United States Patent Application Publication US 2021/0139889 A1 - sequence listing, part 2

SEQ ID NO: 10521 - DNA, 301 bp, Artificial Sequence
  Trp53.2_Pten.4
  crRNA array
  misc_feature (148)..(157): n is a, c, g, or t
cttggctttatatatcttgtggaaaggacgaaacaccgtaatttctactaagtgtagatgccagggtgagcacgtgggataatttctactaagtgtagatctgtaagctaaaccactacataatttctactaagtgtagatttttttnnnnnnnnnnaagcttggcgtggatccgatatcaactagatcttgagacaaatggcagtattcatccacaattttaaaagaaaaggggggattggggggtacagtgcaggggaaagaatagtagacataatagcaacagacatacaaactaaag

SEQ ID NO: 10522 - DNA, 301 bp, Artificial Sequence
  Trp53.3_Pten.1
  crRNA array
  misc_feature (148)..(157): n is a, c, g, or t
cttggctttatatatcttgtggaaaggacgaaacaccgtaatttctactaagtgtagatccctcccacgtgctcacccttaatttctactaagtgtagataagcgtggtgcgtgacgcactaatttctactaagtgtagatttttttnnnnnnnnnnaagcttggcgtggatccgatatcaactagatcttgagacaaatggcagtattcatccacaattttaaaagaaaaggggggattggggggtacagtgcaggggaaagaatagtagacataatagcaacagacatacaaactaaag

SEQ ID NO: 10523 - DNA, 301 bp, Artificial Sequence
  Trp53.3_Pten.2
  crRNA array
  misc_feature (148)..(157): n is a, c, g, or t
cttggctttatatatcttgtggaaaggacgaaacaccgtaatttctactaagtgtagatccctcccacgtgctcacccttaatttctactaagtgtagattgtcaccagctgaagtggcttaatttctactaagtgtagatttttttnnnnnnnnnnaagcttggcgtggatccgatatcaactagatcttgagacaaatggcagtattcatccacaattttaaaagaaaaggggggattggggggtacagtgcaggggaaagaatagtagacataatagcaacagacatacaaactaaag

SEQ ID NO: 10524 - DNA, 301 bp, Artificial Sequence
  Trp53.3_Pten.3
  crRNA array
  misc_feature (148)..(157): n is a, c, g, or t
cttggctttatatatcttgtggaaaggacgaaacaccgtaatttctactaagtgtagatccctcccacgtgctcacccttaatttctactaagtgtagatggagtcaagaggctgatttttaatttctactaagtgtagatttttttnnnnnnnnnnaagcttggcgtggatccgatatcaactagatcttgagacaaatggcagtattcatccacaattttaaaagaaaaggggggattggggggtacagtgcaggggaaagaatagtagacataatagcaacagacatacaaactaaag

SEQ ID NO: 10525 - DNA, 301 bp, Artificial Sequence
  Trp53.3_Pten.4
  crRNA array
  misc_feature (148)..(157): n is a, c, g, or t
cttggctttatatatcttgtggaaaggacgaaacaccgtaatttctactaagtgtagatccctcccacgtgctcacccttaatttctactaagtgtagatctgtaagctaaaccactacataatttctactaagtgtagatttttttnnnnnnnnnnaagcttggcgtggatccgatatcaactagatcttgagacaaatggcagtattcatccacaattttaaaagaaaaggggggattggggggtacagtgcaggggaaagaatagtagacataatagcaacagacatacaaactaaag

SEQ ID NO: 10526 - DNA, 301 bp, Artificial Sequence
  Trp53.4_Pten.1
  crRNA array
  misc_feature (148)..(157): n is a, c, g, or t
cttggctttatatatcttgtggaaaggacgaaacaccgtaatttctactaagtgtagattccaccccccaccctgtctctaatttctactaagtgtagataagcgtggtgcgtgacgcactaatttctactaagtgtagatttttttnnnnnnnnnnaagcttggcgtggatccgatatcaactagatcttgagacaaatggcagtattcatccacaattttaaaagaaaaggggggattggggggtacagtgcaggggaaagaatagtagacataatagcaacagacatacaaactaaag

SEQ ID NO: 10527 - DNA, 301 bp, Artificial Sequence
  Trp53.4_Pten.2
  crRNA array
  misc_feature (148)..(157): n is a, c, g, or t
cttggctttatatatcttgtggaaaggacgaaacaccgtaatttctactaagtgtagattccaccccccaccctgtctctaatttctactaagtgtagattgtcaccagctgaagtggcttaatttctactaagtgtagatttttttnnnnnnnnnnaagcttggcgtggatccgatatcaactagatcttgagacaaatggcagtattcatccacaattttaaaagaaaaggggggattggggggtacagtgcaggggaaagaatagtagacataatagcaacagacatacaaactaaag

SEQ ID NO: 10528 - DNA, 301 bp, Artificial Sequence
  Trp53.4_Pten.3
  crRNA array
  misc_feature (148)..(157): n is a, c, g, or t
cttggctttatatatcttgtggaaaggacgaaacaccgtaatttctactaagtgtagattccaccccccaccctgtctctaatttctactaagtgtagatggagtcaagaggctgatttttaatttctactaagtgtagatttttttnnnnnnnnnnaagcttggcgtggatccgatatcaactagatcttgagacaaatggcagtattcatccacaattttaaaagaaaaggggggattggggggtacagtgcaggggaaagaatagtagacataatagcaacagacatacaaactaaag

SEQ ID NO: 10529 - DNA, 301 bp, Artificial Sequence
  Trp53.4_Pten.4
  crRNA array
  misc_feature (148)..(157): n is a, c, g, or t
cttggctttatatatcttgtggaaaggacgaaacaccgtaatttctactaagtgtagattccaccccccaccctgtctctaatttctactaagtgtagatctgtaagctaaaccactacataatttctactaagtgtagatttttttnnnnnnnnnnaagcttggcgtggatccgatatcaactagatcttgagacaaatggcagtattcatccacaattttaaaagaaaaggggggattggggggtacagtgcaggggaaagaatagtagacataatagcaacagacatacaaactaaag

SEQ ID NO: 10530 - DNA, 301 bp, Artificial Sequence
  Trp53.1_Atm.1
  crRNA array
  misc_feature (148)..(157): n is a, c, g, or t
cttggctttatatatcttgtggaaaggacgaaacaccgtaatttctactaagtgtagatccctgaactgcccccagggataatttctactaagtgtagatgagaaagtctccgaatcgtttaatttctactaagtgtagatttttttnnnnnnnnnnaagcttggcgtggatccgatatcaactagatcttgagacaaatggcagtattcatccacaattttaaaagaaaaggggggattggggggtacagtgcaggggaaagaatagtagacataatagcaacagacatacaaactaaag

SEQ ID NO: 10531 - DNA, 301 bp, Artificial Sequence
  Trp53.1_Atm.2
  crRNA array
  misc_feature (148)..(157): n is a, c, g, or t
cttggctttatatatcttgtggaaaggacgaaacaccgtaatttctactaagtgtagatccctgaactgcccccagggataatttctactaagtgtagatcctacgagggcacgagagactaatttctactaagtgtagatttttttnnnnnnnnnnaagcttggcgtggatccgatatcaactagatcttgagacaaatggcagtattcatccacaattttaaaagaaaaggggggattggggggtacagtgcaggggaaagaatagtagacataatagcaacagacatacaaactaaag

SEQ ID NO: 10532 - DNA, 301 bp, Artificial Sequence
  Trp53.1_Atm.3
  crRNA array
  misc_feature (148)..(157): n is a, c, g, or t
cttggctttatatatcttgtggaaaggacgaaacaccgtaatttctactaagtgtagatccctgaactgcccccagggataatttctactaagtgtagattgaaagtctccgatatgccataatttctactaagtgtagatttttttnnnnnnnnnnaagcttggcgtggatccgatatcaactagatcttgagacaaatggcagtattcatccacaattttaaaagaaaaggggggattggggggtacagtgcaggggaaagaatagtagacataatagcaacagacatacaaactaaag

SEQ ID NO: 10533 - DNA, 301 bp, Artificial Sequence
  Trp53.1_Atm.4
  crRNA array
  misc_feature (148)..(157): n is a, c, g, or t
cttggctttatatatcttgtggaaaggacgaaacaccgtaatttctactaagtgtagatccctgaactgcccccagggataatttctactaagtgtagatggtggtgatcagtcaagtagtaatttctactaagtgtagatttttttnnnnnnnnnnaagcttggcgtggatccgatatcaactagatcttgagacaaatggcagtattcatccacaattttaaaagaaaaggggggattggggggtacagtgcaggggaaagaatagtagacataatagcaacagacatacaaactaaag

SEQ ID NO: 10534 - DNA, 301 bp, Artificial Sequence
  Trp53.2_Atm.1
  crRNA array
  misc_feature (148)..(157): n is a, c, g, or t
cttggctttatatatcttgtggaaaggacgaaacaccgtaatttctactaagtgtagatgccagggtgagcacgtgggataatttctactaagtgtagatgagaaagtctccgaatcgtttaatttctactaagtgtagatttttttnnnnnnnnnnaagcttggcgtggatccgatatcaactagatcttgagacaaatggcagtattcatccacaattttaaaagaaaaggggggattggggggtacagtgcaggggaaagaatagtagacataatagcaacagacatacaaactaaag

SEQ ID NO: 10535 - DNA, 301 bp, Artificial Sequence
  Trp53.2_Atm.2
  crRNA array
  misc_feature (148)..(157): n is a, c, g, or t
cttggctttatatatcttgtggaaaggacgaaacaccgtaatttctactaagtgtagatgccagggtgagcacgtgggataatttctactaagtgtagatcctacgagggcacgagagactaatttctactaagtgtagatttttttnnnnnnnnnnaagcttggcgtggatccgatatcaactagatcttgagacaaatggcagtattcatccacaattttaaaagaaaaggggggattggggggtacagtgcaggggaaagaatagtagacataatagcaacagacatacaaactaaag

SEQ ID NO: 10536 - DNA, 301 bp, Artificial Sequence
  Trp53.2_Atm.3
  crRNA array
  misc_feature (148)..(157): n is a, c, g, or t
cttggctttatatatcttgtggaaaggacgaaacaccgtaatttctactaagtgtagatgccagggtgagcacgtgggataatttctactaagtgtagattgaaagtctccgatatgccataatttctactaagtgtagatttttttnnnnnnnnnnaagcttggcgtggatccgatatcaactagatcttgagacaaatggcagtattcatccacaattttaaaagaaaaggggggattggggggtacagtgcaggggaaagaatagtagacataatagcaacagacatacaaactaaag

SEQ ID NO: 10537 - DNA, 301 bp, Artificial Sequence
  Trp53.2_Atm.4
  crRNA array
  misc_feature (148)..(157): n is a, c, g, or t
cttggctttatatatcttgtggaaaggacgaaacaccgtaatttctactaagtgtagatgccagggtgagcacgtgggataatttctactaagtgtagatggtggtgatcagtcaagtagtaatttctactaagtgtagatttttttnnnnnnnnnnaagcttggcgtggatccgatatcaactagatcttgagacaaatggcagtattcatccacaattttaaaagaaaaggggggattggggggtacagtgcaggggaaagaatagtagacataatagcaacagacatacaaactaaag

SEQ ID NO: 10538 - DNA, 301 bp, Artificial Sequence
  Trp53.3_Atm.1
  crRNA array
  misc_feature (148)..(157): n is a, c, g, or t
cttggctttatatatcttgtggaaaggacgaaacaccgtaatttctactaagtgtagatccctcccacgtgctcacccttaatttctactaagtgtagatgagaaagtctccgaatcgtttaatttctactaagtgtagatttttttnnnnnnnnnnaagcttggcgtggatccgatatcaactagatcttgagacaaatggcagtattcatccacaattttaaaagaaaaggggggattggggggtacagtgcaggggaaagaatagtagacataatagcaacagacatacaaactaaag

SEQ ID NO: 10539 - DNA, 301 bp, Artificial Sequence
  Trp53.3_Atm.2
  crRNA array
  misc_feature (148)..(157): n is a, c, g, or t
cttggctttatatatcttgtggaaaggacgaaacaccgtaatttctactaagtgtagatccctcccacgtgctcacccttaatttctactaagtgtagatcctacgagggcacgagagactaatttctactaagtgtagatttttttnnnnnnnnnnaagcttggcgtggatccgatatcaactagatcttgagacaaatggcagtattcatccacaattttaaaagaaaaggggggattggggggtacagtgcaggggaaagaatagtagacataatagcaacagacatacaaactaaag

SEQ ID NO: 10540 - DNA, 301 bp, Artificial Sequence
  Trp53.3_Atm.3
  crRNA array
  misc_feature (148)..(157): n is a, c, g, or t
cttggctttatatatcttgtggaaaggacgaaacaccgtaatttctactaagtgtagatccctcccacgtgctcacccttaatttctactaagtgtagattgaaagtctccgatatgccataatttctactaagtgtagatttttttnnnnnnnnnnaagcttggcgtggatccgatatcaactagatcttgagacaaatggcagtattcatccacaattttaaaagaaaaggggggattggggggtacagtgcaggggaaagaatagtagacataatagcaacagacatacaaactaaag

SEQ ID NO: 10541 - DNA, 301 bp, Artificial Sequence
  Trp53.3_Atm.4
  crRNA array
  misc_feature (148)..(157): n is a, c, g, or t
cttggctttatatatcttgtggaaaggacgaaacaccgtaatttctactaagtgtagatccctcccacgtgctcacccttaatttctactaagtgtagatggtggtgatcagtcaagtagtaatttctactaagtgtagatttttttnnnnnnnnnnaagcttggcgtggatccgatatcaactagatcttgagacaaatggcagtattcatccacaattttaaaagaaaaggggggattggggggtacagtgcaggggaaagaatagtagacataatagcaacagacatacaaactaaag

SEQ ID NO: 10542 - DNA, 301 bp, Artificial Sequence
  Trp53.4_Atm.1
  crRNA array
  misc_feature (148)..(157): n is a, c, g, or t
cttggctttatatatcttgtggaaaggacgaaacaccgtaatttctactaagtgtagattccaccccccaccctgtctctaatttctactaagtgtagatgagaaagtctccgaatcgtttaatttctactaagtgtagatttttttnnnnnnnnnnaagcttggcgtggatccgatatcaactagatcttgagacaaatggcagtattcatccacaattttaaaagaaaaggggggattggggggtacagtgcaggggaaagaatagtagacataatagcaacagacatacaaactaaag

SEQ ID NO: 10543 - DNA, 301 bp, Artificial Sequence
  Trp53.4_Atm.2
  crRNA array
  misc_feature (148)..(157): n is a, c, g, or t
cttggctttatatatcttgtggaaaggacgaaacaccgtaatttctactaagtgtagattccaccccccaccctgtctctaatttctactaagtgtagatcctacgagggcacgagagactaatttctactaagtgtagatttttttnnnnnnnnnnaagcttggcgtggatccgatatcaactagatcttgagacaaatggcagtattcatccacaattttaaaagaaaaggggggattggggggtacagtgcaggggaaagaatagtagacataatagcaacagacatacaaactaaag

SEQ ID NO: 10544 - DNA, 301 bp, Artificial Sequence
  Trp53.4_Atm.3
  crRNA array
  misc_feature (148)..(157): n is a, c, g, or t
cttggctttatatatcttgtggaaaggacgaaacaccgtaatttctactaagtgtagattccaccccccaccctgtctctaatttctactaagtgtagattgaaagtctccgatatgccataatttctactaagtgtagatttttttnnnnnnnnnnaagcttggcgtggatccgatatcaactagatcttgagacaaatggcagtattcatccacaattttaaaagaaaaggggggattggggggtacagtgcaggggaaagaatagtagacataatagcaacagacatacaaactaaag

SEQ ID NO: 10545 - DNA, 301 bp, Artificial Sequence
  Trp53.4_Atm.4
  crRNA array
  misc_feature (148)..(157): n is a, c, g, or t
cttggctttatatatcttgtggaaaggacgaaacaccgtaatttctactaagtgtagattccaccccccaccctgtctctaatttctactaagtgtagatggtggtgatcagtcaagtagtaatttctactaagtgtagatttttttnnnnnnnnnnaagcttggcgtggatccgatatcaactagatcttgagacaaatggcagtattcatccacaattttaaaagaaaaggggggattggggggtacagtgcaggggaaagaatagtagacataatagcaacagacatacaaactaaag

SEQ ID NO: 10546 - DNA, 301 bp, Artificial Sequence
  Kmt2d.1_Atrx.1
  crRNA array
  misc_feature (148)..(157): n is a, c, g, or t
cttggctttatatatcttgtggaaaggacgaaacaccgtaatttctactaagtgtagatactccaggccacccaggtggtaatttctactaagtgtagatgccagtcgctcatatctctgtaatttctactaagtgtagatttttttnnnnnnnnnnaagcttggcgtggatccgatatcaactagatcttgagacaaatggcagtattcatccacaattttaaaagaaaaggggggattggggggtacagtgcaggggaaagaatagtagacataatagcaacagacatacaaactaaag

SEQ ID NO: 10547 - DNA, 301 bp, Artificial Sequence
  Kmt2d.1_Atrx.2
  crRNA array
  misc_feature (148)..(157): n is a, c, g, or t
cttggctttatatatcttgtggaaaggacgaaacaccgtaatttctactaagtgtagatactccaggccacccaggtggtaatttctactaagtgtagatgcagcatgggggtatccctttaatttctactaagtgtagatttttttnnnnnnnnnnaagcttggcgtggatccgatatcaactagatcttgagacaaatggcagtattcatccacaattttaaaagaaaaggggggattggggggtacagtgcaggggaaagaatagtagacataatagcaacagacatacaaactaaag

SEQ ID NO: 10548 - DNA, 301 bp, Artificial Sequence
  Kmt2d.1_Atrx.3
  crRNA array
  misc_feature (148)..(157): n is a, c, g, or t
cttggctttatatatcttgtggaaaggacgaaacaccgtaatttctactaagtgtagatactccaggccacccaggtggtaatttctactaagtgtagatggagccctgtccgcaatgagtaatttctactaagtgtagatttttttnnnnnnnnnnaagcttggcgtggatccgatatcaactagatcttgagacaaatggcagtattcatccacaattttaaaagaaaaggggggattggggggtacagtgcaggggaaagaatagtagacataatagcaacagacatacaaactaaag

SEQ ID NO: 10549 - DNA, 301 bp, Artificial Sequence
  Kmt2d.1_Atrx.4
  crRNA array
  misc_feature (148)..(157): n is a, c, g, or t
cttggctttatatatcttgtggaaaggacgaaacaccgtaatttctactaagtgtagatactccaggccacccaggtggtaatttctactaagtgtagataaactgggctcctactaaattaatttctactaagtgtagatttttttnnnnnnnnnnaagcttggcgtggatccgatatcaactagatcttgagacaaatggcagtattcatccacaattttaaaagaaaaggggggattggggggtacagtgcaggggaaagaatagtagacataatagcaacagacatacaaactaaag

SEQ ID NO: 10550 - DNA, 301 bp, Artificial Sequence
  Kmt2d.2_Atrx.1
  crRNA array
  misc_feature (148)..(157): n is a, c, g, or t
cttggctttatatatcttgtggaaaggacgaaacaccgtaatttctactaagtgtagatggggaccatagccaggagagtaatttctactaagtgtagatgccagtcgctcatatctctgtaatttctactaagtgtagatttttttnnnnnnnnnnaagcttggcgtggatccgatatcaactagatcttgagacaaatggcagtattcatccacaattttaaaagaaaaggggggattggggggtacagtgcaggggaaagaatagtagacataatagcaacagacatacaaactaaag

SEQ ID NO: 10551 - DNA, 301 bp, Artificial Sequence
  Kmt2d.2_Atrx.2
  crRNA array
  misc_feature (148)..(157): n is a, c, g, or t
cttggctttatatatcttgtggaaaggacgaaacaccgtaatttctactaagtgtagatggggaccatagccaggagagtaatttctactaagtgtagatgcagcatgggggtatccctttaatttctactaagtgtagatttttttnnnnnnnnnnaagcttggcgtggatccgatatcaactagatcttgagacaaatggcagtattcatccacaattttaaaagaaaaggggggattggggggtacagtgcaggggaaagaatagtagacataatagcaacagacatacaaactaaag

SEQ ID NO: 10552 - DNA, 301 bp, Artificial Sequence
  Kmt2d.2_Atrx.3
  crRNA array
  misc_feature (148)..(157): n is a, c, g, or t
cttggctttatatatcttgtggaaaggacgaaacaccgtaatttctactaagtgtagatggggaccatagccaggagagtaatttctactaagtgtagatggagccctgtccgcaatgagtaatttctactaagtgtagatttttttnnnnnnnnnnaagcttggcgtggatccgatatcaactagatcttgagacaaatggcagtattcatccacaattttaaaagaaaaggggggattggggggtacagtgcaggggaaagaatagtagacataatagcaacagacatacaaactaaag

SEQ ID NO: 10553 - DNA, 301 bp, Artificial Sequence
  Kmt2d.2_Atrx.4
  crRNA array
  misc_feature (148)..(157): n is a, c, g, or t
cttggctttatatatcttgtggaaaggacgaaacaccgtaatttctactaagtgtagatggggaccatagccaggagagtaatttctactaagtgtagataaactgggctcctactaaattaatttctactaagtgtagatttttttnnnnnnnnnnaagcttggcgtggatccgatatcaactagatcttgagacaaatggcagtattcatccacaattttaaaagaaaaggggggattggggggtacagtgcaggggaaagaatagtagacataatagcaacagacatacaaactaaag

SEQ ID NO: 10554 - DNA, 301 bp, Artificial Sequence
  Kmt2d.3_Atrx.1
  crRNA array
  misc_feature (148)..(157): n is a, c, g, or t
cttggctttatatatcttgtggaaaggacgaaacaccgtaatttctactaagtgtagataggaaggggtcaggcgtggataatttctactaagtgtagatgccagtcgctcatatctctgtaatttctactaagtgtagatttttttnnnnnnnnnnaagcttggcgtggatccgatatcaactagatcttgagacaaatggcagtattcatccacaattttaaaagaaaaggggggattggggggtacagtgcaggggaaagaatagtagacataatagcaacagacatacaaactaaag

SEQ ID NO: 10555 - DNA, 301 bp, Artificial Sequence
  Kmt2d.3_Atrx.2
  crRNA array
  misc_feature (148)..(157): n is a, c, g, or t
cttggctttatatatcttgtggaaaggacgaaacaccgtaatttctactaagtgtagataggaaggggtcaggcgtggataatttctactaagtgtagatgcagcatgggggtatccctttaatttctactaagtgtagatttttttnnnnnnnnnnaagcttggcgtggatccgatatcaactagatcttgagacaaatggcagtattcatccacaattttaaaagaaaaggggggattggggggtacagtgcaggggaaagaatagtagacataatagcaacagacatacaaactaaag

SEQ ID NO: 10556 - DNA, 301 bp, Artificial Sequence
  Kmt2d.3_Atrx.3
  crRNA array
  misc_feature (148)..(157): n is a, c, g, or t
cttggctttatatatcttgtggaaaggacgaaacaccgtaatttctactaagtgtagataggaaggggtcaggcgtggataatttctactaagtgtagatggagccctgtccgcaatgagtaatttctactaagtgtagatttttttnnnnnnnnnnaagcttggcgtggatccgatatcaactagatcttgagacaaatggcagtattcatccacaattttaaaagaaaaggggggattggggggtacagtgcaggggaaagaatagtagacataatagcaacagacatacaaactaaag

SEQ ID NO: 10557 - DNA, 301 bp, Artificial Sequence
  Kmt2d.3_Atrx.4
  crRNA array
  misc_feature (148)..(157): n is a, c, g, or t
cttggctttatatatcttgtggaaaggacgaaacaccgtaatttctactaagtgtagataggaaggggtcaggcgtggataatttctactaagtgtagataaactgggctcctactaaattaatttctactaagtgtagatttttttnnnnnnnnnnaagcttggcgtggatccgatatcaactagatcttgagacaaatggcagtattcatccacaattttaaaagaaaaggggggattggggggtacagtgcaggggaaagaatagtagacataatagcaacagacatacaaactaaag

SEQ ID NO: 10558 - DNA, 301 bp, Artificial Sequence
  Kmt2d.4_Atrx.1
  crRNA array
  misc_feature (148)..(157): n is a, c, g, or t
cttggctttatatatcttgtggaaaggacgaaacaccgtaatttctactaagtgtagatcccagtcagcgaggaactcctaatttctactaagtgtagatgccagtcgctcatatctctgtaatttctactaagtgtagatttttttnnnnnnnnnnaagcttggcgtggatccgatatcaactagatcttgagacaaatggcagtattcatccacaattttaaaagaaaaggggggattggggggtacagtgcaggggaaagaatagtagacataatagcaacagacatacaaactaaag

SEQ ID NO: 10559 - DNA, 301 bp, Artificial Sequence
  Kmt2d.4_Atrx.2
  crRNA array
  misc_feature (148)..(157): n is a, c, g, or t
cttggctttatatatcttgtggaaaggacgaaacaccgtaatttctactaagtgtagatcccagtcagcgaggaactcctaatttctactaagtgtagatgcagcatgggggtatccctttaatttctactaagtgtagatttttttnnnnnnnnnnaagcttggcgtggatccgatatcaactagatcttgagacaaatggcagtattcatccacaattttaaaagaaaaggggggattggggggtacagtgcaggggaaagaatagtagacataatagcaacagacatacaaactaaag

SEQ ID NO: 10560 - DNA, 301 bp, Artificial Sequence
  Kmt2d.4_Atrx.3
  crRNA array
  misc_feature (148)..(157): n is a, c, g, or t
cttggctttatatatcttgtggaaaggacgaaacaccgtaatttctactaagtgtagatcccagtcagcgaggaactcctaatttctactaagtgtagatggagccctgtccgcaatgagtaatttctactaagtgtagatttttttnnnnnnnnnnaagcttggcgtggatccgatatcaactagatcttgagacaaatggcagtattcatccacaattttaaaagaaaaggggggattggggggtacagtgcaggggaaagaatagtagacataatagcaacagacatacaaactaaag

SEQ ID NO: 10561 - DNA, 301 bp, Artificial Sequence
  Kmt2d.4_Atrx.4
  crRNA array
  misc_feature (148)..(157): n is a, c, g, or t
cttggctttatatatcttgtggaaaggacgaaacaccgtaatttctactaagtgtagatcccagtcagcgaggaactcctaatttctactaagtgtagataaactgggctcctactaaattaatttctactaagtgtagatttttttnnnnnnnnnnaagcttggcgtggatccgatatcaactagatcttgagacaaatggcagtattcatccacaattttaaaagaaaaggggggattggggggtacagtgcaggggaaagaatagtagacataatagcaacagacatacaaactaaag

SEQ ID NO: 10562 - DNA, 301 bp, Artificial Sequence
  Kmt2d.1_Nf2.1
  crRNA array
  misc_feature (148)..(157): n is a, c, g, or t
cttggctttatatatcttgtggaaaggacgaaacaccgtaatttctactaagtgtagatactccaggccacccaggtggtaatttctactaagtgtagatcggagtcatctgatagagattaatttctactaagtgtagatttttttnnnnnnnnnnaagcttggcgtggatccgatatcaactagatcttgagacaaatggcagtattcatccacaattttaaaagaaaaggggggattggggggtacagtgcaggggaaagaatagtagacataatagcaacagacatacaaactaaag

SEQ ID NO: 10563 - DNA, 301 bp, Artificial Sequence
  Kmt2d.1_Nf2.2
  crRNA array
  misc_feature (148)..(157): n is a, c, g, or t
cttggctttatatatcttgtggaaaggacgaaacaccgtaatttctactaagtgtagatactccaggccacccaggtggtaatttctactaagtgtagattgaggcgacggaaagctgactaatttctactaagtgtagatttttttnnnnnnnnnnaagcttggcgtggatccgatatcaactagatcttgagacaaatggcagtattcatccacaattttaaaagaaaaggggggattggggggtacagtgcaggggaaagaatagtagacataatagcaacagacatacaaactaaag

SEQ ID NO: 10564 - DNA, 301 bp, Artificial Sequence
  Kmt2d.1_Nf2.3
  crRNA array
  misc_feature (148)..(157): n is a, c, g, or t
cttggctttatatatcttgtggaaaggacgaaacaccgtaatttctactaagtgtagatactccaggccacccaggtggtaatttctactaagtgtagatcgtcgcctcataaataggtctaatttctactaagtgtagatttttttnnnnnnnnnnaagcttggcgtggatccgatatcaactagatcttgagacaaatggcagtattcatccacaattttaaaagaaaaggggggattggggggtacagtgcaggggaaagaatagtagacataatagcaacagacatacaaactaaag

SEQ ID NO: 10565 - DNA, 301 bp, Artificial Sequence
  Kmt2d.1_Nf2.4
  crRNA array
  misc_feature (148)..(157): n is a, c, g, or t
cttggctttatatatcttgtggaaaggacgaaacaccgtaatttctactaagtgtagatactccaggccacccaggtggtaatttctactaagtgtagataaggcctcgatctccgtctttaatttctactaagtgtagatttttttnnnnnnnnnnaagcttggcgtggatccgatatcaactagatcttgagacaaatggcagtattcatccacaattttaaaagaaaaggggggattggggggtacagtgcaggggaaagaatagtagacataatagcaacagacatacaaactaaag

SEQ ID NO: 10566 - DNA, 301 bp, Artificial Sequence
  Kmt2d.2_Nf2.1
  crRNA array
  misc_feature (148)..(157): n is a, c, g, or t
cttggctttatatatcttgtggaaaggacgaaacaccgtaatttctactaagtgtagatggggaccatagccaggagagtaatttctactaagtgtagatcggagtcatctgatagagattaatttctactaagtgtagatttttttnnnnnnnnnnaagcttggcgtggatccgatatcaactagatcttgagacaaatggcagtattcatccacaattttaaaagaaaaggggggattggggggtacagtgcaggggaaagaatagtagacataatagcaacagacatacaaactaaag

SEQ ID NO: 10567 - DNA, 301 bp, Artificial Sequence
  Kmt2d.2_Nf2.2
  crRNA array
  misc_feature (148)..(157): n is a, c, g, or t
cttggctttatatatcttgtggaaaggacgaaacaccgtaatttctactaagtgtagatggggaccatagccaggagagtaatttctactaagtgtagattgaggcgacggaaagctgactaatttctactaagtgtagatttttttnnnnnnnnnnaagcttggcgtggatccgatatcaactagatcttgagacaaatggcagtattcatccacaattttaaaagaaaaggggggattggggggtacagtgcaggggaaagaatagtagacataatagcaacagacatacaaactaaag

SEQ ID NO: 10568 - DNA, 301 bp, Artificial Sequence
  Kmt2d.2_Nf2.3
  crRNA array
  misc_feature (148)..(157): n is a, c, g, or t
cttggctttatatatcttgtggaaaggacgaaacaccgtaatttctactaagtgtagatggggaccatagccaggagagtaatttctactaagtgtagatcgtcgcctcataaataggtctaatttctactaagtgtagatttttttnnnnnnnnnnaagcttggcgtggatccgatatcaactagatcttgagacaaatggcagtattcatccacaattttaaaagaaaaggggggattggggggtacagtgcaggggaaagaatagtagacataatagcaacagacatacaaactaaag

SEQ ID NO: 10569 - DNA, 301 bp, Artificial Sequence
  Kmt2d.2_Nf2.4
  crRNA array
  misc_feature (148)..(157): n is a, c, g, or t
cttggctttatatatcttgtggaaaggacgaaacaccgtaatttctactaagtgtagatggggaccatagccaggagagtaatttctactaagtgtagataaggcctcgatctccgtctttaatttctactaagtgtagatttttttnnnnnnnnnnaagcttggcgtggatccgatatcaactagatcttgagacaaatggcagtattcatccacaattttaaaagaaaaggggggattggggggtacagtgcaggggaaagaatagtagacataatagcaacagacatacaaactaaag

SEQ ID NO: 10570 - DNA, 301 bp, Artificial Sequence
  Kmt2d.3_Nf2.1
  crRNA array
  misc_feature (148)..(157): n is a, c, g, or t
cttggctttatatatcttgtggaaaggacgaaacaccgtaatttctactaagtgtagataggaaggggtcaggcgtggataatttctactaagtgtagatcggagtcatctgatagagattaatttctactaagtgtagatttttttnnnnnnnnnnaagcttggcgtggatccgatatcaactagatcttgagacaaatggcagtattcatccacaattttaaaagaaaaggggggattggggggtacagtgcaggggaaagaatagtagacataatagcaacagacatacaaactaaag

SEQ ID NO: 10571 - DNA, 301 bp, Artificial Sequence
  Kmt2d.3_Nf2.2
  crRNA array
  misc_feature (148)..(157): n is a, c, g, or t
cttggctttatatatcttgtggaaaggacgaaacaccgtaatttctactaagtgtagataggaaggggtcaggcgtggataatttctactaagtgtagattgaggcgacggaaagctgactaatttctactaagtgtagatttttttnnnnnnnnnnaagcttggcgtggatccgatatcaactagatcttgagacaaatggcagtattcatccacaattttaaaagaaaaggggggattggggggtacagtgcaggggaaagaatagtagacataatagcaacagacatacaaactaaag

SEQ ID NO: 10572 - DNA, 301 bp, Artificial Sequence
  Kmt2d.3_Nf2.3
  crRNA array
  misc_feature (148)..(157): n is a, c, g, or t
cttggctttatatatcttgtggaaaggacgaaacaccgtaatttctactaagtgtagataggaaggggtcaggcgtggataatttctactaagtgtagatcgtcgcctcataaataggtctaatttctactaagtgtagatttttttnnnnnnnnnnaagcttggcgtggatccgatatcaactagatcttgagacaaatggcagtattcatccacaattttaaaagaaaaggggggattggggggtacagtgcaggggaaagaatagtagacataatagcaacagacatacaaactaaag

SEQ ID NO: 10573 - DNA, 301 bp, Artificial Sequence
  Kmt2d.3_Nf2.4
  crRNA array
  misc_feature (148)..(157): n is a, c, g, or t
cttggctttatatatcttgtggaaaggacgaaacaccgtaatttctactaagtgtagataggaaggggtcaggcgtggataatttctactaagtgtagataaggcctcgatctccgtctttaatttctactaagtgtagatttttttnnnnnnnnnnaagcttggcgtggatccgatatcaactagatcttgagacaaatggcagtattcatccacaattttaaaagaaaaggggggattggggggtacagtgcaggggaaagaatagtagacataatagcaacagacatacaaactaaag

SEQ ID NO: 10574 - DNA, 301 bp, Artificial Sequence
  Kmt2d.4_Nf2.1
  crRNA array
  misc_feature (148)..(157): n is a, c, g, or t
cttggctttatatatcttgtggaaaggacgaaacaccgtaatttctactaagtgtagatcccagtcagcgaggaactcctaatttctactaagtgtagatcggagtcatctgatagagattaatttctactaagtgtagatttttttnnnnnnnnnnaagcttggcgtggatccgatatcaactagatcttgagacaaatggcagtattcatccacaattttaaaagaaaaggggggattggggggtacagtgcaggggaaagaatagtagacataatagcaacagacatacaaactaaag

SEQ ID NO: 10575 - DNA, 301 bp, Artificial Sequence
  Kmt2d.4_Nf2.2
  crRNA array
  misc_feature (148)..(157): n is a, c, g, or t
cttggctttatatatcttgtggaaaggacgaaacaccgtaatttctactaagtgtagatcccagtcagcgaggaactcctaatttctactaagtgtagattgaggcgacggaaagctgactaatttctactaagtgtagatttttttnnnnnnnnnnaagcttggcgtggatccgatatcaactagatcttgagacaaatggcagtattcatccacaattttaaaagaaaaggggggattggggggtacagtgcaggggaaagaatagtagacataatagcaacagacatacaaactaaag

SEQ ID NO: 10576 - DNA, 301 bp, Artificial Sequence
  Kmt2d.4_Nf2.3
  crRNA array
  misc_feature (148)..(157): n is a, c, g, or t
cttggctttatatatcttgtggaaaggacgaaacaccgtaatttctactaagtgtagatcccagtcagcgaggaactcctaatttctactaagtgtagatcgtcgcctcataaataggtctaatttctactaagtgtagatttttttnnnnnnnnnnaagcttggcgtggatccgatatcaactagatcttgagacaaatggcagtattcatccacaattttaaaagaaaaggggggattggggggtacagtgcaggggaaagaatagtagacataatagcaacagacatacaaactaaag

SEQ ID NO: 10577 - DNA, 301 bp, Artificial Sequence
  Kmt2d.4_Nf2.4
  crRNA array
  misc_feature (148)..(157): n is a, c, g, or t
cttggctttatatatcttgtggaaaggacgaaacaccgtaatttctactaagtgtagatcccagtcagcgaggaactcctaatttctactaagtgtagataaggcctcgatctccgtctttaatttctactaagtgtagatttttttnnnnnnnnnnaagcttggcgtggatccgatatcaactagatcttgagacaaatggcagtattcatccacaattttaaaagaaaaggggggattggggggtacagtgcaggggaaagaatagtagacataatagcaacagacatacaaactaaag

SEQ ID NO: 10578 - DNA, 301 bp, Artificial Sequence
  Kmt2d.1_Jak1.1
  crRNA array
  misc_feature (148)..(157): n is a, c, g, or t
cttggctttatatatcttgtggaaaggacgaaacaccgtaatttctactaagtgtagatactccaggccacccaggtggtaatttctactaagtgtagatgagcgcaggccgccgcagcctaatttctactaagtgtagatttttttnnnnnnnnnnaagcttggcgtggatccgatatcaactagatcttgagacaaatggcagtattcatccacaattttaaaagaaaaggggggattggggggtacagtgcaggggaaagaatagtagacataatagcaacagacatacaaactaaag

SEQ ID NO: 10579 - DNA, 301 bp, Artificial Sequence
  Kmt2d.1_Jak1.2
  crRNA array
  misc_feature (148)..(157): n is a, c, g, or t
cttggctttatatatcttgtggaaaggacgaaacaccgtaatttctactaagtgtagatactccaggccacccaggtggtaatttctactaagtgtagatagggacactggacaaccgaataatttctactaagtgtagatttttttnnnnnnnnnnaagcttggcgtggatccgatatcaactagatcttgagacaaatggcagtattcatccacaattttaaaagaaaaggggggattggggggtacagtgcaggggaaagaatagtagacataatagcaacagacatacaaactaaag

SEQ ID NO: 10580 - DNA, 301 bp, Artificial Sequence
  Kmt2d.1_Jak1.3
  crRNA array
  misc_feature (148)..(157): n is a, c, g, or t
cttggctttatatatcttgtggaaaggacgaaacaccgtaatttctactaagtgtagatactccaggccacccaggtggtaatttctactaagtgtagatgcacagaacgccatggcatttaatttctactaagtgtagatttttttnnnnnnnnnnaagcttggcgtggatccgatatcaactagatcttgagacaaatggcagtattcatccacaattttaaaagaaaaggggggattggggggtacagtgcaggggaaagaatagtagacataatagcaacagacatacaaactaaag

SEQ ID NO: 10581 - DNA, 301 bp, Artificial Sequence
  Kmt2d.1_Jak1.4
  crRNA array
  misc_feature (148)..(157): n is a, c, g, or t
cttggctttatatatcttgtggaaaggacgaaacaccgtaatttctactaagtgtagatactccaggccacccaggtggtaatttctactaagtgtagattgccgccactggatcccgagtaatttctactaagtgtagatttttttnnnnnnnnnnaagcttggcgtggatccgatatcaactagatcttgagacaaatggcagtattcatccacaattttaaaagaaaaggggggattggggggtacagtgcaggggaaagaatagtagacataatagcaacagacatacaaactaaag

SEQ ID NO: 10582 - DNA, 301 bp, Artificial Sequence
  Kmt2d.2_Jak1.1
  crRNA array
  misc_feature (148)..(157): n is a, c, g, or t
cttggctttatatatcttgtggaaaggacgaaacaccgtaatttctactaagtgtagatggggaccatagccaggagagtaatttctactaagtgtagatgagcgcaggccgccgcagcctaatttctactaagtgtagatttttttnnnnnnnnnnaagcttggcgtggatccgatatcaactagatcttgagacaaatggcagtattcatccacaattttaaaagaaaaggggggattggggggtacagtgcaggggaaagaatagtagacataatagcaacagacatacaaactaaag

SEQ ID NO: 10583 - DNA, 301 bp, Artificial Sequence
  Kmt2d.2_Jak1.2
  crRNA array
  misc_feature (148)..(157): n is a, c, g, or t
cttggctttatatatcttgtggaaaggacgaaacaccgtaatttctactaagtgtagatggggaccatagccaggagagtaatttctactaagtgtagatagggacactggacaaccgaataatttctactaagtgtagatttttttnnnnnnnnnnaagcttggcgtggatccgatatcaactagatcttgagacaaatggcagtattcatccacaattttaaaagaaaaggggggattggggggtacagtgcaggggaaagaatagtagacataatagcaacagacatacaaactaaag

SEQ ID NO: 10584 - DNA, 301 bp, Artificial Sequence
  Kmt2d.2_Jak1.3
  crRNA array
  misc_feature (148)..(157): n is a, c, g, or t
cttggctttatatatcttgtggaaaggacgaaacaccgtaatttctactaagtgtagatggggaccatagccaggagagtaatttctactaagtgtagatgcacagaacgccatggcatttaatttctactaagtgtagatttttttnnnnnnnnnnaagcttggcgtggatccgatatcaactagatcttgagacaaatggcagtattcatccacaattttaaaagaaaaggggggattggggggtacagtgcaggggaaagaatagtagacataatagcaacagacatacaaactaaag

SEQ ID NO: 10585 - DNA, 301 bp, Artificial Sequence
  Kmt2d.2_Jak1.4
  crRNA array
  misc_feature (148)..(157): n is a, c, g, or t
cttggctttatatatcttgtggaaaggacgaaacaccgtaatttctactaagtgtagatggggaccatagccaggagagtaatttctactaagtgtagattgccgccactggatcccgagtaatttctactaagtgtagatttttttnnnnnnnnnnaagcttggcgtggatccgatatcaactagatcttgagacaaatggcagtattcatccacaattttaaaagaaaaggggggattggggggtacagtgcaggggaaagaatagtagacataatagcaacagacatacaaactaaag

SEQ ID NO: 10586 - DNA, 301 bp, Artificial Sequence
  Kmt2d.3_Jak1.1
  crRNA array
  misc_feature (148)..(157): n is a, c, g, or t
cttggctttatatatcttgtggaaaggacgaaacaccgtaatttctactaagtgtagataggaaggggtcaggcgtggataatttctactaagtgtagatgagcgcaggccgccgcagcctaatttctactaagtgtagatttttttnnnnnnnnnnaagcttggcgtggatccgatatcaactagatcttgagacaaatggcagtattcatccacaattttaaaagaaaaggggggattggggggtacagtgcaggggaaagaatagtagacataatagcaacagacatacaaactaaag

SEQ ID NO: 10587 - DNA, 301 bp, Artificial Sequence
  Kmt2d.3_Jak1.2
  crRNA array
  misc_feature (148)..(157): n is a, c, g, or t
cttggctttatatatcttgtggaaaggacgaaacaccgtaatttctactaagtgtagataggaaggggtcaggcgtggataatttctactaagtgtagatagggacactggacaaccgaataatttctactaagtgtagatttttttnnnnnnnnnnaagcttggcgtggatccgatatcaactagatcttgagacaaatggcagtattcatccacaattttaaaagaaaaggggggattggggggtacagtgcaggggaaagaatagtagacataatagcaacagacatacaaactaaag

SEQ ID NO: 10588 - DNA, 301 bp, Artificial Sequence
  Kmt2d.3_Jak1.3
  crRNA array
  misc_feature (148)..(157): n is a, c, g, or t
cttggctttatatatcttgtggaaaggacgaaacaccgtaatttctactaagtgtagataggaaggggtcaggcgtggataatttctactaagtgtagatgcacagaacgccatggcatttaatttctactaagtgtagatttttttnnnnnnnnnnaagcttggcgtggatccgatatcaactagatcttgagacaaatggcagtattcatccacaattttaaaagaaaaggggggattggggggtacagtgcaggggaaagaatagtagacataatagcaacagacatacaaactaaag

SEQ ID NO: 10589 - DNA, 301 bp, Artificial Sequence
  Kmt2d.3_Jak1.4
  crRNA array
  misc_feature (148)..(157): n is a, c, g, or t
cttggctttatatatcttgtggaaaggacgaaacaccgtaatttctactaagtgtagataggaaggggtcaggcgtggataatttctactaagtgtagattgccgccactggatcccgagtaatttctactaagtgtagatttttttnnnnnnnnnnaagcttggcgtggatccgatatcaactagatcttgagacaaatggcagtattcatccacaattttaaaagaaaaggggggattggggggtacagtgcaggggaaagaatagtagacataatagcaacagacatacaaactaaag

SEQ ID NO: 10590 - DNA, 301 bp, Artificial Sequence
  Kmt2d.4_Jak1.1
  crRNA array
  misc_feature (148)..(157): n is a, c, g, or t
cttggctttatatatcttgtggaaaggacgaaacaccgtaatttctactaagtgtagatcccagtcagcgaggaactcctaatttctactaagtgtagatgagcgcaggccgccgcagcctaatttctactaagtgtagatttttttnnnnnnnnnnaagcttggcgtggatccgatatcaactagatcttgagacaaatggcagtattcatccacaattttaaaagaaaaggggggattggggggtacagtgcaggggaaagaatagtagacataatagcaacagacatacaaactaaag

SEQ ID NO: 10591 - DNA, 301 bp, Artificial Sequence
  Kmt2d.4_Jak1.2
  crRNA array
  misc_feature (148)..(157): n is a, c, g, or t
cttggctttatatatcttgtggaaaggacgaaacaccgtaatttctactaagtgtagatcccagtcagcgaggaactcctaatttctactaagtgtagatagggacactggacaaccgaataatttctactaagtgtagatttttttnnnnnnnnnnaagcttggcgtggatccgatatcaactagatcttgagacaaatggcagtattcatccacaattttaaaagaaaaggggggattggggggtacagtgcaggggaaagaatagtagacataatagcaacagacatacaaactaaag

SEQ ID NO: 10592 - DNA, 301 bp, Artificial Sequence
  Kmt2d.4_Jak1.3
  crRNA array
  misc_feature (148)..(157): n is a, c, g, or t
cttggctttatatatcttgtggaaaggacgaaacaccgtaatttctactaagtgtagatcccagtcagcgaggaactcctaatttctactaagtgtagatgcacagaacgccatggcatttaatttctactaagtgtagatttttttnnnnnnnnnnaagcttggcgtggatccgatatcaactagatcttgagacaaatggcagtattcatccacaattttaaaagaaaaggggggattggggggtacagtgcaggggaaagaatagtagacataatagcaacagacatacaaactaaag

SEQ ID NO: 10593 - DNA, 301 bp, Artificial Sequence
  Kmt2d.4_Jak1.4
  crRNA array
  misc_feature (148)..(157): n is a, c, g, or t
cttggctttatatatcttgtggaaaggacgaaacaccgtaatttctactaagtgtagatcccagtcagcgaggaactcctaatttctactaagtgtagattgccgccactggatcccgagtaatttctactaagtgtagatttttttnnnnnnnnnnaagcttggcgtggatccgatatcaactagatcttgagacaaatggcagtattcatccacaattttaaaagaaaaggggggattggggggtacagtgcaggggaaagaatagtagacataatagcaacagacatacaaactaaag

SEQ ID NO: 10594 - DNA, 301 bp, Artificial Sequence
  Kmt2d.1_Chd1.1
  crRNA array
  misc_feature (148)..(157): n is a, c, g, or t
cttggctttatatatcttgtggaaaggacgaaacaccgtaatttctactaagtgtagatactccaggccacccaggtggtaatttctactaagtgtagatcgccccactctgcaatccattaatttctactaagtgtagatttttttnnnnnnnnnnaagcttggcgtggatccgatatcaactagatcttgagacaaatggcagtattcatccacaattttaaaagaaaaggggggattggggggtacagtgcaggggaaagaatagtagacataatagcaacagacatacaaactaaag

SEQ ID NO: 10595 - DNA, 301 bp, Artificial Sequence
  Kmt2d.1_Chd1.2
  crRNA array
  misc_feature (148)..(157): n is a, c, g, or t
cttggctttatatatcttgtggaaaggacgaaacaccgtaatttctactaagtgtagatactccaggccacccaggtggtaatttctactaagtgtagattgcagccggcgtctggcagctaatttctactaagtgtagatttttttnnnnnnnnnnaagcttggcgtggatccgatatcaactagatcttgagacaaatggcagtattcatccacaattttaaaagaaaaggggggattggggggtacagtgcaggggaaagaatagtagacataatagcaacagacatacaaactaaag

SEQ ID NO: 10596 - DNA, 301 bp, Artificial Sequence
  Kmt2d.1_Chd1.3
  crRNA array
  misc_feature (148)..(157): n is a, c, g, or t
cttggctttatatatcttgtggaaaggacgaaacaccgtaatttctactaagtgtagatactccaggccacccaggtggtaatttctactaagtgtagatatcagcaagtatgcaactattaatttctactaagtgtagatttttttnnnnnnnnnnaagcttggcgtggatccgatatcaactagatcttgagacaaatggcagtattcatccacaattttaaaagaaaaggggggattggggggtacagtgcaggggaaagaatagtagacataatagcaacagacatacaaactaaag

SEQ ID NO: 10597 - DNA, 301 bp, Artificial Sequence
  Kmt2d.1_Chd1.4
  crRNA array
  misc_feature (148)..(157): n is a, c, g, or t
cttggctttatatatcttgtggaaaggacgaaacaccgtaatttctactaagtgtagatactccaggccacccaggtggtaatttctactaagtgtagataaatggcggataactcctcttaatttctactaagtgtagatttttttnnnnnnnnnnaagcttggcgtggatccgatatcaactagatcttgagacaaatggcagtattcatccacaattttaaaagaaaaggggggattggggggtacagtgcaggggaaagaatagtagacataatagcaacagacatacaaactaaag

SEQ ID NO: 10598 - DNA, 301 bp, Artificial Sequence
  Kmt2d.2_Chd1.1
  crRNA array
  misc_feature (148)..(157): n is a, c, g, or t
cttggctttatatatcttgtggaaaggacgaaacaccgtaatttctactaagtgtagatggggaccatagccaggagagtaatttctactaagtgtagatcgccccactctgcaatccattaatttctactaagtgtagatttttttnnnnnnnnnnaagcttggcgtggatccgatatcaactagatcttgagacaaatggcagtattcatccacaattttaaaagaaaaggggggattggggggtacagtgcaggggaaagaatagtagacataatagcaacagacatacaaactaaag

SEQ ID NO: 10599 - DNA, 301 bp, Artificial Sequence
  Kmt2d.2_Chd1.2
  crRNA array
  misc_feature (148)..(157): n is a, c, g, or t
cttggctttatatatcttgtggaaaggacgaaacaccgtaatttctactaagtgtagatggggaccatagccaggagagtaatttctactaagtgtagattgcagccggcgtctggcagctaatttctactaagtgtagatttttttnnnnnnnnnnaagcttggcgtggatccgatatcaactagatcttgagacaaatggcagtattcatccacaattttaaaagaaaaggggggattggggggtacagtgcaggggaaagaatagtagacataatagcaacagacatacaaactaaag

SEQ ID NO: 10600 - DNA, 301 bp, Artificial Sequence
  Kmt2d.2_Chd1.3
  crRNA array
  misc_feature (148)..(157): n is a, c, g, or t
cttggctttatatatcttgtggaaaggacgaaacaccgtaatttctactaagtgtagatggggaccatagccaggagagtaatttctactaagtgtagatatcagcaagtatgcaactattaatttctactaagtgtagatttttttnnnnnnnnnnaagcttggcgtggatccgatatcaactagatcttgagacaaatggcagtattcatccacaattttaaaagaaaaggggggattggggggtacagtgcaggggaaagaatagtagacataatagcaacagacatacaaactaaag

SEQ ID NO: 10601 - DNA, 301 bp, Artificial Sequence
  Kmt2d.2_Chd1.4
  crRNA array
  misc_feature (148)..(157): n is a, c, g, or t
cttggctttatatatcttgtggaaaggacgaaacaccgtaatttctactaagtgtagatggggaccatagccaggagagtaatttctactaagtgtagataaatggcggataactcctcttaatttctactaagtgtagatttttttnnnnnnnnnnaagcttggcgtggatccgatatcaactagatcttgagacaaatggcagtattcatccacaattttaaaagaaaaggggggattggggggtacagtgcaggggaaagaatagtagacataatagcaacagacatacaaactaaag

SEQ ID NO: 10602 - DNA, 301 bp, Artificial Sequence
  Kmt2d.3_Chd1.1
  crRNA array
  misc_feature (148)..(157): n is a, c, g, or t
cttggctttatatatcttgtggaaaggacgaaacaccgtaatttctactaagtgtagataggaaggggtcaggcgtggataatttctactaagtgtagatcgccccactctgcaatccattaatttctactaagtgtagatttttttnnnnnnnnnnaagcttggcgtggatccgatatcaactagatcttgagacaaatggcagtattcatccacaattttaaaagaaaaggggggattggggggtacagtgcaggggaaagaatagtagacataatagcaacagacatacaaactaaag

SEQ ID NO: 10603 - DNA, 301 bp, Artificial Sequence
  Kmt2d.3_Chd1.2
  crRNA array
  misc_feature (148)..(157): n is a, c, g, or t
cttggctttatatatcttgtggaaaggacgaaacaccgtaatttctactaagtgtagataggaaggggtcaggcgtggataatttctactaagtgtagattgcagccggcgtctggcagctaatttctactaagtgtagatttttttnnnnnnnnnnaagcttggcgtggatccgatatcaactagatcttgagacaaatggcagtattcatccacaattttaaaagaaaaggggggattggggggtacagtgcaggggaaagaatagtagacataatagcaacagacatacaaactaaag

SEQ ID NO: 10604 - DNA, 301 bp, Artificial Sequence
  Kmt2d.3_Chd1.3
  crRNA array
  misc_feature (148)..(157): n is a, c, g, or t
cttggctttatatatcttgtggaaaggacgaaacaccgtaatttctactaagtgtagataggaaggggtcaggcgtggataatttctactaagtgtagatatcagcaagtatgcaactattaatttctactaagtgtagatttttttnnnnnnnnnnaagcttggcgtggatccgatatcaactagatcttgagacaaatggcagtattcatccacaattttaaaagaaaaggggggattggggggtacagtgcaggggaaagaatagtagacataatagcaacagacatacaaactaaag

SEQ ID NO: 10605 - DNA, 301 bp, Artificial Sequence
  Kmt2d.3_Chd1.4
  crRNA array
  misc_feature (148)..(157): n is a, c, g, or t
cttggctttatatatcttgtggaaaggacgaaacaccgtaatttctactaagtgtagataggaaggggtcaggcgtggataatttctactaagtgtagataaatggcggataactcctcttaatttctactaagtgtagatttttttnnnnnnnnnnaagcttggcgtggatccgatatcaactagatcttgagacaaatggcagtattcatccacaattttaaaagaaaaggggggattggggggtacagtgcaggggaaagaatagtagacataatagcaacagacatacaaactaaag

SEQ ID NO: 10606 - DNA, 301 bp, Artificial Sequence
  Kmt2d.4_Chd1.1
  crRNA array
  misc_feature (148)..(157): n is a, c, g, or t
cttggctttatatatcttgtggaaaggacgaaacaccgtaatttctactaagtgtagatcccagtcagcgaggaactcctaatttctactaagtgtagatcgccccactctgcaatccattaatttctactaagtgtagatttttttnnnnnnnnnnaagcttggcgtggatccgatatcaactagatcttgagacaaatggcagtattcatccacaattttaaaagaaaaggggggattggggggtacagtgcaggggaaagaatagtagacataatagcaacagacatacaaactaaag

SEQ ID NO: 10607 - DNA, 301 bp, Artificial Sequence
  Kmt2d.4_Chd1.2
  crRNA array
  misc_feature (148)..(157): n is a, c, g, or t
cttggctttatatatcttgtggaaaggacgaaacaccgtaatttctactaagtgtagatcccagtcagcgaggaactcctaatttctactaagtgtagattgcagccggcgtctggcagctaatttctactaagtgtagatttttttnnnnnnnnnnaagcttggcgtggatccgatatcaactagatcttgagacaaatggcagtattcatccacaattttaaaagaaaaggggggattggggggtacagtgcaggggaaagaatagtagacataatagcaacagacatacaaactaaag

SEQ ID NO: 10608 - DNA, 301 bp, Artificial Sequence
  Kmt2d.4_Chd1.3
  crRNA array
  misc_feature (148)..(157): n is a, c, g, or t
cttggctttatatatcttgtggaaaggacgaaacaccgtaatttctactaagtgtagatcccagtcagcgaggaactcctaatttctactaagtgtagatatcagcaagtatgcaactattaatttctactaagtgtagatttttttnnnnnnnnnnaagcttggcgtggatccgatatcaactagatcttgagacaaatggcagtattcatccacaattttaaaagaaaaggggggattggggggtacagtgcaggggaaagaatagtagacataatagcaacagacatacaaactaaag

SEQ ID NO: 10609 - DNA, 301 bp, Artificial Sequence
  Kmt2d.4_Chd1.4
  crRNA array
  misc_feature (148)..(157): n is a, c, g, or t
cttggctttatatatcttgtggaaaggacgaaacaccgtaatttctactaagtgtagatcccagtcagcgaggaactcctaatttctactaagtgtagataaatggcggataactcctcttaatttctactaagtgtagatttttttnnnnnnnnnnaagcttggcgtggatccgatatcaactagatcttgagacaaatggcagtattcatccacaattttaaaagaaaaggggggattggggggtacagtgcaggggaaagaatagtagacataatagcaacagacatacaaactaaag

SEQ ID NO: 10610 - DNA, 301 bp, Artificial Sequence
  Kmt2d.1_Pole.1
  crRNA array
  misc_feature (148)..(157): n is a, c, g, or t
cttggctttatatatcttgtggaaaggacgaaacaccgtaatttctactaagtgtagatactccaggccacccaggtggtaatttctactaagtgtagatgcgcgctctccacgtgctcttaatttctactaagtgtagatttttttnnnnnnnnnnaagcttggcgtggatccgatatcaactagatcttgagacaaatggcagtattcatccacaattttaaaagaaaaggggggattggggggtacagtgcaggggaaagaatagtagacataatagcaacagacatacaaactaaag

SEQ ID NO: 10611 - DNA, 301 bp, Artificial Sequence
  Kmt2d.1_Pole.2
  crRNA array
  misc_feature (148)..(157): n is a, c, g, or t
cttggctttatatatcttgtggaaaggacgaaacaccgtaatttctactaagtgtagatactccaggccacccaggtggtaatttctactaagtgtagatacatcgagacgaccaaactgtaatttctactaagtgtagatttttttnnnnnnnnnnaagcttggcgtggatccgatatcaactagatcttgagacaaatggcagtattcatccacaattttaaaagaaaaggggggattggggggtacagtgcaggggaaagaatagtagacataatagcaacagacatacaaactaaag

SEQ ID NO: 10612 - DNA, 301 bp, Artificial Sequence
  Kmt2d.1_Pole.3
  crRNA array
  misc_feature (148)..(157): n is a, c, g, or t
cttggctttatatatcttgtggaaaggacgaaacaccgtaatttctactaagtgtagatactccaggccacccaggtggtaatttctactaagtgtagatctgctgcaacgagtcgagaataatttctactaagtgtagatttttttnnnnnnnnnnaagcttggcgtggatccgatatcaactagatcttgagacaaatggcagtattcatccacaattttaaaagaaaaggggggattggggggtacagtgcaggggaaagaatagtagacataatagcaacagacatacaaactaaag

SEQ ID NO: 10613 - DNA, 301 bp, Artificial Sequence
  Kmt2d.1_Pole.4
  crRNA array
  misc_feature (148)..(157): n is a, c, g, or t
cttggctttatatatcttgtggaaaggacgaaacaccgtaatttctactaagtgtagatactccaggccacccaggtggtaatttctactaagtgtagatgggagatgatatagcggcagtaatttctactaagtgtagatttttttnnnnnnnnnnaagcttggcgtggatccgatatcaactagatcttgagacaaatggcagtattcatccacaattttaaaagaaaaggggggattggggggtacagtgcaggggaaagaatagtagacataatagcaacagacatacaaactaaag

SEQ ID NO: 10614 - DNA, 301 bp, Artificial Sequence
  Kmt2d.2_Pole.1
  crRNA array
  misc_feature (148)..(157): n is a, c, g, or t
cttggctttatatatcttgtggaaaggacgaaacaccgtaatttctactaagtgtagatggggaccatagccaggagagtaatttctactaagtgtagatgcgcgctctccacgtgctcttaatttctactaagtgtagatttttttnnnnnnnnnnaagcttggcgtggatccgatatcaactagatcttgagacaaatggcagtattcatccacaattttaaaagaaaaggggggattggggggtacagtgcaggggaaagaatagtagacataatagcaacagacatacaaactaaag

SEQ ID NO: 10615 - DNA, 301 bp, Artificial Sequence
  Kmt2d.2_Pole.2
  crRNA array
  misc_feature (148)..(157): n is a, c, g, or t
cttggctttatatatcttgtggaaaggacgaaacaccgtaatttctactaagtgtagatggggaccatagccaggagagtaatttctactaagtgtagatacatcgagacgaccaaactgtaatttctactaagtgtagatttttttnnnnnnnnnnaagcttggcgtggatccgatatcaactagatcttgagacaaatggcagtattcatccacaattttaaaagaaaaggggggattggggggtacagtgcaggggaaagaatagtagacataatagcaacagacatacaaactaaag

SEQ ID NO: 10616 - DNA, 301 bp, Artificial Sequence
  Kmt2d.2_Pole.3
  crRNA array
  misc_feature (148)..(157): n is a, c, g, or t
cttggctttatatatcttgtggaaaggacgaaacaccgtaatttctactaagtgtagatggggaccatagccaggagagtaatttctactaagtgtagatctgctgcaacgagtcgagaataatttctactaagtgtagatttttttnnnnnnnnnnaagcttggcgtggatccgatatcaactagatcttgagacaaatggcagtattcatccacaattttaaaagaaaaggggggattggggggtacagtgcaggggaaagaatagtagacataatagcaacagacatacaaactaaag

SEQ ID NO: 10617 - DNA, 301 bp, Artificial Sequence
  Kmt2d.2_Pole.4
  crRNA array
  misc_feature (148)..(157): n is a, c, g, or t
cttggctttatatatcttgtggaaaggacgaaacaccgtaatttctactaagtgtagatggggaccatagccaggagagtaatttctactaagtgtagatgggagatgatatagcggcagtaatttctactaagtgtagatttttttnnnnnnnnnnaagcttggcgtggatccgatatcaactagatcttgagacaaatggcagtattcatccacaattttaaaagaaaaggggggattggggggtacagtgcaggggaaagaatagtagacataatagcaacagacatacaaactaaag

SEQ ID NO: 10618 - DNA, 301 bp, Artificial Sequence
  Kmt2d.3_Pole.1
  crRNA array
  misc_feature (148)..(157): n is a, c, g, or t
cttggctttatatatcttgtggaaaggacgaaacaccgtaatttctactaagtgtagataggaaggggtcaggcgtggataatttctactaagtgtagatgcgcgctctccacgtgctcttaatttctactaagtgtagatttttttnnnnnnnnnnaagcttggcgtggatccgatatcaactagatcttgagacaaatggcagtattcatccacaattttaaaagaaaaggggggattggggggtacagtgcaggggaaagaatagtagacataatagcaacagacatacaaactaaag

SEQ ID NO: 10619 - DNA, 301 bp, Artificial Sequence
  Kmt2d.3_Pole.2
  crRNA array
  misc_feature (148)..(157): n is a, c, g, or t
cttggctttatatatcttgtggaaaggacgaaacaccgtaatttctactaagtgtagataggaaggggtcaggcgtggataatttctactaagtgtagatacatcgagacgaccaaactgtaatttctactaagtgtagatttttttnnnnnnnnnnaagcttggcgtggatccgatatcaactagatcttgagacaaatggcagtattcatccacaattttaaaagaaaaggggggattggggggtacagtgcaggggaaagaatagtagacataatagcaacagacatacaaactaaag

SEQ ID NO: 10620 - DNA, 301 bp, Artificial Sequence
  Kmt2d.3_Pole.3
  crRNA array
  misc_feature (148)..(157): n is a, c, g, or t
cttggctttatatatcttgtggaaaggacgaaacaccgtaatttctactaagtgtagataggaaggggtcaggcgtggataatttctactaagtgtagatctgctgcaacgagtcgagaataatttctactaagtgtagatttttttnnnnnnnnnnaagcttggcgtggatccgatatcaactagatcttgagacaaatggcagtattcatccacaattttaaaagaaaaggggggattggggggtacagtgcaggggaaagaatagtagacataatagcaacagacatacaaactaaag

SEQ ID NO: 10621 - DNA, 301 bp, Artificial Sequence
  Kmt2d.3_Pole.4
  crRNA array
  misc_feature (148)..(157): n is a, c, g, or t
cttggctttatatatcttgtggaaaggacgaaacaccgtaatttctactaagtgtagataggaaggggtcaggcgtggataatttctactaagtgtagatgggagatgatatagcggcagtaatttctactaagtgtagatttttttnnnnnnnnnnaagcttggcgtggatccgatatcaactagatcttgagacaaatggcagtattcatccacaattttaaaagaaaaggggggattggggggtacagtgcaggggaaagaatagtagacataatagcaacagacatacaaactaaag

SEQ ID NO: 10622 - DNA, 301 bp, Artificial Sequence
  Kmt2d.4_Pole.1
  crRNA array
  misc_feature (148)..(157): n is a, c, g, or t
cttggctttatatatcttgtggaaaggacgaaacaccgtaatttctactaagtgtagatcccagtcagcgaggaactcctaatttctactaagtgtagatgcgcgctctccacgtgctcttaatttctactaagtgtagatttttttnnnnnnnnnnaagcttggcgtggatccgatatcaactagatcttgagacaaatggcagtattcatccacaattttaaaagaaaaggggggattggggggtacagtgcaggggaaagaatagtagacataatagcaacagacatacaaactaaag

SEQ ID NO: 10623 - DNA, 301 bp, Artificial Sequence
  Kmt2d.4_Pole.2
  crRNA array
  misc_feature (148)..(157): n is a, c, g, or t
cttggctttatatatcttgtggaaaggacgaaacaccgtaatttctactaagtgtagatcccagtcagcgaggaactcctaatttctactaagtgtagatacatcgagacgaccaaactgtaatttctactaagtgtagatttttttnnnnnnnnnnaagcttggcgtggatccgatatcaactagatcttgagacaaatggcagtattcatccacaattttaaaagaaaaggggggattggggggtacagtgcaggggaaagaatagtagacataatagcaacagacatacaaactaaag

SEQ ID NO: 10624 - DNA, 301 bp, Artificial Sequence
  Kmt2d.4_Pole.3
  crRNA array
  misc_feature (148)..(157): n is a, c, g, or t
cttggctttatatatcttgtggaaaggacgaaacaccgtaatttctactaagtgtagatcccagtcagcgaggaactcctaatttctactaagtgtagatctgctgcaacgagtcgagaataatttctactaagtgtagatttttttnnnnnnnnnnaagcttggcgtggatccgatatcaactagatcttgagacaaatggcagtattcatccacaattttaaaagaaaaggggggattggggggtacagtgcaggggaaagaatagtagacataatagcaacagacatacaaactaaag

SEQ ID NO: 10625 - DNA, 301 bp, Artificial Sequence
  Kmt2d.4_Pole.4
  crRNA array
  misc_feature (148)..(157): n is a, c, g, or t
cttggctttatatatcttgtggaaaggacgaaacaccgtaatttctactaagtgtagatcccagtcagcgaggaactcctaatttctactaagtgtagatgggagatgatatagcggcagtaatttctactaagtgtagatttttttnnnnnnnnnnaagcttggcgtggatccgatatcaactagatcttgagacaaatggcagtattcatccacaattttaaaagaaaaggggggattggggggtacagtgcaggggaaagaatagtagacataatagcaacagacatacaaactaaag

SEQ ID NO: 10626 - DNA, 301 bp, Artificial Sequence
  Kmt2d.1_Notch1.1
  crRNA array
  misc_feature (148)..(157): n is a, c, g, or t
cttggctttatatatcttgtggaaaggacgaaacaccgtaatttctactaagtgtagatactccaggccacccaggtggtaatttctactaagtgtagattgggccaacgatgccaggactaatttctactaagtgtagatttttttnnnnnnnnnnaagcttggcgtggatccgatatcaactagatcttgagacaaatggcagtattcatccacaattttaaaagaaaaggggggattggggggtacagtgcaggggaaagaatagtagacataatagcaacagacatacaaactaaag

SEQ ID NO: 10627 - DNA, 301 bp, Artificial Sequence
  Kmt2d.1_Notch1.2
  crRNA array
  misc_feature (148)..(157): n is a, c, g, or t
cttggctttatatatcttgtggaaaggacgaaacaccgtaatttctactaagtgtagatactccaggccacccaggtggtaatttctactaagtgtagatgtcgccccagcatcctgaagtaatttctactaagtgtagatttttttnnnnnnnnnnaagcttggcgtggatccgatatcaactagatcttgagacaaatggcagtattcatccacaattttaaaagaaaaggggggattggggggtacagtgcaggggaaagaatagtagacataatagcaacagacatacaaactaaag

SEQ ID NO: 10628 - DNA, 301 bp, Artificial Sequence
  Kmt2d.1_Notch1.3
  crRNA array
  misc_feature (148)..(157): n is a, c, g, or t
cttggctttatatatcttgtggaaaggacgaaacaccgtaatttctactaagtgtagatactccaggccacccaggtggtaatttctactaagtgtagatagccacccccgccacgcctctaatttctactaagtgtagatttttttnnnnnnnnnnaagcttggcgtggatccgatatcaactagatcttgagacaaatggcagtattcatccacaattttaaaagaaaaggggggattggggggtacagtgcaggggaaagaatagtagacataatagcaacagacatacaaactaaag

SEQ ID NO: 10629 - DNA, 301 bp, Artificial Sequence
  Kmt2d.1_Notch1.4
  crRNA array
  misc_feature (148)..(157): n is a, c, g, or t
cttggctttatatatcttgtggaaaggacgaaacaccgtaatttctactaagtgtagatactccaggccacccaggtggtaatttctactaagtgtagataaagtgtcagaggccagcaataatttctactaagtgtagatttttttnnnnnnnnnnaagcttggcgtggatccgatatcaactagatcttgagacaaatggcagtattcatccacaattttaaaagaaaaggggggattggggggtacagtgcaggggaaagaatagtagacataatagcaacagacatacaaactaaag

SEQ ID NO: 10630 - DNA, 301 bp, Artificial Sequence
  Kmt2d.2_Notch1.1
  crRNA array
  misc_feature (148)..(157): n is a, c, g, or t
cttggctttatatatcttgtggaaaggacgaaacaccgtaatttctactaagtgtagatggggaccatagccaggagagtaatttctactaagtgtagattgggccaacgatgccaggactaatttctactaagtgtagatttttttnnnnnnnnnnaagcttggcgtggatccgatatcaactagatcttgagacaaatggcagtattcatccacaattttaaaagaaaaggggggattggggggtacagtgcaggggaaagaatagtagacataatagcaacagacatacaaactaaag

SEQ ID NO: 10631 - DNA, 301 bp, Artificial Sequence
  Kmt2d.2_Notch1.2
  crRNA array
  misc_feature (148)..(157): n is a, c, g, or t
cttggctttatatatcttgtggaaaggacgaaacaccgtaatttctactaagtgtagatggggaccatagccaggagagtaatttctactaagtgtagatgtcgccccagcatcctgaagtaatttctactaagtgtagatttttttnnnnnnnnnnaagcttggcgtggatccgatatcaactagatcttgagacaaatggcagtattcatccacaattttaaaagaaaaggggggattggggggtacagtgcaggggaaagaatagtagacataatagcaacagacatacaaactaaag

SEQ ID NO: 10632 - DNA, 301 bp, Artificial Sequence
  Kmt2d.2_Notch1.3
  crRNA array
  misc_feature (148)..(157): n is a, c, g, or t
cttggctttatatatcttgtggaaaggacgaaacaccgtaatttctactaagtgtagatggggaccatagccaggagagtaatttctactaagtgtagatagccacccccgccacgcctctaatttctactaagtgtagatttttttnnnnnnnnnnaagcttggcgtggatccgatatcaactagatcttgagacaaatggcagtattcatccacaattttaaaagaaaaggggggattggggggtacagtgcaggggaaagaatagtagacataatagcaacagacatacaaactaaag

SEQ ID NO: 10633 - DNA, 301 bp, Artificial Sequence
  Kmt2d.2_Notch1.4
  crRNA array
  misc_feature (148)..(157): n is a, c, g, or t
cttggctttatatatcttgtggaaaggacgaaacaccgtaatttctactaagtgtagatggggaccatagccaggagagtaatttctactaagtgtagataaagtgtcagaggccagcaataatttctactaagtgtagatttttttnnnnnnnnnnaagcttggcgtggatccgatatcaactagatcttgagacaaatggcagtattcatccacaattttaaaagaaaaggggggattggggggtacagtgcaggggaaagaatagtagacataatagcaacagacatacaaactaaag

SEQ ID NO: 10634 - DNA, 301 bp, Artificial Sequence
  Kmt2d.3_Notch1.1
  crRNA array
  misc_feature (148)..(157): n is a, c, g, or t
cttggctttatatatcttgtggaaaggacgaaacaccgtaatttctactaagtgtagataggaaggggtcaggcgtggataatttctactaagtgtagattgggccaacgatgccaggactaatttctactaagtgtagatttttttnnnnnnnnnnaagcttggcgtggatccgatatcaactagatcttgagacaaatggcagtattcatccacaattttaaaagaaaaggggggattggggggtacagtgcaggggaaagaatagtagacataatagcaacagacatacaaactaaag

SEQ ID NO: 10635 - DNA, 301 bp, Artificial Sequence
  Kmt2d.3_Notch1.2
  crRNA array
  misc_feature (148)..(157): n is a, c, g, or t
cttggctttatatatcttgtggaaaggacgaaacaccgtaatttctactaagtgtagataggaaggggtcaggcgtggataatttctactaagtgtagatgtcgccccagcatcctgaagtaatttctactaagtgtagatttttttnnnnnnnnnnaagcttggcgtggatccgatatcaactagatcttgagacaaatggcagtattcatccacaattttaaaagaaaaggggggattggggggtacagtgcaggggaaagaatagtagacataatagcaacagacatacaaactaaag

SEQ ID NO: 10636 - DNA, 301 bp, Artificial Sequence
  Kmt2d.3_Notch1.3
  crRNA array
  misc_feature (148)..(157): n is a, c, g, or t
cttggctttatatatcttgtggaaaggacgaaacaccgtaatttctactaagtgtagataggaaggggtcaggcgtggataatttctactaagtgtagatagccacccccgccacgcctctaatttctactaagtgtagatttttttnnnnnnnnnnaagcttggcgtggatccgatatcaactagatcttgagacaaatggcagtattcatccacaattttaaaagaaaaggggggattggggggtacagtgcaggggaaagaatagtagacataatagcaacagacatacaaactaaag

SEQ ID NO: 10637 - DNA, 301 bp, Artificial Sequence
  Kmt2d.3_Notch1.4
  crRNA array
  misc_feature (148)..(157): n is a, c, g, or t
cttggctttatatatcttgtggaaaggacgaaacaccgtaatttctactaagtgtagataggaaggggtcaggcgtggataatttctactaagtgtagataaagtgtcagaggccagcaataatttctactaagtgtagatttttttnnnnnnnnnnaagcttggcgtggatccgatatcaactagatcttgagacaaatggcagtattcatccacaattttaaaagaaaaggggggattggggggtacagtgcaggggaaagaatagtagacataatagcaacagacatacaaactaaag

SEQ ID NO: 10638 - DNA, 301 bp, Artificial Sequence
  Kmt2d.4_Notch1.1
  crRNA array
  misc_feature (148)..(157): n is a, c, g, or t
cttggctttatatatcttgtggaaaggacgaaacaccgtaatttctactaagtgtagatcccagtcagcgaggaactcctaatttctactaagtgtagattgggccaacgatgccaggactaatttctactaagtgtagatttttttnnnnnnnnnnaagcttggcgtggatccgatatcaactagatcttgagacaaatggcagtattcatccacaattttaaaagaaaaggggggattggggggtacagtgcaggggaaagaatagtagacataatagcaacagacatacaaactaaag

SEQ ID NO: 10639 - DNA, 301 bp, Artificial Sequence
  Kmt2d.4_Notch1.2
  crRNA array
  misc_feature (148)..(157): n is a, c, g, or t
cttggctttatatatcttgtggaaaggacgaaacaccgtaatttctactaagtgtagatcccagtcagcgaggaactcctaatttctactaagtgtagatgtcgccccagcatcctgaagtaatttctactaagtgtagatttttttnnnnnnnnnnaagcttggcgtggatccgatatcaactagatcttgagacaaatggcagtattcatccacaattttaaaagaaaaggggggattggggggtacagtgcaggggaaagaatagtagacataatagcaacagacatacaaactaaag

SEQ ID NO: 10640 - DNA, 301 bp, Artificial Sequence
  Kmt2d.4_Notch1.3
  crRNA array
  misc_feature (148)..(157): n is a, c, g, or t
cttggctttatatatcttgtggaaaggacgaaacaccgtaatttctactaagtgtagatcccagtcagcgaggaactcctaatttctactaagtgtagatagccacccccgccacgcctctaatttctactaagtgtagatttttttnnnnnnnnnnaagcttggcgtggatccgatatcaactagatcttgagacaaatggcagtattcatccacaattttaaaagaaaaggggggattggggggtacagtgcaggggaaagaatagtagacataatagcaacagacatacaaactaaag

SEQ ID NO: 10641 - DNA, 301 bp, Artificial Sequence
  Kmt2d.4_Notch1.4
  crRNA array
  misc_feature (148)..(157): n is a, c, g, or t
cttggctttatatatcttgtggaaaggacgaaacaccgtaatttctactaagtgtagatcccagtcagcgaggaactcctaatttctactaagtgtagataaagtgtcagaggccagcaataatttctactaagtgtagatttttttnnnnnnnnnnaagcttggcgtggatccgatatcaactagatcttgagacaaatggcagtattcatccacaattttaaaagaaaaggggggattggggggtacagtgcaggggaaagaatagtagacataatagcaacagacatacaaactaaag

SEQ ID NO: 10642 - DNA, 301 bp, Artificial Sequence
  Kmt2d.1_Arid1a.1
  crRNA array
  misc_feature (148)..(157): n is a, c, g, or t
cttggctttatatatcttgtggaaaggacgaaacaccgtaatttctactaagtgtagatactccaggccacccaggtggtaatttctactaagtgtagatcccgcgctcggccgctgccgtaatttctactaagtgtagatttttttnnnnnnnnnnaagcttggcgtggatccgatatcaactagatcttgagacaaatggcagtattcatccacaattttaaaagaaaaggggggattggggggtacagtgcaggggaaagaatagtagacataatagcaacagacatacaaactaaag

SEQ ID NO: 10643 - DNA, 301 bp, Artificial Sequence
  Kmt2d.1_Arid1a.2
  crRNA array
  misc_feature (148)..(157): n is a, c, g, or t
cttggctttatatatcttgtggaaaggacgaaacaccgtaatttctactaagtgtagatactccaggccacccaggtggtaatttctactaagtgtagatagtgcaagatcgagcgtggataatttctactaagtgtagatttttttnnnnnnnnnnaagcttggcgtggatccgatatcaactagatcttgagacaaatggcagtattcatccacaattttaaaagaaaaggggggattggggggtacagtgcaggggaaagaatagtagacataatagcaacagacatacaaactaaag

SEQ ID NO: 10644 - DNA, 301 bp, Artificial Sequence
  Kmt2d.1_Arid1a.3
  crRNA array
  misc_feature (148)..(157): n is a, c, g, or t
cttggctttatatatcttgtggaaaggacgaaacaccgtaatttctactaagtgtagatactccaggccacccaggtggtaatttctactaagtgtagatagtgagctggcagcactgcttaatttctactaagtgtagatttttttnnnnnnnnnnaagcttggcgtggatccgatatcaactagatcttgagacaaatggcagtattcatccacaattttaaaagaaaaggggggattggggggtacagtgcaggggaaagaatagtagacataatagcaacagacatacaaactaaag

SEQ ID NO: 10645 - DNA, 301 bp, Artificial Sequence
  Kmt2d.1_Arid1a.4
  crRNA array
  misc_feature (148)..(157): n is a, c, g, or t
cttggctttatatatcttgtggaaaggacgaaacaccgtaatttctactaagtgtagatactccaggccacccaggtggtaatttctactaagtgtagatgccgagaccgagtctctgcataatttctactaagtgtagatttttttnnnnnnnnnnaagcttggcgtggatccgatatcaactagatcttgagacaaatggcagtattcatccacaattttaaaagaaaaggggggattggggggtacagtgcaggggaaagaatagtagacataatagcaacagacatacaaactaaag

SEQ ID NO: 10646 - DNA, 301 bp, Artificial Sequence
  Kmt2d.2_Arid1a.1
  crRNA array
  misc_feature (148)..(157): n is a, c, g, or t
cttggctttatatatcttgtggaaaggacgaaacaccgtaatttctactaagtgtagatggggaccatagccaggagagtaatttctactaagtgtagatcccgcgctcggccgctgccgtaatttctactaagtgtagatttttttnnnnnnnnnnaagcttggcgtggatccgatatcaactagatcttgagacaaatggcagtattcatccacaattttaaaagaaaaggggggattggggggtacagtgcaggggaaagaatagtagacataatagcaacagacatacaaactaaag

SEQ ID NO: 10647 - DNA, 301 bp, Artificial Sequence
  Kmt2d.2_Arid1a.2
  crRNA array
  misc_feature (148)..(157): n is a, c, g, or t
cttggctttatatatcttgtggaaaggacgaaacaccgtaatttctactaagtgtagatggggaccatagccaggagagtaatttctactaagtgtagatagtgcaagatcgagcgtggataatttctactaagtgtagatttttttnnnnnnnnnnaagcttggcgtggatccgatatcaactagatcttgagacaaatggcagtattcatccacaattttaaaagaaaaggggggattggggggtacagtgcaggggaaagaatagtagacataatagcaacagacatacaaactaaag

SEQ ID NO: 10648 - DNA, 301 bp, Artificial Sequence
  Kmt2d.2_Arid1a.3
  crRNA array
  misc_feature (148)..(157): n is a, c, g, or t
cttggctttatatatcttgtggaaaggacgaaacaccgtaatttctactaagtgtagatggggaccatagccaggagagtaatttctactaagtgtagatagtgagctggcagcactgcttaatttctactaagtgtagatttttttnnnnnnnnnnaagcttggcgtggatccgatatcaactagatcttgagacaaatggcagtattcatccacaattttaaaagaaaaggggggattggggggtacagtgcaggggaaagaatagtagacataatagcaacagacatacaaactaaag

SEQ ID NO: 10649 - DNA, 301 bp, Artificial Sequence
  Kmt2d.2_Arid1a.4
  crRNA array
  misc_feature (148)..(157): n is a, c, g, or t
cttggctttatatatcttgtggaaaggacgaaacaccgtaatttctactaagtgtagatggggaccatagccaggagagtaatttctactaagtgtagatgccgagaccgagtctctgcataatttctactaagtgtagatttttttnnnnnnnnnnaagcttggcgtggatccgatatcaactagatcttgagacaaatggcagtattcatccacaattttaaaagaaaaggggggattggggggtacagtgcaggggaaagaatagtagacataatagcaacagacatacaaactaaag

SEQ ID NO: 10650 - DNA, 301 bp, Artificial Sequence
  Kmt2d.3_Arid1a.1
  crRNA array
  misc_feature (148)..(157): n is a, c, g, or t
cttggctttatatatcttgtggaaaggacgaaacaccgtaatttctactaagtgtagataggaaggggtcaggcgtggataatttctactaagtgtagatcccgcgctcggccgctgccgtaatttctactaagtgtagatttttttnnnnnnnnnnaagcttggcgtggatccgatatcaactagatcttgagacaaatggcagtattcatccacaattttaaaagaaaaggggggattggggggtacagtgcaggggaaagaatagtagacataatagcaacagacatacaaactaaag

SEQ ID NO: 10651 - DNA, 301 bp, Artificial Sequence
  Kmt2d.3_Arid1a.2
  crRNA array
  misc_feature (148)..(157): n is a, c, g, or t
cttggctttatatatcttgtggaaaggacgaaacaccgtaatttctactaagtgtagataggaaggggtcaggcgtggataatttctactaagtgtagatagtgcaagatcgagcgtggataatttctactaagtgtagatttttttnnnnnnnnnnaagcttggcgtggatccgatatcaactagatcttgagacaaatggcagtattcatccacaattttaaaagaaaaggggggattggggggtacagtgcaggggaaagaatagtagacataatagcaacagacatacaaactaaag

SEQ ID NO: 10652 - DNA, 301 bp, Artificial Sequence
  Kmt2d.3_Arid1a.3
  crRNA array
  misc_feature (148)..(157): n is a, c, g, or t
cttggctttatatatcttgtggaaaggacgaaacaccgtaatttctactaagtgtagataggaaggggtcaggcgtggataatttctactaagtgtagatagtgagctggcagcactgcttaatttctactaagtgtagatttttttnnnnnnnnnnaagcttggcgtggatccgatatcaactagatcttgagacaaatggcagtattcatccacaattttaaaagaaaaggggggattggggggtacagtgcaggggaaagaatagtagacataatagcaacagacatacaaactaaag

SEQ ID NO: 10653 - DNA, 301 bp, Artificial Sequence
  Kmt2d.3_Arid1a.4
  crRNA array
  misc_feature (148)..(157): n is a, c, g, or t
cttggctttatatatcttgtggaaaggacgaaacaccgtaatttctactaagtgtagataggaaggggtcaggcgtggataatttctactaagtgtagatgccgagaccgagtctctgcataatttctactaagtgtagatttttttnnnnnnnnnnaagcttggcgtggatccgatatcaactagatcttgagacaaatggcagtattcatccacaattttaaaagaaaaggggggattggggggtacagtgcaggggaaagaatagtagacataatagcaacagacatacaaactaaag

SEQ ID NO: 10654 - DNA, 301 bp, Artificial Sequence
  Kmt2d.4_Arid1a.1
  crRNA array
  misc_feature (148)..(157): n is a, c, g, or t
cttggctttatatatcttgtggaaaggacgaaacaccgtaatttctactaagtgtagatcccagtcagcgaggaactcctaatttctactaagtgtagatcccgcgctcggccgctgccgtaatttctactaagtgtagatttttttnnnnnnnnnnaagcttggcgtggatccgatatcaactagatcttgagacaaatggcagtattcatccacaattttaaaagaaaaggggggattggggggtacagtgcaggggaaagaatagtagacataatagcaacagacatacaaactaaag

SEQ ID NO: 10655 - DNA, 301 bp, Artificial Sequence
  Kmt2d.4_Arid1a.2
  crRNA array
  misc_feature (148)..(157): n is a, c, g, or t
cttggctttatatatcttgtggaaaggacgaaacaccgtaatttctactaagtgtagatcccagtcagcgaggaactcctaatttctactaagtgtagatagtgcaagatcgagcgtggataatttctactaagtgtagatttttttnnnnnnnnnnaagcttggcgtggatccgatatcaactagatcttgagacaaatggcagtattcatccacaattttaaaagaaaaggggggattggggggtacagtgcaggggaaagaatagtagacataatagcaacagacatacaaactaaag

SEQ ID NO: 10656 - DNA, 301 bp, Artificial Sequence
  Kmt2d.4_Arid1a.3
  crRNA array
  misc_feature (148)..(157): n is a, c, g, or t
cttggctttatatatcttgtggaaaggacgaaacaccgtaatttctactaagtgtagatcccagtcagcgaggaactcctaatttctactaagtgtagatagtgagctggcagcactgcttaatttctactaagtgtagatttttttnnnnnnnnnnaagcttggcgtggatccgatatcaactagatcttgagacaaatggcagtattcatccacaattttaaaagaaaaggggggattggggggtacagtgcaggggaaagaatagtagacataatagcaacagacatacaaactaaag

SEQ ID NO: 10657 - DNA, 301 bp, Artificial Sequence
  Kmt2d.4_Arid1a.4
  crRNA array
  misc_feature (148)..(157): n is a, c, g, or t
cttggctttatatatcttgtggaaaggacgaaacaccgtaatttctactaagtgtagatcccagtcagcgaggaactcctaatttctactaagtgtagatgccgagaccgagtctctgcataatttctactaagtgtagatttttttnnnnnnnnnnaagcttggcgtggatccgatatcaactagatcttgagacaaatggcagtattcatccacaattttaaaagaaaaggggggattggggggtacagtgcaggggaaagaatagtagacataatagcaacagacatacaaactaaag

SEQ ID NO: 10658 - DNA, 301 bp, Artificial Sequence
  Kmt2d.1_Trim72.1
  crRNA array
  misc_feature (148)..(157): n is a, c, g, or t
cttggctttatatatcttgtggaaaggacgaaacaccgtaatttctactaagtgtagatactccaggccacccaggtggtaatttctactaagtgtagataccccagctctgcgcacccgtaatttctactaagtgtagatttttttnnnnnnnnnnaagcttggcgtggatccgatatcaactagatcttgagacaaatggcagtattcatccacaattttaaaagaaaaggggggattggggggtacagtgcaggggaaagaatagtagacataatagcaacagacatacaaactaaag

SEQ ID NO: 10659 - DNA, 301 bp, Artificial Sequence
  Kmt2d.1_Trim72.2
  crRNA array
  misc_feature (148)..(157): n is a, c, g, or t
cttggctttatatatcttgtggaaaggacgaaacaccgtaatttctactaagtgtagatactccaggccacccaggtggtaatttctactaagtgtagatcacgagcgtctgcccgggcctaatttctactaagtgtagatttttttnnnnnnnnnnaagcttggcgtggatccgatatcaactagatcttgagacaaatggcagtattcatccacaattttaaaagaaaaggggggattggggggtacagtgcaggggaaagaatagtagacataatagcaacagacatacaaactaaag

SEQ ID NO: 10660 - DNA, 301 bp, Artificial Sequence
  Kmt2d.1_Trim72.3
  crRNA array
  misc_feature (148)..(157): n is a, c, g, or t
cttggctttatatatcttgtggaaaggacgaaacaccgtaatttctactaagtgtagatactccaggccacccaggtggtaatttctactaagtgtagatacgtgtgctggcacgacaagtaatttctactaagtgtagatttttttnnnnnnnnnnaagcttggcgtggatccgatatcaactagatcttgagacaaatggcagtattcatccacaattttaaaagaaaaggggggattggggggtacagtgcaggggaaagaatagtagacataatagcaacagacatacaaactaaag

SEQ ID NO: 10661 - DNA, 301 bp, Artificial Sequence
  Kmt2d.1_Trim72.4
  crRNA array
  misc_feature (148)..(157): n is a, c, g, or t
cttggctttatatatcttgtggaaaggacgaaacaccgtaatttctactaagtgtagatactccaggccacccaggtggtaatttctactaagtgtagattgccgtgcctgcctgatccgtaatttctactaagtgtagatttttttnnnnnnnnnnaagcttggcgtggatccgatatcaactagatcttgagacaaatggcagtattcatccacaattttaaaagaaaaggggggattggggggtacagtgcaggggaaagaatagtagacataatagcaacagacatacaaactaaag

SEQ ID NO: 10662 - DNA, 301 bp, Artificial Sequence
  Kmt2d.2_Trim72.1
  crRNA array
  misc_feature (148)..(157): n is a, c, g, or t
cttggctttatatatcttgtggaaaggacgaaacaccgtaatttctactaagtgtagatggggaccatagccaggagagtaatttctactaagtgtagataccccagctctgcgcacccgtaatttctactaagtgtagatttttttnnnnnnnnnnaagcttggcgtggatccgatatcaactagatcttgagacaaatggcagtattcatccacaattttaaaagaaaaggggggattggggggtacagtgcaggggaaagaatagtagacataatagcaacagacatacaaactaaag

SEQ ID NO: 10663 - DNA, 301 bp, Artificial Sequence
  Kmt2d.2_Trim72.2
  crRNA array
  misc_feature (148)..(157): n is a, c, g, or t
cttggctttatatatcttgtggaaaggacgaaacaccgtaatttctactaagtgtagatggggaccatagccaggagagtaatttctactaagtgtagatcacgagcgtctgcccgggcctaatttctactaagtgtagatttttttnnnnnnnnnnaagcttggcgtggatccgatatcaactagatcttgagacaaatggcagtattcatccacaattttaaaagaaaaggggggattggggggtacagtgcaggggaaagaatagtagacataatagcaacagacatacaaactaaag

SEQ ID NO: 10664 - DNA, 301 bp, Artificial Sequence
  Kmt2d.2_Trim72.3
  crRNA array
  misc_feature (148)..(157): n is a, c, g, or t
cttggctttatatatcttgtggaaaggacgaaacaccgtaatttctactaagtgtagatggggaccatagccaggagagtaatttctactaagtgtagatacgtgtgctggcacgacaagtaatttctactaagtgtagatttttttnnnnnnnnnnaagcttggcgtggatccgatatcaactagatcttgagacaaatggcagtattcatccacaattttaaaagaaaaggggggattggggggtacagtgcaggggaaagaatagtagacataatagcaacagacatacaaactaaag

SEQ ID NO: 10665 - DNA, 301 bp, Artificial Sequence
  Kmt2d.2_Trim72.4
  crRNA array
  misc_feature (148)..(157): n is a, c, g, or t
cttggctttatatatcttgtggaaaggacgaaacaccgtaatttctactaagtgtagatggggaccatagccaggagagtaatttctactaagtgtagattgccgtgcctgcctgatccgtaatttctactaagtgtagatttttttnnnnnnnnnnaagcttggcgtggatccgatatcaactagatcttgagacaaatggcagtattcatccacaattttaaaagaaaaggggggattggggggtacagtgcaggggaaagaatagtagacataatagcaacagacatacaaactaaag

SEQ ID NO: 10666 - DNA, 301 bp, Artificial Sequence
  Kmt2d.3_Trim72.1
  crRNA array
  misc_feature (148)..(157): n is a, c, g, or t
cttggctttatatatcttgtggaaaggacgaaacaccgtaatttctactaagtgtagataggaaggggtcaggcgtggataatttctactaagtgtagataccccagctctgcgcacccgtaatttctactaagtgtagatttttttnnnnnnnnnnaagcttggcgtggatccgatatcaactagatcttgagacaaatggcagtattcatccacaattttaaaagaaaaggggggattggggggtacagtgcaggggaaagaatagtagacataatagcaacagacatacaaactaaag

SEQ ID NO: 10667 - DNA, 301 bp, Artificial Sequence
  Kmt2d.3_Trim72.2
  crRNA array
  misc_feature (148)..(157): n is a, c, g, or t
cttggctttatatatcttgtggaaaggacgaaacaccgtaatttctactaagtgtagataggaaggggtcaggcgtggataatttctactaagtgtagatcacgagcgtctgcccgggcctaatttctactaagtgtagatttttttnnnnnnnnnnaagcttggcgtggatccgatatcaactagatcttgagacaaatggcagtattcatccacaattttaaaagaaaaggggggattggggggtacagtgcaggggaaagaatagtagacataatagcaacagacatacaaactaaag

SEQ ID NO: 10668 - DNA, 301 bp, Artificial Sequence
  Kmt2d.3_Trim72.3
  crRNA array
  misc_feature (148)..(157): n is a, c, g, or t
cttggctttatatatcttgtggaaaggacgaaacaccgtaatttctactaagtgtagataggaaggggtcaggcgtggataatttctactaagtgtagatacgtgtgctggcacgacaagtaatttctactaagtgtagatttttttnnnnnnnnnnaagcttggcgtggatccgatatcaactagatcttgagacaaatggcagtattcatccacaattttaaaagaaaaggggggattggggggtacagtgcaggggaaagaatagtagacataatagcaacagacatacaaactaaag

SEQ ID NO: 10669 - DNA, 301 bp, Artificial Sequence
  Kmt2d.3_Trim72.4
  crRNA array
  misc_feature (148)..(157): n is a, c, g, or t
cttggctttatatatcttgtggaaaggacgaaacaccgtaatttctactaagtgtagataggaaggggtcaggcgtggataatttctactaagtgtagattgccgtgcctgcctgatccgtaatttctactaagtgtagatttttttnnnnnnnnnnaagcttggcgtggatccgatatcaactagatcttgagacaaatggcagtattcatccacaattttaaaagaaaaggggggattggggggtacagtgcaggggaaagaatagtagacataatagcaacagacatacaaactaaag

SEQ ID NO: 10670 - DNA, 301 bp, Artificial Sequence
  Kmt2d.4_Trim72.1
  crRNA array
  misc_feature (148)..(157): n is a, c, g, or t
cttggctttatatatcttgtggaaaggacgaaacaccgtaatttctactaagtgtagatcccagtcagcgaggaactcctaatttctactaagtgtagataccccagctctgcgcacccgtaatttctactaagtgtagatttttttnnnnnnnnnnaagcttggcgtggatccgatatcaactagatcttgagacaaatggcagtattcatccacaattttaaaagaaaaggggggattggggggtacagtgcaggggaaagaatagtagacataatagcaacagacatacaaactaaag

SEQ ID NO: 10671 - DNA, 301 bp, Artificial Sequence
  Kmt2d.4_Trim72.2
  crRNA array
  misc_feature (148)..(157): n is a, c, g, or t
cttggctttatatatcttgtggaaaggacgaaacaccgtaatttctactaagtgtagatcccagtcagcgaggaactcctaatttctactaagtgtagatcacgagcgtctgcccgggcctaatttctactaagtgtagatttttttnnnnnnnnnnaagcttggcgtggatccgatatcaactagatcttgagacaaatggcagtattcatccacaattttaaaagaaaaggggggattggggggtacagtgcaggggaaagaatagtagacataatagcaacagacatacaaactaaag

SEQ ID NO: 10672 - DNA, 301 bp, Artificial Sequence
  Kmt2d.4_Trim72.3
  crRNA array
  misc_feature (148)..(157): n is a, c, g, or t
cttggctttatatatcttgtggaaaggacgaaacaccgtaatttctactaagtgtagatcccagtcagcgaggaactcctaatttctactaagtgtagatacgtgtgctggcacgacaagtaatttctactaagtgtagatttttttnnnnnnnnnnaagcttggcgtggatccgatatcaactagatcttgagacaaatggcagtattcatccacaattttaaaagaaaaggggggattggggggtacagtgcaggggaaagaatagtagacataatagcaacagacatacaaactaaag

SEQ ID NO: 10673 - DNA, 301 bp, Artificial Sequence
  Kmt2d.4_Trim72.4
  crRNA array
  misc_feature (148)..(157): n is a, c, g, or t
cttggctttatatatcttgtggaaaggacgaaacaccgtaatttctactaagtgtagatcccagtcagcgaggaactcctaatttctactaagtgtagattgccgtgcctgcctgatccgtaatttctactaagtgtagatttttttnnnnnnnnnnaagcttggcgtggatccgatatcaactagatcttgagacaaatggcagtattcatccacaattttaaaagaaaaggggggattggggggtacagtgcaggggaaagaatagtagacataatagcaacagacatacaaactaaag

SEQ ID NO: 10674 - DNA, 301 bp, Artificial Sequence
  Kmt2d.1_Zfhx3.1
  crRNA array
  misc_feature (148)..(157): n is a, c, g, or t
cttggctttatatatcttgtggaaaggacgaaacaccgtaatttctactaagtgtagatactccaggccacccaggtggtaatttctactaagtgtagatcgctgcgaggtgtgtaactataatttctactaagtgtagatttttttnnnnnnnnnnaagcttggcgtggatccgatatcaactagatcttgagacaaatggcagtattcatccacaattttaaaagaaaaggggggattggggggtacagtgcaggggaaagaatagtagacataatagcaacagacatacaaactaaag

SEQ ID NO: 10675 - DNA, 301 bp, Artificial Sequence
  Kmt2d.1_Zfhx3.2
  crRNA array
  misc_feature (148)..(157): n is a, c, g, or t
cttggctttatatatcttgtggaaaggacgaaacaccgtaatttctactaagtgtagatactccaggccacccaggtggtaatttctactaagtgtagatacgtgcgacacaaaagcaactaatttctactaagtgtagatttttttnnnnnnnnnnaagcttggcgtggatccgatatcaactagatcttgagacaaatggcagtattcatccacaattttaaaagaaaaggggggattggggggtacagtgcaggggaaagaatagtagacataatagcaacagacatacaaactaaag

SEQ ID NO: 10676 - DNA, 301 bp, Artificial Sequence
  Kmt2d.1_Zfhx3.3
  crRNA array
  misc_feature (148)..(157): n is a, c, g, or t
cttggctttatatatcttgtggaaaggacgaaacaccgtaatttctactaagtgtagatactccaggccacccaggtggtaatttctactaagtgtagattgctctacggcaagaggaaataatttctactaagtgtagatttttttnnnnnnnnnnaagcttggcgtggatccgatatcaactagatcttgagacaaatggcagtattcatccacaattttaaaagaaaaggggggattggggggtacagtgcaggggaaagaatagtagacataatagcaacagacatacaaactaaag

SEQ ID NO: 10677 - DNA, 301 bp, Artificial Sequence
  Kmt2d.1_Zfhx3.4
  crRNA array
  misc_feature (148)..(157): n is a, c, g, or t
cttggctttatatatcttgtggaaaggacgaaacaccgtaatttctactaagtgtagatactccaggccacccaggtggtaatttctactaagtgtagatagtgagcggcagactgcgagtaatttctactaagtgtagatttttttnnnnnnnnnnaagcttggcgtggatccgatatcaactagatcttgagacaaatggcagtattcatccacaattttaaaagaaaaggggggattggggggtacagtgcaggggaaagaatagtagacataatagcaacagacatacaaactaaag

SEQ ID NO: 10678 - DNA, 301 bp, Artificial Sequence
  Kmt2d.2_Zfhx3.1
  crRNA array
  misc_feature (148)..(157): n is a, c, g, or t
cttggctttatatatcttgtggaaaggacgaaacaccgtaatttctactaagtgtagatggggaccatagccaggagagtaatttctactaagtgtagatcgctgcgaggtgtgtaactataatttctactaagtgtagatttttttnnnnnnnnnnaagcttggcgtggatccgatatcaactagatcttgagacaaatggcagtattcatccacaattttaaaagaaaaggggggattggggggtacagtgcaggggaaagaatagtagacataatagcaacagacatacaaactaaag

SEQ ID NO: 10679 - DNA, 301 bp, Artificial Sequence
  Kmt2d.2_Zfhx3.2
  crRNA array
  misc_feature (148)..(157): n is a, c, g, or t
cttggctttatatatcttgtggaaaggacgaaacaccgtaatttctactaagtgtagatggggaccatagccaggagagtaatttctactaagtgtagatacgtgcgacacaaaagcaactaatttctactaagtgtagatttttttnnnnnnnnnnaagcttggcgtggatccgatatcaactagatcttgagacaaatggcagtattcatccacaattttaaaagaaaaggggggattggggggtacagtgcaggggaaagaatagtagacataatagcaacagacatacaaactaaag

SEQ ID NO: 10680 - DNA, 301 bp, Artificial Sequence
  Kmt2d.2_Zfhx3.3
  crRNA array
  misc_feature (148)..(157): n is a, c, g, or t
cttggctttatatatcttgtggaaaggacgaaacaccgtaatttctactaagtgtagatggggaccatagccaggagagtaatttctactaagtgtagattgctctacggcaagaggaaataatttctactaagtgtagatttttttnnnnnnnnnnaagcttggcgtggatccgatatcaactagatcttgagacaaatggcagtattcatccacaattttaaaagaaaaggggggattggggggtacagtgcaggggaaagaatagtagacataatagcaacagacatacaaactaaag

SEQ ID NO: 10681 - DNA, 301 bp, Artificial Sequence
  Kmt2d.2_Zfhx3.4
  crRNA array
  misc_feature (148)..(157): n is a, c, g, or t
cttggctttatatatcttgtggaaaggacgaaacaccgtaatttctactaagtgtagatggggaccatagccaggagagtaatttctactaagtgtagatagtgagcggcagactgcgagtaatttctactaagtgtagatttttttnnnnnnnnnnaagcttggcgtggatccgatatcaactagatcttgagacaaatggcagtattcatccacaattttaaaagaaaaggggggattggggggtacagtgcaggggaaagaatagtagacataatagcaacagacatacaaactaaag

SEQ ID NO: 10682 - DNA, 301 bp, Artificial Sequence
  Kmt2d.3_Zfhx3.1
  crRNA array
  misc_feature (148)..(157): n is a, c, g, or t
cttggctttatatatcttgtggaaaggacgaaacaccgtaatttctactaagtgtagataggaaggggtcaggcgtggataatttctactaagtgtagatcgctgcgaggtgtgtaactataatttctactaagtgtagatttttttnnnnnnnnnnaagcttggcgtggatccgatatcaactagatcttgagacaaatggcagtattcatccacaattttaaaagaaaaggggggattggggggtacagtgcaggggaaagaatagtagacataatagcaacagacatacaaactaaag

SEQ ID NO: 10683 - DNA, 301 bp, Artificial Sequence
  Kmt2d.3_Zfhx3.2
  crRNA array
  misc_feature (148)..(157): n is a, c, g, or t
cttggctttatatatcttgtggaaaggacgaaacaccgtaatttctactaagtgtagataggaaggggtcaggcgtggataatttctactaagtgtagatacgtgcgacacaaaagcaactaatttctactaagtgtagatttttttnnnnnnnnnnaagcttggcgtggatccgatatcaactagatcttgagacaaatggcagtattcatccacaattttaaaagaaaaggggggattggggggtacagtgcaggggaaagaatagtagacataatagcaacagacatacaaactaaag

SEQ ID NO: 10684 - DNA, 301 bp, Artificial Sequence
  Kmt2d.3_Zfhx3.3
  crRNA array
  misc_feature (148)..(157): n is a, c, g, or t
cttggctttatatatcttgtggaaaggacgaaacaccgtaatttctactaagtgtagataggaaggggtcaggcgtggataatttctactaagtgtagattgctctacggcaagaggaaataatttctactaagtgtagatttttttnnnnnnnnnnaagcttggcgtggatccgatatcaactagatcttgagacaaatggcagtattcatccacaattttaaaagaaaaggggggattggggggtacagtgcaggggaaagaatagtagacataatagcaacagacatacaaactaaag

SEQ ID NO: 10685 - DNA, 301 bp, Artificial Sequence
  Kmt2d.3_Zfhx3.4
  crRNA array
  misc_feature (148)..(157): n is a, c, g, or t
cttggctttatatatcttgtggaaaggacgaaacaccgtaatttctactaagtgtagataggaaggggtcaggcgtggataatttctactaagtgtagatagtgagcggcagactgcgagtaatttctactaagtgtagatttttttnnnnnnnnnnaagcttggcgtggatccgatatcaactagatcttgagacaaatggcagtattcatccacaattttaaaagaaaaggggggattggggggtacagtgcaggggaaagaatagtagacataatagcaacagacatacaaactaaag

SEQ ID NO: 10686 - DNA, 301 bp, Artificial Sequence
  Kmt2d.4_Zfhx3.1
  crRNA array
  misc_feature (148)..(157): n is a, c, g, or t
cttggctttatatatcttgtggaaaggacgaaacaccgtaatttctactaagtgtagatcccagtcagcgaggaactcctaatttctactaagtgtagatcgctgcgaggtgtgtaactataatttctactaagtgtagatttttttnnnnnnnnnnaagcttggcgtggatccgatatcaactagatcttgagacaaatggcagtattcatccacaattttaaaagaaaaggggggattggggggtacagtgcaggggaaagaatagtagacataatagcaacagacatacaaactaaag

SEQ ID NO: 10687 - DNA, 301 bp, Artificial Sequence
  Kmt2d.4_Zfhx3.2
  crRNA array
  misc_feature (148)..(157): n is a, c, g, or t
cttggctttatatatcttgtggaaaggacgaaacaccgtaatttctactaagtgtagatcccagtcagcgaggaactcctaatttctactaagtgtagatacgtgcgacacaaaagcaactaatttctactaagtgtagatttttttnnnnnnnnnnaagcttggcgtggatccgatatcaactagatcttgagacaaatggcagtattcatccacaattttaaaagaaaaggggggattggggggtacagtgcaggggaaagaatagtagacataatagcaacagacatacaaactaaag

SEQ ID NO: 10688 - DNA, 301 bp, Artificial Sequence
  Kmt2d.4_Zfhx3.3
  crRNA array
  misc_feature (148)..(157): n is a, c, g, or t
cttggctttatatatcttgtggaaaggacgaaacaccgtaatttctactaagtgtagatcccagtcagcgaggaactcctaatttctactaagtgtagattgctctacggcaagaggaaataatttctactaagtgtagatttttttnnnnnnnnnnaagcttggcgtggatccgatatcaactagatcttgagacaaatggcagtattcatccacaattttaaaagaaaaggggggattggggggtacagtgcaggggaaagaatagtagacataatagcaacagacatacaaactaaag

SEQ ID NO: 10689 - DNA, 301 bp, Artificial Sequence
  Kmt2d.4_Zfhx3.4
  crRNA array
  misc_feature (148)..(157): n is a, c, g, or t
cttggctttatatatcttgtggaaaggacgaaacaccgtaatttctactaagtgtagatcccagtcagcgaggaactcctaatttctactaagtgtagatagtgagcggcagactgcgagtaatttctactaagtgtagatttttttnnnnnnnnnnaagcttggcgtggatccgatatcaactagatcttgagacaaatggcagtattcatccacaattttaaaagaaaaggggggattggggggtacagtgcaggggaaagaatagtagacataatagcaacagacatacaaactaaag

SEQ ID NO: 10690 - DNA, 301 bp, Artificial Sequence
  Kmt2d.1_Crebbp.1
  crRNA array
  misc_feature (148)..(157): n is a, c, g, or t
cttggctttatatatcttgtggaaaggacgaaacaccgtaatttctactaagtgtagatactccaggccacccaggtggtaatttctactaagtgtagatctcacggcggcggcgggccgtaatttctactaagtgtagatttttttnnnnnnnnnnaagcttggcgtggatccgatatcaactagatcttgagacaaatggcagtattcatccacaattttaaaagaaaaggggggattggggggtacagtgcaggggaaagaatagtagacataatagcaacagacatacaaactaaag

SEQ ID NO: 10691 - DNA, 301 bp, Artificial Sequence
  Kmt2d.1_Crebbp.2
  crRNA array
  misc_feature (148)..(157): n is a, c, g, or t
cttggctttatatatcttgtggaaaggacgaaacaccgtaatttctactaagtgtagatactccaggccacccaggtggtaatttctactaagtgtagatcgcgagcaggtgaagatggctaatttctactaagtgtagatttttttnnnnnnnnnnaagcttggcgtggatccgatatcaactagatcttgagacaaatggcagtattcatccacaattttaaaagaaaaggggggattggggggtacagtgcaggggaaagaatagtagacataatagcaacagacatacaaactaaag

SEQ ID NO: 10692 - DNA, 301 bp, Artificial Sequence
  Kmt2d.1_Crebbp.3
  crRNA array
  misc_feature (148)..(157): n is a, c, g, or t
cttggctttatatatcttgtggaaaggacgaaacaccgtaatttctactaagtgtagatactccaggccacccaggtggtaatttctactaagtgtagatggctccgccgcccgcccgcgtaatttctactaagtgtagatttttttnnnnnnnnnnaagcttggcgtggatccgatatcaactagatcttgagacaaatggcagtattcatccacaattttaaaagaaaaggggggattggggggtacagtgcaggggaaagaatagtagacataatagcaacagacatacaaactaaag

SEQ ID NO: 10693 - DNA, 301 bp, Artificial Sequence
  Kmt2d.1_Crebbp.4
  crRNA array
  misc_feature (148)..(157): n is a, c, g, or t
cttggctttatatatcttgtggaaaggacgaaacaccgtaatttctactaagtgtagatactccaggccacccaggtggtaatttctactaagtgtagattggactagatgactccgtagtaatttctactaagtgtagatttttttnnnnnnnnnnaagcttggcgtggatccgatatcaactagatcttgagacaaatggcagtattcatccacaattttaaaagaaaaggggggattggggggtacagtgcaggggaaagaatagtagacataatagcaacagacatacaaactaaag

SEQ ID NO: 10694 - DNA, 301 bp, Artificial Sequence
  Kmt2d.2_Crebbp.1
  crRNA array
  misc_feature (148)..(157): n is a, c, g, or t
cttggctttatatatcttgtggaaaggacgaaacaccgtaatttctactaagtgtagatggggaccatagccaggagagtaatttctactaagtgtagatctcacggcggcggcgggccgtaatttctactaagtgtagatttttttnnnnnnnnnnaagcttggcgtggatccgatatcaactagatcttgagacaaatggcagtattcatccacaattttaaaagaaaaggggggattggggggtacagtgcaggggaaagaatagtagacataatagcaacagacatacaaactaaag

SEQ ID NO: 10695 - DNA, 301 bp, Artificial Sequence
  Kmt2d.2_Crebbp.2
  crRNA array
  misc_feature (148)..(157): n is a, c, g, or t
cttggctttatatatcttgtggaaaggacgaaacaccgtaatttctactaagtgtagatggggaccatagccaggagagtaatttctactaagtgtagatcgcgagcaggtgaagatggctaatttctactaagtgtagatttttttnnnnnnnnnnaagcttggcgtggatccgatatcaactagatcttgagacaaatggcagtattcatccacaattttaaaagaaaaggggggattggggggtacagtgcaggggaaagaatagtagacataatagcaacagacatacaaactaaag

SEQ ID NO: 10696 - DNA, 301 bp, Artificial Sequence
  Kmt2d.2_Crebbp.3
  crRNA array
  misc_feature (148)..(157): n is a, c, g, or t
cttggctttatatatcttgtggaaaggacgaaacaccgtaatttctactaagtgtagatggggaccatagccaggagagtaatttctactaagtgtagatggctccgccgcccgcccgcgtaatttctactaagtgtagatttttttnnnnnnnnnnaagcttggcgtggatccgatatcaactagatcttgagacaaatggcagtattcatccacaattttaaaagaaaaggggggattggggggtacagtgcaggggaaagaatagtagacataatagcaacagacatacaaactaaag

SEQ ID NO: 10697 - DNA, 301 bp, Artificial Sequence
  Kmt2d.2_Crebbp.4
  crRNA array
  misc_feature (148)..(157): n is a, c, g, or t
cttggctttatatatcttgtggaaaggacgaaacaccgtaatttctactaagtgtagatggggaccatagccaggagagtaatttctactaagtgtagattggactagatgactccgtagtaatttctactaagtgtagatttttttnnnnnnnnnnaagcttggcgtggatccgatatcaactagatcttgagacaaatggcagtattcatccacaattttaaaagaaaaggggggattggggggtacagtgcaggggaaagaatagtagacataatagcaacagacatacaaactaaag

SEQ ID NO: 10698 - DNA, 301 bp, Artificial Sequence
  Kmt2d.3_Crebbp.1
  crRNA array
  misc_feature (148)..(157): n is a, c, g, or t
cttggctttatatatcttgtggaaaggacgaaacaccgtaatttctactaagtgtagataggaaggggtcaggcgtggataatttctactaagtgtagatctcacggcggcggcgggccgtaatttctactaagtgtagatttttttnnnnnnnnnnaagcttggcgtggatccgatatcaactagatcttgagacaaatggcagtattcatccacaattttaaaagaaaaggggggattggggggtacagtgcaggggaaagaatagtagacataatagcaacagacatacaaactaaag

SEQ ID NO: 10699 - DNA, 301 bp, Artificial Sequence
  Kmt2d.3_Crebbp.2
  crRNA array
  misc_feature (148)..(157): n is a, c, g, or t
cttggctttatatatcttgtggaaaggacgaaacaccgtaatttctactaagtgtagataggaaggggtcaggcgtggataatttctactaagtgtagatcgcgagcaggtgaagatggctaatttctactaagtgtagatttttttnnnnnnnnnnaagcttggcgtggatccgatatcaactagatcttgagacaaatggcagtattcatccacaattttaaaagaaaaggggggattggggggtacagtgcaggggaaagaatagtagacataatagcaacagacatacaaactaaag

SEQ ID NO: 10700 - DNA, 301 bp, Artificial Sequence
  Kmt2d.3_Crebbp.3
  crRNA array
  misc_feature (148)..(157): n is a, c, g, or t
cttggctttatatatcttgtggaaaggacgaaacaccgtaatttctactaagtgtagataggaaggggtcaggcgtggataatttctactaagtgtagatggctccgccgcccgcccgcgtaatttctactaagtgtagatttttttnnnnnnnnnnaagcttggcgtggatccgatatcaactagatcttgagacaaatggcagtattcatccacaattttaaaagaaaaggggggattggggggtacagtgcaggggaaagaatagtagacataatagcaacagacatacaaactaaag

SEQ ID NO: 10701 - DNA, 301 bp, Artificial Sequence
  Kmt2d.3_Crebbp.4
  crRNA array
  misc_feature (148)..(157): n is a, c, g, or t
cttggctttatatatcttgtggaaaggacgaaacaccgtaatttctactaagtgtagataggaaggggtcaggcgtggataatttctactaagtgtagattggactagatgactccgtagtaatttctactaagtgtagatttttttnnnnnnnnnnaagcttggcgtggatccgatatcaactagatcttgagacaaatggcagtattcatccacaattttaaaagaaaaggggggattggggggtacagtgcaggggaaagaatagtagacataatagcaacagacatacaaactaaag

SEQ ID NO: 10702 - DNA, 301 bp, Artificial Sequence
  Kmt2d.4_Crebbp.1
  crRNA array
  misc_feature (148)..(157): n is a, c, g, or t
cttggctttatatatcttgtggaaaggacgaaacaccgtaatttctactaagtgtagatcccagtcagcgaggaactcctaatttctactaagtgtagatctcacggcggcggcgggccgtaatttctactaagtgtagatttttttnnnnnnnnnnaagcttggcgtggatccgatatcaactagatcttgagacaaatggcagtattcatccacaattttaaaagaaaaggggggattggggggtacagtgcaggggaaagaatagtagacataatagcaacagacatacaaactaaag

SEQ ID NO: 10703 - DNA, 301 bp, Artificial Sequence
  Kmt2d.4_Crebbp.2
  crRNA array
  misc_feature (148)..(157): n is a, c, g, or t
cttggctttatatatcttgtggaaaggacgaaacaccgtaatttctactaagtgtagatcccagtcagcgaggaactcctaatttctactaagtgtagatcgcgagcaggtgaagatggctaatttctactaagtgtagatttttttnnnnnnnnnnaagcttggcgtggatccgatatcaactagatcttgagacaaatggcagtattcatccacaattttaaaagaaaaggggggattggggggtacagtgcaggggaaagaatagtagacataatagcaacagacatacaaactaaag

SEQ ID NO: 10704 - DNA, 301 bp, Artificial Sequence
  Kmt2d.4_Crebbp.3
  crRNA array
  misc_feature (148)..(157): n is a, c, g, or t
cttggctttatatatcttgtggaaaggacgaaacaccgtaatttctactaagtgtagatcccagtcagcgaggaactcctaatttctactaagtgtagatggctccgccgcccgcccgcgtaatttctactaagtgtagatttttttnnnnnnnnnnaagcttggcgtggatccgatatcaactagatcttgagacaaatggcagtattcatccacaattttaaaagaaaaggggggattggggggtacagtgcaggggaaagaatagtagacataatagcaacagacatacaaactaaag

SEQ ID NO: 10705 - DNA, 301 bp, Artificial Sequence
  Kmt2d.4_Crebbp.4
  crRNA array
  misc_feature (148)..(157): n is a, c, g, or t
cttggctttatatatcttgtggaaaggacgaaacaccgtaatttctactaagtgtagatcccagtcagcgaggaactcctaatttctactaagtgtagattggactagatgactccgtagtaatttctactaagtgtagatttttttnnnnnnnnnnaagcttggcgtggatccgatatcaactagatcttgagacaaatggcagtattcatccacaattttaaaagaaaaggggggattggggggtacagtgcaggggaaagaatagtagacataatagcaacagacatacaaactaaag

SEQ ID NO: 10706 - DNA, 301 bp, Artificial Sequence
  Kmt2d.1_Cdkn2a.1
  crRNA array
  misc_feature (148)..(157): n is a, c, g, or t
cttggctttatatatcttgtggaaaggacgaaacaccgtaatttctactaagtgtagatactccaggccacccaggtggtaatttctactaagtgtagatcaatcacgggagggagcagataatttctactaagtgtagatttttttnnnnnnnnnnaagcttggcgtggatccgatatcaactagatcttgagacaaatggcagtattcatccacaattttaaaagaaaaggggggattggggggtacagtgcaggggaaagaatagtagacataatagcaacagacatacaaactaaag

SEQ ID NO: 10707 - DNA, 301 bp, Artificial Sequence
  Kmt2d.1_Cdkn2a.2
  crRNA array
  misc_feature (148)..(157): n is a, c, g, or t
cttggctttatatatcttgtggaaaggacgaaacaccgtaatttctactaagtgtagatactccaggccacccaggtggtaatttctactaagtgtagatgcccaacgccccgaactctttaatttctactaagtgtagatttttttnnnnnnnnnnaagcttggcgtggatccgatatcaactagatcttgagacaaatggcagtattcatccacaattttaaaagaaaaggggggattggggggtacagtgcaggggaaagaatagtagacataatagcaacagacatacaaactaaag

SEQ ID NO: 10708 - DNA, 301 bp, Artificial Sequence
  Kmt2d.1_Cdkn2a.3
  crRNA array
  misc_feature (148)..(157): n is a, c, g, or t
cttggctttatatatcttgtggaaaggacgaaacaccgtaatttctactaagtgtagatactccaggccacccaggtggtaatttctactaagtgtagattgtaccgctgggaacgtcgctaatttctactaagtgtagatttttttnnnnnnnnnnaagcttggcgtggatccgatatcaactagatcttgagacaaatggcagtattcatccacaattttaaaagaaaaggggggattggggggtacagtgcaggggaaagaatagtagacataatagcaacagacatacaaactaaag

SEQ ID NO: 10709 - DNA, 301 bp, Artificial Sequence
  Kmt2d.1_Cdkn2a.4
  crRNA array
  misc_feature (148)..(157): n is a, c, g, or t
cttggctttatatatcttgtggaaaggacgaaacaccgtaatttctactaagtgtagatactccaggccacccaggtggtaatttctactaagtgtagataagccacatgctagacacgctaatttctactaagtgtagatttttttnnnnnnnnnnaagcttggcgtggatccgatatcaactagatcttgagacaaatggcagtattcatccacaattttaaaagaaaaggggggattggggggtacagtgcaggggaaagaatagtagacataatagcaacagacatacaaactaaag

SEQ ID NO: 10710 - DNA, 301 bp, Artificial Sequence
  Kmt2d.2_Cdkn2a.1
  crRNA array
  misc_feature (148)..(157): n is a, c, g, or t
cttggctttatatatcttgtggaaaggacgaaacaccgtaatttctactaagtgtagatggggaccatagccaggagagtaatttctactaagtgtagatcaatcacgggagggagcagataatttctactaagtgtagatttttttnnnnnnnnnnaagcttggcgtggatccgatatcaactagatcttgagacaaatggcagtattcatccacaattttaaaagaaaaggggggattggggggtacagtgcaggggaaagaatagtagacataatagcaacagacatacaaactaaag

SEQ ID NO: 10711 - DNA, 301 bp, Artificial Sequence
  Kmt2d.2_Cdkn2a.2
  crRNA array
  misc_feature (148)..(157): n is a, c, g, or t
cttggctttatatatcttgtggaaaggacgaaacaccgtaatttctactaagtgtagatggggaccatagccaggagagtaatttctactaagtgtagatgcccaacgccccgaactctttaatttctactaagtgtagatttttttnnnnnnnnnnaagcttggcgtggatccgatatcaactagatcttgagacaaatggcagtattcatccacaattttaaaagaaaaggggggattggggggtacagtgcaggggaaagaatagtagacataatagcaacagacatacaaactaaag

SEQ ID NO: 10712 - DNA, 301 bp, Artificial Sequence
  Kmt2d.2_Cdkn2a.3
  crRNA array
  misc_feature (148)..(157): n is a, c, g, or t
cttggctttatatatcttgtggaaaggacgaaacaccgtaatttctactaagtgtagatggggaccatagccaggagagtaatttctactaagtgtagattgtaccgctgggaacgtcgctaatttctactaagtgtagatttttttnnnnnnnnnnaagcttggcgtggatccgatatcaactagatcttgagacaaatggcagtattcatccacaattttaaaagaaaaggggggattggggggtacagtgcaggggaaagaatagtagacataatagcaacagacatacaaactaaag

SEQ ID NO: 10713 - DNA, 301 bp, Artificial Sequence
  Kmt2d.2_Cdkn2a.4
  crRNA array
  misc_feature (148)..(157): n is a, c, g, or t
cttggctttatatatcttgtggaaaggacgaaacaccgtaatttctactaagtgtagatggggaccatagccaggagagtaatttctactaagtgtagataagccacatgctagacacgctaatttctactaagtgtagatttttttnnnnnnnnnnaagcttggcgtggatccgatatcaactagatcttgagacaaatggcagtattcatccacaattttaaaagaaaaggggggattggggggtacagtgcaggggaaagaatagtagacataatagcaacagacatacaaactaaag

SEQ ID NO: 10714 - DNA, 301 bp, Artificial Sequence
  Kmt2d.3_Cdkn2a.1
  crRNA array
  misc_feature (148)..(157): n is a, c, g, or t
cttggctttatatatcttgtggaaaggacgaaacaccgtaatttctactaagtgtagataggaaggggtcaggcgtggataatttctactaagtgtagatcaatcacgggagggagcagataatttctactaagtgtagatttttttnnnnnnnnnnaagcttggcgtggatccgatatcaactagatcttgagacaaatggcagtattcatccacaattttaaaagaaaaggggggattggggggtacagtgcaggggaaagaatagtagacataatagcaacagacatacaaactaaag

SEQ ID NO: 10715 - DNA, 301 bp, Artificial Sequence
  Kmt2d.3_Cdkn2a.2
  crRNA array
  misc_feature (148)..(157): n is a, c, g, or t
cttggctttatatatcttgtggaaaggacgaaacaccgtaatttctactaagtgtagataggaaggggtcaggcgtggataatttctactaagtgtagatgcccaacgccccgaactctttaatttctactaagtgtagatttttttnnnnnnnnnnaagcttggcgtggatccgatatcaactagatcttgagacaaatggcagtattcatccacaattttaaaagaaaaggggggattggggggtacagtgcaggggaaagaatagtagacataatagcaacagacatacaaactaaag

SEQ ID NO: 10716 - DNA, 301 bp, Artificial Sequence
  Kmt2d.3_Cdkn2a.3
  crRNA array
  misc_feature (148)..(157): n is a, c, g, or t
cttggctttatatatcttgtggaaaggacgaaacaccgtaatttctactaagtgtagataggaaggggtcaggcgtggataatttctactaagtgtagattgtaccgctgggaacgtcgctaatttctactaagtgtagatttttttnnnnnnnnnnaagcttggcgtggatccgatatcaactagatcttgagacaaatggcagtattcatccacaattttaaaagaaaaggggggattggggggtacagtgcaggggaaagaatagtagacataatagcaacagacatacaaactaaag

SEQ ID NO: 10717 - DNA, 301 bp, Artificial Sequence
  Kmt2d.3_Cdkn2a.4
  crRNA array
  misc_feature (148)..(157): n is a, c, g, or t
cttggctttatatatcttgtggaaaggacgaaacaccgtaatttctactaagtgtagataggaaggggtcaggcgtggataatttctactaagtgtagataagccacatgctagacacgctaatttctactaagtgtagatttttttnnnnnnnnnnaagcttggcgtggatccgatatcaactagatcttgagacaaatggcagtattcatccacaattttaaaagaaaaggggggattggggggtacagtgcaggggaaagaatagtagacataatagcaacagacatacaaactaaag

SEQ ID NO: 10718 - DNA, 301 bp, Artificial Sequence
  Kmt2d.4_Cdkn2a.1
  crRNA array
  misc_feature (148)..(157): n is a, c, g, or t
cttggctttatatatcttgtggaaaggacgaaacaccgtaatttctactaagtgtagatcccagtcagcgaggaactcctaatttctactaagtgtagatcaatcacgggagggagcagataatttctactaagtgtagatttttttnnnnnnnnnnaagcttggcgtggatccgatatcaactagatcttgagacaaatggcagtattcatccacaattttaaaagaaaaggggggattggggggtacagtgcaggggaaagaatagtagacataatagcaacagacatacaaactaaag

SEQ ID NO: 10719 - DNA, 301 bp, Artificial Sequence
  Kmt2d.4_Cdkn2a.2
  crRNA array
  misc_feature (148)..(157): n is a, c, g, or t
cttggctttatatatcttgtggaaaggacgaaacaccgtaatttctactaagtgtagatcccagtcagcgaggaactcctaatttctactaagtgtagatgcccaacgccccgaactctttaatttctactaagtgtagatttttttnnnnnnnnnnaagcttggcgtggatccgatatcaactagatcttgagacaaatggcagtattcatccacaattttaaaagaaaaggggggattggggggtacagtgcaggggaaagaatagtagacataatagcaacagacatacaaactaaag

SEQ ID NO: 10720 - DNA, 301 bp, Artificial Sequence
  Kmt2d.4_Cdkn2a.3
  crRNA array
  misc_feature (148)..(157): n is a, c, g, or t
cttggctttatatatcttgtggaaaggacgaaacaccgtaatttctactaagtgtagatcccagtcagcgaggaactcctaatttctactaagtgtagattgtaccgctgggaacgtcgctaatttctactaagtgtagatttttttnnnnnnnnnnaagcttggcgtggatccgatatcaactagatcttgagacaaatggcagtattcatccacaattttaaaagaaaaggggggattggggggtacagtgcaggggaaagaatagtagacataatagcaacagacatacaaactaaag

SEQ ID NO: 10721 - DNA, 301 bp, Artificial Sequence
  Kmt2d.4_Cdkn2a.4
  crRNA array
  misc_feature (148)..(157): n is a, c, g, or t
cttggctttatatatcttgtggaaaggacgaaacaccgtaatttctactaagtgtagatcccagtcagcgaggaactcctaatttctactaagtgtagataagccacatgctagacacgctaatttctactaagtgtagatttttttnnnnnnnnnnaagcttggcgtggatccgatatcaactagatcttgagacaaatggcagtattcatccacaattttaaaagaaaaggggggattggggggtacagtgcaggggaaagaatagtagacataatagcaacagacatacaaactaaag

SEQ ID NO: 10722 - DNA, 301 bp, Artificial Sequence
  Kmt2d.1_Wrn.1
  crRNA array
  misc_feature (148)..(157): n is a, c, g, or t
cttggctttatatatcttgtggaaaggacgaaacaccgtaatttctactaagtgtagatactccaggccacccaggtggtaatttctactaagtgtagatgcaaaccactcgggtaattttaatttctactaagtgtagatttttttnnnnnnnnnnaagcttggcgtggatccgatatcaactagatcttgagacaaatggcagtattcatccacaattttaaaagaaaaggggggattggggggtacagtgcaggggaaagaatagtagacataatagcaacagacatacaaactaaag

SEQ ID NO: 10723 - DNA, 301 bp, Artificial Sequence
  Kmt2d.1_Wrn.2
  crRNA array
  misc_feature (148)..(157): n is a, c, g, or t
cttggctttatatatcttgtggaaaggacgaaacaccgtaatttctactaagtgtagatactccaggccacccaggtggtaatttctactaagtgtagatgccatgtccagcagaacctttaatttctactaagtgtagatttttttnnnnnnnnnnaagcttggcgtggatccgatatcaactagatcttgagacaaatggcagtattcatccacaattttaaaagaaaaggggggattggggggtacagtgcaggggaaagaatagtagacataatagcaacagacatacaaactaaag

SEQ ID NO: 10724 - DNA, 301 bp, Artificial Sequence
  Kmt2d.1_Wrn.3
  crRNA array
  misc_feature (148)..(157): n is a, c, g, or t
cttggctttatatatcttgtggaaaggacgaaacaccgtaatttctactaagtgtagatactccaggccacccaggtggtaatttctactaagtgtagatctgcagcaggccaccgcaattaatttctactaagtgtagatttttttnnnnnnnnnnaagcttggcgtggatccgatatcaactagatcttgagacaaatggcagtattcatccacaattttaaaagaaaaggggggattggggggtacagtgcaggggaaagaatagtagacataatagcaacagacatacaaactaaag

SEQ ID NO: 10725 - DNA, 301 bp, Artificial Sequence
  Kmt2d.1_Wrn.4
  crRNA array
  misc_feature (148)..(157): n is a, c, g, or t
cttggctttatatatcttgtggaaaggacgaaacaccgtaatttctactaagtgtagatactccaggccacccaggtggtaatttctactaagtgtagattcgaaggacaatagatgatgtaatttctactaagtgtagatttttttnnnnnnnnnnaagcttggcgtggatccgatatcaactagatcttgagacaaatggcagtattcatccacaattttaaaagaaaaggggggattggggggtacagtgcaggggaaagaatagtagacataatagcaacagacatacaaactaaag

SEQ ID NO: 10726 - DNA, 301 bp, Artificial Sequence
  Kmt2d.2_Wrn.1
  crRNA array
  misc_feature (148)..(157): n is a, c, g, or t
cttggctttatatatcttgtggaaaggacgaaacaccgtaatttctactaagtgtagatggggaccatagccaggagagtaatttctactaagtgtagatgcaaaccactcgggtaattttaatttctactaagtgtagatttttttnnnnnnnnnnaagcttggcgtggatccgatatcaactagatcttgagacaaatggcagtattcatccacaattttaaaagaaaaggggggattggggggtacagtgcaggggaaagaatagtagacataatagcaacagacatacaaactaaag

SEQ ID NO: 10727 - DNA, 301 bp, Artificial Sequence
  Kmt2d.2_Wrn.2
  crRNA array
  misc_feature (148)..(157): n is a, c, g, or t
cttggctttatatatcttgtggaaaggacgaaacaccgtaatttctactaagtgtagatggggaccatagccaggagagtaatttctactaagtgtagatgccatgtccagcagaacctttaatttctactaagtgtagatttttttnnnnnnnnnnaagcttggcgtggatccgatatcaactagatcttgagacaaatggcagtattcatccacaattttaaaagaaaaggggggattggggggtacagtgcaggggaaagaatagtagacataatagcaacagacatacaaactaaag

SEQ ID NO: 10728 - DNA, 301 bp, Artificial Sequence
  Kmt2d.2_Wrn.3
  crRNA array
  misc_feature (148)..(157): n is a, c, g, or t
cttggctttatatatcttgtggaaaggacgaaacaccgtaatttctactaagtgtagatggggaccatagccaggagagtaatttctactaagtgtagatctgcagcaggccaccgcaattaatttctactaagtgtagatttttttnnnnnnnnnnaagcttggcgtggatccgatatcaactagatcttgagacaaatggcagtattcatccacaattttaaaagaaaaggggggattggggggtacagtgcaggggaaagaatagtagacataatagcaacagacatacaaactaaag

SEQ ID NO: 10729 - DNA, 301 bp, Artificial Sequence
  Kmt2d.2_Wrn.4
  crRNA array
  misc_feature (148)..(157): n is a, c, g, or t
cttggctttatatatcttgtggaaaggacgaaacaccgtaatttctactaagtgtagatggggaccatagccaggagagtaatttctactaagtgtagattcgaaggacaatagatgatgtaatttctactaagtgtagatttttttnnnnnnnnnnaagcttggcgtggatccgatatcaactagatcttgagacaaatggcagtattcatccacaattttaaaagaaaaggggggattggggggtacagtgcaggggaaagaatagtagacataatagcaacagacatacaaactaaag

SEQ ID NO: 10730 - DNA, 301 bp, Artificial Sequence
  Kmt2d.3_Wrn.1
  crRNA array
  misc_feature (148)..(157): n is a, c, g, or t
cttggctttatatatcttgtggaaaggacgaaacaccgtaatttctactaagtgtagataggaaggggtcaggcgtggataatttctactaagtgtagatgcaaaccactcgggtaattttaatttctactaagtgtagatttttttnnnnnnnnnnaagcttggcgtggatccgatatcaactagatcttgagacaaatggcagtattcatccacaattttaaaagaaaaggggggattggggggtacagtgcaggggaaagaatagtagacataatagcaacagacatacaaactaaag

SEQ ID NO: 10731 - DNA, 301 bp, Artificial Sequence
  Kmt2d.3_Wrn.2
  crRNA array
  misc_feature (148)..(157): n is a, c, g, or t
cttggctttatatatcttgtggaaaggacgaaacaccgtaatttctactaagtgtagataggaaggggtcaggcgtggataatttctactaagtgtagatgccatgtccagcagaacctttaatttctactaagtgtagatttttttnnnnnnnnnnaagcttggcgtggatccgatatcaactagatcttgagacaaatggcagtattcatccacaattttaaaagaaaaggggggattggggggtacagtgcaggggaaagaatagtagacataatagcaacagacatacaaactaaag

SEQ ID NO: 10732 - DNA, 301 bp, Artificial Sequence
  Kmt2d.3_Wrn.3
  crRNA array
  misc_feature (148)..(157): n is a, c, g, or t
cttggctttatatatcttgtggaaaggacgaaacaccgtaatttctactaagtgtagataggaaggggtcaggcgtggataatttctactaagtgtagatctgcagcaggccaccgcaattaatttctactaagtgtagatttttttnnnnnnnnnnaagcttggcgtggatccgatatcaactagatcttgagacaaatggcagtattcatccacaattttaaaagaaaaggggggattggggggtacagtgcaggggaaagaatagtagacataatagcaacagacatacaaactaaag

SEQ ID NO: 10733 - DNA, 301 bp, Artificial Sequence
  Kmt2d.3_Wrn.4
  crRNA array
  misc_feature (148)..(157): n is a, c, g, or t
cttggctttatatatcttgtggaaaggacgaaacaccgtaatttctactaagtgtagataggaaggggtcaggcgtggataatttctactaagtgtagattcgaaggacaatagatgatgtaatttctactaagtgtagatttttttnnnnnnnnnnaagcttggcgtggatccgatatcaactagatcttgagacaaatggcagtattcatccacaattttaaaagaaaaggggggattggggggtacagtgcaggggaaagaatagtagacataatagcaacagacatacaaactaaag

SEQ ID NO: 10734 - DNA, 301 bp, Artificial Sequence
  Kmt2d.4_Wrn.1
  crRNA array
  misc_feature (148)..(157): n is a, c, g, or t
cttggctttatatatcttgtggaaaggacgaaacaccgtaatttctactaagtgtagatcccagtcagcgaggaactcctaatttctactaagtgtagatgcaaaccactcgggtaattttaatttctactaagtgtagatttttttnnnnnnnnnnaagcttggcgtggatccgatatcaactagatcttgagacaaatggcagtattcatccacaattttaaaagaaaaggggggattggggggtacagtgcaggggaaagaatagtagacataatagcaacagacatacaaactaaag

SEQ ID NO: 10735 - DNA, 301 bp, Artificial Sequence
  Kmt2d.4_Wrn.2
  crRNA array
  misc_feature (148)..(157): n is a, c, g, or t
cttggctttatatatcttgtggaaaggacgaaacaccgtaatttctactaagtgtagatcccagtcagcgaggaactcctaatttctactaagtgtagatgccatgtccagcagaacctttaatttctactaagtgtagatttttttnnnnnnnnnnaagcttggcgtggatccgatatcaactagatcttgagacaaatggcagtattcatccacaattttaaaagaaaaggggggattggggggtacagtgcaggggaaagaatagtagacataatagcaacagacatacaaactaaag

SEQ ID NO: 10736 - DNA, 301 bp, Artificial Sequence
  Kmt2d.4_Wrn.3
  crRNA array
  misc_feature (148)..(157): n is a, c, g, or t
cttggctttatatatcttgtggaaaggacgaaacaccgtaatttctactaagtgtagatcccagtcagcgaggaactcctaatttctactaagtgtagatctgcagcaggccaccgcaattaatttctactaagtgtagatttttttnnnnnnnnnnaagcttggcgtggatccgatatcaactagatcttgagacaaatggcagtattcatccacaattttaaaagaaaaggggggattggggggtacagtgcaggggaaagaatagtagacataatagcaacagacatacaaactaaag

SEQ ID NO: 10737 - DNA, 301 bp, Artificial Sequence
  Kmt2d.4_Wrn.4
  crRNA array
  misc_feature (148)..(157): n is a, c, g, or t
cttggctttatatatcttgtggaaaggacgaaacaccgtaatttctactaagtgtagatcccagtcagcgaggaactcctaatttctactaagtgtagattcgaaggacaatagatgatgtaatttctactaagtgtagatttttttnnnnnnnnnnaagcttggcgtggatccgatatcaactagatcttgagacaaatggcagtattcatccacaattttaaaagaaaaggggggattggggggtacagtgcaggggaaagaatagtagacataatagcaacagacatacaaactaaag

SEQ ID NO: 10738 - DNA, 301 bp, Artificial Sequence
  Kmt2d.1_Brca2.1
  crRNA array
  misc_feature (148)..(157): n is a, c, g, or t
cttggctttatatatcttgtggaaaggacgaaacaccgtaatttctactaagtgtagatactccaggccacccaggtggtaatttctactaagtgtagatctaagcgtagaaccagaaattaatttctactaagtgtagatttttttnnnnnnnnnnaagcttggcgtggatccgatatcaactagatcttgagacaaatggcagtattcatccacaattttaaaagaaaaggggggattggggggtacagtgcaggggaaagaatagtagacataatagcaacagacatacaaactaaag

SEQ ID NO: 10739 - DNA, 301 bp, Artificial Sequence
  Kmt2d.1_Brca2.2
  crRNA array
  misc_feature (148)..(157): n is a, c, g, or t
cttggctttatatatcttgtggaaaggacgaaacaccgtaatttctactaagtgtagatactccaggccacccaggtggtaatttctactaagtgtagatgatccaggtgtaacaagccataatttctactaagtgtagatttttttnnnnnnnnnnaagcttggcgtggatccgatatcaactagatcttgagacaaatggcagtattcatccacaattttaaaagaaaaggggggattggggggtacagtgcaggggaaagaatagtagacataatagcaacagacatacaaactaaag

SEQ ID NO: 10740 - DNA, 301 bp, Artificial Sequence
  Kmt2d.1_Brca2.3
  crRNA array
  misc_feature (148)..(157): n is a, c, g, or t
cttggctttatatatcttgtggaaaggacgaaacaccgtaatttctactaagtgtagatactccaggccacccaggtggtaatttctactaagtgtagattgaatataaactgggccacttaatttctactaagtgtagatttttttnnnnnnnnnnaagcttggcgtggatccgatatcaactagatcttgagacaaatggcagtattcatccacaattttaaaagaaaaggggggattggggggtacagtgcaggggaaagaatagtagacataatagcaacagacatacaaactaaag

SEQ ID NO: 10741 - DNA, 301 bp, Artificial Sequence
  Kmt2d.1_Brca2.4
  crRNA array
  misc_feature (148)..(157): n is a, c, g, or t
cttggctttatatatcttgtggaaaggacgaaacaccgtaatttctactaagtgtagatactccaggccacccaggtggtaatttctactaagtgtagatgaaacgccgtatatatagagtaatttctactaagtgtagatttttttnnnnnnnnnnaagcttggcgtggatccgatatcaactagatcttgagacaaatggcagtattcatccacaattttaaaagaaaaggggggattggggggtacagtgcaggggaaagaatagtagacataatagcaacagacatacaaactaaag

SEQ ID NO: 10742 - DNA, 301 bp, Artificial Sequence
  Kmt2d.2_Brca2.1
  crRNA array
  misc_feature (148)..(157): n is a, c, g, or t
cttggctttatatatcttgtggaaaggacgaaacaccgtaatttctactaagtgtagatggggaccatagccaggagagtaatttctactaagtgtagatctaagcgtagaaccagaaattaatttctactaagtgtagatttttttnnnnnnnnnnaagcttggcgtggatccgatatcaactagatcttgagacaaatggcagtattcatccacaattttaaaagaaaaggggggattggggggtacagtgcaggggaaagaatagtagacataatagcaacagacatacaaactaaag

SEQ ID NO: 10743 - DNA, 301 bp, Artificial Sequence
  Kmt2d.2_Brca2.2
  crRNA array
  misc_feature (148)..(157): n is a, c, g, or t
cttggctttatatatcttgtggaaaggacgaaacaccgtaatttctactaagtgtagatggggaccatagccaggagagtaatttctactaagtgtagatgatccaggtgtaacaagccataatttctactaagtgtagatttttttnnnnnnnnnnaagcttggcgtggatccgatatcaactagatcttgagacaaatggcagtattcatccacaattttaaaagaaaaggggggattggggggtacagtgcaggggaaagaatagtagacataatagcaacagacatacaaactaaag

SEQ ID NO: 10744 - DNA, 301 bp, Artificial Sequence
  Kmt2d.2_Brca2.3
  crRNA array
  misc_feature (148)..(157): n is a, c, g, or t
cttggctttatatatcttgtggaaaggacgaaacaccgtaatttctactaagtgtagatggggaccatagccaggagagtaatttctactaagtgtagattgaatataaactgggccacttaatttctactaagtgtagatttttttnnnnnnnnnnaagcttggcgtggatccgatatcaactagatcttgagacaaatggcagtattcatccacaattttaaaagaaaaggggggattggggggtacagtgcaggggaaagaatagtagacataatagcaacagacatacaaactaaag

SEQ ID NO: 10745 - DNA, 301 bp, Artificial Sequence
  Kmt2d.2_Brca2.4
  crRNA array
  misc_feature (148)..(157): n is a, c, g, or t
cttggctttatatatcttgtggaaaggacgaaacaccgtaatttctactaagtgtagatggggaccatagccaggagagtaatttctactaagtgtagatgaaacgccgtatatatagagtaatttctactaagtgtagatttttttnnnnnnnnnnaagcttggcgtggatccgatatcaactagatcttgagacaaatggcagtattcatccacaattttaaaagaaaaggggggattggggggtacagtgcaggggaaagaatagtagacataatagcaacagacatacaaactaaag

SEQ ID NO: 10746 - DNA, 301 bp, Artificial Sequence
  Kmt2d.3_Brca2.1
  crRNA array
  misc_feature (148)..(157): n is a, c, g, or t
cttggctttatatatcttgtggaaaggacgaaacaccgtaatttctactaagtgtagataggaaggggtcaggcgtggataatttctactaagtgtagatctaagcgtagaaccagaaattaatttctactaagtgtagatttttttnnnnnnnnnnaagcttggcgtggatccgatatcaactagatcttgagacaaatggcagtattcatccacaattttaaaagaaaaggggggattggggggtacagtgcaggggaaagaatagtagacataatagcaacagacatacaaactaaag

SEQ ID NO: 10747 - DNA, 301 bp, Artificial Sequence
  Kmt2d.3_Brca2.2
  crRNA array
  misc_feature (148)..(157): n is a, c, g, or t
cttggctttatatatcttgtggaaaggacgaaacaccgtaatttctactaagtgtagataggaaggggtcaggcgtggataatttctactaagtgtagatgatccaggtgtaacaagccataatttctactaagtgtagatttttttnnnnnnnnnnaagcttggcgtggatccgatatcaactagatcttgagacaaatggcagtattcatccacaattttaaaagaaaaggggggattggggggtacagtgcaggggaaagaatagtagacataatagcaacagacatacaaactaaag

SEQ ID NO: 10748 - DNA, 301 bp, Artificial Sequence
  Kmt2d.3_Brca2.3
  crRNA array
  misc_feature (148)..(157): n is a, c, g, or t
cttggctttatatatcttgtggaaaggacgaaacaccgtaatttctactaagtgtagataggaaggggtcaggcgtggataatttctactaagtgtagattgaatataaactgggccacttaatttctactaagtgtagatttttttnnnnnnnnnnaagcttggcgtggatccgatatcaactagatcttgagacaaatggcagtattcatccacaattttaaaagaaaaggggggattggggggtacagtgcaggggaaagaatagtagacataatagcaacagacatacaaactaaag

SEQ ID NO: 10749 - DNA, 301 bp, Artificial Sequence
  Kmt2d.3_Brca2.4
  crRNA array
  misc_feature (148)..(157): n is a, c, g, or t
cttggctttatatatcttgtggaaaggacgaaacaccgtaatttctactaagtgtagataggaaggggtcaggcgtggataatttctactaagtgtagatgaaacgccgtatatatagagtaatttctactaagtgtagatttttttnnnnnnnnnnaagcttggcgtggatccgatatcaactagatcttgagacaaatggcagtattcatccacaattttaaaagaaaaggggggattggggggtacagtgcaggggaaagaatagtagacataatagcaacagacatacaaactaaag

SEQ ID NO: 10750 - DNA, 301 bp, Artificial Sequence
  Kmt2d.4_Brca2.1
  crRNA array
  misc_feature (148)..(157): n is a, c, g, or t
cttggctttatatatcttgtggaaaggacgaaacaccgtaatttctactaagtgtagatcccagtcagcgaggaactcctaatttctactaagtgtagatctaagcgtagaaccagaaattaatttctactaagtgtagatttttttnnnnnnnnnnaagcttggcgtggatccgatatcaactagatcttgagacaaatggcagtattcatccacaattttaaaagaaaaggggggattggggggtacagtgcaggggaaagaatagtagacataatagcaacagacatacaaactaaag

SEQ ID NO: 10751 - DNA, 301 bp, Artificial Sequence
  Kmt2d.4_Brca2.2
  crRNA array
  misc_feature (148)..(157): n is a, c, g, or t
cttggctttatatatcttgtggaaaggacgaaacaccgtaatttctactaagtgtagatcccagtcagcgaggaactcctaatttctactaagtgtagatgatccaggtgtaacaagccataatttctactaagtgtagatttttttnnnnnnnnnnaagcttggcgtggatccgatatcaactagatcttgagacaaatggcagtattcatccacaattttaaaagaaaaggggggattggggggtacagtgcaggggaaagaatagtagacataatagcaacagacatacaaactaaag

SEQ ID NO: 10752 - DNA, 301 bp, Artificial Sequence
  Kmt2d.4_Brca2.3
  crRNA array
  misc_feature (148)..(157): n is a, c, g, or t
cttggctttatatatcttgtggaaaggacgaaacaccgtaatttctactaagtgtagatcccagtcagcgaggaactcctaatttctactaagtgtagattgaatataaactgggccacttaatttctactaagtgtagatttttttnnnnnnnnnnaagcttggcgtggatccgatatcaactagatcttgagacaaatggcagtattcatccacaattttaaaagaaaaggggggattggggggtacagtgcaggggaaagaatagtagacataatagcaacagacatacaaactaaag

SEQ ID NO: 10753 - DNA, 301 bp, Artificial Sequence
  Kmt2d.4_Brca2.4
  crRNA array
  misc_feature (148)..(157): n is a, c, g, or t
cttggctttatatatcttgtggaaaggacgaaacaccgtaatttctactaagtgtagatcccagtcagcgaggaactcctaatttctactaagtgtagatgaaacgccgtatatatagagtaatttctactaagtgtagatttttttnnnnnnnnnnaagcttggcgtggatccgatatcaactagatcttgagacaaatggcagtattcatccacaattttaaaagaaaaggggggattggggggtacagtgcaggggaaagaatagtagacataatagcaacagacatacaaactaaag

SEQ ID NO: 10754 - DNA, 301 bp, Artificial Sequence
  Kmt2d.1_Apc.1
  crRNA array
  misc_feature (148)..(157): n is a, c, g, or t
cttggctttatatatcttgtggaaaggacgaaacaccgtaatttctactaagtgtagatactccaggccacccaggtggtaatttctactaagtgtagatgtgatccacacgtgtagctgtaatttctactaagtgtagatttttttnnnnnnnnnnaagcttggcgtggatccgatatcaactagatcttgagacaaatggcagtattcatccacaattttaaaagaaaaggggggattggggggtacagtgcaggggaaagaatagtagacataatagcaacagacatacaaactaaag

SEQ ID NO: 10755 - DNA, 301 bp, Artificial Sequence
  Kmt2d.1_Apc.2
  crRNA array
  misc_feature (148)..(157): n is a, c, g, or t
cttggctttatatatcttgtggaaaggacgaaacaccgtaatttctactaagtgtagatactccaggccacccaggtggtaatttctactaagtgtagatcatctgctcgccaagacaaataatttctactaagtgtagatttttttnnnnnnnnnnaagcttggcgtggatccgatatcaactagatcttgagacaaatggcagtattcatccacaattttaaaagaaaaggggggattggggggtacagtgcaggggaaagaatagtagacataatagcaacagacatacaaactaaag

SEQ ID NO: 10756 - DNA, 301 bp, Artificial Sequence
  Kmt2d.1_Apc.3
  crRNA array
  misc_feature (148)..(157): n is a, c, g, or t
cttggctttatatatcttgtggaaaggacgaaacaccgtaatttctactaagtgtagatactccaggccacccaggtggtaatttctactaagtgtagatacgccaatcgacatgatgattaatttctactaagtgtagatttttttnnnnnnnnnnaagcttggcgtggatccgatatcaactagatcttgagacaaatggcagtattcatccacaattttaaaagaaaaggggggattggggggtacagtgcaggggaaagaatagtagacataatagcaacagacatacaaactaaag

SEQ ID NO: 10757 - DNA, 301 bp, Artificial Sequence
  Kmt2d.1_Apc.4
  crRNA array
  misc_feature (148)..(157): n is a, c, g, or t
cttggctttatatatcttgtggaaaggacgaaacaccgtaatttctactaagtgtagatactccaggccacccaggtggtaatttctactaagtgtagatcaccaggggatgatgtgccctaatttctactaagtgtagatttttttnnnnnnnnnnaagcttggcgtggatccgatatcaactagatcttgagacaaatggcagtattcatccacaattttaaaagaaaaggggggattggggggtacagtgcaggggaaagaatagtagacataatagcaacagacatacaaactaaag

SEQ ID NO: 10758 - DNA, 301 bp, Artificial Sequence
  Kmt2d.2_Apc.1
  crRNA array
  misc_feature (148)..(157): n is a, c, g, or t
cttggctttatatatcttgtggaaaggacgaaacaccgtaatttctactaagtgtagatggggaccatagccaggagagtaatttctactaagtgtagatgtgatccacacgtgtagctgtaatttctactaagtgtagatttttttnnnnnnnnnnaagcttggcgtggatccgatatcaactagatcttgagacaaatggcagtattcatccacaattttaaaagaaaaggggggattggggggtacagtgcaggggaaagaatagtagacataatagcaacagacatacaaactaaag

SEQ ID NO: 10759 - DNA, 301 bp, Artificial Sequence
  Kmt2d.2_Apc.2
  crRNA array
  misc_feature (148)..(157): n is a, c, g, or t
cttggctttatatatcttgtggaaaggacgaaacaccgtaatttctactaagtgtagatggggaccatagccaggagagtaatttctactaagtgtagatcatctgctcgccaagacaaataatttctactaagtgtagatttttttnnnnnnnnnnaagcttggcgtggatccgatatcaactagatcttgagacaaatggcagtattcatccacaattttaaaagaaaaggggggattggggggtacagtgcaggggaaagaatagtagacataatagcaacagacatacaaactaaag

SEQ ID NO: 10760 - DNA, 301 bp, Artificial Sequence
  Kmt2d.2_Apc.3
  crRNA array
  misc_feature (148)..(157): n is a, c, g, or t
cttggctttatatatcttgtggaaaggacgaaacaccgtaatttctactaagtgtagatggggaccatagccaggagagtaatttctactaagtgtagatacgccaatcgacatgatgattaatttctactaagtgtagatttttttnnnnnnnnnnaagcttggcgtggatccgatatcaactagatcttgagacaaatggcagtattcatccacaattttaaaagaaaaggggggattggggggtacagtgcaggggaaagaatagtagacataatagcaacagacatacaaactaaag

SEQ ID NO: 10761 - DNA, 301 bp, Artificial Sequence
  Kmt2d.2_Apc.4
  crRNA array
  misc_feature (148)..(157): n is a, c, g, or t
cttggctttatatatcttgtggaaaggacgaaacaccgtaatttctactaagtgtagatggggaccatagccaggagagtaatttctactaagtgtagatcaccaggggatgatgtgccctaatttctactaagtgtagatttttttnnnnnnnnnnaagcttggcgtggatccgatatcaactagatcttgagacaaatggcagtattcatccacaattttaaaagaaaaggggggattggggggtacagtgcaggggaaagaatagtagacataatagcaacagacatacaaactaaag

SEQ ID NO: 10762 - DNA, 301 bp, Artificial Sequence
  Kmt2d.3_Apc.1
  crRNA array
  misc_feature (148)..(157): n is a, c, g, or t
cttggctttatatatcttgtggaaaggacgaaacaccgtaatttctactaagtgtagataggaaggggtcaggcgtggataatttctactaagtgtagatgtgatccacacgtgtagctgtaatttctactaagtgtagatttttttnnnnnnnnnnaagcttggcgtggatccgatatcaactagatcttgagacaaatggcagtattcatccacaattttaaaagaaaaggggggattggggggtacagtgcaggggaaagaatagtagacataatagcaacagacatacaaactaaag

SEQ ID NO: 10763 - DNA, 301 bp, Artificial Sequence
  Kmt2d.3_Apc.2
  crRNA array
  misc_feature (148)..(157): n is a, c, g, or t
cttggctttatatatcttgtggaaaggacgaaacaccgtaatttctactaagtgtagataggaaggggtcaggcgtggataatttctactaagtgtagatcatctgctcgccaagacaaataatttctactaagtgtagatttttttnnnnnnnnnnaagcttggcgtggatccgatatcaactagatcttgagacaaatggcagtattcatccacaattttaaaagaaaaggggggattggggggtacagtgcaggggaaagaatagtagacataatagcaacagacatacaaactaaag

SEQ ID NO: 10764 - DNA, 301 bp, Artificial Sequence
  Kmt2d.3_Apc.3
  crRNA array
  misc_feature (148)..(157): n is a, c, g, or t
cttggctttatatatcttgtggaaaggacgaaacaccgtaatttctactaagtgtagataggaaggggtcaggcgtggataatttctactaagtgtagatacgccaatcgacatgatgattaatttctactaagtgtagatttttttnnnnnnnnnnaagcttggcgtggatccgatatcaactagatcttgagacaaatggcagtattcatccacaattttaaaagaaaaggggggattggggggtacagtgcaggggaaagaatagtagacataatagcaacagacatacaaactaaag

SEQ ID NO: 10765 - DNA, 301 bp, Artificial Sequence
  Kmt2d.3_Apc.4
  crRNA array
  misc_feature (148)..(157): n is a, c, g, or t
cttggctttatatatcttgtggaaaggacgaaacaccgtaatttctactaagtgtagataggaaggggtcaggcgtggataatttctactaagtgtagatcaccaggggatgatgtgccctaatttctactaagtgtagatttttttnnnnnnnnnnaagcttggcgtggatccgatatcaactagatcttgagacaaatggcagtattcatccacaattttaaaagaaaaggggggattggggggtacagtgcaggggaaagaatagtagacataatagcaacagacatacaaactaaag

SEQ ID NO: 10766 - DNA, 301 bp, Artificial Sequence
  Kmt2d.4_Apc.1
  crRNA array
  misc_feature (148)..(157): n is a, c, g, or t
cttggctttatatatcttgtggaaaggacgaaacaccgtaatttctactaagtgtagatcccagtcagcgaggaactcctaatttctactaagtgtagatgtgatccacacgtgtagctgtaatttctactaagtgtagatttttttnnnnnnnnnnaagcttggcgtggatccgatatcaactagatcttgagacaaatggcagtattcatccacaattttaaaagaaaaggggggattggggggtacagtgcaggggaaagaatagtagacataatagcaacagacatacaaactaaag

SEQ ID NO: 10767 - DNA, 301 bp, Artificial Sequence
  Kmt2d.4_Apc.2
  crRNA array
  misc_feature (148)..(157): n is a, c, g, or t
cttggctttatatatcttgtggaaaggacgaaacaccgtaatttctactaagtgtagatcccagtcagcgaggaactcctaatttctactaagtgtagatcatctgctcgccaagacaaataatttctactaagtgtagatttttttnnnnnnnnnnaagcttggcgtggatccgatatcaactagatcttgagacaaatggcagtattcatccacaattttaaaagaaaaggggggattggggggtacagtgcaggggaaagaatagtagacataatagcaacagacatacaaactaaag

SEQ ID NO: 10768 - DNA, 301 bp, Artificial Sequence
  Kmt2d.4_Apc.3
  crRNA array
  misc_feature (148)..(157): n is a, c, g, or t
cttggctttatatatcttgtggaaaggacgaaacaccgtaatttctactaagtgtagatcccagtcagcgaggaactcctaatttctactaagtgtagatacgccaatcgacatgatgattaatttctactaagtgtagatttttttnnnnnnnnnnaagcttggcgtggatccgatatcaactagatcttgagacaaatggcagtattcatccacaattttaaaagaaaaggggggattggggggtacagtgcaggggaaagaatagtagacataatagcaacagacatacaaactaaag

SEQ ID NO: 10769 - DNA, 301 bp, Artificial Sequence
  Kmt2d.4_Apc.4
  crRNA array
  misc_feature (148)..(157): n is a, c, g, or t
cttggctttatatatcttgtggaaaggacgaaacaccgtaatttctactaagtgtagatcccagtcagcgaggaactcctaatttctactaagtgtagatcaccaggggatgatgtgccctaatttctactaagtgtagatttttttnnnnnnnnnnaagcttggcgtggatccgatatcaactagatcttgagacaaatggcagtattcatccacaattttaaaagaaaaggggggattggggggtacagtgcaggggaaagaatagtagacataatagcaacagacatacaaactaaag

SEQ ID NO: 10770 - DNA, 301 bp, Artificial Sequence
  Kmt2d.1_Fanca.1
  crRNA array
  misc_feature (148)..(157): n is a, c, g, or t
cttggctttatatatcttgtggaaaggacgaaacaccgtaatttctactaagtgtagatactccaggccacccaggtggtaatttctactaagtgtagatggaggccccggggcccaccataatttctactaagtgtagatttttttnnnnnnnnnnaagcttggcgtggatccgatatcaactagatcttgagacaaatggcagtattcatccacaattttaaaagaaaaggggggattggggggtacagtgcaggggaaagaatagtagacataatagcaacagacatacaaactaaag

SEQ ID NO: 10771 - DNA, 301 bp, Artificial Sequence
  Kmt2d.1_Fanca.2
  crRNA array
  misc_feature (148)..(157): n is a, c, g, or t
cttggctttatatatcttgtggaaaggacgaaacaccgtaatttctactaagtgtagatactccaggccacccaggtggtaatttctactaagtgtagatagagctaccacctagacagctaatttctactaagtgtagatttttttnnnnnnnnnnaagcttggcgtggatccgatatcaactagatcttgagacaaatggcagtattcatccacaattttaaaagaaaaggggggattggggggtacagtgcaggggaaagaatagtagacataatagcaacagacatacaaactaaag

SEQ ID NO: 10772 - DNA, 301 bp, Artificial Sequence
  Kmt2d.1_Fanca.3
  crRNA array
  misc_feature (148)..(157): n is a, c, g, or t
cttggctttatatatcttgtggaaaggacgaaacaccgtaatttctactaagtgtagatactccaggccacccaggtggtaatttctactaagtgtagataccaactgctgtgcctcgggtaatttctactaagtgtagatttttttnnnnnnnnnnaagcttggcgtggatccgatatcaactagatcttgagacaaatggcagtattcatccacaattttaaaagaaaaggggggattggggggtacagtgcaggggaaagaatagtagacataatagcaacagacatacaaactaaag

SEQ ID NO: 10773 - DNA, 301 bp, Artificial Sequence
  Kmt2d.1_Fanca.4
  crRNA array
  misc_feature (148)..(157): n is a, c, g, or t
cttggctttatatatcttgtggaaaggacgaaacaccgtaatttctactaagtgtagatactccaggccacccaggtggtaatttctactaagtgtagatcacccacccctggtgccaagtaatttctactaagtgtagatttttttnnnnnnnnnnaagcttggcgtggatccgatatcaactagatcttgagacaaatggcagtattcatccacaattttaaaagaaaaggggggattggggggtacagtgcaggggaaagaatagtagacataatagcaacagacatacaaactaaag

SEQ ID NO: 10774 - DNA, 301 bp, Artificial Sequence
  Kmt2d.2_Fanca.1
  crRNA array
  misc_feature (148)..(157): n is a, c, g, or t
cttggctttatatatcttgtggaaaggacgaaacaccgtaatttctactaagtgtagatggggaccatagccaggagagtaatttctactaagtgtagatggaggccccggggcccaccataatttctactaagtgtagatttttttnnnnnnnnnnaagcttggcgtggatccgatatcaactagatcttgagacaaatggcagtattcatccacaattttaaaagaaaaggggggattggggggtacagtgcaggggaaagaatagtagacataatagcaacagacatacaaactaaag

SEQ ID NO: 10775 - DNA, 301 bp, Artificial Sequence
  Kmt2d.2_Fanca.2
  crRNA array
  misc_feature (148)..(157): n is a, c, g, or t
cttggctttatatatcttgtggaaaggacgaaacaccgtaatttctactaagtgtagatggggaccatagccaggagagtaatttctactaagtgtagatagagctaccacctagacagctaatttctactaagtgtagatttttttnnnnnnnnnnaagcttggcgtggatccgatatcaactagatcttgagacaaatggcagtattcatccacaattttaaaagaaaaggggggattggggggtacagtgcaggggaaagaatagtagacataatagcaacagacatacaaactaaag

SEQ ID NO: 10776 - DNA, 301 bp, Artificial Sequence
  Kmt2d.2_Fanca.3
  crRNA array
  misc_feature (148)..(157): n is a, c, g, or t
cttggctttatatatcttgtggaaaggacgaaacaccgtaatttctactaagtgtagatggggaccatagccaggagagtaatttctactaagtgtagataccaactgctgtgcctcgggtaatttctactaagtgtagatttttttnnnnnnnnnnaagcttggcgtggatccgatatcaactagatcttgagacaaatggcagtattcatccacaattttaaaagaaaaggggggattggggggtacagtgcaggggaaagaatagtagacataatagcaacagacatacaaactaaag

SEQ ID NO: 10777 - DNA, 301 bp, Artificial Sequence
  Kmt2d.2_Fanca.4
  crRNA array
  misc_feature (148)..(157): n is a, c, g, or t
cttggctttatatatcttgtggaaaggacgaaacaccgtaatttctactaagtgtagatggggaccatagccaggagagtaatttctactaagtgtagatcacccacccctggtgccaagtaatttctactaagtgtagatttttttnnnnnnnnnnaagcttggcgtggatccgatatcaactagatcttgagacaaatggcagtattcatccacaattttaaaagaaaaggggggattggggggtacagtgcaggggaaagaatagtagacataatagcaacagacatacaaactaaag

SEQ ID NO: 10778 - DNA, 301 bp, Artificial Sequence
  Kmt2d.3_Fanca.1
  crRNA array
  misc_feature (148)..(157): n is a, c, g, or t
cttggctttatatatcttgtggaaaggacgaaacaccgtaatttctactaagtgtagataggaaggggtcaggcgtggataatttctactaagtgtagatggaggccccggggcccaccataatttctactaagtgtagatttttttnnnnnnnnnnaagcttggcgtggatccgatatcaactagatcttgagacaaatggcagtattcatccacaattttaaaagaaaaggggggattggggggtacagtgcaggggaaagaatagtagacataatagcaacagacatacaaactaaag

SEQ ID NO: 10779 - DNA, 301 bp, Artificial Sequence
  Kmt2d.3_Fanca.2
  crRNA array
  misc_feature (148)..(157): n is a, c, g, or t
cttggctttatatatcttgtggaaaggacgaaacaccgtaatttctactaagtgtagataggaaggggtcaggcgtggataatttctactaagtgtagatagagctaccacctagacagctaatttctactaagtgtagatttttttnnnnnnnnnnaagcttggcgtggatccgatatcaactagatcttgagacaaatggcagtattcatccacaattttaaaagaaaaggggggattggggggtacagtgcaggggaaagaatagtagacataatagcaacagacatacaaactaaag

SEQ ID NO: 10780 - DNA, 301 bp, Artificial Sequence
  Kmt2d.3_Fanca.3
  crRNA array
  misc_feature (148)..(157): n is a, c, g, or t
cttggctttatatatcttgtggaaaggacgaaacaccgtaatttctactaagtgtagataggaaggggtcaggcgtggataatttctactaagtgtagataccaactgctgtgcctcgggtaatttctactaagtgtagatttttttnnnnnnnnnnaagcttggcgtggatccgatatcaactagatcttgagacaaatggcagtattcatccacaattttaaaagaaaaggggggattggggggtacagtgcaggggaaagaatagtagacataatagcaacagacatacaaactaaag

SEQ ID NO: 10781 - DNA, 301 bp, Artificial Sequence
  Kmt2d.3_Fanca.4
  crRNA array
  misc_feature (148)..(157): n is a, c, g, or t
cttggctttatatatcttgtggaaaggacgaaacaccgtaatttctactaagtgtagataggaaggggtcaggcgtggataatttctactaagtgtagatcacccacccctggtgccaagtaatttctactaagtgtagatttttttnnnnnnnnnnaagcttggcgtggatccgatatcaactagatcttgagacaaatggcagtattcatccacaattttaaaagaaaaggggggattggggggtacagtgcaggggaaagaatagtagacataatagcaacagacatacaaactaaag

SEQ ID NO: 10782 - DNA, 301 bp, Artificial Sequence
  Kmt2d.4_Fanca.1
  crRNA array
  misc_feature (148)..(157): n is a, c, g, or t
cttggctttatatatcttgtggaaaggacgaaacaccgtaatttctactaagtgtagatcccagtcagcgaggaactcctaatttctactaagtgtagatggaggccccggggcccaccataatttctactaagtgtagatttttttnnnnnnnnnnaagcttggcgtggatccgatatcaactagatcttgagacaaatggcagtattcatccacaattttaaaagaaaaggggggattggggggtacagtgcaggggaaagaatagtagacataatagcaacagacatacaaactaaag

SEQ ID NO: 10783 - DNA, 301 bp, Artificial Sequence
  Kmt2d.4_Fanca.2
  crRNA array
  misc_feature (148)..(157): n is a, c, g, or t
cttggctttatatatcttgtggaaaggacgaaacaccgtaatttctactaagtgtagatcccagtcagcgaggaactcctaatttctactaagtgtagatagagctaccacctagacagctaatttctactaagtgtagatttttttnnnnnnnnnnaagcttggcgtggatccgatatcaactagatcttgagacaaatggcagtattcatccacaattttaaaagaaaaggggggattggggggtacagtgcaggggaaagaatagtagacataatagcaacagacatacaaactaaag

SEQ ID NO: 10784 - DNA, 301 bp, Artificial Sequence
  Kmt2d.4_Fanca.3
  crRNA array
  misc_feature (148)..(157): n is a, c, g, or t
cttggctttatatatcttgtggaaaggacgaaacaccgtaatttctactaagtgtagatcccagtcagcgaggaactcctaatttctactaagtgtagataccaactgctgtgcctcgggtaatttctactaagtgtagatttttttnnnnnnnnnnaagcttggcgtggatccgatatcaactagatcttgagacaaatggcagtattcatccacaattttaaaagaaaaggggggattggggggtacagtgcaggggaaagaatagtagacataatagcaacagacatacaaactaaag

SEQ ID NO: 10785 - DNA, 301 bp, Artificial Sequence
  Kmt2d.4_Fanca.4
  crRNA array
  misc_feature (148)..(157): n is a, c, g, or t
cttggctttatatatcttgtggaaaggacgaaacaccgtaatttctactaagtgtagatcccagtcagcgaggaactcctaatttctactaagtgtagatcacccacccctggtgccaagtaatttctactaagtgtagatttttttnnnnnnnnnnaagcttggcgtggatccgatatcaactagatcttgagacaaatggcagtattcatccacaattttaaaagaaaaggggggattggggggtacagtgcaggggaaagaatagtagacataatagcaacagacatacaaactaaag

SEQ ID NO: 10786 - DNA, 301 bp, Artificial Sequence
  Kmt2d.1_Nf1.1
  crRNA array
  misc_feature (148)..(157): n is a, c, g, or t
cttggctttatatatcttgtggaaaggacgaaacaccgtaatttctactaagtgtagatactccaggccacccaggtggtaatttctactaagtgtagattggcgatccggaatcctctgtaatttctactaagtgtagatttttttnnnnnnnnnnaagcttggcgtggatccgatatcaactagatcttgagacaaatggcagtattcatccacaattttaaaagaaaaggggggattggggggtacagtgcaggggaaagaatagtagacataatagcaacagacatacaaactaaag

SEQ ID NO: 10787 - DNA, 301 bp, Artificial Sequence
  Kmt2d.1_Nf1.2
  crRNA array
  misc_feature (148)..(157): n is a, c, g, or t
cttggctttatatatcttgtggaaaggacgaaacaccgtaatttctactaagtgtagatactccaggccacccaggtggtaatttctactaagtgtagatggaaacacaacgctggcctctaatttctactaagtgtagatttttttnnnnnnnnnnaagcttggcgtggatccgatatcaactagatcttgagacaaatggcagtattcatccacaattttaaaagaaaaggggggattggggggtacagtgcaggggaaagaatagtagacataatagcaacagacatacaaactaaag

SEQ ID NO: 10788 - DNA, 301 bp, Artificial Sequence
  Kmt2d.1_Nf1.3
  crRNA array
  misc_feature (148)..(157): n is a, c, g, or t
cttggctttatatatcttgtggaaaggacgaaacaccgtaatttctactaagtgtagatactccaggccacccaggtggtaatttctactaagtgtagataatgatggaacgcagtcgcataatttctactaagtgtagatttttttnnnnnnnnnnaagcttggcgtggatccgatatcaactagatcttgagacaaatggcagtattcatccacaattttaaaagaaaaggggggattggggggtacagtgcaggggaaagaatagtagacataatagcaacagacatacaaactaaag

SEQ ID NO: 10789 - DNA, 301 bp, Artificial Sequence
  Kmt2d.1_Nf1.4
  crRNA array
  misc_feature (148)..(157): n is a, c, g, or t
cttggctttatatatcttgtggaaaggacgaaacaccgtaatttctactaagtgtagatactccaggccacccaggtggtaatttctactaagtgtagattgcaaaaccatccaccaagttaatttctactaagtgtagatttttttnnnnnnnnnnaagcttggcgtggatccgatatcaactagatcttgagacaaatggcagtattcatccacaattttaaaagaaaaggggggattggggggtacagtgcaggggaaagaatagtagacataatagcaacagacatacaaactaaag

SEQ ID NO: 10790 - DNA, 301 bp, Artificial Sequence
  Kmt2d.2_Nf1.1
  crRNA array
  misc_feature (148)..(157): n is a, c, g, or t
cttggctttatatatcttgtggaaaggacgaaacaccgtaatttctactaagtgtagatggggaccatagccaggagagtaatttctactaagtgtagattggcgatccggaatcctctgtaatttctactaagtgtagatttttttnnnnnnnnnnaagcttggcgtggatccgatatcaactagatcttgagacaaatggcagtattcatccacaattttaaaagaaaaggggggattggggggtacagtgcaggggaaagaatagtagacataatagcaacagacatacaaactaaag

SEQ ID NO: 10791 - DNA, 301 bp, Artificial Sequence
  Kmt2d.2_Nf1.2
  crRNA array
  misc_feature (148)..(157): n is a, c, g, or t
cttggctttatatatcttgtggaaaggacgaaacaccgtaatttctactaagtgtagatggggaccatagccaggagagtaatttctactaagtgtagatggaaacacaacgctggcctctaatttctactaagtgtagatttttttnnnnnnnnnnaagcttggcgtggatccgatatcaactagatcttgagacaaatggcagtattcatccacaattttaaaagaaaaggggggattggggggtacagtgcaggggaaagaatagtagacataatagcaacagacatacaaactaaag

SEQ ID NO: 10792 - DNA, 301 bp, Artificial Sequence
  Kmt2d.2_Nf1.3
  crRNA array
  misc_feature (148)..(157): n is a, c, g, or t
cttggctttatatatcttgtggaaaggacgaaacaccgtaatttctactaagtgtagatggggaccatagccaggagagtaatttctactaagtgtagataatgatggaacgcagtcgcataatttctactaagtgtagatttttttnnnnnnnnnnaagcttggcgtggatccgatatcaactagatcttgagacaaatggcagtattcatccacaattttaaaagaaaaggggggattggggggtacagtgcaggggaaagaatagtagacataatagcaacagacatacaaactaaag

SEQ ID NO: 10793 - DNA, 301 bp, Artificial Sequence
  Kmt2d.2_Nf1.4
  crRNA array
  misc_feature (148)..(157): n is a, c, g, or t
cttggctttatatatcttgtggaaaggacgaaacaccgtaatttctactaagtgtagatggggaccatagccaggagagtaatttctactaagtgtagattgcaaaaccatccaccaagttaatttctactaagtgtagatttttttnnnnnnnnnnaagcttggcgtggatccgatatcaactagatcttgagacaaatggcagtattcatccacaattttaaaagaaaaggggggattggggggtacagtgcaggggaaagaatagtagacataatagcaacagacatacaaactaaag

SEQ ID NO: 10794 - DNA, 301 bp, Artificial Sequence
  Kmt2d.3_Nf1.1
  crRNA array
  misc_feature (148)..(157): n is a, c, g, or t
cttggctttatatatcttgtggaaaggacgaaacaccgtaatttctactaagtgtagataggaaggggtcaggcgtggataatttctactaagtgtagattggcgatccggaatcctctgtaatttctactaagtgtagatttttttnnnnnnnnnnaagcttggcgtggatccgatatcaactagatcttgagacaaatggcagtattcatccacaattttaaaagaaaaggggggattggggggtacagtgcaggggaaagaatagtagacataatagcaacagacatacaaactaaag

SEQ ID NO: 10795 - DNA, 301 bp, Artificial Sequence
  Kmt2d.3_Nf1.2
  crRNA array
  misc_feature (148)..(157): n is a, c, g, or t
cttggctttatatatcttgtggaaaggacgaaacaccgtaatttctactaagtgtagataggaaggggtcaggcgtggataatttctactaagtgtagatggaaacacaacgctggcctctaatttctactaagtgtagatttttttnnnnnnnnnnaagcttggcgtggatccgatatcaactagatcttgagacaaatggcagtattcatccacaattttaaaagaaaaggggggattggggggtacagtgcaggggaaagaatagtagacataatagcaacagacatacaaactaaag

SEQ ID NO: 10796 - DNA, 301 bp, Artificial Sequence
  Kmt2d.3_Nf1.3
  crRNA array
  misc_feature (148)..(157): n is a, c, g, or t
cttggctttatatatcttgtggaaaggacgaaacaccgtaatttctactaagtgtagataggaaggggtcaggcgtggataatttctactaagtgtagataatgatggaacgcagtcgcataatttctactaagtgtagatttttttnnnnnnnnnnaagcttggcgtggatccgatatcaactagatcttgagacaaatggcagtattcatccacaattttaaaagaaaaggggggattggggggtacagtgcaggggaaagaatagtagacataatagcaacagacatacaaactaaag

SEQ ID NO: 10797 - DNA, 301 bp, Artificial Sequence
  Kmt2d.3_Nf1.4
  crRNA array
  misc_feature (148)..(157): n is a, c, g, or t
cttggctttatatatcttgtggaaaggacgaaacaccgtaatttctactaagtgtagataggaaggggtcaggcgtggataatttctactaagtgtagattgcaaaaccatccaccaagttaatttctactaagtgtagatttttttnnnnnnnnnnaagcttggcgtggatccgatatcaactagatcttgagacaaatggcagtattcatccacaattttaaaagaaaaggggggattggggggtacagtgcaggggaaagaatagtagacataatagcaacagacatacaaactaaag

SEQ ID NO: 10798 - DNA, 301 bp, Artificial Sequence
  Kmt2d.4_Nf1.1
  crRNA array
  misc_feature (148)..(157): n is a, c, g, or t
cttggctttatatatcttgtggaaaggacgaaacaccgtaatttctactaagtgtagatcccagtcagcgaggaactcctaatttctactaagtgtagattggcgatccggaatcctctgtaatttctactaagtgtagatttttttnnnnnnnnnnaagcttggcgtggatccgatatcaactagatcttgagacaaatggcagtattcatccacaattttaaaagaaaaggggggattggggggtacagtgcaggggaaagaatagtagacataatagcaacagacatacaaactaaag

SEQ ID NO: 10799 - DNA, 301 bp, Artificial Sequence
  Kmt2d.4_Nf1.2
  crRNA array
  misc_feature (148)..(157): n is a, c, g, or t
cttggctttatatatcttgtggaaaggacgaaacaccgtaatttctactaagtgtagatcccagtcagcgaggaactcctaatttctactaagtgtagatggaaacacaacgctggcctctaatttctactaagtgtagatttttttnnnnnnnnnnaagcttggcgtggatccgatatcaactagatcttgagacaaatggcagtattcatccacaattttaaaagaaaaggggggattggggggtacagtgcaggggaaagaatagtagacataatagcaacagacatacaaactaaag

SEQ ID NO: 10800 - DNA, 301 bp, Artificial Sequence
  Kmt2d.4_Nf1.3
  crRNA array
  misc_feature (148)..(157): n is a, c, g, or t
cttggctttatatatcttgtggaaaggacgaaacaccgtaatttctactaagtgtagatcccagtcagcgaggaactcctaatttctactaagtgtagataatgatggaacgcagtcgcataatttctactaagtgtagatttttttnnnnnnnnnnaagcttggcgtggatccgatatcaactagatcttgagacaaatggcagtattcatccacaattttaaaagaaaaggggggattggggggtacagtgcaggggaaagaatagtagacataatagcaacagacatacaaactaaag

SEQ ID NO: 10801 - DNA, 301 bp, Artificial Sequence
  Kmt2d.4_Nf1.4
  crRNA array
  misc_feature (148)..(157): n is a, c, g, or t
cttggctttatatatcttgtggaaaggacgaaacaccgtaatttctactaagtgtagatcccagtcagcgaggaactcctaatttctactaagtgtagattgcaaaaccatccaccaagttaatttctactaagtgtagatttttttnnnnnnnnnnaagcttggcgtggatccgatatcaactagatcttgagacaaatggcagtattcatccacaattttaaaagaaaaggggggattggggggtacagtgcaggggaaagaatagtagacataatagcaacagacatacaaactaaag

SEQ ID NO: 10802 - DNA, 301 bp, Artificial Sequence
  Kmt2d.1_Kdm6a.1
  crRNA array
  misc_feature (148)..(157): n is a, c, g, or t
cttggctttatatatcttgtggaaaggacgaaacaccgtaatttctactaagtgtagatactccaggccacccaggtggtaatttctactaagtgtagatgctgccgcctctcgcggcagtaatttctactaagtgtagatttttttnnnnnnnnnnaagcttggcgtggatccgatatcaactagatcttgagacaaatggcagtattcatccacaattttaaaagaaaaggggggattggggggtacagtgcaggggaaagaatagtagacataatagcaacagacatacaaactaaag

SEQ ID NO: 10803 - DNA, 301 bp, Artificial Sequence
  Kmt2d.1_Kdm6a.2
  crRNA array
  misc_feature (148)..(157): n is a, c, g, or t
cttggctttatatatcttgtggaaaggacgaaacaccgtaatttctactaagtgtagatactccaggccacccaggtggtaatttctactaagtgtagatgctgcaggtaaggcacgttttaatttctactaagtgtagatttttttnnnnnnnnnnaagcttggcgtggatccgatatcaactagatcttgagacaaatggcagtattcatccacaattttaaaagaaaaggggggattggggggtacagtgcaggggaaagaatagtagacataatagcaacagacatacaaactaaag

SEQ ID NO: 10804 - DNA, 301 bp, Artificial Sequence
  Kmt2d.1_Kdm6a.3
  crRNA array
  misc_feature (148)..(157): n is a, c, g, or t
cttggctttatatatcttgtggaaaggacgaaacaccgtaatttctactaagtgtagatactccaggccacccaggtggtaatttctactaagtgtagattgctggtgccggggaagttttaatttctactaagtgtagatttttttnnnnnnnnnnaagcttggcgtggatccgatatcaactagatcttgagacaaatggcagtattcatccacaattttaaaagaaaaggggggattggggggtacagtgcaggggaaagaatagtagacataatagcaacagacatacaaactaaag

SEQ ID NO: 10805 - DNA, 301 bp, Artificial Sequence
  Kmt2d.1_Kdm6a.4
  crRNA array
  misc_feature (148)..(157): n is a, c, g, or t
cttggctttatatatcttgtggaaaggacgaaacaccgtaatttctactaagtgtagatactccaggccacccaggtggtaatttctactaagtgtagattgtctcctacgaatcccccctaatttctactaagtgtagatttttttnnnnnnnnnnaagcttggcgtggatccgatatcaactagatcttgagacaaatggcagtattcatccacaattttaaaagaaaaggggggattggggggtacagtgcaggggaaagaatagtagacataatagcaacagacatacaaactaaag

SEQ ID NO: 10806 - DNA, 301 bp, Artificial Sequence
  Kmt2d.2_Kdm6a.1
  crRNA array
  misc_feature (148)..(157): n is a, c, g, or t
cttggctttatatatcttgtggaaaggacgaaacaccgtaatttctactaagtgtagatggggaccatagccaggagagtaatttctactaagtgtagatgctgccgcctctcgcggcagtaatttctactaagtgtagatttttttnnnnnnnnnnaagcttggcgtggatccgatatcaactagatcttgagacaaatggcagtattcatccacaattttaaaagaaaaggggggattggggggtacagtgcaggggaaagaatagtagacataatagcaacagacatacaaactaaag

SEQ ID NO: 10807 - DNA, 301 bp, Artificial Sequence
  Kmt2d.2_Kdm6a.2
  crRNA array
  misc_feature (148)..(157): n is a, c, g, or t
cttggctttatatatcttgtggaaaggacgaaacaccgtaatttctactaagtgtagatggggaccatagccaggagagtaatttctactaagtgtagatgctgcaggtaaggcacgttttaatttctactaagtgtagatttttttnnnnnnnnnnaagcttggcgtggatccgatatcaactagatcttgagacaaatggcagtattcatccacaattttaaaagaaaaggggggattggggggtacagtgcaggggaaagaatagtagacataatagcaacagacatacaaactaaag

SEQ ID NO: 10808 - DNA, 301 bp, Artificial Sequence
  Kmt2d.2_Kdm6a.3
  crRNA array
  misc_feature (148)..(157): n is a, c, g, or t
cttggctttatatatcttgtggaaaggacgaaacaccgtaatttctactaagtgtagatggggaccatagccaggagagtaatttctactaagtgtagattgctggtgccggggaagttttaatttctactaagtgtagatttttttnnnnnnnnnnaagcttggcgtggatccgatatcaactagatcttgagacaaatggcagtattcatccacaattttaaaagaaaaggggggattggggggtacagtgcaggggaaagaatagtagacataatagcaacagacatacaaactaaag

SEQ ID NO: 10809 - DNA, 301 bp, Artificial Sequence
  Kmt2d.2_Kdm6a.4
  crRNA array
  misc_feature (148)..(157): n is a, c, g, or t
cttggctttatatatcttgtggaaaggacgaaacaccgtaatttctactaagtgtagatggggaccatagccaggagagtaatttctactaagtgtagattgtctcctacgaatcccccctaatttctactaagtgtagatttttttnnnnnnnnnnaagcttggcgtggatccgatatcaactagatcttgagacaaatggcagtattcatccacaattttaaaagaaaaggggggattggggggtacagtgcaggggaaagaatagtagacataatagcaacagacatacaaactaaag

SEQ ID NO: 10810 - DNA, 301 bp, Artificial Sequence
  Kmt2d.3_Kdm6a.1
  crRNA array
  misc_feature (148)..(157): n is a, c, g, or t
cttggctttatatatcttgtggaaaggacgaaacaccgtaatttctactaagtgtagataggaaggggtcaggcgtggataatttctactaagtgtagatgctgccgcctctcgcggcagtaatttctactaagtgtagatttttttnnnnnnnnnnaagcttggcgtggatccgatatcaactagatcttgagacaaatggcagtattcatccacaattttaaaagaaaaggggggattggggggtacagtgcaggggaaagaatagtagacataatagcaacagacatacaaactaaag

SEQ ID NO: 10811 - DNA, 301 bp, Artificial Sequence
  Kmt2d.3_Kdm6a.2
  crRNA array
  misc_feature (148)..(157): n is a, c, g, or t
cttggctttatatatcttgtggaaaggacgaaacaccgtaatttctactaagtgtagataggaaggggtcaggcgtggataatttctactaagtgtagatgctgcaggtaaggcacgttttaatttctactaagtgtagatttttttnnnnnnnnnnaagcttggcgtggatccgatatcaactagatcttgagacaaatggcagtattcatccacaattttaaaagaaaaggggggattggggggtacagtgcaggggaaagaatagtagacataatagcaacagacatacaaactaaag

SEQ ID NO: 10812 - DNA, 301 bp, Artificial Sequence
  Kmt2d.3_Kdm6a.3
  crRNA array
  misc_feature (148)..(157): n is a, c, g, or t
cttggctttatatatcttgtggaaaggacgaaacaccgtaatttctactaagtgtagataggaaggggtcaggcgtggataatttctactaagtgtagattgctggtgccggggaagttttaatttctactaagtgtagatttttttnnnnnnnnnnaagcttggcgtggatccgatatcaactagatcttgagacaaatggcagtattcatccacaattttaaaagaaaaggggggattggggggtacagtgcaggggaaagaatagtagacataatagcaacagacatacaaactaaag

SEQ ID NO: 10813 - DNA, 301 bp, Artificial Sequence
  Kmt2d.3_Kdm6a.4
  crRNA array
  misc_feature (148)..(157): n is a, c, g, or t
cttggctttatatatcttgtggaaaggacgaaacaccgtaatttctactaagtgtagataggaaggggtcaggcgtggataatttctactaagtgtagattgtctcctacgaatcccccctaatttctactaagtgtagatttttttnnnnnnnnnnaagcttggcgtggatccgatatcaactagatcttgagacaaatggcagtattcatccacaattttaaaagaaaaggggggattggggggtacagtgcaggggaaagaatagtagacataatagcaacagacatacaaactaaag

SEQ ID NO: 10814 - DNA, 301 bp, Artificial Sequence
  Kmt2d.4_Kdm6a.1
  crRNA array
  misc_feature (148)..(157): n is a, c, g, or t
cttggctttatatatcttgtggaaaggacgaaacaccgtaatttctactaagtgtagatcccagtcagcgaggaactcctaatttctactaagtgtagatgctgccgcctctcgcggcagtaatttctactaagtgtagatttttttnnnnnnnnnnaagcttggcgtggatccgatatcaactagatcttgagacaaatggcagtattcatccacaattttaaaagaaaaggggggattggggggtacagtgcaggggaaagaatagtagacataatagcaacagacatacaaactaaag

SEQ ID NO: 10815 - DNA, 301 bp, Artificial Sequence
  Kmt2d.4_Kdm6a.2
  crRNA array
  misc_feature (148)..(157): n is a, c, g, or t
cttggctttatatatcttgtggaaaggacgaaacaccgtaatttctactaagtgtagatcccagtcagcgaggaactcctaatttctactaagtgtagatgctgcaggtaaggcacgttttaatttctactaagtgtagatttttttnnnnnnnnnnaagcttggcgtggatccgatatcaactagatcttgagacaaatggcagtattcatccacaattttaaaagaaaaggggggattggggggtacagtgcaggggaaagaatagtagacataatagcaacagacatacaaactaaag

SEQ ID NO: 10816 - DNA, 301 bp, Artificial Sequence
  Kmt2d.4_Kdm6a.3
  crRNA array
  misc_feature (148)..(157): n is a, c, g, or t
cttggctttatatatcttgtggaaaggacgaaacaccgtaatttctactaagtgtagatcccagtcagcgaggaactcctaatttctactaagtgtagattgctggtgccggggaagttttaatttctactaagtgtagatttttttnnnnnnnnnnaagcttggcgtggatccgatatcaactagatcttgagacaaatggcagtattcatccacaattttaaaagaaaaggggggattggggggtacagtgcaggggaaagaatagtagacataatagcaacagacatacaaactaaag

SEQ ID NO: 10817 - DNA, 301 bp, Artificial Sequence
  Kmt2d.4_Kdm6a.4
  crRNA array
  misc_feature (148)..(157): n is a, c, g, or t
cttggctttatatatcttgtggaaaggacgaaacaccgtaatttctactaagtgtagatcccagtcagcgaggaactcctaatttctactaagtgtagattgtctcctacgaatcccccctaatttctactaagtgtagatttttttnnnnnnnnnnaagcttggcgtggatccgatatcaactagatcttgagacaaatggcagtattcatccacaattttaaaagaaaaggggggattggggggtacagtgcaggggaaagaatagtagacataatagcaacagacatacaaactaaag

SEQ ID NO: 10818 - DNA, 301 bp, Artificial Sequence
  Kmt2d.1_Ercc5.1
  crRNA array
  misc_feature (148)..(157): n is a, c, g, or t
cttggctttatatatcttgtggaaaggacgaaacaccgtaatttctactaagtgtagatactccaggccacccaggtggtaatttctactaagtgtagatacggcacgagcaagagacactaatttctactaagtgtagatttttttnnnnnnnnnnaagcttggcgtggatccgatatcaactagatcttgagacaaatggcagtattcatccacaattttaaaagaaaaggggggattggggggtacagtgcaggggaaagaatagtagacataatagcaacagacatacaaactaaag

SEQ ID NO: 10819 - DNA, 301 bp, Artificial Sequence
  Kmt2d.1_Ercc5.2
  crRNA array
  misc_feature (148)..(157): n is a, c, g, or t
cttggctttatatatcttgtggaaaggacgaaacaccgtaatttctactaagtgtagatactccaggccacccaggtggtaatttctactaagtgtagatgagtatcacatcggtgactctaatttctactaagtgtagatttttttnnnnnnnnnnaagcttggcgtggatccgatatcaactagatcttgagacaaatggcagtattcatccacaattttaaaagaaaaggggggattggggggtacagtgcaggggaaagaatagtagacataatagcaacagacatacaaactaaag

SEQ ID NO: 10820 - DNA, 301 bp, Artificial Sequence
  Kmt2d.1_Ercc5.3
  crRNA array
  misc_feature (148)..(157): n is a, c, g, or t
cttggctttatatatcttgtggaaaggacgaaacaccgtaatttctactaagtgtagatactccaggccacccaggtggtaatttctactaagtgtagatggagtgggtccaggcctcgttaatttctactaagtgtagatttttttnnnnnnnnnnaagcttggcgtggatccgatatcaactagatcttgagacaaatggcagtattcatccacaattttaaaagaaaaggggggattggggggtacagtgcaggggaaagaatagtagacataatagcaacagacatacaaactaaag

SEQ ID NO: 10821 - DNA, 301 bp, Artificial Sequence
  Kmt2d.1_Ercc5.4
  crRNA array
  misc_feature (148)..(157): n is a, c, g, or t
cttggctttatatatcttgtggaaaggacgaaacaccgtaatttctactaagtgtagatactccaggccacccaggtggtaatttctactaagtgtagatcagagccggtggaataatgttaatttctactaagtgtagatttttttnnnnnnnnnnaagcttggcgtggatccgatatcaactagatcttgagacaaatggcagtattcatccacaattttaaaagaaaaggggggattggggggtacagtgcaggggaaagaatagtagacataatagcaacagacatacaaactaaag

SEQ ID NO: 10822 - DNA, 301 bp, Artificial Sequence
  Kmt2d.2_Ercc5.1
  crRNA array
  misc_feature (148)..(157): n is a, c, g, or t
cttggctttatatatcttgtggaaaggacgaaacaccgtaatttctactaagtgtagatggggaccatagccaggagagtaatttctactaagtgtagatacggcacgagcaagagacactaatttctactaagtgtagatttttttnnnnnnnnnnaagcttggcgtggatccgatatcaactagatcttgagacaaatggcagtattcatccacaattttaaaagaaaaggggggattggggggtacagtgcaggggaaagaatagtagacataatagcaacagacatacaaactaaag

SEQ ID NO: 10823 - DNA, 301 bp, Artificial Sequence
  Kmt2d.2_Ercc5.2
  crRNA array
  misc_feature (148)..(157): n is a, c, g, or t
cttggctttatatatcttgtggaaaggacgaaacaccgtaatttctactaagtgtagatggggaccatagccaggagagtaatttctactaagtgtagatgagtatcacatcggtgactctaatttctactaagtgtagatttttttnnnnnnnnnnaagcttggcgtggatccgatatcaactagatcttgagacaaatggcagtattcatccacaattttaaaagaaaaggggggattggggggtacagtgcaggggaaagaatagtagacataatagcaacagacatacaaactaaag

SEQ ID NO: 10824 - DNA, 301 bp, Artificial Sequence
  Kmt2d.2_Ercc5.3
  crRNA array
  misc_feature (148)..(157): n is a, c, g, or t
cttggctttatatatcttgtggaaaggacgaaacaccgtaatttctactaagtgtagatggggaccatagccaggagagtaatttctactaagtgtagatggagtgggtccaggcctcgttaatttctactaagtgtagatttttttnnnnnnnnnnaagcttggcgtggatccgatatcaactagatcttgagacaaatggcagtattcatccacaattttaaaagaaaaggggggattggggggtacagtgcaggggaaagaatagtagacataatagcaacagacatacaaactaaag

SEQ ID NO: 10825 - DNA, 301 bp, Artificial Sequence
  Kmt2d.2_Ercc5.4
  crRNA array
  misc_feature (148)..(157): n is a, c, g, or t
cttggctttatatatcttgtggaaaggacgaaacaccgtaatttctactaagtgtagatggggaccatagccaggagagtaatttctactaagtgtagatcagagccggtggaataatgttaatttctactaagtgtagatttttttnnnnnnnnnnaagcttggcgtggatccgatatcaactagatcttgagacaaatggcagtattcatccacaattttaaaagaaaaggggggattggggggtacagtgcaggggaaagaatagtagacataatagcaacagacatacaaactaaag

SEQ ID NO: 10826 - DNA, 301 bp, Artificial Sequence
  Kmt2d.3_Ercc5.1
  crRNA array
  misc_feature (148)..(157): n is a, c, g, or t
cttggctttatatatcttgtggaaaggacgaaacaccgtaatttctactaagtgtagataggaaggggtcaggcgtggataatttctactaagtgtagatacggcacgagcaagagacactaatttctactaagtgtagatttttttnnnnnnnnnnaagcttggcgtggatccgatatcaactagatcttgagacaaatggcagtattcatccacaattttaaaagaaaaggggggattggggggtacagtgcaggggaaagaatagtagacataatagcaacagacatacaaactaaag

SEQ ID NO: 10827 - DNA, 301 bp, Artificial Sequence
  Kmt2d.3_Ercc5.2
  crRNA array
  misc_feature (148)..(157): n is a, c, g, or t
cttggctttatatatcttgtggaaaggacgaaacaccgtaatttctactaagtgtagataggaaggggtcaggcgtggataatttctactaagtgtagatgagtatcacatcggtgactctaatttctactaagtgtagatttttttnnnnnnnnnnaagcttggcgtggatccgatatcaactagatcttgagacaaatggcagtattcatccacaattttaaaagaaaaggggggattggggggtacagtgcaggggaaagaatagtagacataatagcaacagacatacaaactaaag

SEQ ID NO: 10828 - DNA, 301 bp, Artificial Sequence
  Kmt2d.3_Ercc5.3
  crRNA array
  misc_feature (148)..(157): n is a, c, g, or t
cttggctttatatatcttgtggaaaggacgaaacaccgtaatttctactaagtgtagataggaaggggtcaggcgtggataatttctactaagtgtagatggagtgggtccaggcctcgttaatttctactaagtgtagatttttttnnnnnnnnnnaagcttggcgtggatccgatatcaactagatcttgagacaaatggcagtattcatccacaattttaaaagaaaaggggggattggggggtacagtgcaggggaaagaatagtagacataatagcaacagacatacaaactaaag

SEQ ID NO: 10829 - DNA, 301 bp, Artificial Sequence
  Kmt2d.3_Ercc5.4
  crRNA array
  misc_feature (148)..(157): n is a, c, g, or t
cttggctttatatatcttgtggaaaggacgaaacaccgtaatttctactaagtgtagataggaaggggtcaggcgtggataatttctactaagtgtagatcagagccggtggaataatgttaatttctactaagtgtagatttttttnnnnnnnnnnaagcttggcgtggatccgatatcaactagatcttgagacaaatggcagtattcatccacaattttaaaagaaaaggggggattggggggtacagtgcaggggaaagaatagtagacataatagcaacagacatacaaactaaag

SEQ ID NO: 10830 - DNA, 301 bp, Artificial Sequence
  Kmt2d.4_Ercc5.1
  crRNA array
  misc_feature (148)..(157): n is a, c, g, or t
cttggctttatatatcttgtggaaaggacgaaacaccgtaatttctactaagtgtagatcccagtcagcgaggaactcctaatttctactaagtgtagatacggcacgagcaagagacactaatttctactaagtgtagatttttttnnnnnnnnnnaagcttggcgtggatccgatatcaactagatcttgagacaaatggcagtattcatccacaattttaaaagaaaaggggggattggggggtacagtgcaggggaaagaatagtagacataatagcaacagacatacaaactaaag

SEQ ID NO: 10831 - DNA, 301 bp, Artificial Sequence
  Kmt2d.4_Ercc5.2
  crRNA array
  misc_feature (148)..(157): n is a, c, g, or t
cttggctttatatatcttgtggaaaggacgaaacaccgtaatttctactaagtgtagatcccagtcagcgaggaactcctaatttctactaagtgtagatgagtatcacatcggtgactctaatttctactaagtgtagatttttttnnnnnnnnnnaagcttggcgtggatccgatatcaactagatcttgagacaaatggcagtattcatccacaattttaaaagaaaaggggggattggggggtacagtgcaggggaaagaatagtagacataatagcaacagacatacaaactaaag

SEQ ID NO: 10832 - DNA, 301 bp, Artificial Sequence
  Kmt2d.4_Ercc5.3
  crRNA array
  misc_feature (148)..(157): n is a, c, g, or t
cttggctttatatatcttgtggaaaggacgaaacaccgtaatttctactaagtgtagatcccagtcagcgaggaactcctaatttctactaagtgtagatggagtgggtccaggcctcgttaatttctactaagtgtagatttttttnnnnnnnnnnaagcttggcgtggatccgatatcaactagatcttgagacaaatggcagtattcatccacaattttaaaagaaaaggggggattggggggtacagtgcaggggaaagaatagtagacataatagcaacagacatacaaactaaag

SEQ ID NO: 10833 - DNA, 301 bp, Artificial Sequence
  Kmt2d.4_Ercc5.4
  crRNA array
  misc_feature (148)..(157): n is a, c, g, or t
cttggctttatatatcttgtggaaaggacgaaacaccgtaatttctactaagtgtagatcccagtcagcgaggaactcctaatttctactaagtgtagatcagagccggtggaataatgttaatttctactaagtgtagatttttttnnnnnnnnnnaagcttggcgtggatccgatatcaactagatcttgagacaaatggcagtattcatccacaattttaaaagaaaaggggggattggggggtacagtgcaggggaaagaatagtagacataatagcaacagacatacaaactaaag

SEQ ID NO: 10834 - DNA, 301 bp, Artificial Sequence
  Kmt2d.1_Arid1b.1
  crRNA array
  misc_feature (148)..(157): n is a, c, g, or t
cttggctttatatatcttgtggaaaggacgaaacaccgtaatttctactaagtgtagatactccaggccacccaggtggtaatttctactaagtgtagatgctgctgctgtagtgcgtggtaatttctactaagtgtagatttttttnnnnnnnnnnaagcttggcgtggatccgatatcaactagatcttgagacaaatggcagtattcatccacaattttaaaagaaaaggggggattggggggtacagtgcaggggaaagaatagtagacataatagcaacagacatacaaactaaag

SEQ ID NO: 10835 - DNA, 301 bp, Artificial Sequence
  Kmt2d.1_Arid1b.2
  crRNA array
  misc_feature (148)..(157): n is a, c, g, or t
cttggctttatatatcttgtggaaaggacgaaacaccgtaatttctactaagtgtagatactccaggccacccaggtggtaatttctactaagtgtagatagtgcaaaactgagcgcgggtaatttctactaagtgtagatttttttnnnnnnnnnnaagcttggcgtggatccgatatcaactagatcttgagacaaatggcagtattcatccacaattttaaaagaaaaggggggattggggggtacagtgcaggggaaagaatagtagacataatagcaacagacatacaaactaaag

SEQ ID NO: 10836 - DNA, 301 bp, Artificial Sequence
  Kmt2d.1_Arid1b.3
  crRNA array
  misc_feature (148)..(157): n is a, c, g, or t
cttggctttatatatcttgtggaaaggacgaaacaccgtaatttctactaagtgtagatactccaggccacccaggtggtaatttctactaagtgtagatcactcaaaggcgaacaggtataatttctactaagtgtagatttttttnnnnnnnnnnaagcttggcgtggatccgatatcaactagatcttgagacaaatggcagtattcatccacaattttaaaagaaaaggggggattggggggtacagtgcaggggaaagaatagtagacataatagcaacagacatacaaactaaag

SEQ ID NO: 10837 - DNA, 301 bp, Artificial Sequence
  Kmt2d.1_Arid1b.4
  crRNA array
  misc_feature (148)..(157): n is a, c, g, or t
cttggctttatatatcttgtggaaaggacgaaacaccgtaatttctactaagtgtagatactccaggccacccaggtggtaatttctactaagtgtagatctcctggctccgtagaagcataatttctactaagtgtagatttttttnnnnnnnnnnaagcttggcgtggatccgatatcaactagatcttgagacaaatggcagtattcatccacaattttaaaagaaaaggggggattggggggtacagtgcaggggaaagaatagtagacataatagcaacagacatacaaactaaag

SEQ ID NO: 10838 - DNA, 301 bp, Artificial Sequence
  Kmt2d.2_Arid1b.1
  crRNA array
  misc_feature (148)..(157): n is a, c, g, or t
cttggctttatatatcttgtggaaaggacgaaacaccgtaatttctactaagtgtagatggggaccatagccaggagagtaatttctactaagtgtagatgctgctgctgtagtgcgtggtaatttctactaagtgtagatttttttnnnnnnnnnnaagcttggcgtggatccgatatcaactagatcttgagacaaatggcagtattcatccacaattttaaaagaaaaggggggattggggggtacagtgcaggggaaagaatagtagacataatagcaacagacatacaaactaaag

SEQ ID NO: 10839 - DNA, 301 bp, Artificial Sequence
  Kmt2d.2_Arid1b.2
  crRNA array
  misc_feature (148)..(157): n is a, c, g, or t
cttggctttatatatcttgtggaaaggacgaaacaccgtaatttctactaagtgtagatggggaccatagccaggagagtaatttctactaagtgtagatagtgcaaaactgagcgcgggtaatttctactaagtgtagatttttttnnnnnnnnnnaagcttggcgtggatccgatatcaactagatcttgagacaaatggcagtattcatccacaattttaaaagaaaaggggggattggggggtacagtgcaggggaaagaatagtagacataatagcaacagacatacaaactaaag

SEQ ID NO: 10840 - DNA, 301 bp, Artificial Sequence
  Kmt2d.2_Arid1b.3
  crRNA array
  misc_feature (148)..(157): n is a, c, g, or t
cttggctttatatatcttgtggaaaggacgaaacaccgtaatttctactaagtgtagatggggaccatagccaggagagtaatttctactaagtgtagatcactcaaaggcgaacaggtataatttctactaagtgtagatttttttnnnnnnnnnnaagcttggcgtggatccgatatcaactagatcttgagacaaatggcagtattcatccacaattttaaaagaaaaggggggattggggggtacagtgcaggggaaagaatagtagacataatagcaacagacatacaaactaaag

SEQ ID NO: 10841 - DNA, 301 bp, Artificial Sequence
  Kmt2d.2_Arid1b.4
  crRNA array
  misc_feature (148)..(157): n is a, c, g, or t
cttggctttatatatcttgtggaaaggacgaaacaccgtaatttctactaagtgtagatggggaccatagccaggagagtaatttctactaagtgtagatctcctggctccgtagaagcataatttctactaagtgtagatttttttnnnnnnnnnnaagcttggcgtggatccgatatcaactagatcttgagacaaatggcagtattcatccacaattttaaaagaaaaggggggattggggggtacagtgcaggggaaagaatagtagacataatagcaacagacatacaaactaaag

SEQ ID NO: 10842 - DNA, 301 bp, Artificial Sequence
  Kmt2d.3_Arid1b.1
  crRNA array
  misc_feature (148)..(157): n is a, c, g, or t
cttggctttatatatcttgtggaaaggacgaaacaccgtaatttctactaagtgtagataggaaggggtcaggcgtggataatttctactaagtgtagatgctgctgctgtagtgcgtggtaatttctactaagtgtagatttttttnnnnnnnnnnaagcttggcgtggatccgatatcaactagatcttgagacaaatggcagtattcatccacaattttaaaagaaaaggggggattggggggtacagtgcaggggaaagaatagtagacataatagcaacagacatacaaactaaag

SEQ ID NO: 10843 - DNA, 301 bp, Artificial Sequence
  Kmt2d.3_Arid1b.2
  crRNA array
  misc_feature (148)..(157): n is a, c, g, or t
cttggctttatatatcttgtggaaaggacgaaacaccgtaatttctactaagtgtagataggaaggggtcaggcgtggataatttctactaagtgtagatagtgcaaaactgagcgcgggtaatttctactaagtgtagatttttttnnnnnnnnnnaagcttggcgtggatccgatatcaactagatcttgagacaaatggcagtattcatccacaattttaaaagaaaaggggggattggggggtacagtgcaggggaaagaatagtagacataatagcaacagacatacaaactaaag

SEQ ID NO: 10844 - DNA, 301 bp, Artificial Sequence
  Kmt2d.3_Arid1b.3
  crRNA array
  misc_feature (148)..(157): n is a, c, g, or t
cttggctttatatatcttgtggaaaggacgaaacaccgtaatttctactaagtgtagataggaaggggtcaggcgtggataatttctactaagtgtagatcactcaaaggcgaacaggtataatttctactaagtgtagatttttttnnnnnnnnnnaagcttggcgtggatccgatatcaactagatcttgagacaaatggcagtattcatccacaattttaaaagaaaaggggggattggggggtacagtgcaggggaaagaatagtagacataatagcaacagacatacaaactaaag

SEQ ID NO: 10845 - DNA, 301 bp, Artificial Sequence
  Kmt2d.3_Arid1b.4
  crRNA array
  misc_feature (148)..(157): n is a, c, g, or t
cttggctttatatatcttgtggaaaggacgaaacaccgtaatttctactaagtgtagataggaaggggtcaggcgtggataatttctactaagtgtagatctcctggctccgtagaagcataatttctactaagtgtagatttttttnnnnnnnnnnaagcttggcgtggatccgatatcaactagatcttgagacaaatggcagtattcatccacaattttaaaagaaaaggggggattggggggtacagtgcaggggaaagaatagtagacataatagcaacagacatacaaactaaag

SEQ ID NO: 10846 - DNA, 301 bp, Artificial Sequence
  Kmt2d.4_Arid1b.1
  crRNA array
  misc_feature (148)..(157): n is a, c, g, or t
cttggctttatatatcttgtggaaaggacgaaacaccgtaatttctactaagtgtagatcccagtcagcgaggaactcctaatttctactaagtgtagatgctgctgctgtagtgcgtggtaatttctactaagtgtagatttttttnnnnnnnnnnaagcttggcgtggatccgatatcaactagatcttgagacaaatggcagtattcatccacaattttaaaagaaaaggggggattggggggtacagtgcaggggaaagaatagtagacataatagcaacagacatacaaactaaag

SEQ ID NO: 10847 - DNA, 301 bp, Artificial Sequence
  Kmt2d.4_Arid1b.2
  crRNA array
  misc_feature (148)..(157): n is a, c, g, or t
cttggctttatatatcttgtggaaaggacgaaacaccgtaatttctactaagtgtagatcccagtcagcgaggaactcctaatttctactaagtgtagatagtgcaaaactgagcgcgggtaatttctactaagtgtagatttttttnnnnnnnnnnaagcttggcgtggatccgatatcaactagatcttgagacaaatggcagtattcatccacaattttaaaagaaaaggggggattggggggtacagtgcaggggaaagaatagtagacataatagcaacagacatacaaactaaag

SEQ ID NO: 10848 - DNA, 301 bp, Artificial Sequence
  Kmt2d.4_Arid1b.3
  crRNA array
  misc_feature (148)..(157): n is a, c, g, or t
cttggctttatatatcttgtggaaaggacgaaacaccgtaatttctactaagtgtagatcccagtcagcgaggaactcctaatttctactaagtgtagatcactcaaaggcgaacaggtataatttctactaagtgtagatttttttnnnnnnnnnnaagcttggcgtggatccgatatcaactagatcttgagacaaatggcagtattcatccacaattttaaaagaaaaggggggattggggggtacagtgcaggggaaagaatagtagacataatagcaacagacatacaaactaaag

SEQ ID NO: 10849 - DNA, 301 bp, Artificial Sequence
  Kmt2d.4_Arid1b.4
  crRNA array
  misc_feature (148)..(157): n is a, c, g, or t
cttggctttatatatcttgtggaaaggacgaaacaccgtaatttctactaagtgtagatcccagtcagcgaggaactcctaatttctactaagtgtagatctcctggctccgtagaagcataatttctactaagtgtagatttttttnnnnnnnnnnaagcttggcgtggatccgatatcaactagatcttgagacaaatggcagtattcatccacaattttaaaagaaaaggggggattggggggtacagtgcaggggaaagaatagtagacataatagcaacagacatacaaactaaag

SEQ ID NO: 10850 - DNA, 301 bp, Artificial Sequence
  Kmt2d.1_Rb1.1
  crRNA array
  misc_feature (148)..(157): n is a, c, g, or t
cttggctttatatatcttgtggaaaggacgaaacaccgtaatttctactaagtgtagatactccaggccacccaggtggtaatttctactaagtgtagattctgacatgatcgggtaccttaatttctactaagtgtagatttttttnnnnnnnnnnaagcttggcgtggatccgatatcaactagatcttgagacaaatggcagtattcatccacaattttaaaagaaaaggggggattggggggtacagtgcaggggaaagaatagtagacataatagcaacagacatacaaactaaag

SEQ ID NO: 10851 - DNA, 301 bp, Artificial Sequence
  Kmt2d.1_Rb1.2
  crRNA array
  misc_feature (148)..(157): n is a, c, g, or t
cttggctttatatatcttgtggaaaggacgaaacaccgtaatttctactaagtgtagatactccaggccacccaggtggtaatttctactaagtgtagatgtctctgcatgaaaacggagtaatttctactaagtgtagatttttttnnnnnnnnnnaagcttggcgtggatccgatatcaactagatcttgagacaaatggcagtattcatccacaattttaaaagaaaaggggggattggggggtacagtgcaggggaaagaatagtagacataatagcaacagacatacaaactaaag

SEQ ID NO: 10852 - DNA, 301 bp, Artificial Sequence
  Kmt2d.1_Rb1.3
  crRNA array
  misc_feature (148)..(157): n is a, c, g, or t
cttggctttatatatcttgtggaaaggacgaaacaccgtaatttctactaagtgtagatactccaggccacccaggtggtaatttctactaagtgtagatagccaatctggtctaataactaatttctactaagtgtagatttttttnnnnnnnnnnaagcttggcgtggatccgatatcaactagatcttgagacaaatggcagtattcatccacaattttaaaagaaaaggggggattggggggtacagtgcaggggaaagaatagtagacataatagcaacagacatacaaactaaag

SEQ ID NO: 10853 - DNA, 301 bp, Artificial Sequence
  Kmt2d.1_Rb1.4
  crRNA array
  misc_feature (148)..(157): n is a, c, g, or t
cttggctttatatatcttgtggaaaggacgaaacaccgtaatttctactaagtgtagatactccaggccacccaggtggtaatttctactaagtgtagattgtagctcagtaaaagtgaataatttctactaagtgtagatttttttnnnnnnnnnnaagcttggcgtggatccgatatcaactagatcttgagacaaatggcagtattcatccacaattttaaaagaaaaggggggattggggggtacagtgcaggggaaagaatagtagacataatagcaacagacatacaaactaaag

SEQ ID NO: 10854 - DNA, 301 bp, Artificial Sequence
  Kmt2d.2_Rb1.1
  crRNA array
  misc_feature (148)..(157): n is a, c, g, or t
cttggctttatatatcttgtggaaaggacgaaacaccgtaatttctactaagtgtagatggggaccatagccaggagagtaatttctactaagtgtagattctgacatgatcgggtaccttaatttctactaagtgtagatttttttnnnnnnnnnnaagcttggcgtggatccgatatcaactagatcttgagacaaatggcagtattcatccacaattttaaaagaaaaggggggattggggggtacagtgcaggggaaagaatagtagacataatagcaacagacatacaaactaaag

SEQ ID NO: 10855 - DNA, 301 bp, Artificial Sequence
  Kmt2d.2_Rb1.2
  crRNA array
  misc_feature (148)..(157): n is a, c, g, or t
cttggctttatatatcttgtggaaaggacgaaacaccgtaatttctactaagtgtagatggggaccatagccaggagagtaatttctactaagtgtagatgtctctgcatgaaaacggagtaatttctactaagtgtagatttttttnnnnnnnnnnaagcttggcgtggatccgatatcaactagatcttgagacaaatggcagtattcatccacaattttaaaagaaaaggggggattggggggtacagtgcaggggaaagaatagtagacataatagcaacagacatacaaactaaag

SEQ ID NO: 10856 - DNA, 301 bp, Artificial Sequence
  Kmt2d.2_Rb1.3
  crRNA array
  misc_feature (148)..(157): n is a, c, g, or t
cttggctttatatatcttgtggaaaggacgaaacaccgtaatttctactaagtgtagatggggaccatagccaggagagtaatttctactaagtgtagatagccaatctggtctaataactaatttctactaagtgtagatttttttnnnnnnnnnnaagcttggcgtggatccgatatcaactagatcttgagacaaatggcagtattcatccacaattttaaaagaaaaggggggattggggggtacagtgcaggggaaagaatagtagacataatagcaacagacatacaaactaaag

SEQ ID NO: 10857 - DNA, 301 bp, Artificial Sequence
  Kmt2d.2_Rb1.4
  crRNA array
  misc_feature (148)..(157): n is a, c, g, or t
cttggctttatatatcttgtggaaaggacgaaacaccgtaatttctactaagtgtagatggggaccatagccaggagagtaatttctactaagtgtagattgtagctcagtaaaagtgaataatttctactaagtgtagatttttttnnnnnnnnnnaagcttggcgtggatccgatatcaactagatcttgagacaaatggcagtattcatccacaattttaaaagaaaaggggggattggggggtacagtgcaggggaaagaatagtagacataatagcaacagacatacaaactaaag

SEQ ID NO: 10858 - DNA, 301 bp, Artificial Sequence
  Kmt2d.3_Rb1.1
  crRNA array
  misc_feature (148)..(157): n is a, c, g, or t
cttggctttatatatcttgtggaaaggacgaaacaccgtaatttctactaagtgtagataggaaggggtcaggcgtggataatttctactaagtgtagattctgacatgatcgggtaccttaatttctactaagtgtagatttttttnnnnnnnnnnaagcttggcgtggatccgatatcaactagatcttgagacaaatggcagtattcatccacaattttaaaagaaaaggggggattggggggtacagtgcaggggaaagaatagtagacataatagcaacagacatacaaactaaag

SEQ ID NO: 10859 - DNA, 301 bp, Artificial Sequence
  Kmt2d.3_Rb1.2
  crRNA array
  misc_feature (148)..(157): n is a, c, g, or t
cttggctttatatatcttgtggaaaggacgaaacaccgtaatttctactaagtgtagataggaaggggtcaggcgtggataatttctactaagtgtagatgtctctgcatgaaaacggagtaatttctactaagtgtagatttttttnnnnnnnnnnaagcttggcgtggatccgatatcaactagatcttgagacaaatggcagtattcatccacaattttaaaagaaaaggggggattggggggtacagtgcaggggaaagaatagtagacataatagcaacagacatacaaactaaag

SEQ ID NO: 10860 - DNA, 301 bp, Artificial Sequence
  Kmt2d.3_Rb1.3
  crRNA array
  misc_feature (148)..(157): n is a, c, g, or t
cttggctttatatatcttgtggaaaggacgaaacaccgtaatttctactaagtgtagataggaaggggtcaggcgtggataatttctactaagtgtagatagccaatctggtctaataactaatttctactaagtgtagatttttttnnnnnnnnnnaagcttggcgtggatccgatatcaactagatcttgagacaaatggcagtattcatccacaattttaaaagaaaaggggggattggggggtacagtgcaggggaaagaatagtagacataatagcaacagacatacaaactaaag

SEQ ID NO: 10861 - DNA, 301 bp, Artificial Sequence
  Kmt2d.3_Rb1.4
  crRNA array
  misc_feature (148)..(157): n is a, c, g, or t
cttggctttatatatcttgtggaaaggacgaaacaccgtaatttctactaagtgtagataggaaggggtcaggcgtggataatttctactaagtgtagattgtagctcagtaaaagtgaataatttctactaagtgtagatttttttnnnnnnnnnnaagcttggcgtggatccgatatcaactagatcttgagacaaatggcagtattcatccacaattttaaaagaaaaggggggattggggggtacagtgcaggggaaagaatagtagacataatagcaacagacatacaaactaaag

SEQ ID NO: 10862 - DNA, 301 bp, Artificial Sequence
  Kmt2d.4_Rb1.1
  crRNA array
  misc_feature (148)..(157): n is a, c, g, or t
cttggctttatatatcttgtggaaaggacgaaacaccgtaatttctactaagtgtagatcccagtcagcgaggaactcctaatttctactaagtgtagattctgacatgatcgggtaccttaatttctactaagtgtagatttttttnnnnnnnnnnaagcttggcgtggatccgatatcaactagatcttgagacaaatggcagtattcatccacaattttaaaagaaaaggggggattggggggtacagtgcaggggaaagaatagtagacataatagcaacagacatacaaactaaag

SEQ ID NO: 10863 - DNA, 301 bp, Artificial Sequence
  Kmt2d.4_Rb1.2
  crRNA array
  misc_feature (148)..(157): n is a, c, g, or t
cttggctttatatatcttgtggaaaggacgaaacaccgtaatttctactaagtgtagatcccagtcagcgaggaactcctaatttctactaagtgtagatgtctctgcatgaaaacggagtaatttctactaagtgtagatttttttnnnnnnnnnnaagcttggcgtggatccgatatcaactagatcttgagacaaatggcagtattcatccacaattttaaaagaaaaggggggattggggggtacagtgcaggggaaagaatagtagacataatagcaacagacatacaaactaaag

SEQ ID NO: 10864 - DNA, 301 bp, Artificial Sequence
  Kmt2d.4_Rb1.3
  crRNA array
  misc_feature (148)..(157): n is a, c, g, or t
cttggctttatatatcttgtggaaaggacgaaacaccgtaatttctactaagtgtagatcccagtcagcgaggaactcctaatttctactaagtgtagatagccaatctggtctaataactaatttctactaagtgtagatttttttnnnnnnnnnnaagcttggcgtggatccgatatcaactagatcttgagacaaatggcagtattcatccacaattttaaaagaaaaggggggattggggggtacagtgcaggggaaagaatagtagacataatagcaacagacatacaaactaaag

SEQ ID NO: 10865 - DNA, 301 bp, Artificial Sequence
  Kmt2d.4_Rb1.4
  crRNA array
  misc_feature (148)..(157): n is a, c, g, or t
cttggctttatatatcttgtggaaaggacgaaacaccgtaatttctactaagtgtagatcccagtcagcgaggaactcctaatttctactaagtgtagattgtagctcagtaaaagtgaataatttctactaagtgtagatttttttnnnnnnnnnnaagcttggcgtggatccgatatcaactagatcttgagacaaatggcagtattcatccacaattttaaaagaaaaggggggattggggggtacagtgcaggggaaagaatagtagacataatagcaacagacatacaaactaaag

SEQ ID NO: 10866 - DNA, 301 bp, Artificial Sequence
  Kmt2d.1_Kmt2c.1
  crRNA array
  misc_feature (148)..(157): n is a, c, g, or t
cttggctttatatatcttgtggaaaggacgaaacaccgtaatttctactaagtgtagatactccaggccacccaggtggtaatttctactaagtgtagatactcgacctccacctccctataatttctactaagtgtagatttttttnnnnnnnnnnaagcttggcgtggatccgatatcaactagatcttgagacaaatggcagtattcatccacaattttaaaagaaaaggggggattggggggtacagtgcaggggaaagaatagtagacataatagcaacagacatacaaactaaag

SEQ ID NO: 10867 - DNA, 301 bp, Artificial Sequence
  Kmt2d.1_Kmt2c.2
  crRNA array
  misc_feature (148)..(157): n is a, c, g, or t
cttggctttatatatcttgtggaaaggacgaaacaccgtaatttctactaagtgtagatactccaggccacccaggtggtaatttctactaagtgtagatcccaaagatcagcgtggacctaatttctactaagtgtagatttttttnnnnnnnnnnaagcttggcgtggatccgatatcaactagatcttgagacaaatggcagtattcatccacaattttaaaagaaaaggggggattggggggtacagtgcaggggaaagaatagtagacataatagcaacagacatacaaactaaag

SEQ ID NO: 10868 - DNA, 301 bp, Artificial Sequence
  Kmt2d.1_Kmt2c.3
  crRNA array
  misc_feature (148)..(157): n is a, c, g, or t
cttggctttatatatcttgtggaaaggacgaaacaccgtaatttctactaagtgtagatactccaggccacccaggtggtaatttctactaagtgtagataaaagatccgaatcgatgcgtaatttctactaagtgtagatttttttnnnnnnnnnnaagcttggcgtggatccgatatcaactagatcttgagacaaatggcagtattcatccacaattttaaaagaaaaggggggattggggggtacagtgcaggggaaagaatagtagacataatagcaacagacatacaaactaaag

SEQ ID NO: 10869 - DNA, 301 bp, Artificial Sequence
  Kmt2d.1_Kmt2c.4
  crRNA array
  misc_feature (148)..(157): n is a, c, g, or t
cttggctttatatatcttgtggaaaggacgaaacaccgtaatttctactaagtgtagatactccaggccacccaggtggtaatttctactaagtgtagatctgaggcacatggaagcgattaatttctactaagtgtagatttttttnnnnnnnnnnaagcttggcgtggatccgatatcaactagatcttgagacaaatggcagtattcatccacaattttaaaagaaaaggggggattggggggtacagtgcaggggaaagaatagtagacataatagcaacagacatacaaactaaag

SEQ ID NO: 10870 - DNA, 301 bp, Artificial Sequence
  Kmt2d.2_Kmt2c.1
  crRNA array
  misc_feature (148)..(157): n is a, c, g, or t
cttggctttatatatcttgtggaaaggacgaaacaccgtaatttctactaagtgtagatggggaccatagccaggagagtaatttctactaagtgtagatactcgacctccacctccctataatttctactaagtgtagatttttttnnnnnnnnnnaagcttggcgtggatccgatatcaactagatcttgagacaaatggcagtattcatccacaattttaaaagaaaaggggggattggggggtacagtgcaggggaaagaatagtagacataatagcaacagacatacaaactaaag

SEQ ID NO: 10871 - DNA, 301 bp, Artificial Sequence
  Kmt2d.2_Kmt2c.2
  crRNA array
  misc_feature (148)..(157): n is a, c, g, or t
cttggctttatatatcttgtggaaaggacgaaacaccgtaatttctactaagtgtagatggggaccatagccaggagagtaatttctactaagtgtagatcccaaagatcagcgtggacctaatttctactaagtgtagatttttttnnnnnnnnnnaagcttggcgtggatccgatatcaactagatcttgagacaaatggcagtattcatccacaattttaaaagaaaaggggggattggggggtacagtgcaggggaaagaatagtagacataatagcaacagacatacaaactaaag

SEQ ID NO: 10872 - DNA, 301 bp, Artificial Sequence
  Kmt2d.2_Kmt2c.3
  crRNA array
  misc_feature (148)..(157): n is a, c, g, or t
cttggctttatatatcttgtggaaaggacgaaacaccgtaatttctactaagtgtagatggggaccatagccaggagagtaatttctactaagtgtagataaaagatccgaatcgatgcgtaatttctactaagtgtagatttttttnnnnnnnnnnaagcttggcgtggatccgatatcaactagatcttgagacaaatggcagtattcatccacaattttaaaagaaaaggggggattggggggtacagtgcaggggaaagaatagtagacataatagcaacagacatacaaactaaag

SEQ ID NO: 10873 - DNA, 301 bp, Artificial Sequence
  Kmt2d.2_Kmt2c.4
  crRNA array
  misc_feature (148)..(157): n is a, c, g, or t
cttggctttatatatcttgtggaaaggacgaaacaccgtaatttctactaagtgtagatggggaccatagccaggagagtaatttctactaagtgtagatctgaggcacatggaagcgattaatttctactaagtgtagatttttttnnnnnnnnnnaagcttggcgtggatccgatatcaactagatcttgagacaaatggcagtattcatccacaattttaaaagaaaaggggggattggggggtacagtgcaggggaaagaatagtagacataatagcaacagacatacaaactaaag

SEQ ID NO: 10874 - DNA, 301 bp, Artificial Sequence
  Kmt2d.3_Kmt2c.1
  crRNA array
  misc_feature (148)..(157): n is a, c, g, or t
cttggctttatatatcttgtggaaaggacgaaacaccgtaatttctactaagtgtagataggaaggggtcaggcgtggataatttctactaagtgtagatactcgacctccacctccctataatttctactaagtgtagatttttttnnnnnnnnnnaagcttggcgtggatccgatatcaactagatcttgagacaaatggcagtattcatccacaattttaaaagaaaaggggggattggggggtacagtgcaggggaaagaatagtagacataatagcaacagacatacaaactaaag

SEQ ID NO: 10875 - DNA, 301 bp, Artificial Sequence
  Kmt2d.3_Kmt2c.2
  crRNA array
  misc_feature (148)..(157): n is a, c, g, or t
cttggctttatatatcttgtggaaaggacgaaacaccgtaatttctactaagtgtagataggaaggggtcaggcgtggataatttctactaagtgtagatcccaaagatcagcgtggacctaatttctactaagtgtagatttttttnnnnnnnnnnaagcttggcgtggatccgatatcaactagatcttgagacaaatggcagtattcatccacaattttaaaagaaaaggggggattggggggtacagtgcaggggaaagaatagtagacataatagcaacagacatacaaactaaag

SEQ ID NO: 10876 - DNA, 301 bp, Artificial Sequence
  Kmt2d.3_Kmt2c.3
  crRNA array
  misc_feature (148)..(157): n is a, c, g, or t
cttggctttatatatcttgtggaaaggacgaaacaccgtaatttctactaagtgtagataggaaggggtcaggcgtggataatttctactaagtgtagataaaagatccgaatcgatgcgtaatttctactaagtgtagatttttttnnnnnnnnnnaagcttggcgtggatccgatatcaactagatcttgagacaaatggcagtattcatccacaattttaaaagaaaaggggggattggggggtacagtgcaggggaaagaatagtagacataatagcaacagacatacaaactaaag

SEQ ID NO: 10877 - DNA, 301 bp, Artificial Sequence
  Kmt2d.3_Kmt2c.4
  crRNA array
  misc_feature (148)..(157): n is a, c, g, or t
cttggctttatatatcttgtggaaaggacgaaacaccgtaatttctactaagtgtagataggaaggggtcaggcgtggataatttctactaagtgtagatctgaggcacatggaagcgattaatttctactaagtgtagatttttttnnnnnnnnnnaagcttggcgtggatccgatatcaactagatcttgagacaaatggcagtattcatccacaattttaaaagaaaaggggggattggggggtacagtgcaggggaaagaatagtagacataatagcaacagacatacaaactaaag

SEQ ID NO: 10878 - DNA, 301 bp, Artificial Sequence
  Kmt2d.4_Kmt2c.1
  crRNA array
  misc_feature (148)..(157): n is a, c, g, or t
cttggctttatatatcttgtggaaaggacgaaacaccgtaatttctactaagtgtagatcccagtcagcgaggaactcctaatttctactaagtgtagatactcgacctccacctccctataatttctactaagtgtagatttttttnnnnnnnnnnaagcttggcgtggatccgatatcaactagatcttgagacaaatggcagtattcatccacaattttaaaagaaaaggggggattggggggtacagtgcaggggaaagaatagtagacataatagcaacagacatacaaactaaag

SEQ ID NO: 10879 - DNA, 301 bp, Artificial Sequence
  Kmt2d.4_Kmt2c.2
  crRNA array
  misc_feature (148)..(157): n is a, c, g, or t
cttggctttatatatcttgtggaaaggacgaaacaccgtaatttctactaagtgtagatcccagtcagcgaggaactcctaatttctactaagtgtagatcccaaagatcagcgtggacctaatttctactaagtgtagatttttttnnnnnnnnnnaagcttggcgtggatccgatatcaactagatcttgagacaaatggcagtattcatccacaattttaaaagaaaaggggggattggggggtacagtgcaggggaaagaatagtagacataatagcaacagacatacaaactaaag

SEQ ID NO: 10880 - DNA, 301 bp, Artificial Sequence
  Kmt2d.4_Kmt2c.3
  crRNA array
  misc_feature (148)..(157): n is a, c, g, or t
cttggctttatatatcttgtggaaaggacgaaacaccgtaatttctactaagtgtagatcccagtcagcgaggaactcctaatttctactaagtgtagataaaagatccgaatcgatgcgtaatttctactaagtgtagatttttttnnnnnnnnnnaagcttggcgtggatccgatatcaactagatcttgagacaaatggcagtattcatccacaattttaaaagaaaaggggggattggggggtacagtgcaggggaaagaatagtagacataatagcaacagacatacaaactaaag

SEQ ID NO: 10881 - DNA, 301 bp, Artificial Sequence
  Kmt2d.4_Kmt2c.4
  crRNA array
  misc_feature (148)..(157): n is a, c, g, or t
cttggctttatatatcttgtggaaaggacgaaacaccgtaatttctactaagtgtagatcccagtcagcgaggaactcctaatttctactaagtgtagatctgaggcacatggaagcgattaatttctactaagtgtagatttttttnnnnnnnnnnaagcttggcgtggatccgatatcaactagatcttgagacaaatggcagtattcatccacaattttaaaagaaaaggggggattggggggtacagtgcaggggaaagaatagtagacataatagcaacagacatacaaactaaag

SEQ ID NO: 10882 - DNA, 301 bp, Artificial Sequence
  Kmt2d.1_Pten.1
  crRNA array
  misc_feature (148)..(157): n is a, c, g, or t
cttggctttatatatcttgtggaaaggacgaaacaccgtaatttctactaagtgtagatactccaggccacccaggtggtaatttctactaagtgtagataagcgtggtgcgtgacgcactaatttctactaagtgtagatttttttnnnnnnnnnnaagcttggcgtggatccgatatcaactagatcttgagacaaatggcagtattcatccacaattttaaaagaaaaggggggattggggggtacagtgcaggggaaagaatagtagacataatagcaacagacatacaaactaaag

SEQ ID NO: 10883 - DNA, 301 bp, Artificial Sequence
  Kmt2d.1_Pten.2
  crRNA array
  misc_feature (148)..(157): n is a, c, g, or t
cttggctttatatatcttgtggaaaggacgaaacaccgtaatttctactaagtgtagatactccaggccacccaggtggtaatttctactaagtgtagattgtcaccagctgaagtggcttaatttctactaagtgtagatttttttnnnnnnnnnnaagcttggcgtggatccgatatcaactagatcttgagacaaatggcagtattcatccacaattttaaaagaaaaggggggattggggggtacagtgcaggggaaagaatagtagacataatagcaacagacatacaaactaaag

SEQ ID NO: 10884 - DNA, 301 bp, Artificial Sequence
  Kmt2d.1_Pten.3
  crRNA array
  misc_feature (148)..(157): n is a, c, g, or t
cttggctttatatatcttgtggaaaggacgaaacaccgtaatttctactaagtgtagatactccaggccacccaggtggtaatttctactaagtgtagatggagtcaagaggctgatttttaatttctactaagtgtagatttttttnnnnnnnnnnaagcttggcgtggatccgatatcaactagatcttgagacaaatggcagtattcatccacaattttaaaagaaaaggggggattggggggtacagtgcaggggaaagaatagtagacataatagcaacagacatacaaactaaag

SEQ ID NO: 10885 - DNA, 301 bp, Artificial Sequence
  Kmt2d.1_Pten.4
  crRNA array
  misc_feature (148)..(157): n is a, c, g, or t
cttggctttatatatcttgtggaaaggacgaaacaccgtaatttctactaagtgtagatactccaggccacccaggtggtaatttctactaagtgtagatctgtaagctaaaccactacataatttctactaagtgtagatttttttnnnnnnnnnnaagcttggcgtggatccgatatcaactagatcttgagacaaatggcagtattcatccacaattttaaaagaaaaggggggattggggggtacagtgcaggggaaagaatagtagacataatagcaacagacatacaaactaaag

SEQ ID NO: 10886 - DNA, 301 bp, Artificial Sequence
  Kmt2d.2_Pten.1
  crRNA array
  misc_feature (148)..(157): n is a, c, g, or t
cttggctttatatatcttgtggaaaggacgaaacaccgtaatttctactaagtgtagatggggaccatagccaggagagtaatttctactaagtgtagataagcgtggtgcgtgacgcactaatttctactaagtgtagatttttttnnnnnnnnnnaagcttggcgtggatccgatatcaactagatcttgagacaaatggcagtattcatccacaattttaaaagaaaaggggggattggggggtacagtgcaggggaaagaatagtagacataatagcaacagacatacaaactaaag

SEQ ID NO: 10887 - DNA, 301 bp, Artificial Sequence
  Kmt2d.2_Pten.2
  crRNA array
  misc_feature (148)..(157): n is a, c, g, or t
cttggctttatatatcttgtggaaaggacgaaacaccgtaatttctactaagtgtagatggggaccatagccaggagagtaatttctactaagtgtagattgtcaccagctgaagtggcttaatttctactaagtgtagatttttttnnnnnnnnnnaagcttggcgtggatccgatatcaactagatcttgagacaaatggcagtattcatccacaattttaaaagaaaaggggggattggggggtacagtgcaggggaaagaatagtagacataatagcaacagacatacaaactaaag

SEQ ID NO: 10888 - DNA, 301 bp, Artificial Sequence
  Kmt2d.2_Pten.3
  crRNA array
  misc_feature (148)..(157): n is a, c, g, or t
cttggctttatatatcttgtggaaaggacgaaacaccgtaatttctactaagtgtagatggggaccatagccaggagagtaatttctactaagtgtagatggagtcaagaggctgatttttaatttctactaagtgtagatttttttnnnnnnnnnnaagcttggcgtggatccgatatcaactagatcttgagacaaatggcagtattcatccacaattttaaaagaaaaggggggattggggggtacagtgcaggggaaagaatagtagacataatagcaacagacatacaaactaaag

SEQ ID NO: 10889 - DNA, 301 bp, Artificial Sequence
  Kmt2d.2_Pten.4
  crRNA array
  misc_feature (148)..(157): n is a, c, g, or t
cttggctttatatatcttgtggaaaggacgaaacaccgtaatttctactaagtgtagatggggaccatagccaggagagtaatttctactaagtgtagatctgtaagctaaaccactacataatttctactaagtgtagatttttttnnnnnnnnnnaagcttggcgtggatccgatatcaactagatcttgagacaaatggcagtattcatccacaattttaaaagaaaaggggggattggggggtacagtgcaggggaaagaatagtagacataatagcaacagacatacaaactaaag

SEQ ID NO: 10890 - DNA, 301 bp, Artificial Sequence
  Kmt2d.3_Pten.1
  crRNA array
  misc_feature (148)..(157): n is a, c, g, or t
cttggctttatatatcttgtggaaaggacgaaacaccgtaatttctactaagtgtagataggaaggggtcaggcgtggataatttctactaagtgtagataagcgtggtgcgtgacgcactaatttctactaagtgtagatttttttnnnnnnnnnnaagcttggcgtggatccgatatcaactagatcttgagacaaatggcagtattcatccacaattttaaaagaaaaggggggattggggggtacagtgcaggggaaagaatagtagacataatagcaacagacatacaaactaaag

SEQ ID NO: 10891 - DNA, 301 bp, Artificial Sequence
  Kmt2d.3_Pten.2
  crRNA array
  misc_feature (148)..(157): n is a, c, g, or t
cttggctttatatatcttgtggaaaggacgaaacaccgtaatttctactaagtgtagataggaaggggtcaggcgtggataatttctactaagtgtagattgtcaccagctgaagtggcttaatttctactaagtgtagatttttttnnnnnnnnnnaagcttggcgtggatccgatatcaactagatcttgagacaaatggcagtattcatccacaattttaaaagaaaaggggggattggggggtacagtgcaggggaaagaatagtagacataatagcaacagacatacaaactaaag

SEQ ID NO: 10892 - DNA, 301 bp, Artificial Sequence
  Kmt2d.3_Pten.3
  crRNA array
  misc_feature (148)..(157): n is a, c, g, or t
cttggctttatatatcttgtggaaaggacgaaacaccgtaatttctactaagtgtagataggaaggggtcaggcgtggataatttctactaagtgtagatggagtcaagaggctgatttttaatttctactaagtgtagatttttttnnnnnnnnnnaagcttggcgtggatccgatatcaactagatcttgagacaaatggcagtattcatccacaattttaaaagaaaaggggggattggggggtacagtgcaggggaaagaatagtagacataatagcaacagacatacaaactaaag

SEQ ID NO: 10893 - DNA, 301 bp, Artificial Sequence
  Kmt2d.3_Pten.4
  crRNA array
  misc_feature (148)..(157): n is a, c, g, or t
cttggctttatatatcttgtggaaaggacgaaacaccgtaatttctactaagtgtagataggaaggggtcaggcgtggataatttctactaagtgtagatctgtaagctaaaccactacataatttctactaagtgtagatttttttnnnnnnnnnnaagcttggcgtggatccgatatcaactagatcttgagacaaatggcagtattcatccacaattttaaaagaaaaggggggattggggggtacagtgcaggggaaagaatagtagacataatagcaacagacatacaaactaaag

SEQ ID NO: 10894 - DNA, 301 bp, Artificial Sequence
  Kmt2d.4_Pten.1
  crRNA array
  misc_feature (148)..(157): n is a, c, g, or t
cttggctttatatatcttgtggaaaggacgaaacaccgtaatttctactaagtgtagatcccagtcagcgaggaactcctaatttctactaagtgtagataagcgtggtgcgtgacgcactaatttctactaagtgtagatttttttnnnnnnnnnnaagcttggcgtggatccgatatcaactagatcttgagacaaatggcagtattcatccacaattttaaaagaaaaggggggattggggggtacagtgcaggggaaagaatagtagacataatagcaacagacatacaaactaaag

SEQ ID NO: 10895 - DNA, 301 bp, Artificial Sequence
  Kmt2d.4_Pten.2
  crRNA array
  misc_feature (148)..(157): n is a, c, g, or t
cttggctttatatatcttgtggaaaggacgaaacaccgtaatttctactaagtgtagatcccagtcagcgaggaactcctaatttctactaagtgtagattgtcaccagctgaagtggcttaatttctactaagtgtagatttttttnnnnnnnnnnaagcttggcgtggatccgatatcaactagatcttgagacaaatggcagtattcatccacaattttaaaagaaaaggggggattggggggtacagtgcaggggaaagaatagtagacataatagcaacagacatacaaactaaag

SEQ ID NO: 10896 - DNA, 301 bp, Artificial Sequence
  Kmt2d.4_Pten.3
  crRNA array
  misc_feature (148)..(157): n is a, c, g, or t
cttggctttatatatcttgtggaaaggacgaaacaccgtaatttctactaagtgtagatcccagtcagcgaggaactcctaatttctactaagtgtagatggagtcaagaggctgatttttaatttctactaagtgtagatttttttnnnnnnnnnnaagcttggcgtggatccgatatcaactagatcttgagacaaatggcagtattcatccacaattttaaaagaaaaggggggattggggggtacagtgcaggggaaagaatagtagacataatagcaacagacatacaaactaaag

SEQ ID NO: 10897 - DNA, 301 bp, Artificial Sequence
  Kmt2d.4_Pten.4
  crRNA array
  misc_feature (148)..(157): n is a, c, g, or t
cttggctttatatatcttgtggaaaggacgaaacaccgtaatttctactaagtgtagatcccagtcagcgaggaactcctaatttctactaagtgtagatctgtaagctaaaccactacataatttctactaagtgtagatttttttnnnnnnnnnnaagcttggcgtggatccgatatcaactagatcttgagacaaatggcagtattcatccacaattttaaaagaaaaggggggattggggggtacagtgcaggggaaagaatagtagacataatagcaacagacatacaaactaaag

SEQ ID NO: 10898 - DNA, 301 bp, Artificial Sequence
  Kmt2d.1_Atm.1
  crRNA array
  misc_feature (148)..(157): n is a, c, g, or t
cttggctttatatatcttgtggaaaggacgaaacaccgtaatttctactaagtgtagatactccaggccacccaggtggtaatttctactaagtgtagatgagaaagtctccgaatcgtttaatttctactaagtgtagatttttttnnnnnnnnnnaagcttggcgtggatccgatatcaactagatcttgagacaaatggcagtattcatccacaattttaaaagaaaaggggggattggggggtacagtgcaggggaaagaatagtagacataatagcaacagacatacaaactaaag

SEQ ID NO: 10899 - DNA, 301 bp, Artificial Sequence
  Kmt2d.1_Atm.2
  crRNA array
  misc_feature (148)..(157): n is a, c, g, or t
cttggctttatatatcttgtggaaaggacgaaacaccgtaatttctactaagtgtagatactccaggccacccaggtggtaatttctactaagtgtagatcctacgagggcacgagagactaatttctactaagtgtagatttttttnnnnnnnnnnaagcttggcgtggatccgatatcaactagatcttgagacaaatggcagtattcatccacaattttaaaagaaaaggggggattggggggtacagtgcaggggaaagaatagtagacataatagcaacagacatacaaactaaag

SEQ ID NO: 10900 - DNA, 301 bp, Artificial Sequence
  Kmt2d.1_Atm.3
  crRNA array
  misc_feature (148)..(157): n is a, c, g, or t
cttggctttatatatcttgtggaaaggacgaaacaccgtaatttctactaagtgtagatactccaggccacccaggtggtaatttctactaagtgtagattgaaagtctccgatatgccataatttctactaagtgtagatttttttnnnnnnnnnnaagcttggcgtggatccgatatcaactagatcttgagacaaatggcagtattcatccacaattttaaaagaaaaggggggattggggggtacagtgcaggggaaagaatagtagacataatagcaacagacatacaaactaaag

SEQ ID NO: 10901 - DNA, 301 bp, Artificial Sequence
  Kmt2d.1_Atm.4
  crRNA array
  misc_feature (148)..(157): n is a, c, g, or t
cttggctttatatatcttgtggaaaggacgaaacaccgtaatttctactaagtgtagatactccaggccacccaggtggtaatttctactaagtgtagatggtggtgatcagtcaagtagtaatttctactaagtgtagatttttttnnnnnnnnnnaagcttggcgtggatccgatatcaactagatcttgagacaaatggcagtattcatccacaattttaaaagaaaaggggggattggggggtacagtgcaggggaaagaatagtagacataatagcaacagacatacaaactaaag

SEQ ID NO: 10902 - DNA, 301 bp, Artificial Sequence
  Kmt2d.2_Atm.1
  crRNA array
  misc_feature (148)..(157): n is a, c, g, or t
cttggctttatatatcttgtggaaaggacgaaacaccgtaatttctactaagtgtagatggggaccatagccaggagagtaatttctactaagtgtagatgagaaagtctccgaatcgtttaatttctactaagtgtagatttttttnnnnnnnnnnaagcttggcgtggatccgatatcaactagatcttgagacaaatggcagtattcatccacaattttaaaagaaaaggggggattggggggtacagtgcaggggaaagaatagtagacataatagcaacagacatacaaactaaag

SEQ ID NO: 10903 - DNA, 301 bp, Artificial Sequence
  Kmt2d.2_Atm.2
  crRNA array
  misc_feature (148)..(157): n is a, c, g, or t
cttggctttatatatcttgtggaaaggacgaaacaccgtaatttctactaagtgtagatggggaccatagccaggagagtaatttctactaagtgtagatcctacgagggcacgagagactaatttctactaagtgtagatttttttnnnnnnnnnnaagcttggcgtggatccgatatcaactagatcttgagacaaatggcagtattcatccacaattttaaaagaaaaggggggattggggggtacagtgcaggggaaagaatagtagacataatagcaacagacatacaaactaaag

SEQ ID NO: 10904 - DNA, 301 bp, Artificial Sequence
  Kmt2d.2_Atm.3
  crRNA array
  misc_feature (148)..(157): n is a, c, g, or t
cttggctttatatatcttgtggaaaggacgaaacaccgtaatttctactaagtgtagatggggaccatagccaggagagtaatttctactaagtgtagattgaaagtctccgatatgccataatttctactaagtgtagatttttttnnnnnnnnnnaagcttggcgtggatccgatatcaactagatcttgagacaaatggcagtattcatccacaattttaaaagaaaaggggggattggggggtacagtgcaggggaaagaatagtagacataatagcaacagacatacaaactaaag

SEQ ID NO: 10905 - DNA, 301 bp, Artificial Sequence
  Kmt2d.2_Atm.4
  crRNA array
  misc_feature (148)..(157): n is a, c, g, or t
cttggctttatatatcttgtggaaaggacgaaacaccgtaatttctactaagtgtagatggggaccatagccaggagagtaatttctactaagtgtagatggtggtgatcagtcaagtagtaatttctactaagtgtagatttttttnnnnnnnnnnaagcttggcgtggatccgatatcaactagatcttgagacaaatggcagtattcatccacaattttaaaagaaaaggggggattggggggtacagtgcaggggaaagaatagtagacataatagcaacagacatacaaactaaag

SEQ ID NO: 10906 - DNA, 301 bp, Artificial Sequence
  Kmt2d.3_Atm.1
  crRNA array
  misc_feature (148)..(157): n is a, c, g, or t
cttggctttatatatcttgtggaaaggacgaaacaccgtaatttctactaagtgtagataggaaggggtcaggcgtggataatttctactaagtgtagatgagaaagtctccgaatcgtttaatttctactaagtgtagatttttttnnnnnnnnnnaagcttggcgtggatccgatatcaactagatcttgagacaaatggcagtattcatccacaattttaaaagaaaaggggggattggggggtacagtgcaggggaaagaatagtagacataatagcaacagacatacaaactaaag

SEQ ID NO: 10907 - DNA, 301 bp, Artificial Sequence
  Kmt2d.3_Atm.2
  crRNA array
  misc_feature (148)..(157): n is a, c, g, or t
cttggctttatatatcttgtggaaaggacgaaacaccgtaatttctactaagtgtagataggaaggggtcaggcgtggataatttctactaagtgtagatcctacgagggcacgagagactaatttctactaagtgtagatttttttnnnnnnnnnnaagcttggcgtggatccgatatcaactagatcttgagacaaatggcagtattcatccacaattttaaaagaaaaggggggattggggggtacagtgcaggggaaagaatagtagacataatagcaacagacatacaaactaaag

SEQ ID NO: 10908 - DNA, 301 bp, Artificial Sequence
  Kmt2d.3_Atm.3
  crRNA array
  misc_feature (148)..(157): n is a, c, g, or t
cttggctttatatatcttgtggaaaggacgaaacaccgtaatttctactaagtgtagataggaaggggtcaggcgtggataatttctactaagtgtagattgaaagtctccgatatgccataatttctactaagtgtagatttttttnnnnnnnnnnaagcttggcgtggatccgatatcaactagatcttgagacaaatggcagtattcatccacaattttaaaagaaaaggggggattggggggtacagtgcaggggaaagaatagtagacataatagcaacagacatacaaactaaag

SEQ ID NO: 10909 - DNA, 301 bp, Artificial Sequence
  Kmt2d.3_Atm.4
  crRNA array
  misc_feature (148)..(157): n is a, c, g, or t
cttggctttatatatcttgtggaaaggacgaaacaccgtaatttctactaagtgtagataggaaggggtcaggcgtggataatttctactaagtgtagatggtggtgatcagtcaagtagtaatttctactaagtgtagatttttttnnnnnnnnnnaagcttggcgtggatccgatatcaactagatcttgagacaaatggcagtattcatccacaattttaaaagaaaaggggggattggggggtacagtgcaggggaaagaatagtagacataatagcaacagacatacaaactaaag

SEQ ID NO: 10910 - DNA, 301 bp, Artificial Sequence
  Kmt2d.4_Atm.1
  crRNA array
  misc_feature (148)..(157): n is a, c, g, or t
cttggctttatatatcttgtggaaaggacgaaacaccgtaatttctactaagtgtagatcccagtcagcgaggaactcctaatttctactaagtgtagatgagaaagtctccgaatcgtttaatttctactaagtgtagatttttttnnnnnnnnnnaagcttggcgtggatccgatatcaactagatcttgagacaaatggcagtattcatccacaattttaaaagaaaaggggggattggggggtacagtgcaggggaaagaatagtagacataatagcaacagacatacaaactaaag

SEQ ID NO: 10911 - DNA, 301 bp, Artificial Sequence
  Kmt2d.4_Atm.2
  crRNA array
  misc_feature (148)..(157): n is a, c, g, or t
cttggctttatatatcttgtggaaaggacgaaacaccgtaatttctactaagtgtagatcccagtcagcgaggaactcctaatttctactaagtgtagatcctacgagggcacgagagactaatttctactaagtgtagatttttttnnnnnnnnnnaagcttggcgtggatccgatatcaactagatcttgagacaaatggcagtattcatccacaattttaaaagaaaaggggggattggggggtacagtgcaggggaaagaatagtagacataatagcaacagacatacaaactaaag

SEQ ID NO: 10912 - DNA, 301 bp, Artificial Sequence
  Kmt2d.4_Atm.3
  crRNA array
  misc_feature (148)..(157): n is a, c, g, or t
cttggctttatatatcttgtggaaaggacgaaacaccgtaatttctactaagtgtagatcccagtcagcgaggaactcctaatttctactaagtgtagattgaaagtctccgatatgccataatttctactaagtgtagatttttttnnnnnnnnnnaagcttggcgtggatccgatatcaactagatcttgagacaaatggcagtattcatccacaattttaaaagaaaaggggggattggggggtacagtgcaggggaaagaatagtagacataatagcaacagacatacaaactaaag

SEQ ID NO: 10913 - DNA, 301 bp, Artificial Sequence
  Kmt2d.4_Atm.4
  crRNA array
  misc_feature (148)..(157): n is a, c, g, or t
cttggctttatatatcttgtggaaaggacgaaacaccgtaatttctactaagtgtagatcccagtcagcgaggaactcctaatttctactaagtgtagatggtggtgatcagtcaagtagtaatttctactaagtgtagatttttttnnnnnnnnnnaagcttggcgtggatccgatatcaactagatcttgagacaaatggcagtattcatccacaattttaaaagaaaaggggggattggggggtacagtgcaggggaaagaatagtagacataatagcaacagacatacaaactaaag

SEQ ID NO: 10914 - DNA, 301 bp, Artificial Sequence
  Atrx.1_Nf2.1
  crRNA array
  misc_feature (148)..(157): n is a, c, g, or t
cttggctttatatatcttgtggaaaggacgaaacaccgtaatttctactaagtgtagatgccagtcgctcatatctctgtaatttctactaagtgtagatcggagtcatctgatagagattaatttctactaagtgtagatttttttnnnnnnnnnnaagcttggcgtggatccgatatcaactagatcttgagacaaatggcagtattcatccacaattttaaaagaaaaggggggattggggggtacagtgcaggggaaagaatagtagacataatagcaacagacatacaaactaaag

SEQ ID NO: 10915 - DNA, 301 bp, Artificial Sequence
  Atrx.1_Nf2.2
  crRNA array
  misc_feature (148)..(157): n is a, c, g, or t
cttggctttatatatcttgtggaaaggacgaaacaccgtaatttctactaagtgtagatgccagtcgctcatatctctgtaatttctactaagtgtagattgaggcgacggaaagctgactaatttctactaagtgtagatttttttnnnnnnnnnnaagcttggcgtggatccgatatcaactagatcttgagacaaatggcagtattcatccacaattttaaaagaaaaggggggattggggggtacagtgcaggggaaagaatagtagacataatagcaacagacatacaaactaaag

SEQ ID NO: 10916 - DNA, 301 bp, Artificial Sequence
  Atrx.1_Nf2.3
  crRNA array
  misc_feature (148)..(157): n is a, c, g, or t
cttggctttatatatcttgtggaaaggacgaaacaccgtaatttctactaagtgtagatgccagtcgctcatatctctgtaatttctactaagtgtagatcgtcgcctcataaataggtctaatttctactaagtgtagatttttttnnnnnnnnnnaagcttggcgtggatccgatatcaactagatcttgagacaaatggcagtattcatccacaattttaaaagaaaaggggggattggggggtacagtgcaggggaaagaatagtagacataatagcaacagacatacaaactaaag

SEQ ID NO: 10917 - DNA, 301 bp, Artificial Sequence
  Atrx.1_Nf2.4
  crRNA array
  misc_feature (148)..(157): n is a, c, g, or t
cttggctttatatatcttgtggaaaggacgaaacaccgtaatttctactaagtgtagatgccagtcgctcatatctctgtaatttctactaagtgtagataaggcctcgatctccgtctttaatttctactaagtgtagatttttttnnnnnnnnnnaagcttggcgtggatccgatatcaactagatcttgagacaaatggcagtattcatccacaattttaaaagaaaaggggggattggggggtacagtgcaggggaaagaatagtagacataatagcaacagacatacaaactaaag

SEQ ID NO: 10918 - DNA, 301 bp, Artificial Sequence
  Atrx.2_Nf2.1
  crRNA array
  misc_feature (148)..(157): n is a, c, g, or t
cttggctttatatatcttgtggaaaggacgaaacaccgtaatttctactaagtgtagatgcagcatgggggtatccctttaatttctactaagtgtagatcggagtcatctgatagagattaatttctactaagtgtagatttttttnnnnnnnnnnaagcttggcgtggatccgatatcaactagatcttgagacaaatggcagtattcatccacaattttaaaagaaaaggggggattggggggtacagtgcaggggaaagaatagtagacataatagcaacagacatacaaactaaag

SEQ ID NO: 10919 - DNA, 301 bp, Artificial Sequence
  Atrx.2_Nf2.2
  crRNA array
  misc_feature (148)..(157): n is a, c, g, or t
cttggctttatatatcttgtggaaaggacgaaacaccgtaatttctactaagtgtagatgcagcatgggggtatccctttaatttctactaagtgtagattgaggcgacggaaagctgactaatttctactaagtgtagatttttttnnnnnnnnnnaagcttggcgtggatccgatatcaactagatcttgagacaaatggcagtattcatccacaattttaaaagaaaaggggggattggggggtacagtgcaggggaaagaatagtagacataatagcaacagacatacaaactaaag

SEQ ID NO: 10920 - DNA, 301 bp, Artificial Sequence
  Atrx.2_Nf2.3
  crRNA array
  misc_feature (148)..(157): n is a, c, g, or t
cttggctttatatatcttgtggaaaggacgaaacaccgtaatttctactaagtgtagatgcagcatgggggtatccctttaatttctactaagtgtagatcgtcgcctcataaataggtctaatttctactaagtgtagatttttttnnnnnnnnnnaagcttggcgtggatccgatatcaactagatcttgagacaaatggcagtattcatccacaattttaaaagaaaaggggggattggggggtacagtgcaggggaaagaatagtagacataatagcaacagacatacaaactaaag

SEQ ID NO: 10921 - DNA, 301 bp, Artificial Sequence
  Atrx.2_Nf2.4
  crRNA array
  misc_feature (148)..(157): n is a, c, g, or t
cttggctttatatatcttgtggaaaggacgaaacaccgtaatttctactaagtgtagatgcagcatgggggtatccctttaatttctactaagtgtagataaggcctcgatctccgtctttaatttctactaagtgtagatttttttnnnnnnnnnnaagcttggcgtggatccgatatcaactagatcttgagacaaatggcagtattcatccacaattttaaaagaaaaggggggattggggggtacagtgcaggggaaagaatagtagacataatagcaacagacatacaaactaaag

SEQ ID NO: 10922 - DNA, 301 bp, Artificial Sequence
  Atrx.3_Nf2.1
  crRNA array
  misc_feature (148)..(157): n is a, c, g, or t
cttggctttatatatcttgtggaaaggacgaaacaccgtaatttctactaagtgtagatggagccctgtccgcaatgagtaatttctactaagtgtagatcggagtcatctgatagagattaatttctactaagtgtagatttttttnnnnnnnnnnaagcttggcgtggatccgatatcaactagatcttgagacaaatggcagtattcatccacaattttaaaagaaaaggggggattggggggtacagtgcaggggaaagaatagtagacataatagcaacagacatacaaactaaag

SEQ ID NO: 10923 - DNA, 301 bp, Artificial Sequence
  Atrx.3_Nf2.2
  crRNA array
  misc_feature (148)..(157): n is a, c, g, or t
cttggctttatatatcttgtggaaaggacgaaacaccgtaatttctactaagtgtagatggagccctgtccgcaatgagtaatttctactaagtgtagattgaggcgacggaaagctgactaatttctactaagtgtagatttttttnnnnnnnnnnaagcttggcgtggatccgatatcaactagatcttgagacaaatggcagtattcatccacaattttaaaagaaaaggggggattggggggtacagtgcaggggaaagaatagtagacataatagcaacagacatacaaactaaag

SEQ ID NO: 10924 - DNA, 301 bp, Artificial Sequence
  Atrx.3_Nf2.3
  crRNA array
  misc_feature (148)..(157): n is a, c, g, or t
cttggctttatatatcttgtggaaaggacgaaacaccgtaatttctactaagtgtagatggagccctgtccgcaatgagtaatttctactaagtgtagatcgtcgcctcataaataggtctaatttctactaagtgtagatttttttnnnnnnnnnnaagcttggcgtggatccgatatcaactagatcttgagacaaatggcagtattcatccacaattttaaaagaaaaggggggattggggggtacagtgcaggggaaagaatagtagacataatagcaacagacatacaaactaaag

SEQ ID NO: 10925 - DNA, 301 bp, Artificial Sequence
  Atrx.3_Nf2.4
  crRNA array
  misc_feature (148)..(157): n is a, c, g, or t
cttggctttatatatcttgtggaaaggacgaaacaccgtaatttctactaagtgtagatggagccctgtccgcaatgagtaatttctactaagtgtagataaggcctcgatctccgtctttaatttctactaagtgtagatttttttnnnnnnnnnnaagcttggcgtggatccgatatcaactagatcttgagacaaatggcagtattcatccacaattttaaaagaaaaggggggattggggggtacagtgcaggggaaagaatagtagacataatagcaacagacatacaaactaaag

SEQ ID NO: 10926 - DNA, 301 bp, Artificial Sequence
  Atrx.4_Nf2.1
  crRNA array
  misc_feature (148)..(157): n is a, c, g, or t
cttggctttatatatcttgtggaaaggacgaaacaccgtaatttctactaagtgtagataaactgggctcctactaaattaatttctactaagtgtagatcggagtcatctgatagagattaatttctactaagtgtagatttttttnnnnnnnnnnaagcttggcgtggatccgatatcaactagatcttgagacaaatggcagtattcatccacaattttaaaagaaaaggggggattggggggtacagtgcaggggaaagaatagtagacataatagcaacagacatacaaactaaag

SEQ ID NO: 10927 - DNA, 301 bp, Artificial Sequence
  Atrx.4_Nf2.2
  crRNA array
  misc_feature (148)..(157): n is a, c, g, or t
cttggctttatatatcttgtggaaaggacgaaacaccgtaatttctactaagtgtagataaactgggctcctactaaattaatttctactaagtgtagattgaggcgacggaaagctgactaatttctactaagtgtagatttttttnnnnnnnnnnaagcttggcgtggatccgatatcaactagatcttgagacaaatggcagtattcatccacaattttaaaagaaaaggggggattggggggtacagtgcaggggaaagaatagtagacataatagcaacagacatacaaactaaag

SEQ ID NO: 10928 - DNA, 301 bp, Artificial Sequence
  Atrx.4_Nf2.3
  crRNA array
  misc_feature (148)..(157): n is a, c, g, or t
cttggctttatatatcttgtggaaaggacgaaacaccgtaatttctactaagtgtagataaactgggctcctactaaattaatttctactaagtgtagatcgtcgcctcataaataggtctaatttctactaagtgtagatttttttnnnnnnnnnnaagcttggcgtggatccgatatcaactagatcttgagacaaatggcagtattcatccacaattttaaaagaaaaggggggattggggggtacagtgcaggggaaagaatagtagacataatagcaacagacatacaaactaaag

SEQ ID NO: 10929 - DNA, 301 bp, Artificial Sequence
  Atrx.4_Nf2.4
  crRNA array
  misc_feature (148)..(157): n is a, c, g, or t
cttggctttatatatcttgtggaaaggacgaaacaccgtaatttctactaagtgtagataaactgggctcctactaaattaatttctactaagtgtagataaggcctcgatctccgtctttaatttctactaagtgtagatttttttnnnnnnnnnnaagcttggcgtggatccgatatcaactagatcttgagacaaatggcagtattcatccacaattttaaaagaaaaggggggattggggggtacagtgcaggggaaagaatagtagacataatagcaacagacatacaaactaaag

SEQ ID NO: 10930 - DNA, 301 bp, Artificial Sequence
  Atrx.1_Jak1.1
  crRNA array
  misc_feature (148)..(157): n is a, c, g, or t
cttggctttatatatcttgtggaaaggacgaaacaccgtaatttctactaagtgtagatgccagtcgctcatatctctgtaatttctactaagtgtagatgagcgcaggccgccgcagcctaatttctactaagtgtagatttttttnnnnnnnnnnaagcttggcgtggatccgatatcaactagatcttgagacaaatggcagtattcatccacaattttaaaagaaaaggggggattggggggtacagtgcaggggaaagaatagtagacataatagcaacagacatacaaactaaag

SEQ ID NO: 10931 - DNA, 301 bp, Artificial Sequence
  Atrx.1_Jak1.2
  crRNA array
  misc_feature (148)..(157): n is a, c, g, or t
cttggctttatatatcttgtggaaaggacgaaacaccgtaatttctactaagtgtagatgccagtcgctcatatctctgtaatttctactaagtgtagatagggacactggacaaccgaataatttctactaagtgtagatttttttnnnnnnnnnnaagcttggcgtggatccgatatcaactagatcttgagacaaatggcagtattcatccacaattttaaaagaaaaggggggattggggggtacagtgcaggggaaagaatagtagacataatagcaacagacatacaaactaaag

SEQ ID NO: 10932 - DNA, 301 bp, Artificial Sequence
  Atrx.1_Jak1.3
  crRNA array
  misc_feature (148)..(157): n is a, c, g, or t
cttggctttatatatcttgtggaaaggacgaaacaccgtaatttctactaagtgtagatgccagtcgctcatatctctgtaatttctactaagtgtagatgcacagaacgccatggcatttaatttctactaagtgtagatttttttnnnnnnnnnnaagcttggcgtggatccgatatcaactagatcttgagacaaatggcagtattcatccacaattttaaaagaaaaggggggattggggggtacagtgcaggggaaagaatagtagacataatagcaacagacatacaaactaaag

SEQ ID NO: 10933 - DNA, 301 bp, Artificial Sequence
  Atrx.1_Jak1.4
  crRNA array
  misc_feature (148)..(157): n is a, c, g, or t
cttggctttatatatcttgtggaaaggacgaaacaccgtaatttctactaagtgtagatgccagtcgctcatatctctgtaatttctactaagtgtagattgccgccactggatcccgagtaatttctactaagtgtagatttttttnnnnnnnnnnaagcttggcgtggatccgatatcaactagatcttgagacaaatggcagtattcatccacaattttaaaagaaaaggggggattggggggtacagtgcaggggaaagaatagtagacataatagcaacagacatacaaactaaag

SEQ ID NO: 10934 - DNA, 301 bp, Artificial Sequence
  Atrx.2_Jak1.1
  crRNA array
  misc_feature (148)..(157): n is a, c, g, or t
cttggctttatatatcttgtggaaaggacgaaacaccgtaatttctactaagtgtagatgcagcatgggggtatccctttaatttctactaagtgtagatgagcgcaggccgccgcagcctaatttctactaagtgtagatttttttnnnnnnnnnnaagcttggcgtggatccgatatcaactagatcttgagacaaatggcagtattcatccacaattttaaaagaaaaggggggattggggggtacagtgcaggggaaagaatagtagacataatagcaacagacatacaaactaaag

SEQ ID NO: 10935 - DNA, 301 bp, Artificial Sequence
  Atrx.2_Jak1.2
  crRNA array
  misc_feature (148)..(157): n is a, c, g, or t
cttggctttatatatcttgtggaaaggacgaaacaccgtaatttctactaagtgtagatgcagcatgggggtatccctttaatttctactaagtgtagatagggacactggacaaccgaataatttctactaagtgtagatttttttnnnnnnnnnnaagcttggcgtggatccgatatcaactagatcttgagacaaatggcagtattcatccacaattttaaaagaaaaggggggattggggggtacagtgcaggggaaagaatagtagacataatagcaacagacatacaaactaaag

SEQ ID NO: 10936 - DNA, 301 bp, Artificial Sequence
  Atrx.2_Jak1.3
  crRNA array
  misc_feature (148)..(157): n is a, c, g, or t
cttggctttatatatcttgtggaaaggacgaaacaccgtaatttctactaagtgtagatgcagcatgggggtatccctttaatttctactaagtgtagatgcacagaacgccatggcatttaatttctactaagtgtagatttttttnnnnnnnnnnaagcttggcgtggatccgatatcaactagatcttgagacaaatggcagtattcatccacaattttaaaagaaaaggggggattggggggtacagtgcaggggaaagaatagtagacataatagcaacagacatacaaactaaag

SEQ ID NO: 10937 - DNA, 301 bp, Artificial Sequence
  Atrx.2_Jak1.4
  crRNA array
  misc_feature (148)..(157): n is a, c, g, or t
cttggctttatatatcttgtggaaaggacgaaacaccgtaatttctactaagtgtagatgcagcatgggggtatccctttaatttctactaagtgtagattgccgccactggatcccgagtaatttctactaagtgtagatttttttnnnnnnnnnnaagcttggcgtggatccgatatcaactagatcttgagacaaatggcagtattcatccacaattttaaaagaaaaggggggattggggggtacagtgcaggggaaagaatagtagacataatagcaacagacatacaaactaaag

SEQ ID NO: 10938 - DNA, 301 bp, Artificial Sequence
  Atrx.3_Jak1.1
  crRNA array
  misc_feature (148)..(157): n is a, c, g, or t
cttggctttatatatcttgtggaaaggacgaaacaccgtaatttctactaagtgtagatggagccctgtccgcaatgagtaatttctactaagtgtagatgagcgcaggccgccgcagcctaatttctactaagtgtagatttttttnnnnnnnnnnaagcttggcgtggatccgatatcaactagatcttgagacaaatggcagtattcatccacaattttaaaagaaaaggggggattggggggtacagtgcaggggaaagaatagtagacataatagcaacagacatacaaactaaag

SEQ ID NO: 10939 - DNA, 301 bp, Artificial Sequence
  Atrx.3_Jak1.2
  crRNA array
  misc_feature (148)..(157): n is a, c, g, or t
cttggctttatatatcttgtggaaaggacgaaacaccgtaatttctactaagtgtagatggagccctgtccgcaatgagtaatttctactaagtgtagatagggacactggacaaccgaataatttctactaagtgtagatttttttnnnnnnnnnnaagcttggcgtggatccgatatcaactagatcttgagacaaatggcagtattcatccacaattttaaaagaaaaggggggattggggggtacagtgcaggggaaagaatagtagacataatagcaacagacatacaaactaaag

SEQ ID NO: 10940 - DNA, 301 bp, Artificial Sequence
  Atrx.3_Jak1.3
  crRNA array
  misc_feature (148)..(157): n is a, c, g, or t
cttggctttatatatcttgtggaaaggacgaaacaccgtaatttctactaagtgtagatggagccctgtccgcaatgagtaatttctactaagtgtagatgcacagaacgccatggcatttaatttctactaagtgtagatttttttnnnnnnnnnnaagcttggcgtggatccgatatcaactagatcttgagacaaatggcagtattcatccacaattttaaaagaaaaggggggattggggggtacagtgcaggggaaagaatagtagacataatagcaacagacatacaaactaaag

SEQ ID NO: 10941 - DNA, 301 bp, Artificial Sequence
  Atrx.3_Jak1.4
  crRNA array
  misc_feature (148)..(157): n is a, c, g, or t
cttggctttatatatcttgtggaaaggacgaaacaccgtaatttctactaagtgtagatggagccctgtccgcaatgagtaatttctactaagtgtagattgccgccactggatcccgagtaatttctactaagtgtagatttttttnnnnnnnnnnaagcttggcgtggatccgatatcaactagatcttgagacaaatggcagtattcatccacaattttaaaagaaaaggggggattggggggtacagtgcaggggaaagaatagtagacataatagcaacagacatacaaactaaag

SEQ ID NO: 10942 - DNA, 301 bp, Artificial Sequence
  Atrx.4_Jak1.1
  crRNA array
  misc_feature (148)..(157): n is a, c, g, or t
cttggctttatatatcttgtggaaaggacgaaacaccgtaatttctactaagtgtagataaactgggctcctactaaattaatttctactaagtgtagatgagcgcaggccgccgcagcctaatttctactaagtgtagatttttttnnnnnnnnnnaagcttggcgtggatccgatatcaactagatcttgagacaaatggcagtattcatccacaattttaaaagaaaaggggggattggggggtacagtgcaggggaaagaatagtagacataatagcaacagacatacaaactaaag

SEQ ID NO: 10943 - DNA, 301 bp, Artificial Sequence
  Atrx.4_Jak1.2
  crRNA array
  misc_feature (148)..(157): n is a, c, g, or t
cttggctttatatatcttgtggaaaggacgaaacaccgtaatttctactaagtgtagataaactgggctcctactaaattaatttctactaagtgtagatagggacactggacaaccgaataatttctactaagtgtagatttttttnnnnnnnnnnaagcttggcgtggatccgatatcaactagatcttgagacaaatggcagtattcatccacaattttaaaagaaaaggggggattggggggtacagtgcaggggaaagaatagtagacataatagcaacagacatacaaactaaag

SEQ ID NO: 10944 - DNA, 301 bp, Artificial Sequence
  Atrx.4_Jak1.3
  crRNA array
  misc_feature (148)..(157): n is a, c, g, or t
cttggctttatatatcttgtggaaaggacgaaacaccgtaatttctactaagtgtagataaactgggctcctactaaattaatttctactaagtgtagatgcacagaacgccatggcatttaatttctactaagtgtagatttttttnnnnnnnnnnaagcttggcgtggatccgatatcaactagatcttgagacaaatggcagtattcatccacaattttaaaagaaaaggggggattggggggtacagtgcaggggaaagaatagtagacataatagcaacagacatacaaactaaag

SEQ ID NO: 10945 - DNA, 301 bp, Artificial Sequence
  Atrx.4_Jak1.4
  crRNA array
  misc_feature (148)..(157): n is a, c, g, or t
cttggctttatatatcttgtggaaaggacgaaacaccgtaatttctactaagtgtagataaactgggctcctactaaattaatttctactaagtgtagattgccgccactggatcccgagtaatttctactaagtgtagatttttttnnnnnnnnnnaagcttggcgtggatccgatatcaactagatcttgagacaaatggcagtattcatccacaattttaaaagaaaaggggggattggggggtacagtgcaggggaaagaatagtagacataatagcaacagacatacaaactaaag

SEQ ID NO: 10946 - DNA, 301 bp, Artificial Sequence
  Atrx.1_Chd1.1
  crRNA array
  misc_feature (148)..(157): n is a, c, g, or t
cttggctttatatatcttgtggaaaggacgaaacaccgtaatttctactaagtgtagatgccagtcgctcatatctctgtaatttctactaagtgtagatcgccccactctgcaatccattaatttctactaagtgtagatttttttnnnnnnnnnnaagcttggcgtggatccgatatcaactagatcttgagacaaatggcagtattcatccacaattttaaaagaaaaggggggattggggggtacagtgcaggggaaagaatagtagacataatagcaacagacatacaaactaaag

SEQ ID NO: 10947 - DNA, 301 bp, Artificial Sequence
  Atrx.1_Chd1.2
  crRNA array
  misc_feature (148)..(157): n is a, c, g, or t
cttggctttatatatcttgtggaaaggacgaaacaccgtaatttctactaagtgtagatgccagtcgctcatatctctgtaatttctactaagtgtagattgcagccggcgtctggcagctaatttctactaagtgtagatttttttnnnnnnnnnnaagcttggcgtggatccgatatcaactagatcttgagacaaatggcagtattcatccacaattttaaaagaaaaggggggattggggggtacagtgcaggggaaagaatagtagacataatagcaacagacatacaaactaaag

SEQ ID NO: 10948 - DNA, 301 bp, Artificial Sequence
  Atrx.1_Chd1.3
  crRNA array
  misc_feature (148)..(157): n is a, c, g, or t
cttggctttatatatcttgtggaaaggacgaaacaccgtaatttctactaagtgtagatgccagtcgctcatatctctgtaatttctactaagtgtagatatcagcaagtatgcaactattaatttctactaagtgtagatttttttnnnnnnnnnnaagcttggcgtggatccgatatcaactagatcttgagacaaatggcagtattcatccacaattttaaaagaaaaggggggattggggggtacagtgcaggggaaagaatagtagacataatagcaacagacatacaaactaaag

SEQ ID NO: 10949 - DNA, 301 bp, Artificial Sequence
  Atrx.1_Chd1.4
  crRNA array
  misc_feature (148)..(157): n is a, c, g, or t
cttggctttatatatcttgtggaaaggacgaaacaccgtaatttctactaagtgtagatgccagtcgctcatatctctgtaatttctactaagtgtagataaatggcggataactcctcttaatttctactaagtgtagatttttttnnnnnnnnnnaagcttggcgtggatccgatatcaactagatcttgagacaaatggcagtattcatccacaattttaaaagaaaaggggggattggggggtacagtgcaggggaaagaatagtagacataatagcaacagacatacaaactaaag

SEQ ID NO: 10950 - DNA, 301 bp, Artificial Sequence
  Atrx.2_Chd1.1
  crRNA array
  misc_feature (148)..(157): n is a, c, g, or t
cttggctttatatatcttgtggaaaggacgaaacaccgtaatttctactaagtgtagatgcagcatgggggtatccctttaatttctactaagtgtagatcgccccactctgcaatccattaatttctactaagtgtagatttttttnnnnnnnnnnaagcttggcgtggatccgatatcaactagatcttgagacaaatggcagtattcatccacaattttaaaagaaaaggggggattggggggtacagtgcaggggaaagaatagtagacataatagcaacagacatacaaactaaag

SEQ ID NO: 10951 - DNA, 301 bp, Artificial Sequence
  Atrx.2_Chd1.2
  crRNA array
  misc_feature (148)..(157): n is a, c, g, or t
cttggctttatatatcttgtggaaaggacgaaacaccgtaatttctactaagtgtagatgcagcatgggggtatccctttaatttctactaagtgtagattgcagccggcgtctggcagctaatttctactaagtgtagatttttttnnnnnnnnnnaagcttggcgtggatccgatatcaactagatcttgagacaaatggcagtattcatccacaattttaaaagaaaaggggggattggggggtacagtgcaggggaaagaatagtagacataatagcaacagacatacaaactaaag

SEQ ID NO: 10952 - DNA, 301 bp, Artificial Sequence
  Atrx.2_Chd1.3
  crRNA array
  misc_feature (148)..(157): n is a, c, g, or t
cttggctttatatatcttgtggaaaggacgaaacaccgtaatttctactaagtgtagatgcagcatgggggtatccctttaatttctactaagtgtagatatcagcaagtatgcaactattaatttctactaagtgtagatttttttnnnnnnnnnnaagcttggcgtggatccgatatcaactagatcttgagacaaatggcagtattcatccacaattttaaaagaaaaggggggattggggggtacagtgcaggggaaagaatagtagacataatagcaacagacatacaaactaaag

SEQ ID NO: 10953 - DNA, 301 bp, Artificial Sequence
  Atrx.2_Chd1.4
  crRNA array
  misc_feature (148)..(157): n is a, c, g, or t
cttggctttatatatcttgtggaaaggacgaaacaccgtaatttctactaagtgtagatgcagcatgggggtatccctttaatttctactaagtgtagataaatggcggataactcctcttaatttctactaagtgtagatttttttnnnnnnnnnnaagcttggcgtggatccgatatcaactagatcttgagacaaatggcagtattcatccacaattttaaaagaaaaggggggattggggggtacagtgcaggggaaagaatagtagacataatagcaacagacatacaaactaaag

SEQ ID NO: 10954 - DNA, 301 bp, Artificial Sequence
  Atrx.3_Chd1.1
  crRNA array
  misc_feature (148)..(157): n is a, c, g, or t
cttggctttatatatcttgtggaaaggacgaaacaccgtaatttctactaagtgtagatggagccctgtccgcaatgagtaatttctactaagtgtagatcgccccactctgcaatccattaatttctactaagtgtagatttttttnnnnnnnnnnaagcttggcgtggatccgatatcaactagatcttgagacaaatggcagtattcatccacaattttaaaagaaaaggggggattggggggtacagtgcaggggaaagaatagtagacataatagcaacagacatacaaactaaag

SEQ ID NO: 10955 - DNA, 301 bp, Artificial Sequence
  Atrx.3_Chd1.2
  crRNA array
  misc_feature (148)..(157): n is a, c, g, or t
cttggctttatatatcttgtggaaaggacgaaacaccgtaatttctactaagtgtagatggagccctgtccgcaatgagtaatttctactaagtgtagattgcagccggcgtctggcagctaatttctactaagtgtagatttttttnnnnnnnnnnaagcttggcgtggatccgatatcaactagatcttgagacaaatggcagtattcatccacaattttaaaagaaaaggggggattggggggtacagtgcaggggaaagaatagtagacataatagcaacagacatacaaactaaag

SEQ ID NO: 10956 - DNA, 301 bp, Artificial Sequence
  Atrx.3_Chd1.3
  crRNA array
  misc_feature (148)..(157): n is a, c, g, or t
cttggctttatatatcttgtggaaaggacgaaacaccgtaatttctactaagtgtagatggagccctgtccgcaatgagtaatttctactaagtgtagatatcagcaagtatgcaactattaatttctactaagtgtagatttttttnnnnnnnnnnaagcttggcgtggatccgatatcaactagatcttgagacaaatggcagtattcatccacaattttaaaagaaaaggggggattggggggtacagtgcaggggaaagaatagtagacataatagcaacagacatacaaactaaag

SEQ ID NO: 10957 - DNA, 301 bp, Artificial Sequence
  Atrx.3_Chd1.4
  crRNA array
  misc_feature (148)..(157): n is a, c, g, or t
cttggctttatatatcttgtggaaaggacgaaacaccgtaatttctactaagtgtagatggagccctgtccgcaatgagtaatttctactaagtgtagataaatggcggataactcctcttaatttctactaagtgtagatttttttnnnnnnnnnnaagcttggcgtggatccgatatcaactagatcttgagacaaatggcagtattcatccacaattttaaaagaaaaggggggattggggggtacagtgcaggggaaagaatagtagacataatagcaacagacatacaaactaaag

SEQ ID NO: 10958 - DNA, 301 bp, Artificial Sequence
  Atrx.4_Chd1.1
  crRNA array
  misc_feature (148)..(157): n is a, c, g, or t
cttggctttatatatcttgtggaaaggacgaaacaccgtaatttctactaagtgtagataaactgggctcctactaaattaatttctactaagtgtagatcgccccactctgcaatccattaatttctactaagtgtagatttttttnnnnnnnnnnaagcttggcgtggatccgatatcaactagatcttgagacaaatggcagtattcatccacaattttaaaagaaaaggggggattggggggtacagtgcaggggaaagaatagtagacataatagcaacagacatacaaactaaag

SEQ ID NO: 10959 - DNA, 301 bp, Artificial Sequence
  Atrx.4_Chd1.2
  crRNA array
  misc_feature (148)..(157): n is a, c, g, or t
cttggctttatatatcttgtggaaaggacgaaacaccgtaatttctactaagtgtagataaactgggctcctactaaattaatttctactaagtgtagattgcagccggcgtctggcagctaatttctactaagtgtagatttttttnnnnnnnnnnaagcttggcgtggatccgatatcaactagatcttgagacaaatggcagtattcatccacaattttaaaagaaaaggggggattggggggtacagtgcaggggaaagaatagtagacataatagcaacagacatacaaactaaag

SEQ ID NO: 10960 - DNA, 301 bp, Artificial Sequence
  Atrx.4_Chd1.3
  crRNA array
  misc_feature (148)..(157): n is a, c, g, or t
cttggctttatatatcttgtggaaaggacgaaacaccgtaatttctactaagtgtagataaactgggctcctactaaattaatttctactaagtgtagatatcagcaagtatgcaactattaatttctactaagtgtagatttttttnnnnnnnnnnaagcttggcgtggatccgatatcaactagatcttgagacaaatggcagtattcatccacaattttaaaagaaaaggggggattggggggtacagtgcaggggaaagaatagtagacataatagcaacagacatacaaactaaag

SEQ ID NO: 10961 - DNA, 301 bp, Artificial Sequence
  Atrx.4_Chd1.4
  crRNA array
  misc_feature (148)..(157): n is a, c, g, or t
cttggctttatatatcttgtggaaaggacgaaacaccgtaatttctactaagtgtagataaactgggctcctactaaattaatttctactaagtgtagataaatggcggataactcctcttaatttctactaagtgtagatttttttnnnnnnnnnnaagcttggcgtggatccgatatcaactagatcttgagacaaatggcagtattcatccacaattttaaaagaaaaggggggattggggggtacagtgcaggggaaagaatagtagacataatagcaacagacatacaaactaaag

SEQ ID NO: 10962 - DNA, 301 bp, Artificial Sequence
  Atrx.1_Pole.1
  crRNA array
  misc_feature (148)..(157): n is a, c, g, or t
cttggctttatatatcttgtggaaaggacgaaacaccgtaatttctactaagtgtagatgccagtcgctcatatctctgtaatttctactaagtgtagatgcgcgctctccacgtgctcttaatttctactaagtgtagatttttttnnnnnnnnnnaagcttggcgtggatccgatatcaactagatcttgagacaaatggcagtattcatccacaattttaaaagaaaaggggggattggggggtacagtgcaggggaaagaatagtagacataatagcaacagacatacaaactaaag

SEQ ID NO: 10963 - DNA, 301 bp, Artificial Sequence
  Atrx.1_Pole.2
  crRNA array
  misc_feature (148)..(157): n is a, c, g, or t
cttggctttatatatcttgtggaaaggacgaaacaccgtaatttctactaagtgtagatgccagtcgctcatatctctgtaatttctactaagtgtagatacatcgagacgaccaaactgtaatttctactaagtgtagatttttttnnnnnnnnnnaagcttggcgtggatccgatatcaactagatcttgagacaaatggcagtattcatccacaattttaaaagaaaaggggggattggggggtacagtgcaggggaaagaatagtagacataatagcaacagacatacaaactaaag

SEQ ID NO: 10964 - DNA, 301 bp, Artificial Sequence
  Atrx.1_Pole.3
  crRNA array
  misc_feature (148)..(157): n is a, c, g, or t
cttggctttatatatcttgtggaaaggacgaaacaccgtaatttctactaagtgtagatgccagtcgctcatatctctgtaatttctactaagtgtagatctgctgcaacgagtcgagaataatttctactaagtgtagatttttttnnnnnnnnnnaagcttggcgtggatccgatatcaactagatcttgagacaaatggcagtattcatccacaattttaaaagaaaaggggggattggggggtacagtgcaggggaaagaatagtagacataatagcaacagacatacaaactaaag

SEQ ID NO: 10965 - DNA, 301 bp, Artificial Sequence
  Atrx.1_Pole.4
  crRNA array
  misc_feature (148)..(157): n is a, c, g, or t
cttggctttatatatcttgtggaaaggacgaaacaccgtaatttctactaagtgtagatgccagtcgctcatatctctgtaatttctactaagtgtagatgggagatgatatagcggcagtaatttctactaagtgtagatttttttnnnnnnnnnnaagcttggcgtggatccgatatcaactagatcttgagacaaatggcagtattcatccacaattttaaaagaaaaggggggattggggggtacagtgcaggggaaagaatagtagacataatagcaacagacatacaaactaaag

SEQ ID NO: 10966 - DNA, 301 bp, Artificial Sequence
  Atrx.2_Pole.1
  crRNA array
  misc_feature (148)..(157): n is a, c, g, or t
cttggctttatatatcttgtggaaaggacgaaacaccgtaatttctactaagtgtagatgcagcatgggggtatccctttaatttctactaagtgtagatgcgcgctctccacgtgctcttaatttctactaagtgtagatttttttnnnnnnnnnnaagcttggcgtggatccgatatcaactagatcttgagacaaatggcagtattcatccacaattttaaaagaaaaggggggattggggggtacagtgcaggggaaagaatagtagacataatagcaacagacatacaaactaaag

SEQ ID NO: 10967 - DNA, 301 bp, Artificial Sequence
  Atrx.2_Pole.2
  crRNA array
  misc_feature (148)..(157): n is a, c, g, or t
cttggctttatatatcttgtggaaaggacgaaacaccgtaatttctactaagtgtagatgcagcatgggggtatccctttaatttctactaagtgtagatacatcgagacgaccaaactgtaatttctactaagtgtagatttttttnnnnnnnnnnaagcttggcgtggatccgatatcaactagatcttgagacaaatggcagtattcatccacaattttaaaagaaaaggggggattggggggtacagtgcaggggaaagaatagtagacataatagcaacagacatacaaactaaag

SEQ ID NO: 10968 - DNA, 301 bp, Artificial Sequence
  Atrx.2_Pole.3
  crRNA array
  misc_feature (148)..(157): n is a, c, g, or t
cttggctttatatatcttgtggaaaggacgaaacaccgtaatttctactaagtgtagatgcagcatgggggtatccctttaatttctactaagtgtagatctgctgcaacgagtcgagaataatttctactaagtgtagatttttttnnnnnnnnnnaagcttggcgtggatccgatatcaactagatcttgagacaaatggcagtattcatccacaattttaaaagaaaaggggggattggggggtacagtgcaggggaaagaatagtagacataatagcaacagacatacaaactaaag

SEQ ID NO: 10969 - DNA, 301 bp, Artificial Sequence
  Atrx.2_Pole.4
  crRNA array
  misc_feature (148)..(157): n is a, c, g, or t
cttggctttatatatcttgtggaaaggacgaaacaccgtaatttctactaagtgtagatgcagcatgggggtatccctttaatttctactaagtgtagatgggagatgatatagcggcagtaatttctactaagtgtagatttttttnnnnnnnnnnaagcttggcgtggatccgatatcaactagatcttgagacaaatggcagtattcatccacaattttaaaagaaaaggggggattggggggtacagtgcaggggaaagaatagtagacataatagcaacagacatacaaactaaag

SEQ ID NO: 10970 - DNA, 301 bp, Artificial Sequence
  Atrx.3_Pole.1
  crRNA array
  misc_feature (148)..(157): n is a, c, g, or t
cttggctttatatatcttgtggaaaggacgaaacaccgtaatttctactaagtgtagatggagccctgtccgcaatgagtaatttctactaagtgtagatgcgcgctctccacgtgctcttaatttctactaagtgtagatttttttnnnnnnnnnnaagcttggcgtggatccgatatcaactagatcttgagacaaatggcagtattcatccacaattttaaaagaaaaggggggattggggggtacagtgcaggggaaagaatagtagacataatagcaacagacatacaaactaaag

SEQ ID NO: 10971 - DNA, 301 bp, Artificial Sequence
  Atrx.3_Pole.2
  crRNA array
  misc_feature (148)..(157): n is a, c, g, or t
cttggctttatatatcttgtggaaaggacgaaacaccgtaatttctactaagtgtagatggagccctgtccgcaatgagtaatttctactaagtgtagatacatcgagacgaccaaactgtaatttctactaagtgtagatttttttnnnnnnnnnnaagcttggcgtggatccgatatcaactagatcttgagacaaatggcagtattcatccacaattttaaaagaaaaggggggattggggggtacagtgcaggggaaagaatagtagacataatagcaacagacatacaaactaaag

SEQ ID NO: 10972 - DNA, 301 bp, Artificial Sequence
  Atrx.3_Pole.3
  crRNA array
  misc_feature (148)..(157): n is a, c, g, or t
cttggctttatatatcttgtggaaaggacgaaacaccgtaatttctactaagtgtagatggagccctgtccgcaatgagtaatttctactaagtgtagatctgctgcaacgagtcgagaataatttctactaagtgtagatttttttnnnnnnnnnnaagcttggcgtggatccgatatcaactagatcttgagacaaatggcagtattcatccacaattttaaaagaaaaggggggattggggggtacagtgcaggggaaagaatagtagacataatagcaacagacatacaaactaaag

SEQ ID NO: 10973 - DNA, 301 bp, Artificial Sequence
  Atrx.3_Pole.4
  crRNA array
  misc_feature (148)..(157): n is a, c, g, or t
cttggctttatatatcttgtggaaaggacgaaacaccgtaatttctactaagtgtagatggagccctgtccgcaatgagtaatttctactaagtgtagatgggagatgatatagcggcagtaatttctactaagtgtagatttttttnnnnnnnnnnaagcttggcgtggatccgatatcaactagatcttgagacaaatggcagtattcatccacaattttaaaagaaaaggggggattggggggtacagtgcaggggaaagaatagtagacataatagcaacagacatacaaactaaag

SEQ ID NO: 10974 - DNA, 301 bp, Artificial Sequence
  Atrx.4_Pole.1
  crRNA array
  misc_feature (148)..(157): n is a, c, g, or t
cttggctttatatatcttgtggaaaggacgaaacaccgtaatttctactaagtgtagataaactgggctcctactaaattaatttctactaagtgtagatgcgcgctctccacgtgctcttaatttctactaagtgtagatttttttnnnnnnnnnnaagcttggcgtggatccgatatcaactagatcttgagacaaatggcagtattcatccacaattttaaaagaaaaggggggattggggggtacagtgcaggggaaagaatagtagacataatagcaacagacatacaaactaaag

SEQ ID NO: 10975 - DNA, 301 bp, Artificial Sequence
  Atrx.4_Pole.2
  crRNA array
  misc_feature (148)..(157): n is a, c, g, or t
cttggctttatatatcttgtggaaaggacgaaacaccgtaatttctactaagtgtagataaactgggctcctactaaattaatttctactaagtgtagatacatcgagacgaccaaactgtaatttctactaagtgtagatttttttnnnnnnnnnnaagcttggcgtggatccgatatcaactagatcttgagacaaatggcagtattcatccacaattttaaaagaaaaggggggattggggggtacagtgcaggggaaagaatagtagacataatagcaacagacatacaaactaaag

SEQ ID NO: 10976 - DNA, 301 bp, Artificial Sequence
  Atrx.4_Pole.3
  crRNA array
  misc_feature (148)..(157): n is a, c, g, or t
cttggctttatatatcttgtggaaaggacgaaacaccgtaatttctactaagtgtagataaactgggctcctactaaattaatttctactaagtgtagatctgctgcaacgagtcgagaataatttctactaagtgtagatttttttnnnnnnnnnnaagcttggcgtggatccgatatcaactagatcttgagacaaatggcagtattcatccacaattttaaaagaaaaggggggattggggggtacagtgcaggggaaagaatagtagacataatagcaacagacatacaaactaaag

SEQ ID NO: 10977 - DNA, 301 bp, Artificial Sequence
  Atrx.4_Pole.4
  crRNA array
  misc_feature (148)..(157): n is a, c, g, or t
cttggctttatatatcttgtggaaaggacgaaacaccgtaatttctactaagtgtagataaactgggctcctactaaattaatttctactaagtgtagatgggagatgatatagcggcagtaatttctactaagtgtagatttttttnnnnnnnnnnaagcttggcgtggatccgatatcaactagatcttgagacaaatggcagtattcatccacaattttaaaagaaaaggggggattggggggtacagtgcaggggaaagaatagtagacataatagcaacagacatacaaactaaag

SEQ ID NO: 10978 - DNA, 301 bp, Artificial Sequence
  Atrx.1_Notch1.1
  crRNA array
  misc_feature (148)..(157): n is a, c, g, or t
cttggctttatatatcttgtggaaaggacgaaacaccgtaatttctactaagtgtagatgccagtcgctcatatctctgtaatttctactaagtgtagattgggccaacgatgccaggactaatttctactaagtgtagatttttttnnnnnnnnnnaagcttggcgtggatccgatatcaactagatcttgagacaaatggcagtattcatccacaattttaaaagaaaaggggggattggggggtacagtgcaggggaaagaatagtagacataatagcaacagacatacaaactaaag

SEQ ID NO: 10979 - DNA, 301 bp, Artificial Sequence
  Atrx.1_Notch1.2
  crRNA array
  misc_feature (148)..(157): n is a, c, g, or t
cttggctttatatatcttgtggaaaggacgaaacaccgtaatttctactaagtgtagatgccagtcgctcatatctctgtaatttctactaagtgtagatgtcgccccagcatcctgaagtaatttctactaagtgtagatttttttnnnnnnnnnnaagcttggcgtggatccgatatcaactagatcttgagacaaatggcagtattcatccacaattttaaaagaaaaggggggattggggggtacagtgcaggggaaagaatagtagacataatagcaacagacatacaaactaaag

SEQ ID NO: 10980 - DNA, 301 bp, Artificial Sequence
  Atrx.1_Notch1.3
  crRNA array
  misc_feature (148)..(157): n is a, c, g, or t
cttggctttatatatcttgtggaaaggacgaaacaccgtaatttctactaagtgtagatgccagtcgctcatatctctgtaatttctactaagtgtagatagccacccccgccacgcctctaatttctactaagtgtagatttttttnnnnnnnnnnaagcttggcgtggatccgatatcaactagatcttgagacaaatggcagtattcatccacaattttaaaagaaaaggggggattggggggtacagtgcaggggaaagaatagtagacataatagcaacagacatacaaactaaag

SEQ ID NO: 10981 - DNA, 301 bp, Artificial Sequence
  Atrx.1_Notch1.4
  crRNA array
  misc_feature (148)..(157): n is a, c, g, or t
cttggctttatatatcttgtggaaaggacgaaacaccgtaatttctactaagtgtagatgccagtcgctcatatctctgtaatttctactaagtgtagataaagtgtcagaggccagcaataatttctactaagtgtagatttttttnnnnnnnnnnaagcttggcgtggatccgatatcaactagatcttgagacaaatggcagtattcatccacaattttaaaagaaaaggggggattggggggtacagtgcaggggaaagaatagtagacataatagcaacagacatacaaactaaag

SEQ ID NO: 10982 - DNA, 301 bp, Artificial Sequence
  Atrx.2_Notch1.1
  crRNA array
  misc_feature (148)..(157): n is a, c, g, or t
cttggctttatatatcttgtggaaaggacgaaacaccgtaatttctactaagtgtagatgcagcatgggggtatccctttaatttctactaagtgtagattgggccaacgatgccaggactaatttctactaagtgtagatttttttnnnnnnnnnnaagcttggcgtggatccgatatcaactagatcttgagacaaatggcagtattcatccacaattttaaaagaaaaggggggattggggggtacagtgcaggggaaagaatagtagacataatagcaacagacatacaaactaaag

SEQ ID NO: 10983 - DNA, 301 bp, Artificial Sequence
  Atrx.2_Notch1.2
  crRNA array
  misc_feature (148)..(157): n is a, c, g, or t
cttggctttatatatcttgtggaaaggacgaaacaccgtaatttctactaagtgtagatgcagcatgggggtatccctttaatttctactaagtgtagatgtcgccccagcatcctgaagtaatttctactaagtgtagatttttttnnnnnnnnnnaagcttggcgtggatccgatatcaactagatcttgagacaaatggcagtattcatccacaattttaaaagaaaaggggggattggggggtacagtgcaggggaaagaatagtagacataatagcaacagacatacaaactaaag

SEQ ID NO: 10984 - DNA, 301 bp, Artificial Sequence
  Atrx.2_Notch1.3
  crRNA array
  misc_feature (148)..(157): n is a, c, g, or t
cttggctttatatatcttgtggaaaggacgaaacaccgtaatttctactaagtgtagatgcagcatgggggtatccctttaatttctactaagtgtagatagccacccccgccacgcctctaatttctactaagtgtagatttttttnnnnnnnnnnaagcttggcgtggatccgatatcaactagatcttgagacaaatggcagtattcatccacaattttaaaagaaaaggggggattggggggtacagtgcaggggaaagaatagtagacataatagcaacagacatacaaactaaag

SEQ ID NO: 10985 - DNA, 301 bp, Artificial Sequence
  Atrx.2_Notch1.4
  crRNA array
  misc_feature (148)..(157): n is a, c, g, or t
cttggctttatatatcttgtggaaaggacgaaacaccgtaatttctactaagtgtagatgcagcatgggggtatccctttaatttctactaagtgtagataaagtgtcagaggccagcaataatttctactaagtgtagatttttttnnnnnnnnnnaagcttggcgtggatccgatatcaactagatcttgagacaaatggcagtattcatccacaattttaaaagaaaaggggggattggggggtacagtgcaggggaaagaatagtagacataatagcaacagacatacaaactaaag

SEQ ID NO: 10986 - DNA, 301 bp, Artificial Sequence
  Atrx.3_Notch1.1
  crRNA array
  misc_feature (148)..(157): n is a, c, g, or t
cttggctttatatatcttgtggaaaggacgaaacaccgtaatttctactaagtgtagatggagccctgtccgcaatgagtaatttctactaagtgtagattgggccaacgatgccaggactaatttctactaagtgtagatttttttnnnnnnnnnnaagcttggcgtggatccgatatcaactagatcttgagacaaatggcagtattcatccacaattttaaaagaaaaggggggattggggggtacagtgcaggggaaagaatagtagacataatagcaacagacatacaaactaaag

SEQ ID NO: 10987 - DNA, 301 bp, Artificial Sequence
  Atrx.3_Notch1.2
  crRNA array
  misc_feature (148)..(157): n is a, c, g, or t
cttggctttatatatcttgtggaaaggacgaaacaccgtaatttctactaagtgtagatggagccctgtccgcaatgagtaatttctactaagtgtagatgtcgccccagcatcctgaagtaatttctactaagtgtagatttttttnnnnnnnnnnaagcttggcgtggatccgatatcaactagatcttgagacaaatggcagtattcatccacaattttaaaagaaaaggggggattggggggtacagtgcaggggaaagaatagtagacataatagcaacagacatacaaactaaag

SEQ ID NO: 10988 - DNA, 301 bp, Artificial Sequence
  Atrx.3_Notch1.3
  crRNA array
  misc_feature (148)..(157): n is a, c, g, or t
cttggctttatatatcttgtggaaaggacgaaacaccgtaatttctactaagtgtagatggagccctgtccgcaatgagtaatttctactaagtgtagatagccacccccgccacgcctctaatttctactaagtgtagatttttttnnnnnnnnnnaagcttggcgtggatccgatatcaactagatcttgagacaaatggcagtattcatccacaattttaaaagaaaaggggggattggggggtacagtgcaggggaaagaatagtagacataatagcaacagacatacaaactaaag

SEQ ID NO: 10989 - DNA, 301 bp, Artificial Sequence
  Atrx.3_Notch1.4
  crRNA array
  misc_feature (148)..(157): n is a, c, g, or t
cttggctttatatatcttgtggaaaggacgaaacaccgtaatttctactaagtgtagatggagccctgtccgcaatgagtaatttctactaagtgtagataaagtgtcagaggccagcaataatttctactaagtgtagatttttttnnnnnnnnnnaagcttggcgtggatccgatatcaactagatcttgagacaaatggcagtattcatccacaattttaaaagaaaaggggggattggggggtacagtgcaggggaaagaatagtagacataatagcaacagacatacaaactaaag

SEQ ID NO: 10990 - DNA, 301 bp, Artificial Sequence
  Atrx.4_Notch1.1
  crRNA array
  misc_feature (148)..(157): n is a, c, g, or t
cttggctttatatatcttgtggaaaggacgaaacaccgtaatttctactaagtgtagataaactgggctcctactaaattaatttctactaagtgtagattgggccaacgatgccaggactaatttctactaagtgtagatttttttnnnnnnnnnnaagcttggcgtggatccgatatcaactagatcttgagacaaatggcagtattcatccacaattttaaaagaaaaggggggattggggggtacagtgcaggggaaagaatagtagacataatagcaacagacatacaaactaaag

SEQ ID NO: 10991 - DNA, 301 bp, Artificial Sequence
  Atrx.4_Notch1.2
  crRNA array
  misc_feature (148)..(157): n is a, c, g, or t
cttggctttatatatcttgtggaaaggacgaaacaccgtaatttctactaagtgtagataaactgggctcctactaaattaatttctactaagtgtagatgtcgccccagcatcctgaagtaatttctactaagtgtagatttttttnnnnnnnnnnaagcttggcgtggatccgatatcaactagatcttgagacaaatggcagtattcatccacaattttaaaagaaaaggggggattggggggtacagtgcaggggaaagaatagtagacataatagcaacagacatacaaactaaag

SEQ ID NO: 10992 - DNA, 301 bp, Artificial Sequence
  Atrx.4_Notch1.3
  crRNA array
  misc_feature (148)..(157): n is a, c, g, or t
cttggctttatatatcttgtggaaaggacgaaacaccgtaatttctactaagtgtagataaactgggctcctactaaattaatttctactaagtgtagatagccacccccgccacgcctctaatttctactaagtgtagatttttttnnnnnnnnnnaagcttggcgtggatccgatatcaactagatcttgagacaaatggcagtattcatccacaattttaaaagaaaaggggggattggggggtacagtgcaggggaaagaatagtagacataatagcaacagacatacaaactaaag

SEQ ID NO: 10993 - DNA, 301 bp, Artificial Sequence
  Atrx.4_Notch1.4
  crRNA array
  misc_feature (148)..(157): n is a, c, g, or t
cttggctttatatatcttgtggaaaggacgaaacaccgtaatttctactaagtgtagataaactgggctcctactaaattaatttctactaagtgtagataaagtgtcagaggccagcaataatttctactaagtgtagatttttttnnnnnnnnnnaagcttggcgtggatccgatatcaactagatcttgagacaaatggcagtattcatccacaattttaaaagaaaaggggggattggggggtacagtgcaggggaaagaatagtagacataatagcaacagacatacaaactaaag

SEQ ID NO: 10994 - DNA, 301 bp, Artificial Sequence
  Atrx.1_Arid1a.1
  crRNA array
  misc_feature (148)..(157): n is a, c, g, or t
cttggctttatatatcttgtggaaaggacgaaacaccgtaatttctactaagtgtagatgccagtcgctcatatctctgtaatttctactaagtgtagatcccgcgctcggccgctgccgtaatttctactaagtgtagatttttttnnnnnnnnnnaagcttggcgtggatccgatatcaactagatcttgagacaaatggcagtattcatccacaattttaaaagaaaaggggggattggggggtacagtgcaggggaaagaatagtagacataatagcaacagacatacaaactaaag

SEQ ID NO: 10995 - DNA, 301 bp, Artificial Sequence
  Atrx.1_Arid1a.2
  crRNA array
  misc_feature (148)..(157): n is a, c, g, or t
cttggctttatatatcttgtggaaaggacgaaacaccgtaatttctactaagtgtagatgccagtcgctcatatctctgtaatttctactaagtgtagatagtgcaagatcgagcgtggataatttctactaagtgtagatttttttnnnnnnnnnnaagcttggcgtggatccgatatcaactagatcttgagacaaatggcagtattcatccacaattttaaaagaaaaggggggattggggggtacagtgcaggggaaagaatagtagacataatagcaacagacatacaaactaaag

SEQ ID NO: 10996 - DNA, 301 bp, Artificial Sequence
  Atrx.1_Arid1a.3
  crRNA array
  misc_feature (148)..(157): n is a, c, g, or t
cttggctttatatatcttgtggaaaggacgaaacaccgtaatttctactaagtgtagatgccagtcgctcatatctctgtaatttctactaagtgtagatagtgagctggcagcactgcttaatttctactaagtgtagatttttttnnnnnnnnnnaagcttggcgtggatccgatatcaactagatcttgagacaaatggcagtattcatccacaattttaaaagaaaaggggggattggggggtacagtgcaggggaaagaatagtagacataatagcaacagacatacaaactaaag

SEQ ID NO: 10997 - DNA, 301 bp, Artificial Sequence
  Atrx.1_Arid1a.4
  crRNA array
  misc_feature (148)..(157): n is a, c, g, or t
cttggctttatatatcttgtggaaaggacgaaacaccgtaatttctactaagtgtagatgccagtcgctcatatctctgtaatttctactaagtgtagatgccgagaccgagtctctgcataatttctactaagtgtagatttttttnnnnnnnnnnaagcttggcgtggatccgatatcaactagatcttgagacaaatggcagtattcatccacaattttaaaagaaaaggggggattggggggtacagtgcaggggaaagaatagtagacataatagcaacagacatacaaactaaag

SEQ ID NO: 10998 - DNA, 301 bp, Artificial Sequence
  Atrx.2_Arid1a.1
  crRNA array
  misc_feature (148)..(157): n is a, c, g, or t
cttggctttatatatcttgtggaaaggacgaaacaccgtaatttctactaagtgtagatgcagcatgggggtatccctttaatttctactaagtgtagatcccgcgctcggccgctgccgtaatttctactaagtgtagatttttttnnnnnnnnnnaagcttggcgtggatccgatatcaactagatcttgagacaaatggcagtattcatccacaattttaaaagaaaaggggggattggggggtacagtgcaggggaaagaatagtagacataatagcaacagacatacaaactaaag

SEQ ID NO: 10999 - DNA, 301 bp, Artificial Sequence
  Atrx.2_Arid1a.2
  crRNA array
  misc_feature (148)..(157): n is a, c, g, or t
cttggctttatatatcttgtggaaaggacgaaacaccgtaatttctactaagtgtagatgcagcatgggggtatccctttaatttctactaagtgtagatagtgcaagatcgagcgtggataatttctactaagtgtagatttttttnnnnnnnnnnaagcttggcgtggatccgatatcaactagatcttgagacaaatggcagtattcatccacaattttaaaagaaaaggggggattggggggtacagtgcaggggaaagaatagtagacataatagcaacagacatacaaactaaag

SEQ ID NO: 11000 - DNA, 301 bp, Artificial Sequence
  Atrx.2_Arid1a.3
  crRNA array
  misc_feature (148)..(157): n is a, c, g, or t
cttggctttatatatcttgtggaaaggacgaaacaccgtaatttctactaagtgtagatgcagcatgggggtatccctttaatttctactaagtgtagatagtgagctggcagcactgcttaatttctactaagtgtagatttttttnnnnnnnnnnaagcttggcgtggatccgatatcaactagatcttgagacaaatggcagtattcatccacaattttaaaagaaaaggggggattggggggtacagtgcaggggaaagaatagtagacataatagcaacagacatacaaactaaag

SEQ ID NO: 11001 - DNA, 301 bp, Artificial Sequence
  Atrx.2_Arid1a.4
  crRNA array
  misc_feature (148)..(157): n is a, c, g, or t
cttggctttatatatcttgtggaaaggacgaaacaccgtaatttctactaagtgtagatgcagcatgggggtatccctttaatttctactaagtgtagatgccgagaccgagtctctgcataatttctactaagtgtagatttttttnnnnnnnnnnaagcttggcgtggatccgatatcaactagatcttgagacaaatggcagtattcatccacaattttaaaagaaaaggggggattggggggtacagtgcaggggaaagaatagtagacataatagcaacagacatacaaactaaag

SEQ ID NO: 11002 - DNA, 301 bp, Artificial Sequence
  Atrx.3_Arid1a.1
  crRNA array
  misc_feature (148)..(157): n is a, c, g, or t
cttggctttatatatcttgtggaaaggacgaaacaccgtaatttctactaagtgtagatggagccctgtccgcaatgagtaatttctactaagtgtagatcccgcgctcggccgctgccgtaatttctactaagtgtagatttttttnnnnnnnnnnaagcttggcgtggatccgatatcaactagatcttgagacaaatggcagtattcatccacaattttaaaagaaaaggggggattggggggtacagtgcaggggaaagaatagtagacataatagcaacagacatacaaactaaag

SEQ ID NO: 11003 - DNA, 301 bp, Artificial Sequence
  Atrx.3_Arid1a.2
  crRNA array
  misc_feature (148)..(157): n is a, c, g, or t
cttggctttatatatcttgtggaaaggacgaaacaccgtaatttctactaagtgtagatggagccctgtccgcaatgagtaatttctactaagtgtagatagtgcaagatcgagcgtggataatttctactaagtgtagatttttttnnnnnnnnnnaagcttggcgtggatccgatatcaactagatcttgagacaaatggcagtattcatccacaattttaaaagaaaaggggggattggggggtacagtgcaggggaaagaatagtagacataatagcaacagacatacaaactaaag

SEQ ID NO: 11004 - DNA, 301 bp, Artificial Sequence
  Atrx.3_Arid1a.3
  crRNA array
  misc_feature (148)..(157): n is a, c, g, or t
cttggctttatatatcttgtggaaaggacgaaacaccgtaatttctactaagtgtagatggagccctgtccgcaatgagtaatttctactaagtgtagatagtgagctggcagcactgcttaatttctactaagtgtagatttttttnnnnnnnnnnaagcttggcgtggatccgatatcaactagatcttgagacaaatggcagtattcatccacaattttaaaagaaaaggggggattggggggtacagtgcaggggaaagaatagtagacataatagcaacagacatacaaactaaag

SEQ ID NO: 11005 - DNA, 301 bp, Artificial Sequence
  Atrx.3_Arid1a.4
  crRNA array
  misc_feature (148)..(157): n is a, c, g, or t
cttggctttatatatcttgtggaaaggacgaaacaccgtaatttctactaagtgtagatggagccctgtccgcaatgagtaatttctactaagtgtagatgccgagaccgagtctctgcataatttctactaagtgtagatttttttnnnnnnnnnnaagcttggcgtggatccgatatcaactagatcttgagacaaatggcagtattcatccacaattttaaaagaaaaggggggattggggggtacagtgcaggggaaagaatagtagacataatagcaacagacatacaaactaaag

SEQ ID NO: 11006 - DNA, 301 bp, Artificial Sequence
  Atrx.4_Arid1a.1
  crRNA array
  misc_feature (148)..(157): n is a, c, g, or t
cttggctttatatatcttgtggaaaggacgaaacaccgtaatttctactaagtgtagataaactgggctcctactaaattaatttctactaagtgtagatcccgcgctcggccgctgccgtaatttctactaagtgtagatttttttnnnnnnnnnnaagcttggcgtggatccgatatcaactagatcttgagacaaatggcagtattcatccacaattttaaaagaaaaggggggattggggggtacagtgcaggggaaagaatagtagacataatagcaacagacatacaaactaaag

SEQ ID NO: 11007 - DNA, 301 bp, Artificial Sequence
  Atrx.4_Arid1a.2
  crRNA array
  misc_feature (148)..(157): n is a, c, g, or t
cttggctttatatatcttgtggaaaggacgaaacaccgtaatttctactaagtgtagataaactgggctcctactaaattaatttctactaagtgtagatagtgcaagatcgagcgtggataatttctactaagtgtagatttttttnnnnnnnnnnaagcttggcgtggatccgatatcaactagatcttgagacaaatggcagtattcatccacaattttaaaagaaaaggggggattggggggtacagtgcaggggaaagaatagtagacataatagcaacagacatacaaactaaag

SEQ ID NO: 11008 - DNA, 301 bp, Artificial Sequence
  Atrx.4_Arid1a.3
  crRNA array
  misc_feature (148)..(157): n is a, c, g, or t
cttggctttatatatcttgtggaaaggacgaaacaccgtaatttctactaagtgtagataaactgggctcctactaaattaatttctactaagtgtagatagtgagctggcagcactgcttaatttctactaagtgtagatttttttnnnnnnnnnnaagcttggcgtggatccgatatcaactagatcttgagacaaatggcagtattcatccacaattttaaaagaaaaggggggattggggggtacagtgcaggggaaagaatagtagacataatagcaacagacatacaaactaaag

SEQ ID NO: 11009 - DNA, 301 bp, Artificial Sequence
  Atrx.4_Arid1a.4
  crRNA array
  misc_feature (148)..(157): n is a, c, g, or t
cttggctttatatatcttgtggaaaggacgaaacaccgtaatttctactaagtgtagataaactgggctcctactaaattaatttctactaagtgtagatgccgagaccgagtctctgcataatttctactaagtgtagatttttttnnnnnnnnnnaagcttggcgtggatccgatatcaactagatcttgagacaaatggcagtattcatccacaattttaaaagaaaaggggggattggggggtacagtgcaggggaaagaatagtagacataatagcaacagacatacaaactaaag

SEQ ID NO: 11010 - DNA, 301 bp, Artificial Sequence
  Atrx.1_Trim72.1
  crRNA array
  misc_feature (148)..(157): n is a, c, g, or t
cttggctttatatatcttgtggaaaggacgaaacaccgtaatttctactaagtgtagatgccagtcgctcatatctctgtaatttctactaagtgtagataccccagctctgcgcacccgtaatttctactaagtgtagatttttttnnnnnnnnnnaagcttggcgtggatccgatatcaactagatcttgagacaaatggcagtattcatccacaattttaaaagaaaaggggggattggggggtacagtgcaggggaaagaatagtagacataatagcaacagacatacaaactaaag

SEQ ID NO: 11011 - DNA, 301 bp, Artificial Sequence
  Atrx.1_Trim72.2
  crRNA array
  misc_feature (148)..(157): n is a, c, g, or t
cttggctttatatatcttgtggaaaggacgaaacaccgtaatttctactaagtgtagatgccagtcgctcatatctctgtaatttctactaagtgtagatcacgagcgtctgcccgggcctaatttctactaagtgtagatttttttnnnnnnnnnnaagcttggcgtggatccgatatcaactagatcttgagacaaatggcagtattcatccacaattttaaaagaaaaggggggattggggggtacagtgcaggggaaagaatagtagacataatagcaacagacatacaaactaaag

SEQ ID NO: 11012 - DNA, 301 bp, Artificial Sequence
  Atrx.1_Trim72.3
  crRNA array
  misc_feature (148)..(157): n is a, c, g, or t
cttggctttatatatcttgtggaaaggacgaaacaccgtaatttctactaagtgtagatgccagtcgctcatatctctgtaatttctactaagtgtagatacgtgtgctggcacgacaagtaatttctactaagtgtagatttttttnnnnnnnnnnaagcttggcgtggatccgatatcaactagatcttgagacaaatggcagtattcatccacaattttaaaagaaaaggggggattggggggtacagtgcaggggaaagaatagtagacataatagcaacagacatacaaactaaag

SEQ ID NO: 11013 - DNA, 301 bp, Artificial Sequence
  Atrx.1_Trim72.4
  crRNA array
  misc_feature (148)..(157): n is a, c, g, or t
cttggctttatatatcttgtggaaaggacgaaacaccgtaatttctactaagtgtagatgccagtcgctcatatctctgtaatttctactaagtgtagattgccgtgcctgcctgatccgtaatttctactaagtgtagatttttttnnnnnnnnnnaagcttggcgtggatccgatatcaactagatcttgagacaaatggcagtattcatccacaattttaaaagaaaaggggggattggggggtacagtgcaggggaaagaatagtagacataatagcaacagacatacaaactaaag

SEQ ID NO: 11014 - DNA, 301 bp, Artificial Sequence
  Atrx.2_Trim72.1
  crRNA array
  misc_feature (148)..(157): n is a, c, g, or t
cttggctttatatatcttgtggaaaggacgaaacaccgtaatttctactaagtgtagatgcagcatgggggtatccctttaatttctactaagtgtagataccccagctctgcgcacccgtaatttctactaagtgtagatttttttnnnnnnnnnnaagcttggcgtggatccgatatcaactagatcttgagacaaatggcagtattcatccacaattttaaaagaaaaggggggattggggggtacagtgcaggggaaagaatagtagacataatagcaacagacatacaaactaaag

SEQ ID NO: 11015 - DNA, 301 bp, Artificial Sequence
  Atrx.2_Trim72.2
  crRNA array
  misc_feature (148)..(157): n is a, c, g, or t
cttggctttatatatcttgtggaaaggacgaaacaccgtaatttctactaagtgtagatgcagcatgggggtatccctttaatttctactaagtgtagatcacgagcgtctgcccgggcctaatttctactaagtgtagatttttttnnnnnnnnnnaagcttggcgtggatccgatatcaactagatcttgagacaaatggcagtattcatccacaattttaaaagaaaaggggggattggggggtacagtgcaggggaaagaatagtagacataatagcaacagacatacaaactaaag

SEQ ID NO: 11016 - DNA, 301 bp, Artificial Sequence
  Atrx.2_Trim72.3
  crRNA array
  misc_feature (148)..(157): n is a, c, g, or t
cttggctttatatatcttgtggaaaggacgaaacaccgtaatttctactaagtgtagatgcagcatgggggtatccctttaatttctactaagtgtagatacgtgtgctggcacgacaagtaatttctactaagtgtagatttttttnnnnnnnnnnaagcttggcgtggatccgatatcaactagatcttgagacaaatggcagtattcatccacaattttaaaagaaaaggggggattggggggtacagtgcaggggaaagaatagtagacataatagcaacagacatacaaactaaag

SEQ ID NO: 11017 - DNA, 301 bp, Artificial Sequence
  Atrx.2_Trim72.4
  crRNA array
  misc_feature (148)..(157): n is a, c, g, or t
cttggctttatatatcttgtggaaaggacgaaacaccgtaatttctactaagtgtagatgcagcatgggggtatccctttaatttctactaagtgtagattgccgtgcctgcctgatccgtaatttctactaagtgtagatttttttnnnnnnnnnnaagcttggcgtggatccgatatcaactagatcttgagacaaatggcagtattcatccacaattttaaaagaaaaggggggattggggggtacagtgcaggggaaagaatagtagacataatagcaacagacatacaaactaaag

SEQ ID NO: 11018 - DNA, 301 bp, Artificial Sequence
  Atrx.3_Trim72.1
  crRNA array
  misc_feature (148)..(157): n is a, c, g, or t
cttggctttatatatcttgtggaaaggacgaaacaccgtaatttctactaagtgtagatggagccctgtccgcaatgagtaatttctactaagtgtagataccccagctctgcgcacccgtaatttctactaagtgtagatttttttnnnnnnnnnnaagcttggcgtggatccgatatcaactagatcttgagacaaatggcagtattcatccacaattttaaaagaaaaggggggattggggggtacagtgcaggggaaagaatagtagacataatagcaacagacatacaaactaaag

SEQ ID NO: 11019 - DNA, 301 bp, Artificial Sequence
  Atrx.3_Trim72.2
  crRNA array
  misc_feature (148)..(157): n is a, c, g, or t
cttggctttatatatcttgtggaaaggacgaaacaccgtaatttctactaagtgtagatggagccctgtccgcaatgagtaatttctactaagtgtagatcacgagcgtctgcccgggcctaatttctactaagtgtagatttttttnnnnnnnnnnaagcttggcgtggatccgatatcaactagatcttgagacaaatggcagtattcatccacaattttaaaagaaaaggggggattggggggtacagtgcaggggaaagaatagtagacataatagcaacagacatacaaactaaag

SEQ ID NO: 11020 - DNA, 301 bp, Artificial Sequence
  Atrx.3_Trim72.3
  crRNA array
  misc_feature (148)..(157): n is a, c, g, or t
cttggctttatatatcttgtggaaaggacgaaacaccgtaatttctactaagtgtagatggagccctgtccgcaatgagtaatttctactaagtgtagatacgtgtgctggcacgacaagtaatttctactaagtgtagatttttttnnnnnnnnnnaagcttggcgtggatccgatatcaactagatcttgagacaaatggcagtattcatccacaattttaaaagaaaaggggggattggggggtacagtgcaggggaaagaatagtagacataatagcaacagacatacaaactaaag

SEQ ID NO: 11021 - DNA, 301 bp, Artificial Sequence
  Atrx.3_Trim72.4
  crRNA array
  misc_feature (148)..(157): n is a, c, g, or t
cttggctttatatatcttgtggaaaggacgaaacaccgtaatttctactaagtgtagatggagccctgtccgcaatgagtaatttctactaagtgtagattgccgtgcctgcctgatccgtaatttctactaagtgtagatttttttnnnnnnnnnnaagcttggcgtggatccgatatcaactagatcttgagacaaatggcagtattcatccacaattttaaaagaaaaggggggattggggggtacagtgcaggggaaagaatagtagacataatagcaacagacatacaaactaaag

SEQ ID NO: 11022 - DNA, 301 bp, Artificial Sequence
  Atrx.4_Trim72.1
  crRNA array
  misc_feature (148)..(157): n is a, c, g, or t
cttggctttatatatcttgtggaaaggacgaaacaccgtaatttctactaagtgtagataaactgggctcctactaaattaatttctactaagtgtagataccccagctctgcgcacccgtaatttctactaagtgtagatttttttnnnnnnnnnnaagcttggcgtggatccgatatcaactagatcttgagacaaatggcagtattcatccacaattttaaaagaaaaggggggattggggggtacagtgcaggggaaagaatagtagacataatagcaacagacatacaaactaaag

SEQ ID NO: 11023 - DNA, 301 bp, Artificial Sequence
  Atrx.4_Trim72.2
  crRNA array
  misc_feature (148)..(157): n is a, c, g, or t
cttggctttatatatcttgtggaaaggacgaaacaccgtaatttctactaagtgtagataaactgggctcctactaaattaatttctactaagtgtagatcacgagcgtctgcccgggcctaatttctactaagtgtagatttttttnnnnnnnnnnaagcttggcgtggatccgatatcaactagatcttgagacaaatggcagtattcatccacaattttaaaagaaaaggggggattggggggtacagtgcaggggaaagaatagtagacataatagcaacagacatacaaactaaag

SEQ ID NO: 11024 - DNA, 301 bp, Artificial Sequence
  Atrx.4_Trim72.3
  crRNA array
  misc_feature (148)..(157): n is a, c, g, or t
cttggctttatatatcttgtggaaaggacgaaacaccgtaatttctactaagtgtagataaactgggctcctactaaattaatttctactaagtgtagatacgtgtgctggcacgacaagtaatttctactaagtgtagatttttttnnnnnnnnnnaagcttggcgtggatccgatatcaactagatcttgagacaaatggcagtattcatccacaattttaaaagaaaaggggggattggggggtacagtgcaggggaaagaatagtagacataatagcaacagacatacaaactaaag

SEQ ID NO: 11025 - DNA, 301 bp, Artificial Sequence
  Atrx.4_Trim72.4
  crRNA array
  misc_feature (148)..(157): n is a, c, g, or t
cttggctttatatatcttgtggaaaggacgaaacaccgtaatttctactaagtgtagataaactgggctcctactaaattaatttctactaagtgtagattgccgtgcctgcctgatccgtaatttctactaagtgtagatttttttnnnnnnnnnnaagcttggcgtggatccgatatcaactagatcttgagacaaatggcagtattcatccacaattttaaaagaaaaggggggattggggggtacagtgcaggggaaagaatagtagacataatagcaacagacatacaaactaaag

SEQ ID NO: 11026 - DNA, 301 bp, Artificial Sequence
  Atrx.1_Zfhx3.1
  crRNA array
  misc_feature (148)..(157): n is a, c, g, or t
cttggctttatatatcttgtggaaaggacgaaacaccgtaatttctactaagtgtagatgccagtcgctcatatctctgtaatttctactaagtgtagatcgctgcgaggtgtgtaactataatttctactaagtgtagatttttttnnnnnnnnnnaagcttggcgtggatccgatatcaactagatcttgagacaaatggcagtattcatccacaattttaaaagaaaaggggggattggggggtacagtgcaggggaaagaatagtagacataatagcaacagacatacaaactaaag

SEQ ID NO: 11027 - DNA, 301 bp, Artificial Sequence
  Atrx.1_Zfhx3.2
  crRNA array
  misc_feature (148)..(157): n is a, c, g, or t
cttggctttatatatcttgtggaaaggacgaaacaccgtaatttctactaagtgtagatgccagtcgctcatatctctgtaatttctactaagtgtagatacgtgcgacacaaaagcaactaatttctactaagtgtagatttttttnnnnnnnnnnaagcttggcgtggatccgatatcaactagatcttgagacaaatggcagtattcatccacaattttaaaagaaaaggggggattggggggtacagtgcaggggaaagaatagtagacataatagcaacagacatacaaactaaag

SEQ ID NO: 11028 - DNA, 301 bp, Artificial Sequence
  Atrx.1_Zfhx3.3
  crRNA array
  misc_feature (148)..(157): n is a, c, g, or t
cttggctttatatatcttgtggaaaggacgaaacaccgtaatttctactaagtgtagatgccagtcgctcatatctctgtaatttctactaagtgtagattgctctacggcaagaggaaataatttctactaagtgtagatttttttnnnnnnnnnnaagcttggcgtggatccgatatcaactagatcttgagacaaatggcagtattcatccacaattttaaaagaaaaggggggattggggggtacagtgcaggggaaagaatagtagacataatagcaacagacatacaaactaaag

SEQ ID NO: 11029 - DNA, 301 bp, Artificial Sequence
  Atrx.1_Zfhx3.4
  crRNA array
  misc_feature (148)..(157): n is a, c, g, or t
cttggctttatatatcttgtggaaaggacgaaacaccgtaatttctactaagtgtagatgccagtcgctcatatctctgtaatttctactaagtgtagatagtgagcggcagactgcgagtaatttctactaagtgtagatttttttnnnnnnnnnnaagcttggcgtggatccgatatcaactagatcttgagacaaatggcagtattcatccacaattttaaaagaaaaggggggattggggggtacagtgcaggggaaagaatagtagacataatagcaacagacatacaaactaaag

SEQ ID NO: 11030 - DNA, 301 bp, Artificial Sequence
  Atrx.2_Zfhx3.1
  crRNA array
  misc_feature (148)..(157): n is a, c, g, or t
cttggctttatatatcttgtggaaaggacgaaacaccgtaatttctactaagtgtagatgcagcatgggggtatccctttaatttctactaagtgtagatcgctgcgaggtgtgtaactataatttctactaagtgtagatttttttnnnnnnnnnnaagcttggcgtggatccgatatcaactagatcttgagacaaatggcagtattcatccacaattttaaaagaaaaggggggattggggggtacagtgcaggggaaagaatagtagacataatagcaacagacatacaaactaaag

SEQ ID NO: 11031 - DNA, 301 bp, Artificial Sequence
  Atrx.2_Zfhx3.2
  crRNA array
  misc_feature (148)..(157): n is a, c, g, or t
cttggctttatatatcttgtggaaaggacgaaacaccgtaatttctactaagtgtagatgcagcatgggggtatccctttaatttctactaagtgtagatacgtgcgacacaaaagcaactaatttctactaagtgtagatttttttnnnnnnnnnnaagcttggcgtggatccgatatcaactagatcttgagacaaatggcagtattcatccacaattttaaaagaaaaggggggattggggggtacagtgcaggggaaagaatagtagacataatagcaacagacatacaaactaaag

SEQ ID NO: 11032 - DNA, 301 bp, Artificial Sequence
  Atrx.2_Zfhx3.3
  crRNA array
  misc_feature (148)..(157): n is a, c, g, or t
cttggctttatatatcttgtggaaaggacgaaacaccgtaatttctactaagtgtagatgcagcatgggggtatccctttaatttctactaagtgtagattgctctacggcaagaggaaataatttctactaagtgtagatttttttnnnnnnnnnnaagcttggcgtggatccgatatcaactagatcttgagacaaatggcagtattcatccacaattttaaaagaaaaggggggattggggggtacagtgcaggggaaagaatagtagacataatagcaacagacatacaaactaaag

SEQ ID NO: 11033 - DNA, 301 bp, Artificial Sequence
  Atrx.2_Zfhx3.4
  crRNA array
  misc_feature (148)..(157): n is a, c, g, or t
cttggctttatatatcttgtggaaaggacgaaacaccgtaatttctactaagtgtagatgcagcatgggggtatccctttaatttctactaagtgtagatagtgagcggcagactgcgagtaatttctactaagtgtagatttttttnnnnnnnnnnaagcttggcgtggatccgatatcaactagatcttgagacaaatggcagtattcatccacaattttaaaagaaaaggggggattggggggtacagtgcaggggaaagaatagtagacataatagcaacagacatacaaactaaag

SEQ ID NO: 11034 - DNA, 301 bp, Artificial Sequence
  Atrx.3_Zfhx3.1
  crRNA array
  misc_feature (148)..(157): n is a, c, g, or t
cttggctttatatatcttgtggaaaggacgaaacaccgtaatttctactaagtgtagatggagccctgtccgcaatgagtaatttctactaagtgtagatcgctgcgaggtgtgtaactataatttctactaagtgtagatttttttnnnnnnnnnnaagcttggcgtggatccgatatcaactagatcttgagacaaatggcagtattcatccacaattttaaaagaaaaggggggattggggggtacagtgcaggggaaagaatagtagacataatagcaacagacatacaaactaaag

SEQ ID NO: 11035 - DNA, 301 bp, Artificial Sequence
  Atrx.3_Zfhx3.2
  crRNA array
  misc_feature (148)..(157): n is a, c, g, or t
cttggctttatatatcttgtggaaaggacgaaacaccgtaatttctactaagtgtagatggagccctgtccgcaatgagtaatttctactaagtgtagatacgtgcgacacaaaagcaactaatttctactaagtgtagatttttttnnnnnnnnnnaagcttggcgtggatccgatatcaactagatcttgagacaaatggcagtattcatccacaattttaaaagaaaaggggggattggggggtacagtgcaggggaaagaatagtagacataatagcaacagacatacaaactaaag

SEQ ID NO: 11036 - DNA, 301 bp, Artificial Sequence
  Atrx.3_Zfhx3.3
  crRNA array
  misc_feature (148)..(157): n is a, c, g, or t
cttggctttatatatcttgtggaaaggacgaaacaccgtaatttctactaagtgtagatggagccctgtccgcaatgagtaatttctactaagtgtagattgctctacggcaagaggaaataatttctactaagtgtagatttttttnnnnnnnnnnaagcttggcgtggatccgatatcaactagatcttgagacaaatggcagtattcatccacaattttaaaagaaaaggggggattggggggtacagtgcaggggaaagaatagtagacataatagcaacagacatacaaactaaag

SEQ ID NO: 11037 - DNA, 301 bp, Artificial Sequence
  Atrx.3_Zfhx3.4
  crRNA array
  misc_feature (148)..(157): n is a, c, g, or t
cttggctttatatatcttgtggaaaggacgaaacaccgtaatttctactaagtgtagatggagccctgtccgcaatgagtaatttctactaagtgtagatagtgagcggcagactgcgagtaatttctactaagtgtagatttttttnnnnnnnnnnaagcttggcgtggatccgatatcaactagatcttgagacaaatggcagtattcatccacaattttaaaagaaaaggggggattggggggtacagtgcaggggaaagaatagtagacataatagcaacagacatacaaactaaag

SEQ ID NO: 11038 - DNA, 301 bp, Artificial Sequence
  Atrx.4_Zfhx3.1
  crRNA array
  misc_feature (148)..(157): n is a, c, g, or t
cttggctttatatatcttgtggaaaggacgaaacaccgtaatttctactaagtgtagataaactgggctcctactaaattaatttctactaagtgtagatcgctgcgaggtgtgtaactataatttctactaagtgtagatttttttnnnnnnnnnnaagcttggcgtggatccgatatcaactagatcttgagacaaatggcagtattcatccacaattttaaaagaaaaggggggattggggggtacagtgcaggggaaagaatagtagacataatagcaacagacatacaaactaaag

SEQ ID NO: 11039 - DNA, 301 bp, Artificial Sequence
  Atrx.4_Zfhx3.2
  crRNA array
  misc_feature (148)..(157): n is a, c, g, or t
cttggctttatatatcttgtggaaaggacgaaacaccgtaatttctactaagtgtagataaactgggctcctactaaattaatttctactaagtgtagatacgtgcgacacaaaagcaactaatttctactaagtgtagatttttttnnnnnnnnnnaagcttggcgtggatccgatatcaactagatcttgagacaaatggcagtattcatccacaattttaaaagaaaaggggggattggggggtacagtgcaggggaaagaatagtagacataatagcaacagacatacaaactaaag

SEQ ID NO: 11040 - DNA, 301 bp, Artificial Sequence
  Atrx.4_Zfhx3.3
  crRNA array
  misc_feature (148)..(157): n is a, c, g, or t
cttggctttatatatcttgtggaaaggacgaaacaccgtaatttctactaagtgtagataaactgggctcctactaaattaatttctactaagtgtagattgctctacggcaagaggaaataatttctactaagtgtagatttttttnnnnnnnnnnaagcttggcgtggatccgatatcaactagatcttgagacaaatggcagtattcatccacaattttaaaagaaaaggggggattggggggtacagtgcaggggaaagaatagtagacataatagcaacagacatacaaactaaag

SEQ ID NO: 11041 - DNA, 301 bp, Artificial Sequence
  Atrx.4_Zfhx3.4
  crRNA array
  misc_feature (148)..(157): n is a, c, g, or t
cttggctttatatatcttgtggaaaggacgaaacaccgtaatttctactaagtgtagataaactgggctcctactaaattaatttctactaagtgtagatagtgagcggcagactgcgagtaatttctactaagtgtagatttttttnnnnnnnnnnaagcttggcgtggatccgatatcaactagatcttgagacaaatggcagtattcatccacaattttaaaagaaaaggggggattggggggtacagtgcaggggaaagaatagtagacataatagcaacagacatacaaactaaag

SEQ ID NO: 11042 - DNA, 301 bp, Artificial Sequence
  Atrx.1_Crebbp.1
  crRNA array
  misc_feature (148)..(157): n is a, c, g, or t
cttggctttatatatcttgtggaaaggacgaaacaccgtaatttctactaagtgtagatgccagtcgctcatatctctgtaatttctactaagtgtagatctcacggcggcggcgggccgtaatttctactaagtgtagatttttttnnnnnnnnnnaagcttggcgtggatccgatatcaactagatcttgagacaaatggcagtattcatccacaattttaaaagaaaaggggggattggggggtacagtgcaggggaaagaatagtagacataatagcaacagacatacaaactaaag

SEQ ID NO: 11043 - DNA, 301 bp, Artificial Sequence
  Atrx.1_Crebbp.2
  crRNA array
  misc_feature (148)..(157): n is a, c, g, or t
cttggctttatatatcttgtggaaaggacgaaacaccgtaatttctactaagtgtagatgccagtcgctcatatctctgtaatttctactaagtgtagatcgcgagcaggtgaagatggctaatttctactaagtgtagatttttttnnnnnnnnnnaagcttggcgtggatccgatatcaactagatcttgagacaaatggcagtattcatccacaattttaaaagaaaaggggggattggggggtacagtgcaggggaaagaatagtagacataatagcaacagacatacaaactaaag

SEQ ID NO: 11044 - DNA, 301 bp, Artificial Sequence
  Atrx.1_Crebbp.3
  crRNA array
  misc_feature (148)..(157): n is a, c, g, or t
cttggctttatatatcttgtggaaaggacgaaacaccgtaatttctactaagtgtagatgccagtcgctcatatctctgtaatttctactaagtgtagatggctccgccgcccgcccgcgtaatttctactaagtgtagatttttttnnnnnnnnnnaagcttggcgtggatccgatatcaactagatcttgagacaaatggcagtattcatccacaattttaaaagaaaaggggggattggggggtacagtgcaggggaaagaatagtagacataatagcaacagacatacaaactaaag

SEQ ID NO: 11045 - DNA, 301 bp, Artificial Sequence
  Atrx.1_Crebbp.4
  crRNA array
  misc_feature (148)..(157): n is a, c, g, or t
cttggctttatatatcttgtggaaaggacgaaacaccgtaatttctactaagtgtagatgccagtcgctcatatctctgtaatttctactaagtgtagattggactagatgactccgtagtaatttctactaagtgtagatttttttnnnnnnnnnnaagcttggcgtggatccgatatcaactagatcttgagacaaatggcagtattcatccacaattttaaaagaaaaggggggattggggggtacagtgcaggggaaagaatagtagacataatagcaacagacatacaaactaaag

SEQ ID NO: 11046 - DNA, 301 bp, Artificial Sequence
  Atrx.2_Crebbp.1
  crRNA array
  misc_feature (148)..(157): n is a, c, g, or t
cttggctttatatatcttgtggaaaggacgaaacaccgtaatttctactaagtgtagatgcagcatgggggtatccctttaatttctactaagtgtagatctcacggcggcggcgggccgtaatttctactaagtgtagatttttttnnnnnnnnnnaagcttggcgtggatccgatatcaactagatcttgagacaaatggcagtattcatccacaattttaaaagaaaaggggggattggggggtacagtgcaggggaaagaatagtagacataatagcaacagacatacaaactaaag

SEQ ID NO: 11047 - DNA, 301 bp, Artificial Sequence
  Atrx.2_Crebbp.2
  crRNA array
  misc_feature (148)..(157): n is a, c, g, or t
cttggctttatatatcttgtggaaaggacgaaacaccgtaatttctactaagtgtagatgcagcatgggggtatccctttaatttctactaagtgtagatcgcgagcaggtgaagatggctaatttctactaagtgtagatttttttnnnnnnnnnnaagcttggcgtggatccgatatcaactagatcttgagacaaatggcagtattcatccacaattttaaaagaaaaggggggattggggggtacagtgcaggggaaagaatagtagacataatagcaacagacatacaaactaaag

SEQ ID NO: 11048 - DNA, 301 bp, Artificial Sequence
  Atrx.2_Crebbp.3
  crRNA array
  misc_feature (148)..(157): n is a, c, g, or t
cttggctttatatatcttgtggaaaggacgaaacaccgtaatttctactaagtgtagatgcagcatgggggtatccctttaatttctactaagtgtagatggctccgccgcccgcccgcgtaatttctactaagtgtagatttttttnnnnnnnnnnaagcttggcgtggatccgatatcaactagatcttgagacaaatggcagtattcatccacaattttaaaagaaaaggggggattggggggtacagtgcaggggaaagaatagtagacataatagcaacagacatacaaactaaag

SEQ ID NO: 11049 - DNA, 301 bp, Artificial Sequence
  Atrx.2_Crebbp.4
  crRNA array
  misc_feature (148)..(157): n is a, c, g, or t
cttggctttatatatcttgtggaaaggacgaaacaccgtaatttctactaagtgtagatgcagcatgggggtatccctttaatttctactaagtgtagattggactagatgactccgtagtaatttctactaagtgtagatttttttnnnnnnnnnnaagcttggcgtggatccgatatcaactagatcttgagacaaatggcagtattcatccacaattttaaaagaaaaggggggattggggggtacagtgcaggggaaagaatagtagacataatagcaacagacatacaaactaaag

SEQ ID NO: 11050 - DNA, 301 bp, Artificial Sequence
  Atrx.3_Crebbp.1
  crRNA array
  misc_feature (148)..(157): n is a, c, g, or t
cttggctttatatatcttgtggaaaggacgaaacaccgtaatttctactaagtgtagatggagccctgtccgcaatgagtaatttctactaagtgtagatctcacggcggcggcgggccgtaatttctactaagtgtagatttttttnnnnnnnnnnaagcttggcgtggatccgatatcaactagatcttgagacaaatggcagtattcatccacaattttaaaagaaaaggggggattggggggtacagtgcaggggaaagaatagtagacataatagcaacagacatacaaactaaag

SEQ ID NO: 11051 - DNA, 301 bp, Artificial Sequence
  Atrx.3_Crebbp.2
  crRNA array
  misc_feature (148)..(157): n is a, c, g, or t
cttggctttatatatcttgtggaaaggacgaaacaccgtaatttctactaagtgtagatggagccctgtccgcaatgagtaatttctactaagtgtagatcgcgagcaggtgaagatggctaatttctactaagtgtagatttttttnnnnnnnnnnaagcttggcgtggatccgatatcaactagatcttgagacaaatggcagtattcatccacaattttaaaagaaaaggggggattggggggtacagtgcaggggaaagaatagtagacataatagcaacagacatacaaactaaag

SEQ ID NO: 11052 - DNA, 301 bp, Artificial Sequence
  Atrx.3_Crebbp.3
  crRNA array
  misc_feature (148)..(157): n is a, c, g, or t
cttggctttatatatcttgtggaaaggacgaaacaccgtaatttctactaagtgtagatggagccctgtccgcaatgagtaatttctactaagtgtagatggctccgccgcccgcccgcgtaatttctactaagtgtagatttttttnnnnnnnnnnaagcttggcgtggatccgatatcaactagatcttgagacaaatggcagtattcatccacaattttaaaagaaaaggggggattggggggtacagtgcaggggaaagaatagtagacataatagcaacagacatacaaactaaag

SEQ ID NO: 11053 - DNA, 301 bp, Artificial Sequence
  Atrx.3_Crebbp.4
  crRNA array
  misc_feature (148)..(157): n is a, c, g, or t
cttggctttatatatcttgtggaaaggacgaaacaccgtaatttctactaagtgtagatggagccctgtccgcaatgagtaatttctactaagtgtagattggactagatgactccgtagtaatttctactaagtgtagatttttttnnnnnnnnnnaagcttggcgtggatccgatatcaactagatcttgagacaaatggcagtattcatccacaattttaaaagaaaaggggggattggggggtacagtgcaggggaaagaatagtagacataatagcaacagacatacaaactaaag

SEQ ID NO: 11054 - DNA, 301 bp, Artificial Sequence
  Atrx.4_Crebbp.1
  crRNA array
  misc_feature (148)..(157): n is a, c, g, or t
cttggctttatatatcttgtggaaaggacgaaacaccgtaatttctactaagtgtagataaactgggctcctactaaattaatttctactaagtgtagatctcacggcggcggcgggccgtaatttctactaagtgtagatttttttnnnnnnnnnnaagcttggcgtggatccgatatcaactagatcttgagacaaatggcagtattcatccacaattttaaaagaaaaggggggattggggggtacagtgcaggggaaagaatagtagacataatagcaacagacatacaaactaaag

SEQ ID NO: 11055 - DNA, 301 bp, Artificial Sequence
  Atrx.4_Crebbp.2
  crRNA array
  misc_feature (148)..(157): n is a, c, g, or t
cttggctttatatatcttgtggaaaggacgaaacaccgtaatttctactaagtgtagataaactgggctcctactaaattaatttctactaagtgtagatcgcgagcaggtgaagatggctaatttctactaagtgtagatttttttnnnnnnnnnnaagcttggcgtggatccgatatcaactagatcttgagacaaatggcagtattcatccacaattttaaaagaaaaggggggattggggggtacagtgcaggggaaagaatagtagacataatagcaacagacatacaaactaaag

SEQ ID NO: 11056 - DNA, 301 bp, Artificial Sequence
  Atrx.4_Crebbp.3
  crRNA array
  misc_feature (148)..(157): n is a, c, g, or t
cttggctttatatatcttgtggaaaggacgaaacaccgtaatttctactaagtgtagataaactgggctcctactaaattaatttctactaagtgtagatggctccgccgcccgcccgcgtaatttctactaagtgtagatttttttnnnnnnnnnnaagcttggcgtggatccgatatcaactagatcttgagacaaatggcagtattcatccacaattttaaaagaaaaggggggattggggggtacagtgcaggggaaagaatagtagacataatagcaacagacatacaaactaaag

SEQ ID NO: 11057 - DNA, 301 bp, Artificial Sequence
  Atrx.4_Crebbp.4
  crRNA array
  misc_feature (148)..(157): n is a, c, g, or t
cttggctttatatatcttgtggaaaggacgaaacaccgtaatttctactaagtgtagataaactgggctcctactaaattaatttctactaagtgtagattggactagatgactccgtagtaatttctactaagtgtagatttttttnnnnnnnnnnaagcttggcgtggatccgatatcaactagatcttgagacaaatggcagtattcatccacaattttaaaagaaaaggggggattggggggtacagtgcaggggaaagaatagtagacataatagcaacagacatacaaactaaag

SEQ ID NO: 11058 - DNA, 301 bp, Artificial Sequence
  Atrx.1_Cdkn2a.1
  crRNA array
  misc_feature (148)..(157): n is a, c, g, or t
cttggctttatatatcttgtggaaaggacgaaacaccgtaatttctactaagtgtagatgccagtcgctcatatctctgtaatttctactaagtgtagatcaatcacgggagggagcagataatttctactaagtgtagatttttttnnnnnnnnnnaagcttggcgtggatccgatatcaactagatcttgagacaaatggcagtattcatccacaattttaaaagaaaaggggggattggggggtacagtgcaggggaaagaatagtagacataatagcaacagacatacaaactaaag

SEQ ID NO: 11059 - DNA, 301 bp, Artificial Sequence
  Atrx.1_Cdkn2a.2
  crRNA array
  misc_feature (148)..(157): n is a, c, g, or t
cttggctttatatatcttgtggaaaggacgaaacaccgtaatttctactaagtgtagatgccagtcgctcatatctctgtaatttctactaagtgtagatgcccaacgccccgaactctttaatttctactaagtgtagatttttttnnnnnnnnnnaagcttggcgtggatccgatatcaactagatcttgagacaaatggcagtattcatccacaattttaaaagaaaaggggggattggggggtacagtgcaggggaaagaatagtagacataatagcaacagacatacaaactaaag

SEQ ID NO: 11060 - DNA, 301 bp, Artificial Sequence
  Atrx.1_Cdkn2a.3
  crRNA array
  misc_feature (148)..(157): n is a, c, g, or t
cttggctttatatatcttgtggaaaggacgaaacaccgtaatttctactaagtgtagatgccagtcgctcatatctctgtaatttctactaagtgtagattgtaccgctgggaacgtcgctaatttctactaagtgtagatttttttnnnnnnnnnnaagcttggcgtggatccgatatcaactagatcttgagacaaatggcagtattcatccacaattttaaaagaaaaggggggattggggggtacagtgcaggggaaagaatagtagacataatagcaacagacatacaaactaaag

SEQ ID NO: 11061 - DNA, 301 bp, Artificial Sequence
  Atrx.1_Cdkn2a.4
  crRNA array
  misc_feature (148)..(157): n is a, c, g, or t
cttggctttatatatcttgtggaaaggacgaaacaccgtaatttctactaagtgtagatgccagtcgctcatatctctgtaatttctactaagtgtagataagccacatgctagacacgctaatttctactaagtgtagatttttttnnnnnnnnnnaagcttggcgtggatccgatatcaactagatcttgagacaaatggcagtattcatccacaattttaaaagaaaaggggggattggggggtacagtgcaggggaaagaatagtagacataatagcaacagacatacaaactaaag

SEQ ID NO: 11062 - DNA, 301 bp, Artificial Sequence
  Atrx.2_Cdkn2a.1
  crRNA array
  misc_feature (148)..(157): n is a, c, g, or t
cttggctttatatatcttgtggaaaggacgaaacaccgtaatttctactaagtgtagatgcagcatgggggtatccctttaatttctactaagtgtagatcaatcacgggagggagcagataatttctactaagtgtagatttttttnnnnnnnnnnaagcttggcgtggatccgatatcaactagatcttgagacaaatggcagtattcatccacaattttaaaagaaaaggggggattggggggtacagtgcaggggaaagaatagtagacataatagcaacagacatacaaactaaag

SEQ ID NO: 11063 - DNA, 301 bp, Artificial Sequence
  Atrx.2_Cdkn2a.2
  crRNA array
  misc_feature (148)..(157): n is a, c, g, or t
cttggctttatatatcttgtggaaaggacgaaacaccgtaatttctactaagtgtagatgcagcatgggggtatccctttaatttctactaagtgtagatgcccaacgccccgaactctttaatttctactaagtgtagatttttttnnnnnnnnnnaagcttggcgtggatccgatatcaactagatcttgagacaaatggcagtattcatccacaattttaaaagaaaaggggggattggggggtacagtgcaggggaaagaatagtagacataatagcaacagacatacaaactaaag

SEQ ID NO: 11064 - DNA, 301 bp, Artificial Sequence
  Atrx.2_Cdkn2a.3
  crRNA array
  misc_feature (148)..(157): n is a, c, g, or t
cttggctttatatatcttgtggaaaggacgaaacaccgtaatttctactaagtgtagatgcagcatgggggtatccctttaatttctactaagtgtagattgtaccgctgggaacgtcgctaatttctactaagtgtagatttttttnnnnnnnnnnaagcttggcgtggatccgatatcaactagatcttgagacaaatggcagtattcatccacaattttaaaagaaaaggggggattggggggtacagtgcaggggaaagaatagtagacataatagcaacagacatacaaactaaag

SEQ ID NO: 11065 - DNA, 301 bp, Artificial Sequence
  Atrx.2_Cdkn2a.4
  crRNA array
  misc_feature (148)..(157): n is a, c, g, or t
cttggctttatatatcttgtggaaaggacgaaacaccgtaatttctactaagtgtagatgcagcatgggggtatccctttaatttctactaagtgtagataagccacatgctagacacgctaatttctactaagtgtagatttttttnnnnnnnnnnaagcttggcgtggatccgatatcaactagatcttgagacaaatggcagtattcatccacaattttaaaagaaaaggggggattggggggtacagtgcaggggaaagaatagtagacataatagcaacagacatacaaactaaag

SEQ ID NO: 11066 - DNA, 301 bp, Artificial Sequence
  Atrx.3_Cdkn2a.1
  crRNA array
  misc_feature (148)..(157): n is a, c, g, or t
cttggctttatatatcttgtggaaaggacgaaacaccgtaatttctactaagtgtagatggagccctgtccgcaatgagtaatttctactaagtgtagatcaatcacgggagggagcagataatttctactaagtgtagatttttttnnnnnnnnnnaagcttggcgtggatccgatatcaactagatcttgagacaaatggcagtattcatccacaattttaaaagaaaaggggggattggggggtacagtgcaggggaaagaatagtagacataatagcaacagacatacaaactaaag

SEQ ID NO: 11067 - DNA, 301 bp, Artificial Sequence
  Atrx.3_Cdkn2a.2
  crRNA array
  misc_feature (148)..(157): n is a, c, g, or t
cttggctttatatatcttgtggaaaggacgaaacaccgtaatttctactaagtgtagatggagccctgtccgcaatgagtaatttctactaagtgtagatgcccaacgccccgaactctttaatttctactaagtgtagatttttttnnnnnnnnnnaagcttggcgtggatccgatatcaactagatcttgagacaaatggcagtattcatccacaattttaaaagaaaaggggggattggggggtacagtgcaggggaaagaatagtagacataatagcaacagacatacaaactaaag

SEQ ID NO: 11068 - DNA, 301 bp, Artificial Sequence
  Atrx.3_Cdkn2a.3
  crRNA array
  misc_feature (148)..(157): n is a, c, g, or t
cttggctttatatatcttgtggaaaggacgaaacaccgtaatttctactaagtgtagatggagccctgtccgcaatgagtaatttctactaagtgtagattgtaccgctgggaacgtcgctaatttctactaagtgtagatttttttnnnnnnnnnnaagcttggcgtggatccgatatcaactagatcttgagacaaatggcagtattcatccacaattttaaaagaaaaggggggattggggggtacagtgcaggggaaagaatagtagacataatagcaacagacatacaaactaaag

SEQ ID NO: 11069 - DNA, 301 bp, Artificial Sequence
  Atrx.3_Cdkn2a.4
  crRNA array
  misc_feature (148)..(157): n is a, c, g, or t
cttggctttatatatcttgtggaaaggacgaaacaccgtaatttctactaagtgtagatggagccctgtccgcaatgagtaatttctactaagtgtagataagccacatgctagacacgctaatttctactaagtgtagatttttttnnnnnnnnnnaagcttggcgtggatccgatatcaactagatcttgagacaaatggcagtattcatccacaattttaaaagaaaaggggggattggggggtacagtgcaggggaaagaatagtagacataatagcaacagacatacaaactaaag

SEQ ID NO: 11070 - DNA, 301 bp, Artificial Sequence
  Atrx.4_Cdkn2a.1
  crRNA array
  misc_feature (148)..(157): n is a, c, g, or t
cttggctttatatatcttgtggaaaggacgaaacaccgtaatttctactaagtgtagataaactgggctcctactaaattaatttctactaagtgtagatcaatcacgggagggagcagataatttctactaagtgtagatttttttnnnnnnnnnnaagcttggcgtggatccgatatcaactagatcttgagacaaatggcagtattcatccacaattttaaaagaaaaggggggattggggggtacagtgcaggggaaagaatagtagacataatagcaacagacatacaaactaaag

SEQ ID NO: 11071 - DNA, 301 bp, Artificial Sequence
  Atrx.4_Cdkn2a.2
  crRNA array
  misc_feature (148)..(157): n is a, c, g, or t
cttggctttatatatcttgtggaaaggacgaaacaccgtaatttctactaagtgtagataaactgggctcctactaaattaatttctactaagtgtagatgcccaacgccccgaactctttaatttctactaagtgtagatttttttnnnnnnnnnnaagcttggcgtggatccgatatcaactagatcttgagacaaatggcagtattcatccacaattttaaaagaaaaggggggattggggggtacagtgcaggggaaagaatagtagacataatagcaacagacatacaaactaaag

SEQ ID NO: 11072 - DNA, 301 bp, Artificial Sequence
  Atrx.4_Cdkn2a.3
  crRNA array
  misc_feature (148)..(157): n is a, c, g, or t
cttggctttatatatcttgtggaaaggacgaaacaccgtaatttctactaagtgtagataaactgggctcctactaaattaatttctactaagtgtagattgtaccgctgggaacgtcgctaatttctactaagtgtagatttttttnnnnnnnnnnaagcttggcgtggatccgatatcaactagatcttgagacaaatggcagtattcatccacaattttaaaagaaaaggggggattggggggtacagtgcaggggaaagaatagtagacataatagcaacagacatacaaactaaag

SEQ ID NO: 11073 - DNA, 301 bp, Artificial Sequence
  Atrx.4_Cdkn2a.4
  crRNA array
  misc_feature (148)..(157): n is a, c, g, or t
cttggctttatatatcttgtggaaaggacgaaacaccgtaatttctactaagtgtagataaactgggctcctactaaattaatttctactaagtgtagataagccacatgctagacacgctaatttctactaagtgtagatttttttnnnnnnnnnnaagcttggcgtggatccgatatcaactagatcttgagacaaatggcagtattcatccacaattttaaaagaaaaggggggattggggggtacagtgcaggggaaagaatagtagacataatagcaacagacatacaaactaaag

SEQ ID NO: 11074 - DNA, 301 bp, Artificial Sequence
  Atrx.1_Wrn.1
  crRNA array
  misc_feature (148)..(157): n is a, c, g, or t
cttggctttatatatcttgtggaaaggacgaaacaccgtaatttctactaagtgtagatgccagtcgctcatatctctgtaatttctactaagtgtagatgcaaaccactcgggtaattttaatttctactaagtgtagatttttttnnnnnnnnnnaagcttggcgtggatccgatatcaactagatcttgagacaaatggcagtattcatccacaattttaaaagaaaaggggggattggggggtacagtgcaggggaaagaatagtagacataatagcaacagacatacaaactaaag

SEQ ID NO: 11075 - DNA, 301 bp, Artificial Sequence
  Atrx.1_Wrn.2
  crRNA array
  misc_feature (148)..(157): n is a, c, g, or t
cttggctttatatatcttgtggaaaggacgaaacaccgtaatttctactaagtgtagatgccagtcgctcatatctctgtaatttctactaagtgtagatgccatgtccagcagaacctttaatttctactaagtgtagatttttttnnnnnnnnnnaagcttggcgtggatccgatatcaactagatcttgagacaaatggcagtattcatccacaattttaaaagaaaaggggggattggggggtacagtgcaggggaaagaatagtagacataatagcaacagacatacaaactaaag

SEQ ID NO: 11076 - DNA, 301 bp, Artificial Sequence
  Atrx.1_Wrn.3
  crRNA array
  misc_feature (148)..(157): n is a, c, g, or t
cttggctttatatatcttgtggaaaggacgaaacaccgtaatttctactaagtgtagatgccagtcgctcatatctctgtaatttctactaagtgtagatctgcagcaggccaccgcaattaatttctactaagtgtagatttttttnnnnnnnnnnaagcttggcgtggatccgatatcaactagatcttgagacaaatggcagtattcatccacaattttaaaagaaaaggggggattggggggtacagtgcaggggaaagaatagtagacataatagcaacagacatacaaactaaag

SEQ ID NO: 11077 - DNA, 301 bp, Artificial Sequence
  Atrx.1_Wrn.4
  crRNA array
  misc_feature (148)..(157): n is a, c, g, or t
cttggctttatatatcttgtggaaaggacgaaacaccgtaatttctactaagtgtagatgccagtcgctcatatctctgtaatttctactaagtgtagattcgaaggacaatagatgatgtaatttctactaagtgtagatttttttnnnnnnnnnnaagcttggcgtggatccgatatcaactagatcttgagacaaatggcagtattcatccacaattttaaaagaaaaggggggattggggggtacagtgcaggggaaagaatagtagacataatagcaacagacatacaaactaaag

SEQ ID NO: 11078 - DNA, 301 bp, Artificial Sequence
  Atrx.2_Wrn.1
  crRNA array
  misc_feature (148)..(157): n is a, c, g, or t
cttggctttatatatcttgtggaaaggacgaaacaccgtaatttctactaagtgtagatgcagcatgggggtatccctttaatttctactaagtgtagatgcaaaccactcgggtaattttaatttctactaagtgtagatttttttnnnnnnnnnnaagcttggcgtggatccgatatcaactagatcttgagacaaatggcagtattcatccacaattttaaaagaaaaggggggattggggggtacagtgcaggggaaagaatagtagacataatagcaacagacatacaaactaaag

SEQ ID NO: 11079 - DNA, 301 bp, Artificial Sequence
  Atrx.2_Wrn.2
  crRNA array
  misc_feature (148)..(157): n is a, c, g, or t
cttggctttatatatcttgtggaaaggacgaaacaccgtaatttctactaagtgtagatgcagcatgggggtatccctttaatttctactaagtgtagatgccatgtccagcagaacctttaatttctactaagtgtagatttttttnnnnnnnnnnaagcttggcgtggatccgatatcaactagatcttgagacaaatggcagtattcatccacaattttaaaagaaaaggggggattggggggtacagtgcaggggaaagaatagtagacataatagcaacagacatacaaactaaag

SEQ ID NO: 11080 - DNA, 301 bp, Artificial Sequence
  Atrx.2_Wrn.3
  crRNA array
  misc_feature (148)..(157): n is a, c, g, or t
cttggctttatatatcttgtggaaaggacgaaacaccgtaatttctactaagtgtagatgcagcatgggggtatccctttaatttctactaagtgtagatctgcagcaggccaccgcaattaatttctactaagtgtagatttttttnnnnnnnnnnaagcttggcgtggatccgatatcaactagatcttgagacaaatggcagtattcatccacaattttaaaagaaaaggggggattggggggtacagtgcaggggaaagaatagtagacataatagcaacagacatacaaactaaag

SEQ ID NO: 11081 - DNA, 301 bp, Artificial Sequence
  Atrx.2_Wrn.4
  crRNA array
  misc_feature (148)..(157): n is a, c, g, or t
cttggctttatatatcttgtggaaaggacgaaacaccgtaatttctactaagtgtagatgcagcatgggggtatccctttaatttctactaagtgtagattcgaaggacaatagatgatgtaatttctactaagtgtagatttttttnnnnnnnnnnaagcttggcgtggatccgatatcaactagatcttgagacaaatggcagtattcatccacaattttaaaagaaaaggggggattggggggtacagtgcaggggaaagaatagtagacataatagcaacagacatacaaactaaag

SEQ ID NO: 11082 - DNA, 301 bp, Artificial Sequence
  Atrx.3_Wrn.1
  crRNA array
  misc_feature (148)..(157): n is a, c, g, or t
cttggctttatatatcttgtggaaaggacgaaacaccgtaatttctactaagtgtagatggagccctgtccgcaatgagtaatttctactaagtgtagatgcaaaccactcgggtaattttaatttctactaagtgtagatttttttnnnnnnnnnnaagcttggcgtggatccgatatcaactagatcttgagacaaatggcagtattcatccacaattttaaaagaaaaggggggattggggggtacagtgcaggggaaagaatagtagacataatagcaacagacatacaaactaaag

SEQ ID NO: 11083 - DNA, 301 bp, Artificial Sequence
  Atrx.3_Wrn.2
  crRNA array
  misc_feature (148)..(157): n is a, c, g, or t
cttggctttatatatcttgtggaaaggacgaaacaccgtaatttctactaagtgtagatggagccctgtccgcaatgagtaatttctactaagtgtagatgccatgtccagcagaacctttaatttctactaagtgtagatttttttnnnnnnnnnnaagcttggcgtggatccgatatcaactagatcttgagacaaatggcagtattcatccacaattttaaaagaaaaggggggattggggggtacagtgcaggggaaagaatagtagacataatagcaacagacatacaaactaaag

SEQ ID NO: 11084 - DNA, 301 bp, Artificial Sequence
  Atrx.3_Wrn.3
  crRNA array
  misc_feature (148)..(157): n is a, c, g, or t
cttggctttatatatcttgtggaaaggacgaaacaccgtaatttctactaagtgtagatggagccctgtccgcaatgagtaatttctactaagtgtagatctgcagcaggccaccgcaattaatttctactaagtgtagatttttttnnnnnnnnnnaagcttggcgtggatccgatatcaactagatcttgagacaaatggcagtattcatccacaattttaaaagaaaaggggggattggggggtacagtgcaggggaaagaatagtagacataatagcaacagacatacaaactaaag

SEQ ID NO: 11085 - DNA, 301 bp, Artificial Sequence
  Atrx.3_Wrn.4
  crRNA array
  misc_feature (148)..(157): n is a, c, g, or t
cttggctttatatatcttgtggaaaggacgaaacaccgtaatttctactaagtgtagatggagccctgtccgcaatgagtaatttctactaagtgtagattcgaaggacaatagatgatgtaatttctactaagtgtagatttttttnnnnnnnnnnaagcttggcgtggatccgatatcaactagatcttgagacaaatggcagtattcatccacaattttaaaagaaaaggggggattggggggtacagtgcaggggaaagaatagtagacataatagcaacagacatacaaactaaag

SEQ ID NO: 11086 - DNA, 301 bp, Artificial Sequence
  Atrx.4_Wrn.1
  crRNA array
  misc_feature (148)..(157): n is a, c, g, or t
cttggctttatatatcttgtggaaaggacgaaacaccgtaatttctactaagtgtagataaactgggctcctactaaattaatttctactaagtgtagatgcaaaccactcgggtaattttaatttctactaagtgtagatttttttnnnnnnnnnnaagcttggcgtggatccgatatcaactagatcttgagacaaatggcagtattcatccacaattttaaaagaaaaggggggattggggggtacagtgcaggggaaagaatagtagacataatagcaacagacatacaaactaaag

SEQ ID NO: 11087 - DNA, 301 bp, Artificial Sequence
  Atrx.4_Wrn.2
  crRNA array
  misc_feature (148)..(157): n is a, c, g, or t
cttggctttatatatcttgtggaaaggacgaaacaccgtaatttctactaagtgtagataaactgggctcctactaaattaatttctactaagtgtagatgccatgtccagcagaacctttaatttctactaagtgtagatttttttnnnnnnnnnnaagcttggcgtggatccgatatcaactagatcttgagacaaatggcagtattcatccacaattttaaaagaaaaggggggattggggggtacagtgcaggggaaagaatagtagacataatagcaacagacatacaaactaaag

SEQ ID NO: 11088 - DNA, 301 bp, Artificial Sequence
  Atrx.4_Wrn.3
  crRNA array
  misc_feature (148)..(157): n is a, c, g, or t
cttggctttatatatcttgtggaaaggacgaaacaccgtaatttctactaagtgtagataaactgggctcctactaaattaatttctactaagtgtagatctgcagcaggccaccgcaattaatttctactaagtgtagatttttttnnnnnnnnnnaagcttggcgtggatccgatatcaactagatcttgagacaaatggcagtattcatccacaattttaaaagaaaaggggggattggggggtacagtgcaggggaaagaatagtagacataatagcaacagacatacaaactaaag

SEQ ID NO: 11089 - DNA, 301 bp, Artificial Sequence
  Atrx.4_Wrn.4
  crRNA array
  misc_feature (148)..(157): n is a, c, g, or t
cttggctttatatatcttgtggaaaggacgaaacaccgtaatttctactaagtgtagataaactgggctcctactaaattaatttctactaagtgtagattcgaaggacaatagatgatgtaatttctactaagtgtagatttttttnnnnnnnnnnaagcttggcgtggatccgatatcaactagatcttgagacaaatggcagtattcatccacaattttaaaagaaaaggggggattggggggtacagtgcaggggaaagaatagtagacataatagcaacagacatacaaactaaag

SEQ ID NO: 11090 - DNA, 301 bp, Artificial Sequence
  Atrx.1_Brca2.1
  crRNA array
  misc_feature (148)..(157): n is a, c, g, or t
cttggctttatatatcttgtggaaaggacgaaacaccgtaatttctactaagtgtagatgccagtcgctcatatctctgtaatttctactaagtgtagatctaagcgtagaaccagaaattaatttctactaagtgtagatttttttnnnnnnnnnnaagcttggcgtggatccgatatcaactagatcttgagacaaatggcagtattcatccacaattttaaaagaaaaggggggattggggggtacagtgcaggggaaagaatagtagacataatagcaacagacatacaaactaaag

SEQ ID NO: 11091 - DNA, 301 bp, Artificial Sequence
  Atrx.1_Brca2.2
  crRNA array
  misc_feature (148)..(157): n is a, c, g, or t
cttggctttatatatcttgtggaaaggacgaaacaccgtaatttctactaagtgtagatgccagtcgctcatatctctgtaatttctactaagtgtagatgatccaggtgtaacaagccataatttctactaagtgtagatttttttnnnnnnnnnnaagcttggcgtggatccgatatcaactagatcttgagacaaatggcagtattcatccacaattttaaaagaaaaggggggattggggggtacagtgcaggggaaagaatagtagacataatagcaacagacatacaaactaaag

SEQ ID NO: 11092 - DNA, 301 bp, Artificial Sequence
  Atrx.1_Brca2.3
  crRNA array
  misc_feature (148)..(157): n is a, c, g, or t
cttggctttatatatcttgtggaaaggacgaaacaccgtaatttctactaagtgtagatgccagtcgctcatatctctgtaatttctactaagtgtagattgaatataaactgggccacttaatttctactaagtgtagatttttttnnnnnnnnnnaagcttggcgtggatccgatatcaactagatcttgagacaaatggcagtattcatccacaattttaaaagaaaaggggggattggggggtacagtgcaggggaaagaatagtagacataatagcaacagacatacaaactaaag

SEQ ID NO: 11093 - DNA, 301 bp, Artificial Sequence
  Atrx.1_Brca2.4
  crRNA array
  misc_feature (148)..(157): n is a, c, g, or t
cttggctttatatatcttgtggaaaggacgaaacaccgtaatttctactaagtgtagatgccagtcgctcatatctctgtaatttctactaagtgtagatgaaacgccgtatatatagagtaatttctactaagtgtagatttttttnnnnnnnnnnaagcttggcgtggatccgatatcaactagatcttgagacaaatggcagtattcatccacaattttaaaagaaaaggggggattggggggtacagtgcaggggaaagaatagtagacataatagcaacagacatacaaactaaag

SEQ ID NO: 11094 - DNA, 301 bp, Artificial Sequence
  Atrx.2_Brca2.1
  crRNA array
  misc_feature (148)..(157): n is a, c, g, or t
cttggctttatatatcttgtggaaaggacgaaacaccgtaatttctactaagtgtagatgcagcatgggggtatccctttaatttctactaagtgtagatctaagcgtagaaccagaaattaatttctactaagtgtagatttttttnnnnnnnnnnaagcttggcgtggatccgatatcaactagatcttgagacaaatggcagtattcatccacaattttaaaagaaaaggggggattggggggtacagtgcaggggaaagaatagtagacataatagcaacagacatacaaactaaag

SEQ ID NO: 11095 - DNA, 301 bp, Artificial Sequence
  Atrx.2_Brca2.2
  crRNA array
  misc_feature (148)..(157): n is a, c, g, or t
cttggctttatatatcttgtggaaaggacgaaacaccgtaatttctactaagtgtagatgcagcatgggggtatccctttaatttctactaagtgtagatgatccaggtgtaacaagccataatttctactaagtgtagatttttttnnnnnnnnnnaagcttggcgtggatccgatatcaactagatcttgagacaaatggcagtattcatccacaattttaaaagaaaaggggggattggggggtacagtgcaggggaaagaatagtagacataatagcaacagacatacaaactaaag

SEQ ID NO: 11096 - DNA, 301 bp, Artificial Sequence
  Atrx.2_Brca2.3
  crRNA array
  misc_feature (148)..(157): n is a, c, g, or t
cttggctttatatatcttgtggaaaggacgaaacaccgtaatttctactaagtgtagatgcagcatgggggtatccctttaatttctactaagtgtagattgaatataaactgggccacttaatttctactaagtgtagatttttttnnnnnnnnnnaagcttggcgtggatccgatatcaactagatcttgagacaaatggcagtattcatccacaattttaaaagaaaaggggggattggggggtacagtgcaggggaaagaatagtagacataatagcaacagacatacaaactaaag

SEQ ID NO: 11097 - DNA, 301 bp, Artificial Sequence
  Atrx.2_Brca2.4
  crRNA array
  misc_feature (148)..(157): n is a, c, g, or t
cttggctttatatatcttgtggaaaggacgaaacaccgtaatttctactaagtgtagatgcagcatgggggtatccctttaatttctactaagtgtagatgaaacgccgtatatatagagtaatttctactaagtgtagatttttttnnnnnnnnnnaagcttggcgtggatccgatatcaactagatcttgagacaaatggcagtattcatccacaattttaaaagaaaaggggggattggggggtacagtgcaggggaaagaatagtagacataatagcaacagacatacaaactaaag

SEQ ID NO: 11098 - DNA, 301 bp, Artificial Sequence
  Atrx.3_Brca2.1
  crRNA array
  misc_feature (148)..(157): n is a, c, g, or t
cttggctttatatatcttgtggaaaggacgaaacaccgtaatttctactaagtgtagatggagccctgtccgcaatgagtaatttctactaagtgtagatctaagcgtagaaccagaaattaatttctactaagtgtagatttttttnnnnnnnnnnaagcttggcgtggatccgatatcaactagatcttgagacaaatggcagtattcatccacaattttaaaagaaaaggggggattggggggtacagtgcaggggaaagaatagtagacataatagcaacagacatacaaactaaag

SEQ ID NO: 11099 - DNA, 301 bp, Artificial Sequence
  Atrx.3_Brca2.2
  crRNA array
  misc_feature (148)..(157): n is a, c, g, or t
cttggctttatatatcttgtggaaaggacgaaacaccgtaatttctactaagtgtagatggagccctgtccgcaatgagtaatttctactaagtgtagatgatccaggtgtaacaagccataatttctactaagtgtagatttttttnnnnnnnnnnaagcttggcgtggatccgatatcaactagatcttgagacaaatggcagtattcatccacaattttaaaagaaaaggggggattggggggtacagtgcaggggaaagaatagtagacataatagcaacagacatacaaactaaag

SEQ ID NO: 11100 - DNA, 301 bp, Artificial Sequence
  Atrx.3_Brca2.3
  crRNA array
  misc_feature (148)..(157): n is a, c, g, or t
cttggctttatatatcttgtggaaaggacgaaacaccgtaatttctactaagtgtagatggagccctgtccgcaatgagtaatttctactaagtgtagattgaatataaactgggccacttaatttctactaagtgtagatttttttnnnnnnnnnnaagcttggcgtggatccgatatcaactagatcttgagacaaatggcagtattcatccacaattttaaaagaaaaggggggattggggggtacagtgcaggggaaagaatagtagacataatagcaacagacatacaaactaaag

SEQ ID NO: 11101 - DNA, 301 bp, Artificial Sequence
  Atrx.3_Brca2.4
  crRNA array
  misc_feature (148)..(157): n is a, c, g, or t
cttggctttatatatcttgtggaaaggacgaaacaccgtaatttctactaagtgtagatggagccctgtccgcaatgagtaatttctactaagtgtagatgaaacgccgtatatatagagtaatttctactaagtgtagatttttttnnnnnnnnnnaagcttggcgtggatccgatatcaactagatcttgagacaaatggcagtattcatccacaattttaaaagaaaaggggggattggggggtacagtgcaggggaaagaatagtagacataatagcaacagacatacaaactaaag

SEQ ID NO: 11102 - DNA, 301 bp, Artificial Sequence
  Atrx.4_Brca2.1
  crRNA array
  misc_feature (148)..(157): n is a, c, g, or t
cttggctttatatatcttgtggaaaggacgaaacaccgtaatttctactaagtgtagataaactgggctcctactaaattaatttctactaagtgtagatctaagcgtagaaccagaaattaatttctactaagtgtagatttttttnnnnnnnnnnaagcttggcgtggatccgatatcaactagatcttgagacaaatggcagtattcatccacaattttaaaagaaaaggggggattggggggtacagtgcaggggaaagaatagtagacataatagcaacagacatacaaactaaag

SEQ ID NO: 11103 - DNA, 301 bp, Artificial Sequence
  Atrx.4_Brca2.2
  crRNA array
  misc_feature (148)..(157): n is a, c, g, or t
cttggctttatatatcttgtggaaaggacgaaacaccgtaatttctactaagtgtagataaactgggctcctactaaattaatttctactaagtgtagatgatccaggtgtaacaagccataatttctactaagtgtagatttttttnnnnnnnnnnaagcttggcgtggatccgatatcaactagatcttgagacaaatggcagtattcatccacaattttaaaagaaaaggggggattggggggtacagtgcaggggaaagaatagtagacataatagcaacagacatacaaactaaag

SEQ ID NO: 11104 - DNA, 301 bp, Artificial Sequence
  Atrx.4_Brca2.3
  crRNA array
  misc_feature (148)..(157): n is a, c, g, or t
cttggctttatatatcttgtggaaaggacgaaacaccgtaatttctactaagtgtagataaactgggctcctactaaattaatttctactaagtgtagattgaatataaactgggccacttaatttctactaagtgtagatttttttnnnnnnnnnnaagcttggcgtggatccgatatcaactagatcttgagacaaatggcagtattcatccacaattttaaaagaaaaggggggattggggggtacagtgcaggggaaagaatagtagacataatagcaacagacatacaaactaaag

SEQ ID NO: 11105 - DNA, 301 bp, Artificial Sequence
  Atrx.4_Brca2.4
  crRNA array
  misc_feature (148)..(157): n is a, c, g, or t
cttggctttatatatcttgtggaaaggacgaaacaccgtaatttctactaagtgtagataaactgggctcctactaaattaatttctactaagtgtagatgaaacgccgtatatatagagtaatttctactaagtgtagatttttttnnnnnnnnnnaagcttggcgtggatccgatatcaactagatcttgagacaaatggcagtattcatccacaattttaaaagaaaaggggggattggggggtacagtgcaggggaaagaatagtagacataatagcaacagacatacaaactaaag

SEQ ID NO: 11106 - DNA, 301 bp, Artificial Sequence
  Atrx.1_Apc.1
  crRNA array
  misc_feature (148)..(157): n is a, c, g, or t
cttggctttatatatcttgtggaaaggacgaaacaccgtaatttctactaagtgtagatgccagtcgctcatatctctgtaatttctactaagtgtagatgtgatccacacgtgtagctgtaatttctactaagtgtagatttttttnnnnnnnnnnaagcttggcgtggatccgatatcaactagatcttgagacaaatggcagtattcatccacaattttaaaagaaaaggggggattggggggtacagtgcaggggaaagaatagtagacataatagcaacagacatacaaactaaag

SEQ ID NO: 11107 - DNA, 301 bp, Artificial Sequence
  Atrx.1_Apc.2
  crRNA array
  misc_feature (148)..(157): n is a, c, g, or t
cttggctttatatatcttgtggaaaggacgaaacaccgtaatttctactaagtgtagatgccagtcgctcatatctctgtaatttctactaagtgtagatcatctgctcgccaagacaaataatttctactaagtgtagatttttttnnnnnnnnnnaagcttggcgtggatccgatatcaactagatcttgagacaaatggcagtattcatccacaattttaaaagaaaaggggggattggggggtacagtgcaggggaaagaatagtagacataatagcaacagacatacaaactaaag

SEQ ID NO: 11108 - DNA, 301 bp, Artificial Sequence
  Atrx.1_Apc.3
  crRNA array
  misc_feature (148)..(157): n is a, c, g, or t
cttggctttatatatcttgtggaaaggacgaaacaccgtaatttctactaagtgtagatgccagtcgctcatatctctgtaatttctactaagtgtagatacgccaatcgacatgatgattaatttctactaagtgtagatttttttnnnnnnnnnnaagcttggcgtggatccgatatcaactagatcttgagacaaatggcagtattcatccacaattttaaaagaaaaggggggattggggggtacagtgcaggggaaagaatagtagacataatagcaacagacatacaaactaaag

SEQ ID NO: 11109 - DNA, 301 bp, Artificial Sequence
  Atrx.1_Apc.4
  crRNA array
  misc_feature (148)..(157): n is a, c, g, or t
cttggctttatatatcttgtggaaaggacgaaacaccgtaatttctactaagtgtagatgccagtcgctcatatctctgtaatttctactaagtgtagatcaccaggggatgatgtgccctaatttctactaagtgtagatttttttnnnnnnnnnnaagcttggcgtggatccgatatcaactagatcttgagacaaatggcagtattcatccacaattttaaaagaaaaggggggattggggggtacagtgcaggggaaagaatagtagacataatagcaacagacatacaaactaaag

SEQ ID NO: 11110 - DNA, 301 bp, Artificial Sequence
  Atrx.2_Apc.1
  crRNA array
  misc_feature (148)..(157): n is a, c, g, or t
cttggctttatatatcttgtggaaaggacgaaacaccgtaatttctactaagtgtagatgcagcatgggggtatccctttaatttctactaagtgtagatgtgatccacacgtgtagctgtaatttctactaagtgtagatttttttnnnnnnnnnnaagcttggcgtggatccgatatcaactagatcttgagacaaatggcagtattcatccacaattttaaaagaaaaggggggattggggggtacagtgcaggggaaagaatagtagacataatagcaacagacatacaaactaaag

SEQ ID NO: 11111 - DNA, 301 bp, Artificial Sequence
  Atrx.2_Apc.2
  crRNA array
  misc_feature (148)..(157): n is a, c, g, or t
cttggctttatatatcttgtggaaaggacgaaacaccgtaatttctactaagtgtagatgcagcatgggggtatccctttaatttctactaagtgtagatcatctgctcgccaagacaaataatttctactaagtgtagatttttttnnnnnnnnnnaagcttggcgtggatccgatatcaactagatcttgagacaaatggcagtattcatccacaattttaaaagaaaaggggggattggggggtacagtgcaggggaaagaatagtagacataatagcaacagacatacaaactaaag

SEQ ID NO: 11112 - DNA, 301 bp, Artificial Sequence
  Atrx.2_Apc.3
  crRNA array
  misc_feature (148)..(157): n is a, c, g, or t
cttggctttatatatcttgtggaaaggacgaaacaccgtaatttctactaagtgtagatgcagcatgggggtatccctttaatttctactaagtgtagatacgccaatcgacatgatgattaatttctactaagtgtagatttttttnnnnnnnnnnaagcttggcgtggatccgatatcaactagatcttgagacaaatggcagtattcatccacaattttaaaagaaaaggggggattggggggtacagtgcaggggaaagaatagtagacataatagcaacagacatacaaactaaag

SEQ ID NO: 11113 - DNA, 301 bp, Artificial Sequence
  Atrx.2_Apc.4
  crRNA array
  misc_feature (148)..(157): n is a, c, g, or t
cttggctttatatatcttgtggaaaggacgaaacaccgtaatttctactaagtgtagatgcagcatgggggtatccctttaatttctactaagtgtagatcaccaggggatgatgtgccctaatttctactaagtgtagatttttttnnnnnnnnnnaagcttggcgtggatccgatatcaactagatcttgagacaaatggcagtattcatccacaattttaaaagaaaaggggggattggggggtacagtgcaggggaaagaatagtagacataatagcaacagacatacaaactaaag

SEQ ID NO: 11114 - DNA, 301 bp, Artificial Sequence
  Atrx.3_Apc.1
  crRNA array
  misc_feature (148)..(157): n is a, c, g, or t
cttggctttatatatcttgtggaaaggacgaaacaccgtaatttctactaagtgtagatggagccctgtccgcaatgagtaatttctactaagtgtagatgtgatccacacgtgtagctgtaatttctactaagtgtagatttttttnnnnnnnnnnaagcttggcgtggatccgatatcaactagatcttgagacaaatggcagtattcatccacaattttaaaagaaaaggggggattggggggtacagtgcaggggaaagaatagtagacataatagcaacagacatacaaactaaag

SEQ ID NO: 11115 - DNA, 301 bp, Artificial Sequence
  Atrx.3_Apc.2
  crRNA array
  misc_feature (148)..(157): n is a, c, g, or t
cttggctttatatatcttgtggaaaggacgaaacaccgtaatttctactaagtgtagatggagccctgtccgcaatgagtaatttctactaagtgtagatcatctgctcgccaagacaaataatttctactaagtgtagatttttttnnnnnnnnnnaagcttggcgtggatccgatatcaactagatcttgagacaaatggcagtattcatccacaattttaaaagaaaaggggggattggggggtacagtgcaggggaaagaatagtagacataatagcaacagacatacaaactaaag

SEQ ID NO: 11116 - DNA, 301 bp, Artificial Sequence
  Atrx.3_Apc.3
  crRNA array
  misc_feature (148)..(157): n is a, c, g, or t
cttggctttatatatcttgtggaaaggacgaaacaccgtaatttctactaagtgtagatggagccctgtccgcaatgagtaatttctactaagtgtagatacgccaatcgacatgatgattaatttctactaagtgtagatttttttnnnnnnnnnnaagcttggcgtggatccgatatcaactagatcttgagacaaatggcagtattcatccacaattttaaaagaaaaggggggattggggggtacagtgcaggggaaagaatagtagacataatagcaacagacatacaaactaaag

SEQ ID NO: 11117 - DNA, 301 bp, Artificial Sequence
  Atrx.3_Apc.4
  crRNA array
  misc_feature (148)..(157): n is a, c, g, or t
cttggctttatatatcttgtggaaaggacgaaacaccgtaatttctactaagtgtagatggagccctgtccgcaatgagtaatttctactaagtgtagatcaccaggggatgatgtgccctaatttctactaagtgtagatttttttnnnnnnnnnnaagcttggcgtggatccgatatcaactagatcttgagacaaatggcagtattcatccacaattttaaaagaaaaggggggattggggggtacagtgcaggggaaagaatagtagacataatagcaacagacatacaaactaaag

SEQ ID NO: 11118 - DNA, 301 bp, Artificial Sequence
  Atrx.4_Apc.1
  crRNA array
  misc_feature (148)..(157): n is a, c, g, or t
cttggctttatatatcttgtggaaaggacgaaacaccgtaatttctactaagtgtagataaactgggctcctactaaattaatttctactaagtgtagatgtgatccacacgtgtagctgtaatttctactaagtgtagatttttttnnnnnnnnnnaagcttggcgtggatccgatatcaactagatcttgagacaaatggcagtattcatccacaattttaaaagaaaaggggggattggggggtacagtgcaggggaaagaatagtagacataatagcaacagacatacaaactaaag

SEQ ID NO: 11119 - DNA, 301 bp, Artificial Sequence
  Atrx.4_Apc.2
  crRNA array
  misc_feature (148)..(157): n is a, c, g, or t
cttggctttatatatcttgtggaaaggacgaaacaccgtaatttctactaagtgtagataaactgggctcctactaaattaatttctactaagtgtagatcatctgctcgccaagacaaataatttctactaagtgtagatttttttnnnnnnnnnnaagcttggcgtggatccgatatcaactagatcttgagacaaatggcagtattcatccacaattttaaaagaaaaggggggattggggggtacagtgcaggggaaagaatagtagacataatagcaacagacatacaaactaaag

SEQ ID NO: 11120 - DNA, 301 bp, Artificial Sequence
  Atrx.4_Apc.3
  crRNA array
  misc_feature (148)..(157): n is a, c, g, or t
cttggctttatatatcttgtggaaaggacgaaacaccgtaatttctactaagtgtagataaactgggctcctactaaattaatttctactaagtgtagatacgccaatcgacatgatgattaatttctactaagtgtagatttttttnnnnnnnnnnaagcttggcgtggatccgatatcaactagatcttgagacaaatggcagtattcatccacaattttaaaagaaaaggggggattggggggtacagtgcaggggaaagaatagtagacataatagcaacagacatacaaactaaag

SEQ ID NO: 11121 - DNA, 301 bp, Artificial Sequence
  Atrx.4_Apc.4
  crRNA array
  misc_feature (148)..(157): n is a, c, g, or t
cttggctttatatatcttgtggaaaggacgaaacaccgtaatttctactaagtgtagataaactgggctcctactaaattaatttctactaagtgtagatcaccaggggatgatgtgccctaatttctactaagtgtagatttttttnnnnnnnnnnaagcttggcgtggatccgatatcaactagatcttgagacaaatggcagtattcatccacaattttaaaagaaaaggggggattggggggtacagtgcaggggaaagaatagtagacataatagcaacagacatacaaactaaag

SEQ ID NO: 11122 - DNA, 301 bp, Artificial Sequence
  Atrx.1_Fanca.1
  crRNA array
  misc_feature (148)..(157): n is a, c, g, or t
cttggctttatatatcttgtggaaaggacgaaacaccgtaatttctactaagtgtagatgccagtcgctcatatctctgtaatttctactaagtgtagatggaggccccggggcccaccataatttctactaagtgtagatttttttnnnnnnnnnnaagcttggcgtggatccgatatcaactagatcttgagacaaatggcagtattcatccacaattttaaaagaaaaggggggattggggggtacagtgcaggggaaagaatagtagacataatagcaacagacatacaaactaaag

SEQ ID NO: 11123 - DNA, 301 bp, Artificial Sequence
  Atrx.1_Fanca.2
  crRNA array
  misc_feature (148)..(157): n is a, c, g, or t
cttggctttatatatcttgtggaaaggacgaaacaccgtaatttctactaagtgtagatgccagtcgctcatatctctgtaatttctactaagtgtagatagagctaccacctagacagctaatttctactaagtgtagatttttttnnnnnnnnnnaagcttggcgtggatccgatatcaactagatcttgagacaaatggcagtattcatccacaattttaaaagaaaaggggggattggggggtacagtgcaggggaaagaatagtagacataatagcaacagacatacaaactaaag

SEQ ID NO: 11124 - DNA, 301 bp, Artificial Sequence
  Atrx.1_Fanca.3
  crRNA array
  misc_feature (148)..(157): n is a, c, g, or t
cttggctttatatatcttgtggaaaggacgaaacaccgtaatttctactaagtgtagatgccagtcgctcatatctctgtaatttctactaagtgtagataccaactgctgtgcctcgggtaatttctactaagtgtagatttttttnnnnnnnnnnaagcttggcgtggatccgatatcaactagatcttgagacaaatggcagtattcatccacaattttaaaagaaaaggggggattggggggtacagtgcaggggaaagaatagtagacataatagcaacagacatacaaactaaag

SEQ ID NO: 11125 - DNA, 301 bp, Artificial Sequence
  Atrx.1_Fanca.4
  crRNA array
  misc_feature (148)..(157): n is a, c, g, or t
cttggctttatatatcttgtggaaaggacgaaacaccgtaatttctactaagtgtagatgccagtcgctcatatctctgtaatttctactaagtgtagatcacccacccctggtgccaagtaatttctactaagtgtagatttttttnnnnnnnnnnaagcttggcgtggatccgatatcaactagatcttgagacaaatggcagtattcatccacaattttaaaagaaaaggggggattggggggtacagtgcaggggaaagaatagtagacataatagcaacagacatacaaactaaag

SEQ ID NO: 11126 - DNA, 301 bp, Artificial Sequence
  Atrx.2_Fanca.1
  crRNA array
  misc_feature (148)..(157): n is a, c, g, or t
cttggctttatatatcttgtggaaaggacgaaacaccgtaatttctactaagtgtagatgcagcatgggggtatccctttaatttctactaagtgtagatggaggccccggggcccaccataatttctactaagtgtagatttttttnnnnnnnnnnaagcttggcgtggatccgatatcaactagatcttgagacaaatggcagtattcatccacaattttaaaagaaaaggggggattggggggtacagtgcaggggaaagaatagtagacataatagcaacagacatacaaactaaag

SEQ ID NO: 11127 - DNA, 301 bp, Artificial Sequence
  Atrx.2_Fanca.2
  crRNA array
  misc_feature (148)..(157): n is a, c, g, or t
cttggctttatatatcttgtggaaaggacgaaacaccgtaatttctactaagtgtagatgcagcatgggggtatccctttaatttctactaagtgtagatagagctaccacctagacagctaatttctactaagtgtagatttttttnnnnnnnnnnaagcttggcgtggatccgatatcaactagatcttgagacaaatggcagtattcatccacaattttaaaagaaaaggggggattggggggtacagtgcaggggaaagaatagtagacataatagcaacagacatacaaactaaag

SEQ ID NO: 11128 - DNA, 301 bp, Artificial Sequence
  Atrx.2_Fanca.3
  crRNA array
  misc_feature (148)..(157): n is a, c, g, or t
cttggctttatatatcttgtggaaaggacgaaacaccgtaatttctactaagtgtagatgcagcatgggggtatccctttaatttctactaagtgtagataccaactgctgtgcctcgggtaatttctactaagtgtagatttttttnnnnnnnnnnaagcttggcgtggatccgatatcaactagatcttgagacaaatggcagtattcatccacaattttaaaagaaaaggggggattggggggtacagtgcaggggaaagaatagtagacataatagcaacagacatacaaactaaag

SEQ ID NO: 11129 - DNA, 301 bp, Artificial Sequence
  Atrx.2_Fanca.4
  crRNA array
  misc_feature (148)..(157): n is a, c, g, or t
cttggctttatatatcttgtggaaaggacgaaacaccgtaatttctactaagtgtagatgcagcatgggggtatccctttaatttctactaagtgtagatcacccacccctggtgccaagtaatttctactaagtgtagatttttttnnnnnnnnnnaagcttggcgtggatccgatatcaactagatcttgagacaaatggcagtattcatccacaattttaaaagaaaaggggggattggggggtacagtgcaggggaaagaatagtagacataatagcaacagacatacaaactaaag

SEQ ID NO: 11130 - DNA, 301 bp, Artificial Sequence
  Atrx.3_Fanca.1
  crRNA array
  misc_feature (148)..(157): n is a, c, g, or t
cttggctttatatatcttgtggaaaggacgaaacaccgtaatttctactaagtgtagatggagccctgtccgcaatgagtaatttctactaagtgtagatggaggccccggggcccaccataatttctactaagtgtagatttttttnnnnnnnnnnaagcttggcgtggatccgatatcaactagatcttgagacaaatggcagtattcatccacaattttaaaagaaaaggggggattggggggtacagtgcaggggaaagaatagtagacataatagcaacagacatacaaactaaag

SEQ ID NO: 11131 - DNA, 301 bp, Artificial Sequence
  Atrx.3_Fanca.2
  crRNA array
  misc_feature (148)..(157): n is a, c, g, or t
cttggctttatatatcttgtggaaaggacgaaacaccgtaatttctactaagtgtagatggagccctgtccgcaatgagtaatttctactaagtgtagatagagctaccacctagacagctaatttctactaagtgtagatttttttnnnnnnnnnnaagcttggcgtggatccgatatcaactagatcttgagacaaatggcagtattcatccacaattttaaaagaaaaggggggattggggggtacagtgcaggggaaagaatagtagacataatagcaacagacatacaaactaaag

SEQ ID NO: 11132 - DNA, 301 bp, Artificial Sequence
  Atrx.3_Fanca.3
  crRNA array
  misc_feature (148)..(157): n is a, c, g, or t
cttggctttatatatcttgtggaaaggacgaaacaccgtaatttctactaagtgtagatggagccctgtccgcaatgagtaatttctactaagtgtagataccaactgctgtgcctcgggtaatttctactaagtgtagatttttttnnnnnnnnnnaagcttggcgtggatccgatatcaactagatcttgagacaaatggcagtattcatccacaattttaaaagaaaaggggggattggggggtacagtgcaggggaaagaatagtagacataatagcaacagacatacaaactaaag

SEQ ID NO: 11133 - DNA, 301 bp, Artificial Sequence
  Atrx.3_Fanca.4
  crRNA array
  misc_feature (148)..(157): n is a, c, g, or t
cttggctttatatatcttgtggaaaggacgaaacaccgtaatttctactaagtgtagatggagccctgtccgcaatgagtaatttctactaagtgtagatcacccacccctggtgccaagtaatttctactaagtgtagatttttttnnnnnnnnnnaagcttggcgtggatccgatatcaactagatcttgagacaaatggcagtattcatccacaattttaaaagaaaaggggggattggggggtacagtgcaggggaaagaatagtagacataatagcaacagacatacaaactaaag

SEQ ID NO: 11134 - DNA, 301 bp, Artificial Sequence
  Atrx.4_Fanca.1
  crRNA array
  misc_feature (148)..(157): n is a, c, g, or t
cttggctttatatatcttgtggaaaggacgaaacaccgtaatttctactaagtgtagataaactgggctcctactaaattaatttctactaagtgtagatggaggccccggggcccaccataatttctactaagtgtagatttttttnnnnnnnnnnaagcttggcgtggatccgatatcaactagatcttgagacaaatggcagtattcatccacaattttaaaagaaaaggggggattggggggtacagtgcaggggaaagaatagtagacataatagcaacagacatacaaactaaag

SEQ ID NO: 11135 - DNA, 301 bp, Artificial Sequence
  Atrx.4_Fanca.2
  crRNA array
  misc_feature (148)..(157): n is a, c, g, or t
cttggctttatatatcttgtggaaaggacgaaacaccgtaatttctactaagtgtagataaactgggctcctactaaattaatttctactaagtgtagatagagctaccacctagacagctaatttctactaagtgtagatttttttnnnnnnnnnnaagcttggcgtggatccgatatcaactagatcttgagacaaatggcagtattcatccacaattttaaaagaaaaggggggattggggggtacagtgcaggggaaagaatagtagacataatagcaacagacatacaaactaaag

SEQ ID NO: 11136 - DNA, 301 bp, Artificial Sequence
  Atrx.4_Fanca.3
  crRNA array
  misc_feature (148)..(157): n is a, c, g, or t
cttggctttatatatcttgtggaaaggacgaaacaccgtaatttctactaagtgtagataaactgggctcctactaaattaatttctactaagtgtagataccaactgctgtgcctcgggtaatttctactaagtgtagatttttttnnnnnnnnnnaagcttggcgtggatccgatatcaactagatcttgagacaaatggcagtattcatccacaattttaaaagaaaaggggggattggggggtacagtgcaggggaaagaatagtagacataatagcaacagacatacaaactaaag

SEQ ID NO: 11137 - DNA, 301 bp, Artificial Sequence
  Atrx.4_Fanca.4
  crRNA array
  misc_feature (148)..(157): n is a, c, g, or t
cttggctttatatatcttgtggaaaggacgaaacaccgtaatttctactaagtgtagataaactgggctcctactaaattaatttctactaagtgtagatcacccacccctggtgccaagtaatttctactaagtgtagatttttttnnnnnnnnnnaagcttggcgtggatccgatatcaactagatcttgagacaaatggcagtattcatccacaattttaaaagaaaaggggggattggggggtacagtgcaggggaaagaatagtagacataatagcaacagacatacaaactaaag

SEQ ID NO: 11138 - DNA, 301 bp, Artificial Sequence
  Atrx.1_Nf1.1
  crRNA array
  misc_feature (148)..(157): n is a, c, g, or t
cttggctttatatatcttgtggaaaggacgaaacaccgtaatttctactaagtgtagatgccagtcgctcatatctctgtaatttctactaagtgtagattggcgatccggaatcctctgtaatttctactaagtgtagatttttttnnnnnnnnnnaagcttggcgtggatccgatatcaactagatcttgagacaaatggcagtattcatccacaattttaaaagaaaaggggggattggggggtacagtgcaggggaaagaatagtagacataatagcaacagacatacaaactaaag

SEQ ID NO: 11139 - DNA, 301 bp, Artificial Sequence
  Atrx.1_Nf1.2
  crRNA array
  misc_feature (148)..(157): n is a, c, g, or t
cttggctttatatatcttgtggaaaggacgaaacaccgtaatttctactaagtgtagatgccagtcgctcatatctctgtaatttctactaagtgtagatggaaacacaacgctggcctctaatttctactaagtgtagatttttttnnnnnnnnnnaagcttggcgtggatccgatatcaactagatcttgagacaaatggcagtattcatccacaattttaaaagaaaaggggggattggggggtacagtgcaggggaaagaatagtagacataatagcaacagacatacaaactaaag

SEQ ID NO: 11140 - DNA, 301 bp, Artificial Sequence
  Atrx.1_Nf1.3
  crRNA array
  misc_feature (148)..(157): n is a, c, g, or t
cttggctttatatatcttgtggaaaggacgaaacaccgtaatttctactaagtgtagatgccagtcgctcatatctctgtaatttctactaagtgtagataatgatggaacgcagtcgcataatttctactaagtgtagatttttttnnnnnnnnnnaagcttggcgtggatccgatatcaactagatcttgagacaaatggcagtattcatccacaattttaaaagaaaaggggggattggggggtacagtgcaggggaaagaatagtagacataatagcaacagacatacaaactaaag

SEQ ID NO: 11141 - DNA, 301 bp, Artificial Sequence
  Atrx.1_Nf1.4
  crRNA array
  misc_feature (148)..(157): n is a, c, g, or t
cttggctttatatatcttgtggaaaggacgaaacaccgtaatttctactaagtgtagatgccagtcgctcatatctctgtaatttctactaagtgtagattgcaaaaccatccaccaagttaatttctactaagtgtagatttttttnnnnnnnnnnaagcttggcgtggatccgatatcaactagatcttgagacaaatggcagtattcatccacaattttaaaagaaaaggggggattggggggtacagtgcaggggaaagaatagtagacataatagcaacagacatacaaactaaag

SEQ ID NO: 11142 - DNA, 301 bp, Artificial Sequence
  Atrx.2_Nf1.1
  crRNA array
  misc_feature (148)..(157): n is a, c, g, or t
cttggctttatatatcttgtggaaaggacgaaacaccgtaatttctactaagtgtagatgcagcatgggggtatccctttaatttctactaagtgtagattggcgatccggaatcctctgtaatttctactaagtgtagatttttttnnnnnnnnnnaagcttggcgtggatccgatatcaactagatcttgagacaaatggcagtattcatccacaattttaaaagaaaaggggggattggggggtacagtgcaggggaaagaatagtagacataatagcaacagacatacaaactaaag

SEQ ID NO: 11143 - DNA, 301 bp, Artificial Sequence
  Atrx.2_Nf1.2
  crRNA array
  misc_feature (148)..(157): n is a, c, g, or t
cttggctttatatatcttgtggaaaggacgaaacaccgtaatttctactaagtgtagatgcagcatgggggtatccctttaatttctactaagtgtagatggaaacacaacgctggcctctaatttctactaagtgtagatttttttnnnnnnnnnnaagcttggcgtggatccgatatcaactagatcttgagacaaatggcagtattcatccacaattttaaaagaaaaggggggattggggggtacagtgcaggggaaagaatagtagacataatagcaacagacatacaaactaaag

SEQ ID NO: 11144 - DNA, 301 bp, Artificial Sequence
  Atrx.2_Nf1.3
  crRNA array
  misc_feature (148)..(157): n is a, c, g, or t
cttggctttatatatcttgtggaaaggacgaaacaccgtaatttctactaagtgtagatgcagcatgggggtatccctttaatttctactaagtgtagataatgatggaacgcagtcgcataatttctactaagtgtagatttttttnnnnnnnnnnaagcttggcgtggatccgatatcaactagatcttgagacaaatggcagtattcatccacaattttaaaagaaaaggggggattggggggtacagtgcaggggaaagaatagtagacataatagcaacagacatacaaactaaag

SEQ ID NO: 11145 - DNA, 301 bp, Artificial Sequence
  Atrx.2_Nf1.4
  crRNA array
  misc_feature (148)..(157): n is a, c, g, or t
cttggctttatatatcttgtggaaaggacgaaacaccgtaatttctactaagtgtagatgcagcatgggggtatccctttaatttctactaagtgtagattgcaaaaccatccaccaagttaatttctactaagtgtagatttttttnnnnnnnnnnaagcttggcgtggatccgatatcaactagatcttgagacaaatggcagtattcatccacaattttaaaagaaaaggggggattggggggtacagtgcaggggaaagaatagtagacataatagcaacagacatacaaactaaag

SEQ ID NO: 11146 - DNA, 301 bp, Artificial Sequence
  Atrx.3_Nf1.1
  crRNA array
  misc_feature (148)..(157): n is a, c, g, or t
cttggctttatatatcttgtggaaaggacgaaacaccgtaatttctactaagtgtagatggagccctgtccgcaatgagtaatttctactaagtgtagattggcgatccggaatcctctgtaatttctactaagtgtagatttttttnnnnnnnnnnaagcttggcgtggatccgatatcaactagatcttgagacaaatggcagtattcatccacaattttaaaagaaaaggggggattggggggtacagtgcaggggaaagaatagtagacataatagcaacagacatacaaactaaag

SEQ ID NO: 11147 - DNA, 301 bp, Artificial Sequence
  Atrx.3_Nf1.2
  crRNA array
  misc_feature (148)..(157): n is a, c, g, or t
cttggctttatatatcttgtggaaaggacgaaacaccgtaatttctactaagtgtagatggagccctgtccgcaatgagtaatttctactaagtgtagatggaaacacaacgctggcctctaatttctactaagtgtagatttttttnnnnnnnnnnaagcttggcgtggatccgatatcaactagatcttgagacaaatggcagtattcatccacaattttaaaagaaaaggggggattggggggtacagtgcaggggaaagaatagtagacataatagcaacagacatacaaactaaag

SEQ ID NO: 11148 - DNA, 301 bp, Artificial Sequence
  Atrx.3_Nf1.3
  crRNA array
  misc_feature (148)..(157): n is a, c, g, or t
cttggctttatatatcttgtggaaaggacgaaacaccgtaatttctactaagtgtagatggagccctgtccgcaatgagtaatttctactaagtgtagataatgatggaacgcagtcgcataatttctactaagtgtagatttttttnnnnnnnnnnaagcttggcgtggatccgatatcaactagatcttgagacaaatggcagtattcatccacaattttaaaagaaaaggggggattggggggtacagtgcaggggaaagaatagtagacataatagcaacagacatacaaactaaag

SEQ ID NO: 11149 - DNA, 301 bp, Artificial Sequence
  Atrx.3_Nf1.4
  crRNA array
  misc_feature (148)..(157): n is a, c, g, or t
cttggctttatatatcttgtggaaaggacgaaacaccgtaatttctactaagtgtagatggagccctgtccgcaatgagtaatttctactaagtgtagattgcaaaaccatccaccaagttaatttctactaagtgtagatttttttnnnnnnnnnnaagcttggcgtggatccgatatcaactagatcttgagacaaatggcagtattcatccacaattttaaaagaaaaggggggattggggggtacagtgcaggggaaagaatagtagacataatagcaacagacatacaaactaaag

SEQ ID NO: 11150 - DNA, 301 bp, Artificial Sequence
  Atrx.4_Nf1.1
  crRNA array
  misc_feature (148)..(157): n is a, c, g, or t
cttggctttatatatcttgtggaaaggacgaaacaccgtaatttctactaagtgtagataaactgggctcctactaaattaatttctactaagtgtagattggcgatccggaatcctctgtaatttctactaagtgtagatttttttnnnnnnnnnnaagcttggcgtggatccgatatcaactagatcttgagacaaatggcagtattcatccacaattttaaaagaaaaggggggattggggggtacagtgcaggggaaagaatagtagacataatagcaacagacatacaaactaaag

SEQ ID NO: 11151 - DNA, 301 bp, Artificial Sequence
  Atrx.4_Nf1.2
  crRNA array
  misc_feature (148)..(157): n is a, c, g, or t
cttggctttatatatcttgtggaaaggacgaaacaccgtaatttctactaagtgtagataaactgggctcctactaaattaatttctactaagtgtagatggaaacacaacgctggcctctaatttctactaagtgtagatttttttnnnnnnnnnnaagcttggcgtggatccgatatcaactagatcttgagacaaatggcagtattcatccacaattttaaaagaaaaggggggattggggggtacagtgcaggggaaagaatagtagacataatagcaacagacatacaaactaaag

SEQ ID NO: 11152 - DNA, 301 bp, Artificial Sequence
  Atrx.4_Nf1.3
  crRNA array
  misc_feature (148)..(157): n is a, c, g, or t
cttggctttatatatcttgtggaaaggacgaaacaccgtaatttctactaagtgtagataaactgggctcctactaaattaatttctactaagtgtagataatgatggaacgcagtcgcataatttctactaagtgtagatttttttnnnnnnnnnnaagcttggcgtggatccgatatcaactagatcttgagacaaatggcagtattcatccacaattttaaaagaaaaggggggattggggggtacagtgcaggggaaagaatagtagacataatagcaacagacatacaaactaaag

SEQ ID NO: 11153 - DNA, 301 bp, Artificial Sequence
  Atrx.4_Nf1.4
  crRNA array
  misc_feature (148)..(157): n is a, c, g, or t
cttggctttatatatcttgtggaaaggacgaaacaccgtaatttctactaagtgtagataaactgggctcctactaaattaatttctactaagtgtagattgcaaaaccatccaccaagttaatttctactaagtgtagatttttttnnnnnnnnnnaagcttggcgtggatccgatatcaactagatcttgagacaaatggcagtattcatccacaattttaaaagaaaaggggggattggggggtacagtgcaggggaaagaatagtagacataatagcaacagacatacaaactaaag

SEQ ID NO: 11154 - DNA, 301 bp, Artificial Sequence
  Atrx.1_Kdm6a.1
  crRNA array
  misc_feature (148)..(157): n is a, c, g, or t
cttggctttatatatcttgtggaaaggacgaaacaccgtaatttctactaagtgtagatgccagtcgctcatatctctgtaatttctactaagtgtagatgctgccgcctctcgcggcagtaatttctactaagtgtagatttttttnnnnnnnnnnaagcttggcgtggatccgatatcaactagatcttgagacaaatggcagtattcatccacaattttaaaagaaaaggggggattggggggtacagtgcaggggaaagaatagtagacataatagcaacagacatacaaactaaag

SEQ ID NO: 11155 - DNA, 301 bp, Artificial Sequence
  Atrx.1_Kdm6a.2
  crRNA array
  misc_feature (148)..(157): n is a, c, g, or t
cttggctttatatatcttgtggaaaggacgaaacaccgtaatttctactaagtgtagatgccagtcgctcatatctctgtaatttctactaagtgtagatgctgcaggtaaggcacgttttaatttctactaagtgtagatttttttnnnnnnnnnnaagcttggcgtggatccgatatcaactagatcttgagacaaatggcagtattcatccacaattttaaaagaaaaggggggattggggggtacagtgcaggggaaagaatagtagacataatagcaacagacatacaaactaaag

SEQ ID NO: 11156 - DNA, 301 bp, Artificial Sequence
  Atrx.1_Kdm6a.3
  crRNA array
  misc_feature (148)..(157): n is a, c, g, or t
cttggctttatatatcttgtggaaaggacgaaacaccgtaatttctactaagtgtagatgccagtcgctcatatctctgtaatttctactaagtgtagattgctggtgccggggaagttttaatttctactaagtgtagatttttttnnnnnnnnnnaagcttggcgtggatccgatatcaactagatcttgagacaaatggcagtattcatccacaattttaaaagaaaaggggggattggggggtacagtgcaggggaaagaatagtagacataatagcaacagacatacaaactaaag

SEQ ID NO: 11157 - DNA, 301 bp, Artificial Sequence
  Atrx.1_Kdm6a.4
  crRNA array
  misc_feature (148)..(157): n is a, c, g, or t
cttggctttatatatcttgtggaaaggacgaaacaccgtaatttctactaagtgtagatgccagtcgctcatatctctgtaatttctactaagtgtagattgtctcctacgaatcccccctaatttctactaagtgtagatttttttnnnnnnnnnnaagcttggcgtggatccgatatcaactagatcttgagacaaatggcagtattcatccacaattttaaaagaaaaggggggattggggggtacagtgcaggggaaagaatagtagacataatagcaacagacatacaaactaaag

SEQ ID NO: 11158 - DNA, 301 bp, Artificial Sequence
  Atrx.2_Kdm6a.1
  crRNA array
  misc_feature (148)..(157): n is a, c, g, or t
cttggctttatatatcttgtggaaaggacgaaacaccgtaatttctactaagtgtagatgcagcatgggggtatccctttaatttctactaagtgtagatgctgccgcctctcgcggcagtaatttctactaagtgtagatttttttnnnnnnnnnnaagcttggcgtggatccgatatcaactagatcttgagacaaatggcagtattcatccacaattttaaaagaaaaggggggattggggggtacagtgcaggggaaagaatagtagacataatagcaacagacatacaaactaaag

SEQ ID NO: 11159 - DNA, 301 bp, Artificial Sequence
  Atrx.2_Kdm6a.2
  crRNA array
  misc_feature (148)..(157): n is a, c, g, or t
cttggctttatatatcttgtggaaaggacgaaacaccgtaatttctactaagtgtagatgcagcatgggggtatccctttaatttctactaagtgtagatgctgcaggtaaggcacgttttaatttctactaagtgtagatttttttnnnnnnnnnnaagcttggcgtggatccgatatcaactagatcttgagacaaatggcagtattcatccacaattttaaaagaaaaggggggattggggggtacagtgcaggggaaagaatagtagacataatagcaacagacatacaaactaaag

SEQ ID NO: 11160 - DNA, 301 bp, Artificial Sequence
  Atrx.2_Kdm6a.3
  crRNA array
  misc_feature (148)..(157): n is a, c, g, or t
cttggctttatatatcttgtggaaaggacgaaacaccgtaatttctactaagtgtagatgcagcatgggggtatccctttaatttctactaagtgtagattgctggtgccggggaagttttaatttctactaagtgtagatttttttnnnnnnnnnnaagcttggcgtggatccgatatcaactagatcttgagacaaatggcagtattcatccacaattttaaaagaaaaggggggattggggggtacagtgcaggggaaagaatagtagacataatagcaacagacatacaaactaaag

SEQ ID NO: 11161 - DNA, 301 bp, Artificial Sequence
  Atrx.2_Kdm6a.4
  crRNA array
  misc_feature (148)..(157): n is a, c, g, or t
cttggctttatatatcttgtggaaaggacgaaacaccgtaatttctactaagtgtagatgcagcatgggggtatccctttaatttctactaagtgtagattgtctcctacgaatcccccctaatttctactaagtgtagatttttttnnnnnnnnnnaagcttggcgtggatccgatatcaactagatcttgagacaaatggcagtattcatccacaattttaaaagaaaaggggggattggggggtacagtgcaggggaaagaatagtagacataatagcaacagacatacaaactaaag

SEQ ID NO: 11162 - DNA, 301 bp, Artificial Sequence
  Atrx.3_Kdm6a.1
  crRNA array
  misc_feature (148)..(157): n is a, c, g, or t
cttggctttatatatcttgtggaaaggacgaaacaccgtaatttctactaagtgtagatggagccctgtccgcaatgagtaatttctactaagtgtagatgctgccgcctctcgcggcagtaatttctactaagtgtagatttttttnnnnnnnnnnaagcttggcgtggatccgatatcaactagatcttgagacaaatggcagtattcatccacaattttaaaagaaaaggggggattggggggtacagtgcaggggaaagaatagtagacataatagcaacagacatacaaactaaag

SEQ ID NO: 11163 - DNA, 301 bp, Artificial Sequence
  Atrx.3_Kdm6a.2
  crRNA array
  misc_feature (148)..(157): n is a, c, g, or t
cttggctttatatatcttgtggaaaggacgaaacaccgtaatttctactaagtgtagatggagccctgtccgcaatgagtaatttctactaagtgtagatgctgcaggtaaggcacgttttaatttctactaagtgtagatttttttnnnnnnnnnnaagcttggcgtggatccgatatcaactagatcttgagacaaatggcagtattcatccacaattttaaaagaaaaggggggattggggggtacagtgcaggggaaagaatagtagacataatagcaacagacatacaaactaaag

SEQ ID NO: 11164 - DNA, 301 bp, Artificial Sequence
  Atrx.3_Kdm6a.3
  crRNA array
  misc_feature (148)..(157): n is a, c, g, or t
cttggctttatatatcttgtggaaaggacgaaacaccgtaatttctactaagtgtagatggagccctgtccgcaatgagtaatttctactaagtgtagattgctggtgccggggaagttttaatttctactaagtgtagatttttttnnnnnnnnnnaagcttggcgtggatccgatatcaactagatcttgagacaaatggcagtattcatccacaattttaaaagaaaaggggggattggggggtacagtgcaggggaaagaatagtagacataatagcaacagacatacaaactaaag

SEQ ID NO: 11165 - DNA, 301 bp, Artificial Sequence
  Atrx.3_Kdm6a.4
  crRNA array
  misc_feature (148)..(157): n is a, c, g, or t
cttggctttatatatcttgtggaaaggacgaaacaccgtaatttctactaagtgtagatggagccctgtccgcaatgagtaatttctactaagtgtagattgtctcctacgaatcccccctaatttctactaagtgtagatttttttnnnnnnnnnnaagcttggcgtggatccgatatcaactagatcttgagacaaatggcagtattcatccacaattttaaaagaaaaggggggattggggggtacagtgcaggggaaagaatagtagacataatagcaacagacatacaaactaaag

SEQ ID NO: 11166 - DNA, 301 bp, Artificial Sequence
  Atrx.4_Kdm6a.1
  crRNA array
  misc_feature (148)..(157): n is a, c, g, or t
cttggctttatatatcttgtggaaaggacgaaacaccgtaatttctactaagtgtagataaactgggctcctactaaattaatttctactaagtgtagatgctgccgcctctcgcggcagtaatttctactaagtgtagatttttttnnnnnnnnnnaagcttggcgtggatccgatatcaactagatcttgagacaaatggcagtattcatccacaattttaaaagaaaaggggggattggggggtacagtgcaggggaaagaatagtagacataatagcaacagacatacaaactaaag

SEQ ID NO: 11167 - DNA, 301 bp, Artificial Sequence
  Atrx.4_Kdm6a.2
  crRNA array
  misc_feature (148)..(157): n is a, c, g, or t
cttggctttatatatcttgtggaaaggacgaaacaccgtaatttctactaagtgtagataaactgggctcctactaaattaatttctactaagtgtagatgctgcaggtaaggcacgttttaatttctactaagtgtagatttttttnnnnnnnnnnaagcttggcgtggatccgatatcaactagatcttgagacaaatggcagtattcatccacaattttaaaagaaaaggggggattggggggtacagtgcaggggaaagaatagtagacataatagcaacagacatacaaactaaag

SEQ ID NO: 11168 - DNA, 301 bp, Artificial Sequence
  Atrx.4_Kdm6a.3
  crRNA array
  misc_feature (148)..(157): n is a, c, g, or t
cttggctttatatatcttgtggaaaggacgaaacaccgtaatttctactaagtgtagataaactgggctcctactaaattaatttctactaagtgtagattgctggtgccggggaagttttaatttctactaagtgtagatttttttnnnnnnnnnnaagcttggcgtggatccgatatcaactagatcttgagacaaatggcagtattcatccacaattttaaaagaaaaggggggattggggggtacagtgcaggggaaagaatagtagacataatagcaacagacatacaaactaaag

SEQ ID NO: 11169 - DNA, 301 bp, Artificial Sequence
  Atrx.4_Kdm6a.4
  crRNA array
  misc_feature (148)..(157): n is a, c, g, or t
cttggctttatatatcttgtggaaaggacgaaacaccgtaatttctactaagtgtagataaactgggctcctactaaattaatttctactaagtgtagattgtctcctacgaatcccccctaatttctactaagtgtagatttttttnnnnnnnnnnaagcttggcgtggatccgatatcaactagatcttgagacaaatggcagtattcatccacaattttaaaagaaaaggggggattggggggtacagtgcaggggaaagaatagtagacataatagcaacagacatacaaactaaag

SEQ ID NO: 11170 - DNA, 301 bp, Artificial Sequence
  Atrx.1_Ercc5.1
  crRNA array
  misc_feature (148)..(157): n is a, c, g, or t
cttggctttatatatcttgtggaaaggacgaaacaccgtaatttctactaagtgtagatgccagtcgctcatatctctgtaatttctactaagtgtagatacggcacgagcaagagacactaatttctactaagtgtagatttttttnnnnnnnnnnaagcttggcgtggatccgatatcaactagatcttgagacaaatggcagtattcatccacaattttaaaagaaaaggggggattggggggtacagtgcaggggaaagaatagtagacataatagcaacagacatacaaactaaag

SEQ ID NO: 11171 - DNA, 301 bp, Artificial Sequence
  Atrx.1_Ercc5.2
  crRNA array
  misc_feature (148)..(157): n is a, c, g, or t
cttggctttatatatcttgtggaaaggacgaaacaccgtaatttctactaagtgtagatgccagtcgctcatatctctgtaatttctactaagtgtagatgagtatcacatcggtgactctaatttctactaagtgtagatttttttnnnnnnnnnnaagcttggcgtggatccgatatcaactagatcttgagacaaatggcagtattcatccacaattttaaaagaaaaggggggattggggggtacagtgcaggggaaagaatagtagacataatagcaacagacatacaaactaaag

SEQ ID NO: 11172 - DNA, 301 bp, Artificial Sequence
  Atrx.1_Ercc5.3
  crRNA array
  misc_feature (148)..(157): n is a, c, g, or t
cttggctttatatatcttgtggaaaggacgaaacaccgtaatttctactaagtgtagatgccagtcgctcatatctctgtaatttctactaagtgtagatggagtgggtccaggcctcgttaatttctactaagtgtagatttttttnnnnnnnnnnaagcttggcgtggatccgatatcaactagatcttgagacaaatggcagtattcatccacaattttaaaagaaaaggggggattggggggtacagtgcaggggaaagaatagtagacataatagcaacagacatacaaactaaag

SEQ ID NO: 11173 - DNA, 301 bp, Artificial Sequence
  Atrx.1_Ercc5.4
  crRNA array
  misc_feature (148)..(157): n is a, c, g, or t
cttggctttatatatcttgtggaaaggacgaaacaccgtaatttctactaagtgtagatgccagtcgctcatatctctgtaatttctactaagtgtagatcagagccggtggaataatgttaatttctactaagtgtagatttttttnnnnnnnnnnaagcttggcgtggatccgatatcaactagatcttgagacaaatggcagtattcatccacaattttaaaagaaaaggggggattggggggtacagtgcaggggaaagaatagtagacataatagcaacagacatacaaactaaag

SEQ ID NO: 11174 - DNA, 301 bp, Artificial Sequence
  Atrx.2_Ercc5.1
  crRNA array
  misc_feature (148)..(157): n is a, c, g, or t
cttggctttatatatcttgtggaaaggacgaaacaccgtaatttctactaagtgtagatgcagcatgggggtatccctttaatttctactaagtgtagatacggcacgagcaagagacactaatttctactaagtgtagatttttttnnnnnnnnnnaagcttggcgtggatccgatatcaactagatcttgagacaaatggcagtattcatccacaattttaaaagaaaaggggggattggggggtacagtgcaggggaaagaatagtagacataatagcaacagacatacaaactaaag

SEQ ID NO: 11175 - DNA, 301 bp, Artificial Sequence
  Atrx.2_Ercc5.2
  crRNA array
  misc_feature (148)..(157): n is a, c, g, or t
cttggctttatatatcttgtggaaaggacgaaacaccgtaatttctactaagtgtagatgcagcatgggggtatccctttaatttctactaagtgtagatgagtatcacatcggtgactctaatttctactaagtgtagatttttttnnnnnnnnnnaagcttggcgtggatccgatatcaactagatcttgagacaaatggcagtattcatccacaattttaaaagaaaaggggggattggggggtacagtgcaggggaaagaatagtagacataatagcaacagacatacaaactaaag

SEQ ID NO: 11176 - DNA, 301 bp, Artificial Sequence
  Atrx.2_Ercc5.3
  crRNA array
  misc_feature (148)..(157): n is a, c, g, or t
cttggctttatatatcttgtggaaaggacgaaacaccgtaatttctactaagtgtagatgcagcatgggggtatccctttaatttctactaagtgtagatggagtgggtccaggcctcgttaatttctactaagtgtagatttttttnnnnnnnnnnaagcttggcgtggatccgatatcaactagatcttgagacaaatggcagtattcatccacaattttaaaagaaaaggggggattggggggtacagtgcaggggaaagaatagtagacataatagcaacagacatacaaactaaag

SEQ ID NO: 11177 - DNA, 301 bp, Artificial Sequence
  Atrx.2_Ercc5.4
  crRNA array
  misc_feature (148)..(157): n is a, c, g, or t
cttggctttatatatcttgtggaaaggacgaaacaccgtaatttctactaagtgtagatgcagcatgggggtatccctttaatttctactaagtgtagatcagagccggtggaataatgttaatttctactaagtgtagatttttttnnnnnnnnnnaagcttggcgtggatccgatatcaactagatcttgagacaaatggcagtattcatccacaattttaaaagaaaaggggggattggggggtacagtgcaggggaaagaatagtagacataatagcaacagacatacaaactaaag

SEQ ID NO: 11178 - DNA, 301 bp, Artificial Sequence
  Atrx.3_Ercc5.1
  crRNA array
  misc_feature (148)..(157): n is a, c, g, or t
cttggctttatatatcttgtggaaaggacgaaacaccgtaatttctactaagtgtagatggagccctgtccgcaatgagtaatttctactaagtgtagatacggcacgagcaagagacactaatttctactaagtgtagatttttttnnnnnnnnnnaagcttggcgtggatccgatatcaactagatcttgagacaaatggcagtattcatccacaattttaaaagaaaaggggggattggggggtacagtgcaggggaaagaatagtagacataatagcaacagacatacaaactaaag

SEQ ID NO: 11179 - DNA, 301 bp, Artificial Sequence
  Atrx.3_Ercc5.2
  crRNA array
  misc_feature (148)..(157): n is a, c, g, or t
cttggctttatatatcttgtggaaaggacgaaacaccgtaatttctactaagtgtagatggagccctgtccgcaatgagtaatttctactaagtgtagatgagtatcacatcggtgactctaatttctactaagtgtagatttttttnnnnnnnnnnaagcttggcgtggatccgatatcaactagatcttgagacaaatggcagtattcatccacaattttaaaagaaaaggggggattggggggtacagtgcaggggaaagaatagtagacataatagcaacagacatacaaactaaag

SEQ ID NO: 11180 - DNA, 301 bp, Artificial Sequence
  Atrx.3_Ercc5.3
  crRNA array
  misc_feature (148)..(157): n is a, c, g, or t
cttggctttatatatcttgtggaaaggacgaaacaccgtaatttctactaagtgtagatggagccctgtccgcaatgagtaatttctactaagtgtagatggagtgggtccaggcctcgttaatttctactaagtgtagatttttttnnnnnnnnnnaagcttggcgtggatccgatatcaactagatcttgagacaaatggcagtattcatccacaattttaaaagaaaaggggggattggggggtacagtgcaggggaaagaatagtagacataatagcaacagacatacaaactaaag

SEQ ID NO: 11181 - DNA, 301 bp, Artificial Sequence
  Atrx.3_Ercc5.4
  crRNA array
  misc_feature (148)..(157): n is a, c, g, or t
cttggctttatatatcttgtggaaaggacgaaacaccgtaatttctactaagtgtagatggagccctgtccgcaatgagtaatttctactaagtgtagatcagagccggtggaataatgttaatttctactaagtgtagatttttttnnnnnnnnnnaagcttggcgtggatccgatatcaactagatcttgagacaaatggcagtattcatccacaattttaaaagaaaaggggggattggggggtacagtgcaggggaaagaatagtagacataatagcaacagacatacaaactaaag

SEQ ID NO: 11182 - DNA, 301 bp, Artificial Sequence
  Atrx.4_Ercc5.1
  crRNA array
  misc_feature (148)..(157): n is a, c, g, or t
cttggctttatatatcttgtggaaaggacgaaacaccgtaatttctactaagtgtagataaactgggctcctactaaattaatttctactaagtgtagatacggcacgagcaagagacactaatttctactaagtgtagatttttttnnnnnnnnnnaagcttggcgtggatccgatatcaactagatcttgagacaaatggcagtattcatccacaattttaaaagaaaaggggggattggggggtacagtgcaggggaaagaatagtagacataatagcaacagacatacaaactaaag

SEQ ID NO: 11183 - DNA, 301 bp, Artificial Sequence
  Atrx.4_Ercc5.2
  crRNA array
  misc_feature (148)..(157): n is a, c, g, or t
cttggctttatatatcttgtggaaaggacgaaacaccgtaatttctactaagtgtagataaactgggctcctactaaattaatttctactaagtgtagatgagtatcacatcggtgactctaatttctactaagtgtagatttttttnnnnnnnnnnaagcttggcgtggatccgatatcaactagatcttgagacaaatggcagtattcatccacaattttaaaagaaaaggggggattggggggtacagtgcaggggaaagaatagtagacataatagcaacagacatacaaactaaag

SEQ ID NO: 11184 - DNA, 301 bp, Artificial Sequence
  Atrx.4_Ercc5.3
  crRNA array
  misc_feature (148)..(157): n is a, c, g, or t
cttggctttatatatcttgtggaaaggacgaaacaccgtaatttctactaagtgtagataaactgggctcctactaaattaatttctactaagtgtagatggagtgggtccaggcctcgttaatttctactaagtgtagatttttttnnnnnnnnnnaagcttggcgtggatccgatatcaactagatcttgagacaaatggcagtattcatccacaattttaaaagaaaaggggggattggggggtacagtgcaggggaaagaatagtagacataatagcaacagacatacaaactaaag

SEQ ID NO: 11185 - DNA, 301 bp, Artificial Sequence
  Atrx.4_Ercc5.4
  crRNA array
  misc_feature (148)..(157): n is a, c, g, or t
cttggctttatatatcttgtggaaaggacgaaacaccgtaatttctactaagtgtagataaactgggctcctactaaattaatttctactaagtgtagatcagagccggtggaataatgttaatttctactaagtgtagatttttttnnnnnnnnnnaagcttggcgtggatccgatatcaactagatcttgagacaaatggcagtattcatccacaattttaaaagaaaaggggggattggggggtacagtgcaggggaaagaatagtagacataatagcaacagacatacaaactaaag

SEQ ID NO: 11186 - DNA, 301 bp, Artificial Sequence
  Atrx.1_Arid1b.1
  crRNA array
  misc_feature (148)..(157): n is a, c, g, or t
cttggctttatatatcttgtggaaaggacgaaacaccgtaatttctactaagtgtagatgccagtcgctcatatctctgtaatttctactaagtgtagatgctgctgctgtagtgcgtggtaatttctactaagtgtagatttttttnnnnnnnnnnaagcttggcgtggatccgatatcaactagatcttgagacaaatggcagtattcatccacaattttaaaagaaaaggggggattggggggtacagtgcaggggaaagaatagtagacataatagcaacagacatacaaactaaag

SEQ ID NO: 11187 - DNA, 301 bp, Artificial Sequence
  Atrx.1_Arid1b.2
  crRNA array
  misc_feature (148)..(157): n is a, c, g, or t
cttggctttatatatcttgtggaaaggacgaaacaccgtaatttctactaagtgtagatgccagtcgctcatatctctgtaatttctactaagtgtagatagtgcaaaactgagcgcgggtaatttctactaagtgtagatttttttnnnnnnnnnnaagcttggcgtggatccgatatcaactagatcttgagacaaatggcagtattcatccacaattttaaaagaaaaggggggattggggggtacagtgcaggggaaagaatagtagacataatagcaacagacatacaaactaaag

SEQ ID NO: 11188 - DNA, 301 bp, Artificial Sequence
  Atrx.1_Arid1b.3
  crRNA array
  misc_feature (148)..(157): n is a, c, g, or t
cttggctttatatatcttgtggaaaggacgaaacaccgtaatttctactaagtgtagatgccagtcgctcatatctctgtaatttctactaagtgtagatcactcaaaggcgaacaggtataatttctactaagtgtagatttttttnnnnnnnnnnaagcttggcgtggatccgatatcaactagatcttgagacaaatggcagtattcatccacaattttaaaagaaaaggggggattggggggtacagtgcaggggaaagaatagtagacataatagcaacagacatacaaactaaag

SEQ ID NO: 11189 - DNA, 301 bp, Artificial Sequence
  Atrx.1_Arid1b.4
  crRNA array
  misc_feature (148)..(157): n is a, c, g, or t
cttggctttatatatcttgtggaaaggacgaaacaccgtaatttctactaagtgtagatgccagtcgctcatatctctgtaatttctactaagtgtagatctcctggctccgtagaagcataatttctactaagtgtagatttttttnnnnnnnnnnaagcttggcgtggatccgatatcaactagatcttgagacaaatggcagtattcatccacaattttaaaagaaaaggggggattggggggtacagtgcaggggaaagaatagtagacataatagcaacagacatacaaactaaag

SEQ ID NO: 11190 - DNA, 301 bp, Artificial Sequence
  Atrx.2_Arid1b.1
  crRNA array
  misc_feature (148)..(157): n is a, c, g, or t
cttggctttatatatcttgtggaaaggacgaaacaccgtaatttctactaagtgtagatgcagcatgggggtatccctttaatttctactaagtgtagatgctgctgctgtagtgcgtggtaatttctactaagtgtagatttttttnnnnnnnnnnaagcttggcgtggatccgatatcaactagatcttgagacaaatggcagtattcatccacaattttaaaagaaaaggggggattggggggtacagtgcaggggaaagaatagtagacataatagcaacagacatacaaactaaag

SEQ ID NO: 11191 - DNA, 301 bp, Artificial Sequence
  Atrx.2_Arid1b.2
  crRNA array
  misc_feature (148)..(157): n is a, c, g, or t
cttggctttatatatcttgtggaaaggacgaaacaccgtaatttctactaagtgtagatgcagcatgggggtatccctttaatttctactaagtgtagatagtgcaaaactgagcgcgggtaatttctactaagtgtagatttttttnnnnnnnnnnaagcttggcgtggatccgatatcaactagatcttgagacaaatggcagtattcatccacaattttaaaagaaaaggggggattggggggtacagtgcaggggaaagaatagtagacataatagcaacagacatacaaactaaag

SEQ ID NO: 11192 - DNA, 301 bp, Artificial Sequence
  Atrx.2_Arid1b.3
  crRNA array
  misc_feature (148)..(157): n is a, c, g, or t
cttggctttatatatcttgtggaaaggacgaaacaccgtaatttctactaagtgtagatgcagcatgggggtatccctttaatttctactaagtgtagatcactcaaaggcgaacaggtataatttctactaagtgtagatttttttnnnnnnnnnnaagcttggcgtggatccgatatcaactagatcttgagacaaatggcagtattcatccacaattttaaaagaaaaggggggattggggggtacagtgcaggggaaagaatagtagacataatagcaacagacatacaaactaaag

SEQ ID NO: 11193 - DNA, 301 bp, Artificial Sequence
  Atrx.2_Arid1b.4
  crRNA array
  misc_feature (148)..(157): n is a, c, g, or t
cttggctttatatatcttgtggaaaggacgaaacaccgtaatttctactaagtgtagatgcagcatgggggtatccctttaatttctactaagtgtagatctcctggctccgtagaagcataatttctactaagtgtagatttttttnnnnnnnnnnaagcttggcgtggatccgatatcaactagatcttgagacaaatggcagtattcatccacaattttaaaagaaaaggggggattggggggtacagtgcaggggaaagaatagtagacataatagcaacagacatacaaactaaag

SEQ ID NO: 11194 - DNA, 301 bp, Artificial Sequence
  Atrx.3_Arid1b.1
  crRNA array
  misc_feature (148)..(157): n is a, c, g, or t
cttggctttatatatcttgtggaaaggacgaaacaccgtaatttctactaagtgtagatggagccctgtccgcaatgagtaatttctactaagtgtagatgctgctgctgtagtgcgtggtaatttctactaagtgtagatttttttnnnnnnnnnnaagcttggcgtggatccgatatcaactagatcttgagacaaatggcagtattcatccacaattttaaaagaaaaggggggattggggggtacagtgcaggggaaagaatagtagacataatagcaacagacatacaaactaaag

SEQ ID NO: 11195 - DNA, 301 bp, Artificial Sequence
  Atrx.3_Arid1b.2
  crRNA array
  misc_feature (148)..(157): n is a, c, g, or t
cttggctttatatatcttgtggaaaggacgaaacaccgtaatttctactaagtgtagatggagccctgtccgcaatgagtaatttctactaagtgtagatagtgcaaaactgagcgcgggtaatttctactaagtgtagatttttttnnnnnnnnnnaagcttggcgtggatccgatatcaactagatcttgagacaaatggcagtattcatccacaattttaaaagaaaaggggggattggggggtacagtgcaggggaaagaatagtagacataatagcaacagacatacaaactaaag

SEQ ID NO: 11196 - DNA, 301 bp, Artificial Sequence
  Atrx.3_Arid1b.3
  crRNA array
  misc_feature (148)..(157): n is a, c, g, or t
cttggctttatatatcttgtggaaaggacgaaacaccgtaatttctactaagtgtagatggagccctgtccgcaatgagtaatttctactaagtgtagatcactcaaaggcgaacaggtataatttctactaagtgtagatttttttnnnnnnnnnnaagcttggcgtggatccgatatcaactagatcttgagacaaatggcagtattcatccacaattttaaaagaaaaggggggattggggggtacagtgcaggggaaagaatagtagacataatagcaacagacatacaaactaaag

SEQ ID NO: 11197 - DNA, 301 bp, Artificial Sequence
  Atrx.3_Arid1b.4
  crRNA array
  misc_feature (148)..(157): n is a, c, g, or t
cttggctttatatatcttgtggaaaggacgaaacaccgtaatttctactaagtgtagatggagccctgtccgcaatgagtaatttctactaagtgtagatctcctggctccgtagaagcataatttctactaagtgtagatttttttnnnnnnnnnnaagcttggcgtggatccgatatcaactagatcttgagacaaatggcagtattcatccacaattttaaaagaaaaggggggattggggggtacagtgcaggggaaagaatagtagacataatagcaacagacatacaaactaaag

SEQ ID NO: 11198 - DNA, 301 bp, Artificial Sequence
  Atrx.4_Arid1b.1
  crRNA array
  misc_feature (148)..(157): n is a, c, g, or t
cttggctttatatatcttgtggaaaggacgaaacaccgtaatttctactaagtgtagataaactgggctcctactaaattaatttctactaagtgtagatgctgctgctgtagtgcgtggtaatttctactaagtgtagatttttttnnnnnnnnnnaagcttggcgtggatccgatatcaactagatcttgagacaaatggcagtattcatccacaattttaaaagaaaaggggggattggggggtacagtgcaggggaaagaatagtagacataatagcaacagacatacaaactaaag

SEQ ID NO: 11199 - DNA, 301 bp, Artificial Sequence
  Atrx.4_Arid1b.2
  crRNA array
  misc_feature (148)..(157): n is a, c, g, or t
cttggctttatatatcttgtggaaaggacgaaacaccgtaatttctactaagtgtagataaactgggctcctactaaattaatttctactaagtgtagatagtgcaaaactgagcgcgggtaatttctactaagtgtagatttttttnnnnnnnnnnaagcttggcgtggatccgatatcaactagatcttgagacaaatggcagtattcatccacaattttaaaagaaaaggggggattggggggtacagtgcaggggaaagaatagtagacataatagcaacagacatacaaactaaag

SEQ ID NO: 11200 - DNA, 301 bp, Artificial Sequence
  Atrx.4_Arid1b.3
  crRNA array
  misc_feature (148)..(157): n is a, c, g, or t
cttggctttatatatcttgtggaaaggacgaaacaccgtaatttctactaagtgtagataaactgggctcctactaaattaatttctactaagtgtagatcactcaaaggcgaacaggtataatttctactaagtgtagatttttttnnnnnnnnnnaagcttggcgtggatccgatatcaactagatcttgagacaaatggcagtattcatccacaattttaaaagaaaaggggggattggggggtacagtgcaggggaaagaatagtagacataatagcaacagacatacaaactaaag

SEQ ID NO: 11201 - DNA, 301 bp, Artificial Sequence
  Atrx.4_Arid1b.4
  crRNA array
  misc_feature (148)..(157): n is a, c, g, or t
cttggctttatatatcttgtggaaaggacgaaacaccgtaatttctactaagtgtagataaactgggctcctactaaattaatttctactaagtgtagatctcctggctccgtagaagcataatttctactaagtgtagatttttttnnnnnnnnnnaagcttggcgtggatccgatatcaactagatcttgagacaaatggcagtattcatccacaattttaaaagaaaaggggggattggggggtacagtgcaggggaaagaatagtagacataatagcaacagacatacaaactaaag

SEQ ID NO: 11202 - DNA, 301 bp, Artificial Sequence
  Atrx.1_Rb1.1
  crRNA array
  misc_feature (148)..(157): n is a, c, g, or t
cttggctttatatatcttgtggaaaggacgaaacaccgtaatttctactaagtgtagatgccagtcgctcatatctctgtaatttctactaagtgtagattctgacatgatcgggtaccttaatttctactaagtgtagatttttttnnnnnnnnnnaagcttggcgtggatccgatatcaactagatcttgagacaaatggcagtattcatccacaattttaaaagaaaaggggggattggggggtacagtgcaggggaaagaatagtagacataatagcaacagacatacaaactaaag

SEQ ID NO: 11203 - DNA, 301 bp, Artificial Sequence
  Atrx.1_Rb1.2
  crRNA array
  misc_feature (148)..(157): n is a, c, g, or t
cttggctttatatatcttgtggaaaggacgaaacaccgtaatttctactaagtgtagatgccagtcgctcatatctctgtaatttctactaagtgtagatgtctctgcatgaaaacggagtaatttctactaagtgtagatttttttnnnnnnnnnnaagcttggcgtggatccgatatcaactagatcttgagacaaatggcagtattcatccacaattttaaaagaaaaggggggattggggggtacagtgcaggggaaagaatagtagacataatagcaacagacatacaaactaaag

SEQ ID NO: 11204 - DNA, 301 bp, Artificial Sequence
  Atrx.1_Rb1.3
  crRNA array
  misc_feature (148)..(157): n is a, c, g, or t
cttggctttatatatcttgtggaaaggacgaaacaccgtaatttctactaagtgtagatgccagtcgctcatatctctgtaatttctactaagtgtagatagccaatctggtctaataactaatttctactaagtgtagatttttttnnnnnnnnnnaagcttggcgtggatccgatatcaactagatcttgagacaaatggcagtattcatccacaattttaaaagaaaaggggggattggggggtacagtgcaggggaaagaatagtagacataatagcaacagacatacaaactaaag

SEQ ID NO: 11205 - DNA, 301 bp, Artificial Sequence
  Atrx.1_Rb1.4
  crRNA array
  misc_feature (148)..(157): n is a, c, g, or t
cttggctttatatatcttgtggaaaggacgaaacaccgtaatttctactaagtgtagatgccagtcgctcatatctctgtaatttctactaagtgtagattgtagctcagtaaaagtgaataatttctactaagtgtagatttttttnnnnnnnnnnaagcttggcgtggatccgatatcaactagatcttgagacaaatggcagtattcatccacaattttaaaagaaaaggggggattggggggtacagtgcaggggaaagaatagtagacataatagcaacagacatacaaactaaag

SEQ ID NO: 11206 - DNA, 301 bp, Artificial Sequence
  Atrx.2_Rb1.1
  crRNA array
  misc_feature (148)..(157): n is a, c, g, or t
cttggctttatatatcttgtggaaaggacgaaacaccgtaatttctactaagtgtagatgcagcatgggggtatccctttaatttctactaagtgtagattctgacatgatcgggtaccttaatttctactaagtgtagatttttttnnnnnnnnnnaagcttggcgtggatccgatatcaactagatcttgagacaaatggcagtattcatccacaattttaaaagaaaaggggggattggggggtacagtgcaggggaaagaatagtagacataatagcaacagacatacaaactaaag

SEQ ID NO: 11207 - DNA, 301 bp, Artificial Sequence
  Atrx.2_Rb1.2
  crRNA array
  misc_feature (148)..(157): n is a, c, g, or t
cttggctttatatatcttgtggaaaggacgaaacaccgtaatttctactaagtgtagatgcagcatgggggtatccctttaatttctactaagtgtagatgtctctgcatgaaaacggagtaatttctactaagtgtagatttttttnnnnnnnnnnaagcttggcgtggatccgatatcaactagatcttgagacaaatggcagtattcatccacaattttaaaagaaaaggggggattggggggtacagtgcaggggaaagaatagtagacataatagcaacagacatacaaactaaag

SEQ ID NO: 11208 - DNA, 301 bp, Artificial Sequence
  Atrx.2_Rb1.3
  crRNA array
  misc_feature (148)..(157): n is a, c, g, or t
cttggctttatatatcttgtggaaaggacgaaacaccgtaatttctactaagtgtagatgcagcatgggggtatccctttaatttctactaagtgtagatagccaatctggtctaataactaatttctactaagtgtagatttttttnnnnnnnnnnaagcttggcgtggatccgatatcaactagatcttgagacaaatggcagtattcatccacaattttaaaagaaaaggggggattggggggtacagtgcaggggaaagaatagtagacataatagcaacagacatacaaactaaag

SEQ ID NO: 11209 - DNA, 301 bp, Artificial Sequence
  Atrx.2_Rb1.4
  crRNA array
  misc_feature (148)..(157): n is a, c, g, or t
cttggctttatatatcttgtggaaaggacgaaacaccgtaatttctactaagtgtagatgcagcatgggggtatccctttaatttctactaagtgtagattgtagctcagtaaaagtgaataatttctactaagtgtagatttttttnnnnnnnnnnaagcttggcgtggatccgatatcaactagatcttgagacaaatggcagtattcatccacaattttaaaagaaaaggggggattggggggtacagtgcaggggaaagaatagtagacataatagcaacagacatacaaactaaag

SEQ ID NO: 11210 - DNA, 301 bp, Artificial Sequence
  Atrx.3_Rb1.1
  crRNA array
  misc_feature (148)..(157): n is a, c, g, or t
cttggctttatatatcttgtggaaaggacgaaacaccgtaatttctactaagtgtagatggagccctgtccgcaatgagtaatttctactaagtgtagattctgacatgatcgggtaccttaatttctactaagtgtagatttttttnnnnnnnnnnaagcttggcgtggatccgatatcaactagatcttgagacaaatggcagtattcatccacaattttaaaagaaaaggggggattggggggtacagtgcaggggaaagaatagtagacataatagcaacagacatacaaactaaag

SEQ ID NO: 11211 - DNA, 301 bp, Artificial Sequence
  Atrx.3_Rb1.2
  crRNA array
  misc_feature (148)..(157): n is a, c, g, or t
cttggctttatatatcttgtggaaaggacgaaacaccgtaatttctactaagtgtagatggagccctgtccgcaatgagtaatttctactaagtgtagatgtctctgcatgaaaacggagtaatttctactaagtgtagatttttttnnnnnnnnnnaagcttggcgtggatccgatatcaactagatcttgagacaaatggcagtattcatccacaattttaaaagaaaaggggggattggggggtacagtgcaggggaaagaatagtagacataatagcaacagacatacaaactaaag

SEQ ID NO: 11212 - DNA, 301 bp, Artificial Sequence
  Atrx.3_Rb1.3
  crRNA array
  misc_feature (148)..(157): n is a, c, g, or t
cttggctttatatatcttgtggaaaggacgaaacaccgtaatttctactaagtgtagatggagccctgtccgcaatgagtaatttctactaagtgtagatagccaatctggtctaataactaatttctactaagtgtagatttttttnnnnnnnnnnaagcttggcgtggatccgatatcaactagatcttgagacaaatggcagtattcatccacaattttaaaagaaaaggggggattggggggtacagtgcaggggaaagaatagtagacataatagcaacagacatacaaactaaag

SEQ ID NO: 11213 - DNA, 301 bp, Artificial Sequence
  Atrx.3_Rb1.4
  crRNA array
  misc_feature (148)..(157): n is a, c, g, or t
cttggctttatatatcttgtggaaaggacgaaacaccgtaatttctactaagtgtagatggagccctgtccgcaatgagtaatttctactaagtgtagattgtagctcagtaaaagtgaataatttctactaagtgtagatttttttnnnnnnnnnnaagcttggcgtggatccgatatcaactagatcttgagacaaatggcagtattcatccacaattttaaaagaaaaggggggattggggggtacagtgcaggggaaagaatagtagacataatagcaacagacatacaaactaaag

SEQ ID NO: 11214 - DNA, 301 bp, Artificial Sequence
  Atrx.4_Rb1.1
  crRNA array
  misc_feature (148)..(157): n is a, c, g, or t
cttggctttatatatcttgtggaaaggacgaaacaccgtaatttctactaagtgtagataaactgggctcctactaaattaatttctactaagtgtagattctgacatgatcgggtaccttaatttctactaagtgtagatttttttnnnnnnnnnnaagcttggcgtggatccgatatcaactagatcttgagacaaatggcagtattcatccacaattttaaaagaaaaggggggattggggggtacagtgcaggggaaagaatagtagacataatagcaacagacatacaaactaaag

SEQ ID NO: 11215 - DNA, 301 bp, Artificial Sequence
  Atrx.4_Rb1.2
  crRNA array
  misc_feature (148)..(157): n is a, c, g, or t
cttggctttatatatcttgtggaaaggacgaaacaccgtaatttctactaagtgtagataaactgggctcctactaaattaatttctactaagtgtagatgtctctgcatgaaaacggagtaatttctactaagtgtagatttttttnnnnnnnnnnaagcttggcgtggatccgatatcaactagatcttgagacaaatggcagtattcatccacaattttaaaagaaaaggggggattggggggtacagtgcaggggaaagaatagtagacataatagcaacagacatacaaactaaag

SEQ ID NO: 11216 - DNA, 301 bp, Artificial Sequence
  Atrx.4_Rb1.3
  crRNA array
  misc_feature (148)..(157): n is a, c, g, or t
cttggctttatatatcttgtggaaaggacgaaacaccgtaatttctactaagtgtagataaactgggctcctactaaattaatttctactaagtgtagatagccaatctggtctaataactaatttctactaagtgtagatttttttnnnnnnnnnnaagcttggcgtggatccgatatcaactagatcttgagacaaatggcagtattcatccacaattttaaaagaaaaggggggattggggggtacagtgcaggggaaagaatagtagacataatagcaacagacatacaaactaaag

SEQ ID NO: 11217 - DNA, 301 bp, Artificial Sequence
  Atrx.4_Rb1.4
  crRNA array
  misc_feature (148)..(157): n is a, c, g, or t
cttggctttatatatcttgtggaaaggacgaaacaccgtaatttctactaagtgtagataaactgggctcctactaaattaatttctactaagtgtagattgtagctcagtaaaagtgaataatttctactaagtgtagatttttttnnnnnnnnnnaagcttggcgtggatccgatatcaactagatcttgagacaaatggcagtattcatccacaattttaaaagaaaaggggggattggggggtacagtgcaggggaaagaatagtagacataatagcaacagacatacaaactaaag

SEQ ID NO: 11218 - DNA, 301 bp, Artificial Sequence
  Atrx.1_Kmt2c.1
  crRNA array
  misc_feature (148)..(157): n is a, c, g, or t
cttggctttatatatcttgtggaaaggacgaaacaccgtaatttctactaagtgtagatgccagtcgctcatatctctgtaatttctactaagtgtagatactcgacctccacctccctataatttctactaagtgtagatttttttnnnnnnnnnnaagcttggcgtggatccgatatcaactagatcttgagacaaatggcagtattcatccacaattttaaaagaaaaggggggattggggggtacagtgcaggggaaagaatagtagacataatagcaacagacatacaaactaaag

SEQ ID NO: 11219 - DNA, 301 bp, Artificial Sequence
  Atrx.1_Kmt2c.2
  crRNA array
  misc_feature (148)..(157): n is a, c, g, or t
cttggctttatatatcttgtggaaaggacgaaacaccgtaatttctactaagtgtagatgccagtcgctcatatctctgtaatttctactaagtgtagatcccaaagatcagcgtggacctaatttctactaagtgtagatttttttnnnnnnnnnnaagcttggcgtggatccgatatcaactagatcttgagacaaatggcagtattcatccacaattttaaaagaaaaggggggattggggggtacagtgcaggggaaagaatagtagacataatagcaacagacatacaaactaaag

SEQ ID NO: 11220 - DNA, 301 bp, Artificial Sequence
  Atrx.1_Kmt2c.3
  crRNA array
  misc_feature (148)..(157): n is a, c, g, or t
cttggctttatatatcttgtggaaaggacgaaacaccgtaatttctactaagtgtagatgccagtcgctcatatctctgtaatttctactaagtgtagataaaagatccgaatcgatgcgtaatttctactaagtgtagatttttttnnnnnnnnnnaagcttggcgtggatccgatatcaactagatcttgagacaaatggcagtattcatccacaattttaaaagaaaaggggggattggggggtacagtgcaggggaaagaatagtagacataatagcaacagacatacaaactaaag

SEQ ID NO: 11221 - DNA, 301 bp, Artificial Sequence
  Atrx.1_Kmt2c.4
  crRNA array
  misc_feature (148)..(157): n is a, c, g, or t
cttggctttatatatcttgtggaaaggacgaaacaccgtaatttctactaagtgtagatgccagtcgctcatatctctgtaatttctactaagtgtagatctgaggcacatggaagcgattaatttctactaagtgtagatttttttnnnnnnnnnnaagcttggcgtggatccgatatcaactagatcttgagacaaatggcagtattcatccacaattttaaaagaaaaggggggattggggggtacagtgcaggggaaagaatagtagacataatagcaacagacatacaaactaaag

SEQ ID NO: 11222 - DNA, 301 bp, Artificial Sequence
  Atrx.2_Kmt2c.1
  crRNA array
  misc_feature (148)..(157): n is a, c, g, or t
cttggctttatatatcttgtggaaaggacgaaacaccgtaatttctactaagtgtagatgcagcatgggggtatccctttaatttctactaagtgtagatactcgacctccacctccctataatttctactaagtgtagatttttttnnnnnnnnnnaagcttggcgtggatccgatatcaactagatcttgagacaaatggcagtattcatccacaattttaaaagaaaaggggggattggggggtacagtgcaggggaaagaatagtagacataatagcaacagacatacaaactaaag

SEQ ID NO: 11223 - DNA, 301 bp, Artificial Sequence
  Atrx.2_Kmt2c.2
  crRNA array
  misc_feature (148)..(157): n is a, c, g, or t
cttggctttatatatcttgtggaaaggacgaaacaccgtaatttctactaagtgtagatgcagcatgggggtatccctttaatttctactaagtgtagatcccaaagatcagcgtggacctaatttctactaagtgtagatttttttnnnnnnnnnnaagcttggcgtggatccgatatcaactagatcttgagacaaatggcagtattcatccacaattttaaaagaaaaggggggattggggggtacagtgcaggggaaagaatagtagacataatagcaacagacatacaaactaaag

SEQ ID NO: 11224 - DNA, 301 bp, Artificial Sequence
  Atrx.2_Kmt2c.3
  crRNA array
  misc_feature (148)..(157): n is a, c, g, or t
cttggctttatatatcttgtggaaaggacgaaacaccgtaatttctactaagtgtagatgcagcatgggggtatccctttaatttctactaagtgtagataaaagatccgaatcgatgcgtaatttctactaagtgtagatttttttnnnnnnnnnnaagcttggcgtggatccgatatcaactagatcttgagacaaatggcagtattcatccacaattttaaaagaaaaggggggattggggggtacagtgcaggggaaagaatagtagacataatagcaacagacatacaaactaaag

SEQ ID NO: 11225 - DNA, 301 bp, Artificial Sequence
  Atrx.2_Kmt2c.4
  crRNA array
  misc_feature (148)..(157): n is a, c, g, or t
cttggctttatatatcttgtggaaaggacgaaacaccgtaatttctactaagtgtagatgcagcatgggggtatccctttaatttctactaagtgtagatctgaggcacatggaagcgattaatttctactaagtgtagatttttttnnnnnnnnnnaagcttggcgtggatccgatatcaactagatcttgagacaaatggcagtattcatccacaattttaaaagaaaaggggggattggggggtacagtgcaggggaaagaatagtagacataatagcaacagacatacaaactaaag

SEQ ID NO: 11226 - DNA, 301 bp, Artificial Sequence
  Atrx.3_Kmt2c.1
  crRNA array
  misc_feature (148)..(157): n is a, c, g, or t
cttggctttatatatcttgtggaaaggacgaaacaccgtaatttctactaagtgtagatggagccctgtccgcaatgagtaatttctactaagtgtagatactcgacctccacctccctataatttctactaagtgtagatttttttnnnnnnnnnnaagcttggcgtggatccgatatcaactagatcttgagacaaatggcagtattcatccacaattttaaaagaaaaggggggattggggggtacagtgcaggggaaagaatagtagacataatagcaacagacatacaaactaaag

SEQ ID NO: 11227 - DNA, 301 bp, Artificial Sequence
  Atrx.3_Kmt2c.2
  crRNA array
  misc_feature (148)..(157): n is a, c, g, or t
cttggctttatatatcttgtggaaaggacgaaacaccgtaatttctactaagtgtagatggagccctgtccgcaatgagtaatttctactaagtgtagatcccaaagatcagcgtggacctaatttctactaagtgtagatttttttnnnnnnnnnnaagcttggcgtggatccgatatcaactagatcttgagacaaatggcagtattcatccacaattttaaaagaaaaggggggattggggggtacagtgcaggggaaagaatagtagacataatagcaacagacatacaaactaaag

SEQ ID NO: 11228 - DNA, 301 bp, Artificial Sequence
  Atrx.3_Kmt2c.3
  crRNA array
  misc_feature (148)..(157): n is a, c, g, or t
cttggctttatatatcttgtggaaaggacgaaacaccgtaatttctactaagtgtagatggagccctgtccgcaatgagtaatttctactaagtgtagataaaagatccgaatcgatgcgtaatttctactaagtgtagatttttttnnnnnnnnnnaagcttggcgtggatccgatatcaactagatcttgagacaaatggcagtattcatccacaattttaaaagaaaaggggggattggggggtacagtgcaggggaaagaatagtagacataatagcaacagacatacaaactaaag

SEQ ID NO: 11229 - DNA, 301 bp, Artificial Sequence
  Atrx.3_Kmt2c.4
  crRNA array
  misc_feature (148)..(157): n is a, c, g, or t
cttggctttatatatcttgtggaaaggacgaaacaccgtaatttctactaagtgtagatggagccctgtccgcaatgagtaatttctactaagtgtagatctgaggcacatggaagcgattaatttctactaagtgtagatttttttnnnnnnnnnnaagcttggcgtggatccgatatcaactagatcttgagacaaatggcagtattcatccacaattttaaaagaaaaggggggattggggggtacagtgcaggggaaagaatagtagacataatagcaacagacatacaaactaaag

SEQ ID NO: 11230 - DNA, 301 bp, Artificial Sequence
  Atrx.4_Kmt2c.1
  crRNA array
  misc_feature (148)..(157): n is a, c, g, or t
cttggctttatatatcttgtggaaaggacgaaacaccgtaatttctactaagtgtagataaactgggctcctactaaattaatttctactaagtgtagatactcgacctccacctccctataatttctactaagtgtagatttttttnnnnnnnnnnaagcttggcgtggatccgatatcaactagatcttgagacaaatggcagtattcatccacaattttaaaagaaaaggggggattggggggtacagtgcaggggaaagaatagtagacataatagcaacagacatacaaactaaag

SEQ ID NO: 11231 - DNA, 301 bp, Artificial Sequence
  Atrx.4_Kmt2c.2
  crRNA array
  misc_feature (148)..(157): n is a, c, g, or t
cttggctttatatatcttgtggaaaggacgaaacaccgtaatttctactaagtgtagataaactgggctcctactaaattaatttctactaagtgtagatcccaaagatcagcgtggacctaatttctactaagtgtagatttttttnnnnnnnnnnaagcttggcgtggatccgatatcaactagatcttgagacaaatggcagtattcatccacaattttaaaagaaaaggggggattggggggtacagtgcaggggaaagaatagtagacataatagcaacagacatacaaactaaag

SEQ ID NO: 11232 - DNA, 301 bp, Artificial Sequence
  Atrx.4_Kmt2c.3
  crRNA array
  misc_feature (148)..(157): n is a, c, g, or t
cttggctttatatatcttgtggaaaggacgaaacaccgtaatttctactaagtgtagataaactgggctcctactaaattaatttctactaagtgtagataaaagatccgaatcgatgcgtaatttctactaagtgtagatttttttnnnnnnnnnnaagcttggcgtggatccgatatcaactagatcttgagacaaatggcagtattcatccacaattttaaaagaaaaggggggattggggggtacagtgcaggggaaagaatagtagacataatagcaacagacatacaaactaaag

SEQ ID NO: 11233 - DNA, 301 bp, Artificial Sequence
  Atrx.4_Kmt2c.4
  crRNA array
  misc_feature (148)..(157): n is a, c, g, or t
cttggctttatatatcttgtggaaaggacgaaacaccgtaatttctactaagtgtagataaactgggctcctactaaattaatttctactaagtgtagatctgaggcacatggaagcgattaatttctactaagtgtagatttttttnnnnnnnnnnaagcttggcgtggatccgatatcaactagatcttgagacaaatggcagtattcatccacaattttaaaagaaaaggggggattggggggtacagtgcaggggaaagaatagtagacataatagcaacagacatacaaactaaag

SEQ ID NO: 11234 - DNA, 301 bp, Artificial Sequence
  Atrx.1_Pten.1
  crRNA array
  misc_feature (148)..(157): n is a, c, g, or t
cttggctttatatatcttgtggaaaggacgaaacaccgtaatttctactaagtgtagatgccagtcgctcatatctctgtaatttctactaagtgtagataagcgtggtgcgtgacgcactaatttctactaagtgtagatttttttnnnnnnnnnnaagcttggcgtggatccgatatcaactagatcttgagacaaatggcagtattcatccacaattttaaaagaaaaggggggattggggggtacagtgcaggggaaagaatagtagacataatagcaacagacatacaaactaaag

SEQ ID NO: 11235 - DNA, 301 bp, Artificial Sequence
  Atrx.1_Pten.2
  crRNA array
  misc_feature (148)..(157): n is a, c, g, or t
cttggctttatatatcttgtggaaaggacgaaacaccgtaatttctactaagtgtagatgccagtcgctcatatctctgtaatttctactaagtgtagattgtcaccagctgaagtggcttaatttctactaagtgtagatttttttnnnnnnnnnnaagcttggcgtggatccgatatcaactagatcttgagacaaatggcagtattcatccacaattttaaaagaaaaggggggattggggggtacagtgcaggggaaagaatagtagacataatagcaacagacatacaaactaaag

SEQ ID NO: 11236 - DNA, 301 bp, Artificial Sequence
  Atrx.1_Pten.3
  crRNA array
  misc_feature (148)..(157): n is a, c, g, or t
cttggctttatatatcttgtggaaaggacgaaacaccgtaatttctactaagtgtagatgccagtcgctcatatctctgtaatttctactaagtgtagatggagtcaagaggctgatttttaatttctactaagtgtagatttttttnnnnnnnnnnaagcttggcgtggatccgatatcaactagatcttgagacaaatggcagtattcatccacaattttaaaagaaaaggggggattggggggtacagtgcaggggaaagaatagtagacataatagcaacagacatacaaactaaag

SEQ ID NO: 11237 - DNA, 301 bp, Artificial Sequence
  Atrx.1_Pten.4
  crRNA array
  misc_feature (148)..(157): n is a, c, g, or t
cttggctttatatatcttgtggaaaggacgaaacaccgtaatttctactaagtgtagatgccagtcgctcatatctctgtaatttctactaagtgtagatctgtaagctaaaccactacataatttctactaagtgtagatttttttnnnnnnnnnnaagcttggcgtggatccgatatcaactagatcttgagacaaatggcagtattcatccacaattttaaaagaaaaggggggattggggggtacagtgcaggggaaagaatagtagacataatagcaacagacatacaaactaaag

SEQ ID NO: 11238 - DNA, 301 bp, Artificial Sequence
  Atrx.2_Pten.1
  crRNA array
  misc_feature (148)..(157): n is a, c, g, or t
cttggctttatatatcttgtggaaaggacgaaacaccgtaatttctactaagtgtagatgcagcatgggggtatccctttaatttctactaagtgtagataagcgtggtgcgtgacgcactaatttctactaagtgtagatttttttnnnnnnnnnnaagcttggcgtggatccgatatcaactagatcttgagacaaatggcagtattcatccacaattttaaaagaaaaggggggattggggggtacagtgcaggggaaagaatagtagacataatagcaacagacatacaaactaaag

SEQ ID NO: 11239 - DNA, 301 bp, Artificial Sequence
  Atrx.2_Pten.2
  crRNA array
  misc_feature (148)..(157): n is a, c, g, or t
cttggctttatatatcttgtggaaaggacgaaacaccgtaatttctactaagtgtagatgcagcatgggggtatccctttaatttctactaagtgtagattgtcaccagctgaagtggcttaatttctactaagtgtagatttttttnnnnnnnnnnaagcttggcgtggatccgatatcaactagatcttgagacaaatggcagtattcatccacaattttaaaagaaaaggggggattggggggtacagtgcaggggaaagaatagtagacataatagcaacagacatacaaactaaag

SEQ ID NO: 11240 - DNA, 301 bp, Artificial Sequence
  Atrx.2_Pten.3
  crRNA array
  misc_feature (148)..(157): n is a, c, g, or t
cttggctttatatatcttgtggaaaggacgaaacaccgtaatttctactaagtgtagatgcagcatgggggtatccctttaatttctactaagtgtagatggagtcaagaggctgatttttaatttctactaagtgtagatttttttnnnnnnnnnnaagcttggcgtggatccgatatcaactagatcttgagacaaatggcagtattcatccacaattttaaaagaaaaggggggattggggggtacagtgcaggggaaagaatagtagacataatagcaacagacatacaaactaaag

SEQ ID NO: 11241 - DNA, 301 bp, Artificial Sequence
  Atrx.2_Pten.4
  crRNA array
  misc_feature (148)..(157): n is a, c, g, or t
cttggctttatatatcttgtggaaaggacgaaacaccgtaatttctactaagtgtagatgcagcatgggggtatccctttaatttctactaagtgtagatctgtaagctaaaccactacataatttctactaagtgtagatttttttnnnnnnnnnnaagcttggcgtggatccgatatcaactagatcttgagacaaatggcagtattcatccacaattttaaaagaaaaggggggattggggggtacagtgcaggggaaagaatagtagacataatagcaacagacatacaaactaaag

SEQ ID NO: 11242 - DNA, 301 bp, Artificial Sequence
  Atrx.3_Pten.1
  crRNA array
  misc_feature (148)..(157): n is a, c, g, or t
cttggctttatatatcttgtggaaaggacgaaacaccgtaatttctactaagtgtagatggagccctgtccgcaatgagtaatttctactaagtgtagataagcgtggtgcgtgacgcactaatttctactaagtgtagatttttttnnnnnnnnnnaagcttggcgtggatccgatatcaactagatcttgagacaaatggcagtattcatccacaattttaaaagaaaaggggggattggggggtacagtgcaggggaaagaatagtagacataatagcaacagacatacaaactaaag

SEQ ID NO: 11243 - DNA, 301 bp, Artificial Sequence
  Atrx.3_Pten.2
  crRNA array
  misc_feature (148)..(157): n is a, c, g, or t
cttggctttatatatcttgtggaaaggacgaaacaccgtaatttctactaagtgtagatggagccctgtccgcaatgagtaatttctactaagtgtagattgtcaccagctgaagtggcttaatttctactaagtgtagatttttttnnnnnnnnnnaagcttggcgtggatccgatatcaactagatcttgagacaaatggcagtattcatccacaattttaaaagaaaaggggggattggggggtacagtgcaggggaaagaatagtagacataatagcaacagacatacaaactaaag

SEQ ID NO: 11244 - DNA, 301 bp, Artificial Sequence
  Atrx.3_Pten.3
  crRNA array
  misc_feature (148)..(157): n is a, c, g, or t
cttggctttatatatcttgtggaaaggacgaaacaccgtaatttctactaagtgtagatggagccctgtccgcaatgagtaatttctactaagtgtagatggagtcaagaggctgatttttaatttctactaagtgtagatttttttnnnnnnnnnnaagcttggcgtggatccgatatcaactagatcttgagacaaatggcagtattcatccacaattttaaaagaaaaggggggattggggggtacagtgcaggggaaagaatagtagacataatagcaacagacatacaaactaaag

SEQ ID NO: 11245 - DNA, 301 bp, Artificial Sequence
  Atrx.3_Pten.4
  crRNA array
  misc_feature (148)..(157): n is a, c, g, or t
cttggctttatatatcttgtggaaaggacgaaacaccgtaatttctactaagtgtagatggagccctgtccgcaatgagtaatttctactaagtgtagatctgtaagctaaaccactacataatttctactaagtgtagatttttttnnnnnnnnnnaagcttggcgtggatccgatatcaactagatcttgagacaaatggcagtattcatccacaattttaaaagaaaaggggggattggggggtacagtgcaggggaaagaatagtagacataatagcaacagacatacaaactaaag

SEQ ID NO: 11246 - DNA, 301 bp, Artificial Sequence
  Atrx.4_Pten.1
  crRNA array
  misc_feature (148)..(157): n is a, c, g, or t
cttggctttatatatcttgtggaaaggacgaaacaccgtaatttctactaagtgtagataaactgggctcctactaaattaatttctactaagtgtagataagcgtggtgcgtgacgcactaatttctactaagtgtagatttttttnnnnnnnnnnaagcttggcgtggatccgatatcaactagatcttgagacaaatggcagtattcatccacaattttaaaagaaaaggggggattggggggtacagtgcaggggaaagaatagtagacataatagcaacagacatacaaactaaag

SEQ ID NO: 11247 - DNA, 301 bp, Artificial Sequence
  Atrx.4_Pten.2
  crRNA array
  misc_feature (148)..(157): n is a, c, g, or t
cttggctttatatatcttgtggaaaggacgaaacaccgtaatttctactaagtgtagataaactgggctcctactaaattaatttctactaagtgtagattgtcaccagctgaagtggcttaatttctactaagtgtagatttttttnnnnnnnnnnaagcttggcgtggatccgatatcaactagatcttgagacaaatggcagtattcatccacaattttaaaagaaaaggggggattggggggtacagtgcaggggaaagaatagtagacataatagcaacagacatacaaactaaag

SEQ ID NO: 11248 - DNA, 301 bp, Artificial Sequence
  Atrx.4_Pten.3
  crRNA array
  misc_feature (148)..(157): n is a, c, g, or t
cttggctttatatatcttgtggaaaggacgaaacaccgtaatttctactaagtgtagataaactgggctcctactaaattaatttctactaagtgtagatggagtcaagaggctgatttttaatttctactaagtgtagatttttttnnnnnnnnnnaagcttggcgtggatccgatatcaactagatcttgagacaaatggcagtattcatccacaattttaaaagaaaaggggggattggggggtacagtgcaggggaaagaatagtagacataatagcaacagacatacaaactaaag

SEQ ID NO: 11249 - DNA, 301 bp, Artificial Sequence
  Atrx.4_Pten.4
  crRNA array
  misc_feature (148)..(157): n is a, c, g, or t
cttggctttatatatcttgtggaaaggacgaaacaccgtaatttctactaagtgtagataaactgggctcctactaaattaatttctactaagtgtagatctgtaagctaaaccactacataatttctactaagtgtagatttttttnnnnnnnnnnaagcttggcgtggatccgatatcaactagatcttgagacaaatggcagtattcatccacaattttaaaagaaaaggggggattggggggtacagtgcaggggaaagaatagtagacataatagcaacagacatacaaactaaag

SEQ ID NO: 11250 - DNA, 301 bp, Artificial Sequence
  Atrx.1_Atm.1
  crRNA array
  misc_feature (148)..(157): n is a, c, g, or t
cttggctttatatatcttgtggaaaggacgaaacaccgtaatttctactaagtgtagatgccagtcgctcatatctctgtaatttctactaagtgtagatgagaaagtctccgaatcgtttaatttctactaagtgtagatttttttnnnnnnnnnnaagcttggcgtggatccgatatcaactagatcttgagacaaatggcagtattcatccacaattttaaaagaaaaggggggattggggggtacagtgcaggggaaagaatagtagacataatagcaacagacatacaaactaaag

SEQ ID NO: 11251 - DNA, 301 bp, Artificial Sequence
  Atrx.1_Atm.2
  crRNA array
  misc_feature (148)..(157): n is a, c, g, or t
cttggctttatatatcttgtggaaaggacgaaacaccgtaatttctactaagtgtagatgccagtcgctcatatctctgtaatttctactaagtgtagatcctacgagggcacgagagactaatttctactaagtgtagatttttttnnnnnnnnnnaagcttggcgtggatccgatatcaactagatcttgagacaaatggcagtattcatccacaattttaaaagaaaaggggggattggggggtacagtgcaggggaaagaatagtagacataatagcaacagacatacaaactaaag

SEQ ID NO: 11252 - DNA, 301 bp, Artificial Sequence
  Atrx.1_Atm.3
  crRNA array
  misc_feature (148)..(157): n is a, c, g, or t
cttggctttatatatcttgtggaaaggacgaaacaccgtaatttctactaagtgtagatgccagtcgctcatatctctgtaatttctactaagtgtagattgaaagtctccgatatgccataatttctactaagtgtagatttttttnnnnnnnnnnaagcttggcgtggatccgatatcaactagatcttgagacaaatggcagtattcatccacaattttaaaagaaaaggggggattggggggtacagtgcaggggaaagaatagtagacataatagcaacagacatacaaactaaag

SEQ ID NO: 11253 - DNA, 301 bp, Artificial Sequence
  Atrx.1_Atm.4
  crRNA array
  misc_feature (148)..(157): n is a, c, g, or t
cttggctttatatatcttgtggaaaggacgaaacaccgtaatttctactaagtgtagatgccagtcgctcatatctctgtaatttctactaagtgtagatggtggtgatcagtcaagtagtaatttctactaagtgtagatttttttnnnnnnnnnnaagcttggcgtggatccgatatcaactagatcttgagacaaatggcagtattcatccacaattttaaaagaaaaggggggattggggggtacagtgcaggggaaagaatagtagacataatagcaacagacatacaaactaaag

SEQ ID NO: 11254 - DNA, 301 bp, Artificial Sequence
  Atrx.2_Atm.1
  crRNA array
  misc_feature (148)..(157): n is a, c, g, or t
cttggctttatatatcttgtggaaaggacgaaacaccgtaatttctactaagtgtagatgcagcatgggggtatccctttaatttctactaagtgtagatgagaaagtctccgaatcgtttaatttctactaagtgtagatttttttnnnnnnnnnnaagcttggcgtggatccgatatcaactagatcttgagacaaatggcagtattcatccacaattttaaaagaaaaggggggattggggggtacagtgcaggggaaagaatagtagacataatagcaacagacatacaaactaaag

SEQ ID NO: 11255 - DNA, 301 bp, Artificial Sequence
  Atrx.2_Atm.2
  crRNA array
  misc_feature (148)..(157): n is a, c, g, or t
cttggctttatatatcttgtggaaaggacgaaacaccgtaatttctactaagtgtagatgcagcatgggggtatccctttaatttctactaagtgtagatcctacgagggcacgagagactaatttctactaagtgtagatttttttnnnnnnnnnnaagcttggcgtggatccgatatcaactagatcttgagacaaatggcagtattcatccacaattttaaaagaaaaggggggattggggggtacagtgcaggggaaagaatagtagacataatagcaacagacatacaaactaaag

SEQ ID NO: 11256 - DNA, 301 bp, Artificial Sequence
  Atrx.2_Atm.3
  crRNA array
  misc_feature (148)..(157): n is a, c, g, or t
cttggctttatatatcttgtggaaaggacgaaacaccgtaatttctactaagtgtagatgcagcatgggggtatccctttaatttctactaagtgtagattgaaagtctccgatatgccataatttctactaagtgtagatttttttnnnnnnnnnnaagcttggcgtggatccgatatcaactagatcttgagacaaatggcagtattcatccacaattttaaaagaaaaggggggattggggggtacagtgcaggggaaagaatagtagacataatagcaacagacatacaaactaaag

SEQ ID NO: 11257 - DNA, 301 bp, Artificial Sequence
  Atrx.2_Atm.4
  crRNA array
  misc_feature (148)..(157): n is a, c, g, or t
cttggctttatatatcttgtggaaaggacgaaacaccgtaatttctactaagtgtagatgcagcatgggggtatccctttaatttctactaagtgtagatggtggtgatcagtcaagtagtaatttctactaagtgtagatttttttnnnnnnnnnnaagcttggcgtggatccgatatcaactagatcttgagacaaatggcagtattcatccacaattttaaaagaaaaggggggattggggggtacagtgcaggggaaagaatagtagacataatagcaacagacatacaaactaaag

SEQ ID NO: 11258 - DNA, 301 bp, Artificial Sequence
  Atrx.3_Atm.1
  crRNA array
  misc_feature (148)..(157): n is a, c, g, or t
cttggctttatatatcttgtggaaaggacgaaacaccgtaatttctactaagtgtagatggagccctgtccgcaatgagtaatttctactaagtgtagatgagaaagtctccgaatcgtttaatttctactaagtgtagatttttttnnnnnnnnnnaagcttggcgtggatccgatatcaactagatcttgagacaaatggcagtattcatccacaattttaaaagaaaaggggggattggggggtacagtgcaggggaaagaatagtagacataatagcaacagacatacaaactaaag

SEQ ID NO: 11259 - DNA, 301 bp, Artificial Sequence
  Atrx.3_Atm.2
  crRNA array
  misc_feature (148)..(157): n is a, c, g, or t
cttggctttatatatcttgtggaaaggacgaaacaccgtaatttctactaagtgtagatggagccctgtccgcaatgagtaatttctactaagtgtagatcctacgagggcacgagagactaatttctactaagtgtagatttttttnnnnnnnnnnaagcttggcgtggatccgatatcaactagatcttgagacaaatggcagtattcatccacaattttaaaagaaaaggggggattggggggtacagtgcaggggaaagaatagtagacataatagcaacagacatacaaactaaag

SEQ ID NO: 11260 - DNA, 301 bp, Artificial Sequence
  Atrx.3_Atm.3
  crRNA array
  misc_feature (148)..(157): n is a, c, g, or t
cttggctttatatatcttgtggaaaggacgaaacaccgtaatttctactaagtgtagatggagccctgtccgcaatgagtaatttctactaagtgtagattgaaagtctccgatatgccataatttctactaagtgtagatttttttnnnnnnnnnnaagcttggcgtggatccgatatcaactagatcttgagacaaatggcagtattcatccacaattttaaaagaaaaggggggattggggggtacagtgcaggggaaagaatagtagacataatagcaacagacatacaaactaaag

SEQ ID NO: 11261 - DNA, 301 bp, Artificial Sequence
  Atrx.3_Atm.4
  crRNA array
  misc_feature (148)..(157): n is a, c, g, or t
cttggctttatatatcttgtggaaaggacgaaacaccgtaatttctactaagtgtagatggagccctgtccgcaatgagtaatttctactaagtgtagatggtggtgatcagtcaagtagtaatttctactaagtgtagatttttttnnnnnnnnnnaagcttggcgtggatccgatatcaactagatcttgagacaaatggcagtattcatccacaattttaaaagaaaaggggggattggggggtacagtgcaggggaaagaatagtagacataatagcaacagacatacaaactaaag

SEQ ID NO: 11262 - DNA, 301 bp, Artificial Sequence
  Atrx.4_Atm.1
  crRNA array
  misc_feature (148)..(157): n is a, c, g, or t
cttggctttatatatcttgtggaaaggacgaaacaccgtaatttctactaagtgtagataaactgggctcctactaaattaatttctactaagtgtagatgagaaagtctccgaatcgtttaatttctactaagtgtagatttttttnnnnnnnnnnaagcttggcgtggatccgatatcaactagatcttgagacaaatggcagtattcatccacaattttaaaagaaaaggggggattggggggtacagtgcaggggaaagaatagtagacataatagcaacagacatacaaactaaag

SEQ ID NO: 11263 - DNA, 301 bp, Artificial Sequence
  Atrx.4_Atm.2
  crRNA array
  misc_feature (148)..(157): n is a, c, g, or t
cttggctttatatatcttgtggaaaggacgaaacaccgtaatttctactaagtgtagataaactgggctcctactaaattaatttctactaagtgtagatcctacgagggcacgagagactaatttctactaagtgtagatttttttnnnnnnnnnnaagcttggcgtggatccgatatcaactagatcttgagacaaatggcagtattcatccacaattttaaaagaaaaggggggattggggggtacagtgcaggggaaagaatagtagacataatagcaacagacatacaaactaaag

SEQ ID NO: 11264 - DNA, 301 bp, Artificial Sequence
  Atrx.4_Atm.3
  crRNA array
  misc_feature (148)..(157): n is a, c, g, or t
cttggctttatatatcttgtggaaaggacgaaacaccgtaatttctactaagtgtagataaactgggctcctactaaattaatttctactaagtgtagattgaaagtctccgatatgccataatttctactaagtgtagatttttttnnnnnnnnnnaagcttggcgtggatccgatatcaactagatcttgagacaaatggcagtattcatccacaattttaaaagaaaaggggggattggggggtacagtgcaggggaaagaatagtagacataatagcaacagacatacaaactaaag

SEQ ID NO: 11265 - DNA, 301 bp, Artificial Sequence
  Atrx.4_Atm.4
  crRNA array
  misc_feature (148)..(157): n is a, c, g, or t
cttggctttatatatcttgtggaaaggacgaaacaccgtaatttctactaagtgtagataaactgggctcctactaaattaatttctactaagtgtagatggtggtgatcagtcaagtagtaatttctactaagtgtagatttttttnnnnnnnnnnaagcttggcgtggatccgatatcaactagatcttgagacaaatggcagtattcatccacaattttaaaagaaaaggggggattggggggtacagtgcaggggaaagaatagtagacataatagcaacagacatacaaactaaag

SEQ ID NO: 11266 - DNA, 301 bp, Artificial Sequence
  Nf2.1_Jak1.1
  crRNA array
  misc_feature (148)..(157): n is a, c, g, or t
cttggctttatatatcttgtggaaaggacgaaacaccgtaatttctactaagtgtagatcggagtcatctgatagagattaatttctactaagtgtagatgagcgcaggccgccgcagcctaatttctactaagtgtagatttttttnnnnnnnnnnaagcttggcgtggatccgatatcaactagatcttgagacaaatggcagtattcatccacaattttaaaagaaaaggggggattggggggtacagtgcaggggaaagaatagtagacataatagcaacagacatacaaactaaag

SEQ ID NO: 11267 - DNA, 301 bp, Artificial Sequence
  Nf2.1_Jak1.2
  crRNA array
  misc_feature (148)..(157): n is a, c, g, or t
cttggctttatatatcttgtggaaaggacgaaacaccgtaatttctactaagtgtagatcggagtcatctgatagagattaatttctactaagtgtagatagggacactggacaaccgaataatttctactaagtgtagatttttttnnnnnnnnnnaagcttggcgtggatccgatatcaactagatcttgagacaaatggcagtattcatccacaattttaaaagaaaaggggggattggggggtacagtgcaggggaaagaatagtagacataatagcaacagacatacaaactaaag

SEQ ID NO: 11268 - DNA, 301 bp, Artificial Sequence
  Nf2.1_Jak1.3
  crRNA array
  misc_feature (148)..(157): n is a, c, g, or t
cttggctttatatatcttgtggaaaggacgaaacaccgtaatttctactaagtgtagatcggagtcatctgatagagattaatttctactaagtgtagatgcacagaacgccatggcatttaatttctactaagtgtagatttttttnnnnnnnnnnaagcttggcgtggatccgatatcaactagatcttgagacaaatggcagtattcatccacaattttaaaagaaaaggggggattggggggtacagtgcaggggaaagaatagtagacataatagcaacagacatacaaactaaag

SEQ ID NO: 11269 - DNA, 301 bp, Artificial Sequence
  Nf2.1_Jak1.4
  crRNA array
  misc_feature (148)..(157): n is a, c, g, or t
cttggctttatatatcttgtggaaaggacgaaacaccgtaatttctactaagtgtagatcggagtcatctgatagagattaatttctactaagtgtagattgccgccactggatcccgagtaatttctactaagtgtagatttttttnnnnnnnnnnaagcttggcgtggatccgatatcaactagatcttgagacaaatggcagtattcatccacaattttaaaagaaaaggggggattggggggtacagtgcaggggaaagaatagtagacataatagcaacagacatacaaactaaag

SEQ ID NO: 11270 - DNA, 301 bp, Artificial Sequence
  Nf2.2_Jak1.1
  crRNA array
  misc_feature (148)..(157): n is a, c, g, or t
cttggctttatatatcttgtggaaaggacgaaacaccgtaatttctactaagtgtagattgaggcgacggaaagctgactaatttctactaagtgtagatgagcgcaggccgccgcagcctaatttctactaagtgtagatttttttnnnnnnnnnnaagcttggcgtggatccgatatcaactagatcttgagacaaatggcagtattcatccacaattttaaaagaaaaggggggattggggggtacagtgcaggggaaagaatagtagacataatagcaacagacatacaaactaaag

SEQ ID NO: 11271 - DNA, 301 bp, Artificial Sequence
  Nf2.2_Jak1.2
  crRNA array
  misc_feature (148)..(157): n is a, c, g, or t
cttggctttatatatcttgtggaaaggacgaaacaccgtaatttctactaagtgtagattgaggcgacggaaagctgactaatttctactaagtgtagatagggacactggacaaccgaataatttctactaagtgtagatttttttnnnnnnnnnnaagcttggcgtggatccgatatcaactagatcttgagacaaatggcagtattcatccacaattttaaaagaaaaggggggattggggggtacagtgcaggggaaagaatagtagacataatagcaacagacatacaaactaaag

SEQ ID NO: 11272 - DNA, 301 bp, Artificial Sequence
  Nf2.2_Jak1.3
  crRNA array
  misc_feature (148)..(157): n is a, c, g, or t
cttggctttatatatcttgtggaaaggacgaaacaccgtaatttctactaagtgtagattgaggcgacggaaagctgactaatttctactaagtgtagatgcacagaacgccatggcatttaatttctactaagtgtagatttttttnnnnnnnnnnaagcttggcgtggatccgatatcaactagatcttgagacaaatggcagtattcatccacaattttaaaagaaaaggggggattggggggtacagtgcaggggaaagaatagtagacataatagcaacagacatacaaactaaag

SEQ ID NO: 11273 - DNA, 301 bp, Artificial Sequence
  Nf2.2_Jak1.4
  crRNA array
  misc_feature (148)..(157): n is a, c, g, or t
cttggctttatatatcttgtggaaaggacgaaacaccgtaatttctactaagtgtagattgaggcgacggaaagctgactaatttctactaagtgtagattgccgccactggatcccgagtaatttctactaagtgtagatttttttnnnnnnnnnnaagcttggcgtggatccgatatcaactagatcttgagacaaatggcagtattcatccacaattttaaaagaaaaggggggattggggggtacagtgcaggggaaagaatagtagacataatagcaacagacatacaaactaaag

SEQ ID NO: 11274 - DNA, 301 bp, Artificial Sequence
  Nf2.3_Jak1.1
  crRNA array
  misc_feature (148)..(157): n is a, c, g, or t
cttggctttatatatcttgtggaaaggacgaaacaccgtaatttctactaagtgtagatcgtcgcctcataaataggtctaatttctactaagtgtagatgagcgcaggccgccgcagcctaatttctactaagtgtagatttttttnnnnnnnnnnaagcttggcgtggatccgatatcaactagatcttgagacaaatggcagtattcatccacaattttaaaagaaaaggggggattggggggtacagtgcaggggaaagaatagtagacataatagcaacagacatacaaactaaag

SEQ ID NO: 11275 - DNA, 301 bp, Artificial Sequence
  Nf2.3_Jak1.2
  crRNA array
  misc_feature (148)..(157): n is a, c, g, or t
cttggctttatatatcttgtggaaaggacgaaacaccgtaatttctactaagtgtagatcgtcgcctcataaataggtctaatttctactaagtgtagatagggacactggacaaccgaataatttctactaagtgtagatttttttnnnnnnnnnnaagcttggcgtggatccgatatcaactagatcttgagacaaatggcagtattcatccacaattttaaaagaaaaggggggattggggggtacagtgcaggggaaagaatagtagacataatagcaacagacatacaaactaaag

SEQ ID NO: 11276 - DNA, 301 bp, Artificial Sequence
  Nf2.3_Jak1.3
  crRNA array
  misc_feature (148)..(157): n is a, c, g, or t
cttggctttatatatcttgtggaaaggacgaaacaccgtaatttctactaagtgtagatcgtcgcctcataaataggtctaatttctactaagtgtagatgcacagaacgccatggcatttaatttctactaagtgtagatttttttnnnnnnnnnnaagcttggcgtggatccgatatcaactagatcttgagacaaatggcagtattcatccacaattttaaaagaaaaggggggattggggggtacagtgcaggggaaagaatagtagacataatagcaacagacatacaaactaaag

SEQ ID NO: 11277 - DNA, 301 bp, Artificial Sequence
  Nf2.3_Jak1.4
  crRNA array
  misc_feature (148)..(157): n is a, c, g, or t
cttggctttatatatcttgtggaaaggacgaaacaccgtaatttctactaagtgtagatcgtcgcctcataaataggtctaatttctactaagtgtagattgccgccactggatcccgagtaatttctactaagtgtagatttttttnnnnnnnnnnaagcttggcgtggatccgatatcaactagatcttgagacaaatggcagtattcatccacaattttaaaagaaaaggggggattggggggtacagtgcaggggaaagaatagtagacataatagcaacagacatacaaactaaag

SEQ ID NO: 11278 - DNA, 301 bp, Artificial Sequence
  Nf2.4_Jak1.1
  crRNA array
  misc_feature (148)..(157): n is a, c, g, or t
cttggctttatatatcttgtggaaaggacgaaacaccgtaatttctactaagtgtagataaggcctcgatctccgtctttaatttctactaagtgtagatgagcgcaggccgccgcagcctaatttctactaagtgtagatttttttnnnnnnnnnnaagcttggcgtggatccgatatcaactagatcttgagacaaatggcagtattcatccacaattttaaaagaaaaggggggattggggggtacagtgcaggggaaagaatagtagacataatagcaacagacatacaaactaaag

SEQ ID NO: 11279 - DNA, 301 bp, Artificial Sequence
  Nf2.4_Jak1.2
  crRNA array
  misc_feature (148)..(157): n is a, c, g, or t
cttggctttatatatcttgtggaaaggacgaaacaccgtaatttctactaagtgtagataaggcctcgatctccgtctttaatttctactaagtgtagatagggacactggacaaccgaataatttctactaagtgtagatttttttnnnnnnnnnnaagcttggcgtggatccgatatcaactagatcttgagacaaatggcagtattcatccacaattttaaaagaaaaggggggattggggggtacagtgcaggggaaagaatagtagacataatagcaacagacatacaaactaaag

SEQ ID NO: 11280 - DNA, 301 bp, Artificial Sequence
  Nf2.4_Jak1.3
  crRNA array
  misc_feature (148)..(157): n is a, c, g, or t
cttggctttatatatcttgtggaaaggacgaaacaccgtaatttctactaagtgtagataaggcctcgatctccgtctttaatttctactaagtgtagatgcacagaacgccatggcatttaatttctactaagtgtagatttttttnnnnnnnnnnaagcttggcgtggatccgatatcaactagatcttgagacaaatggcagtattcatccacaattttaaaagaaaaggggggattggggggtacagtgcaggggaaagaatagtagacataatagcaacagacatacaaactaaag

SEQ ID NO: 11281 - DNA, 301 bp, Artificial Sequence
  Nf2.4_Jak1.4
  crRNA array
  misc_feature (148)..(157): n is a, c, g, or t
cttggctttatatatcttgtggaaaggacgaaacaccgtaatttctactaagtgtagataaggcctcgatctccgtctttaatttctactaagtgtagattgccgccactggatcccgagtaatttctactaagtgtagatttttttnnnnnnnnnnaagcttggcgtggatccgatatcaactagatcttgagacaaatggcagtattcatccacaattttaaaagaaaaggggggattggggggtacagtgcaggggaaagaatagtagacataatagcaacagacatacaaactaaag

SEQ ID NO: 11282 - DNA, 301 bp, Artificial Sequence
  Nf2.1_Chd1.1
  crRNA array
  misc_feature (148)..(157): n is a, c, g, or t
cttggctttatatatcttgtggaaaggacgaaacaccgtaatttctactaagtgtagatcggagtcatctgatagagattaatttctactaagtgtagatcgccccactctgcaatccattaatttctactaagtgtagatttttttnnnnnnnnnnaagcttggcgtggatccgatatcaactagatcttgagacaaatggcagtattcatccacaattttaaaagaaaaggggggattggggggtacagtgcaggggaaagaatagtagacataatagcaacagacatacaaactaaag

SEQ ID NO: 11283 - DNA, 301 bp, Artificial Sequence
  Nf2.1_Chd1.2
  crRNA array
  misc_feature (148)..(157): n is a, c, g, or t
cttggctttatatatcttgtggaaaggacgaaacaccgtaatttctactaagtgtagatcggagtcatctgatagagattaatttctactaagtgtagattgcagccggcgtctggcagctaatttctactaagtgtagatttttttnnnnnnnnnnaagcttggcgtggatccgatatcaactagatcttgagacaaatggcagtattcatccacaattttaaaagaaaaggggggattggggggtacagtgcaggggaaagaatagtagacataatagcaacagacatacaaactaaag

SEQ ID NO: 11284 - DNA, 301 bp, Artificial Sequence
  Nf2.1_Chd1.3
  crRNA array
  misc_feature (148)..(157): n is a, c, g, or t
cttggctttatatatcttgtggaaaggacgaaacaccgtaatttctactaagtgtagatcggagtcatctgatagagattaatttctactaagtgtagatatcagcaagtatgcaactattaatttctactaagtgtagatttttttnnnnnnnnnnaagcttggcgtggatccgatatcaactagatcttgagacaaatggcagtattcatccacaattttaaaagaaaaggggggattggggggtacagtgcaggggaaagaatagtagacataatagcaacagacatacaaactaaag

SEQ ID NO: 11285 - DNA, 301 bp, Artificial Sequence
  Nf2.1_Chd1.4
  crRNA array
  misc_feature (148)..(157): n is a, c, g, or t
cttggctttatatatcttgtggaaaggacgaaacaccgtaatttctactaagtgtagatcggagtcatctgatagagattaatttctactaagtgtagataaatggcggataactcctcttaatttctactaagtgtagatttttttnnnnnnnnnnaagcttggcgtggatccgatatcaactagatcttgagacaaatggcagtattcatccacaattttaaaagaaaaggggggattggggggtacagtgcaggggaaagaatagtagacataatagcaacagacatacaaactaaag

SEQ ID NO: 11286 - DNA, 301 bp, Artificial Sequence
  Nf2.2_Chd1.1
  crRNA array
  misc_feature (148)..(157): n is a, c, g, or t
cttggctttatatatcttgtggaaaggacgaaacaccgtaatttctactaagtgtagattgaggcgacggaaagctgactaatttctactaagtgtagatcgccccactctgcaatccattaatttctactaagtgtagatttttttnnnnnnnnnnaagcttggcgtggatccgatatcaactagatcttgagacaaatggcagtattcatccacaattttaaaagaaaaggggggattggggggtacagtgcaggggaaagaatagtagacataatagcaacagacatacaaactaaag

SEQ ID NO: 11287 - DNA, 301 bp, Artificial Sequence
  Nf2.2_Chd1.2
  crRNA array
  misc_feature (148)..(157): n is a, c, g, or t
cttggctttatatatcttgtggaaaggacgaaacaccgtaatttctactaagtgtagattgaggcgacggaaagctgactaatttctactaagtgtagattgcagccggcgtctggcagctaatttctactaagtgtagatttttttnnnnnnnnnnaagcttggcgtggatccgatatcaactagatcttgagacaaatggcagtattcatccacaattttaaaagaaaaggggggattggggggtacagtgcaggggaaagaatagtagacataatagcaacagacatacaaactaaag

SEQ ID NO: 11288 - DNA, 301 bp, Artificial Sequence
  Nf2.2_Chd1.3
  crRNA array
  misc_feature (148)..(157): n is a, c, g, or t
cttggctttatatatcttgtggaaaggacgaaacaccgtaatttctactaagtgtagattgaggcgacggaaagctgactaatttctactaagtgtagatatcagcaagtatgcaactattaatttctactaagtgtagatttttttnnnnnnnnnnaagcttggcgtggatccgatatcaactagatcttgagacaaatggcagtattcatccacaattttaaaagaaaaggggggattggggggtacagtgcaggggaaagaatagtagacataatagcaacagacatacaaactaaag

SEQ ID NO: 11289 - DNA, 301 bp, Artificial Sequence
  Nf2.2_Chd1.4
  crRNA array
  misc_feature (148)..(157): n is a, c, g, or t
cttggctttatatatcttgtggaaaggacgaaacaccgtaatttctactaagtgtagattgaggcgacggaaagctgactaatttctactaagtgtagataaatggcggataactcctcttaatttctactaagtgtagatttttttnnnnnnnnnnaagcttggcgtggatccgatatcaactagatcttgagacaaatggcagtattcatccacaattttaaaagaaaaggggggattggggggtacagtgcaggggaaagaatagtagacataatagcaacagacatacaaactaaag

SEQ ID NO: 11290 - DNA, 301 bp, Artificial Sequence
  Nf2.3_Chd1.1
  crRNA array
  misc_feature (148)..(157): n is a, c, g, or t
cttggctttatatatcttgtggaaaggacgaaacaccgtaatttctactaagtgtagatcgtcgcctcataaataggtctaatttctactaagtgtagatcgccccactctgcaatccattaatttctactaagtgtagatttttttnnnnnnnnnnaagcttggcgtggatccgatatcaactagatcttgagacaaatggcagtattcatccacaattttaaaagaaaaggggggattggggggtacagtgcaggggaaagaatagtagacataatagcaacagacatacaaactaaag

SEQ ID NO: 11291 - DNA, 301 bp, Artificial Sequence
  Nf2.3_Chd1.2
  crRNA array
  misc_feature (148)..(157): n is a, c, g, or t
cttggctttatatatcttgtggaaaggacgaaacaccgtaatttctactaagtgtagatcgtcgcctcataaataggtctaatttctactaagtgtagattgcagccggcgtctggcagctaatttctactaagtgtagatttttttnnnnnnnnnnaagcttggcgtggatccgatatcaactagatcttgagacaaatggcagtattcatccacaattttaaaagaaaaggggggattggggggtacagtgcaggggaaagaatagtagacataatagcaacagacatacaaactaaag

SEQ ID NO: 11292 - DNA, 301 bp, Artificial Sequence
  Nf2.3_Chd1.3
  crRNA array
  misc_feature (148)..(157): n is a, c, g, or t
cttggctttatatatcttgtggaaaggacgaaacaccgtaatttctactaagtgtagatcgtcgcctcataaataggtctaatttctactaagtgtagatatcagcaagtatgcaactattaatttctactaagtgtagatttttttnnnnnnnnnnaagcttggcgtggatccgatatcaactagatcttgagacaaatggcagtattcatccacaattttaaaagaaaaggggggattggggggtacagtgcaggggaaagaatagtagacataatagcaacagacatacaaactaaag

SEQ ID NO: 11293 - DNA, 301 bp, Artificial Sequence
  Nf2.3_Chd1.4
  crRNA array
  misc_feature (148)..(157): n is a, c, g, or t
cttggctttatatatcttgtggaaaggacgaaacaccgtaatttctactaagtgtagatcgtcgcctcataaataggtctaatttctactaagtgtagataaatggcggataactcctcttaatttctactaagtgtagatttttttnnnnnnnnnnaagcttggcgtggatccgatatcaactagatcttgagacaaatggcagtattcatccacaattttaaaagaaaaggggggattggggggtacagtgcaggggaaagaatagtagacataatagcaacagacatacaaactaaag

SEQ ID NO: 11294 - DNA, 301 bp, Artificial Sequence
  Nf2.4_Chd1.1
  crRNA array
  misc_feature (148)..(157): n is a, c, g, or t
cttggctttatatatcttgtggaaaggacgaaacaccgtaatttctactaagtgtagataaggcctcgatctccgtctttaatttctactaagtgtagatcgccccactctgcaatccattaatttctactaagtgtagatttttttnnnnnnnnnnaagcttggcgtggatccgatatcaactagatcttgagacaaatggcagtattcatccacaattttaaaagaaaaggggggattggggggtacagtgcaggggaaagaatagtagacataatagcaacagacatacaaactaaag

SEQ ID NO: 11295 - DNA, 301 bp, Artificial Sequence
  Nf2.4_Chd1.2
  crRNA array
  misc_feature (148)..(157): n is a, c, g, or t
cttggctttatatatcttgtggaaaggacgaaacaccgtaatttctactaagtgtagataaggcctcgatctccgtctttaatttctactaagtgtagattgcagccggcgtctggcagctaatttctactaagtgtagatttttttnnnnnnnnnnaagcttggcgtggatccgatatcaactagatcttgagacaaatggcagtattcatccacaattttaaaagaaaaggggggattggggggtacagtgcaggggaaagaatagtagacataatagcaacagacatacaaactaaag

SEQ ID NO: 11296 - DNA, 301 bp, Artificial Sequence
  Nf2.4_Chd1.3
  crRNA array
  misc_feature (148)..(157): n is a, c, g, or t
cttggctttatatatcttgtggaaaggacgaaacaccgtaatttctactaagtgtagataaggcctcgatctccgtctttaatttctactaagtgtagatatcagcaagtatgcaactattaatttctactaagtgtagatttttttnnnnnnnnnnaagcttggcgtggatccgatatcaactagatcttgagacaaatggcagtattcatccacaattttaaaagaaaaggggggattggggggtacagtgcaggggaaagaatagtagacataatagcaacagacatacaaactaaag

SEQ ID NO: 11297 - DNA, 301 bp, Artificial Sequence
  Nf2.4_Chd1.4
  crRNA array
  misc_feature (148)..(157): n is a, c, g, or t
cttggctttatatatcttgtggaaaggacgaaacaccgtaatttctactaagtgtagataaggcctcgatctccgtctttaatttctactaagtgtagataaatggcggataactcctcttaatttctactaagtgtagatttttttnnnnnnnnnnaagcttggcgtggatccgatatcaactagatcttgagacaaatggcagtattcatccacaattttaaaagaaaaggggggattggggggtacagtgcaggggaaagaatagtagacataatagcaacagacatacaaactaaag

SEQ ID NO: 11298 - DNA, 301 bp, Artificial Sequence
  Nf2.1_Pole.1
  crRNA array
  misc_feature (148)..(157): n is a, c, g, or t
cttggctttatatatcttgtggaaaggacgaaacaccgtaatttctactaagtgtagatcggagtcatctgatagagattaatttctactaagtgtagatgcgcgctctccacgtgctcttaatttctactaagtgtagatttttttnnnnnnnnnnaagcttggcgtggatccgatatcaactagatcttgagacaaatggcagtattcatccacaattttaaaagaaaaggggggattggggggtacagtgcaggggaaagaatagtagacataatagcaacagacatacaaactaaag

SEQ ID NO: 11299 - DNA, 301 bp, Artificial Sequence
  Nf2.1_Pole.2
  crRNA array
  misc_feature (148)..(157): n is a, c, g, or t
cttggctttatatatcttgtggaaaggacgaaacaccgtaatttctactaagtgtagatcggagtcatctgatagagattaatttctactaagtgtagatacatcgagacgaccaaactgtaatttctactaagtgtagatttttttnnnnnnnnnnaagcttggcgtggatccgatatcaactagatcttgagacaaatggcagtattcatccacaattttaaaagaaaaggggggattggggggtacagtgcaggggaaagaatagtagacataatagcaacagacatacaaactaaag

SEQ ID NO: 11300 - DNA, 301 bp, Artificial Sequence
  Nf2.1_Pole.3
  crRNA array
  misc_feature (148)..(157): n is a, c, g, or t
cttggctttatatatcttgtggaaaggacgaaacaccgtaatttctactaagtgtagatcggagtcatctgatagagattaatttctactaagtgtagatctgctgcaacgagtcgagaataatttctactaagtgtagatttttttnnnnnnnnnnaagcttggcgtggatccgatatcaactagatcttgagacaaatggcagtattcatccacaattttaaaagaaaaggggggattggggggtacagtgcaggggaaagaatagtagacataatagcaacagacatacaaactaaag

SEQ ID NO: 11301 - DNA, 301 bp, Artificial Sequence
  Nf2.1_Pole.4
  crRNA array
  misc_feature (148)..(157): n is a, c, g, or t
cttggctttatatatcttgtggaaaggacgaaacaccgtaatttctactaagtgtagatcggagtcatctgatagagattaatttctactaagtgtagatgggagatgatatagcggcagtaatttctactaagtgtagatttttttnnnnnnnnnnaagcttggcgtggatccgatatcaactagatcttgagacaaatggcagtattcatccacaattttaaaagaaaaggggggattggggggtacagtgcaggggaaagaatagtagacataatagcaacagacatacaaactaaag

SEQ ID NO: 11302 - DNA, 301 bp, Artificial Sequence
  Nf2.2_Pole.1
  crRNA array
  misc_feature (148)..(157): n is a, c, g, or t
cttggctttatatatcttgtggaaaggacgaaacaccgtaatttctactaagtgtagattgaggcgacggaaagctgactaatttctactaagtgtagatgcgcgctctccacgtgctcttaatttctactaagtgtagatttttttnnnnnnnnnnaagcttggcgtggatccgatatcaactagatcttgagacaaatggcagtattcatccacaattttaaaagaaaaggggggattggggggtacagtgcaggggaaagaatagtagacataatagcaacagacatacaaactaaag

SEQ ID NO: 11303 - DNA, 301 bp, Artificial Sequence
  Nf2.2_Pole.2
  crRNA array
  misc_feature (148)..(157): n is a, c, g, or t
cttggctttatatatcttgtggaaaggacgaaacaccgtaatttctactaagtgtagattgaggcgacggaaagctgactaatttctactaagtgtagatacatcgagacgaccaaactgtaatttctactaagtgtagatttttttnnnnnnnnnnaagcttggcgtggatccgatatcaactagatcttgagacaaatggcagtattcatccacaattttaaaagaaaaggggggattggggggtacagtgcaggggaaagaatagtagacataatagcaacagacatacaaactaaag

SEQ ID NO: 11304 - DNA, 301 bp, Artificial Sequence
  Nf2.2_Pole.3
  crRNA array
  misc_feature (148)..(157): n is a, c, g, or t
cttggctttatatatcttgtggaaaggacgaaacaccgtaatttctactaagtgtagattgaggcgacggaaagctgactaatttctactaagtgtagatctgctgcaacgagtcgagaataatttctactaagtgtagatttttttnnnnnnnnnnaagcttggcgtggatccgatatcaactagatcttgagacaaatggcagtattcatccacaattttaaaagaaaaggggggattggggggtacagtgcaggggaaagaatagtagacataatagcaacagacatacaaactaaag

SEQ ID NO: 11305 - DNA, 301 bp, Artificial Sequence
  Nf2.2_Pole.4
  crRNA array
  misc_feature (148)..(157): n is a, c, g, or t
cttggctttatatatcttgtggaaaggacgaaacaccgtaatttctactaagtgtagattgaggcgacggaaagctgactaatttctactaagtgtagatgggagatgatatagcggcagtaatttctactaagtgtagatttttttnnnnnnnnnnaagcttggcgtggatccgatatcaactagatcttgagacaaatggcagtattcatccacaattttaaaagaaaaggggggattggggggtacagtgcaggggaaagaatagtagacataatagcaacagacatacaaactaaag

SEQ ID NO: 11306 - DNA, 301 bp, Artificial Sequence
  Nf2.3_Pole.1
  crRNA array
  misc_feature (148)..(157): n is a, c, g, or t
cttggctttatatatcttgtggaaaggacgaaacaccgtaatttctactaagtgtagatcgtcgcctcataaataggtctaatttctactaagtgtagatgcgcgctctccacgtgctcttaatttctactaagtgtagatttttttnnnnnnnnnnaagcttggcgtggatccgatatcaactagatcttgagacaaatggcagtattcatccacaattttaaaagaaaaggggggattggggggtacagtgcaggggaaagaatagtagacataatagcaacagacatacaaactaaag

SEQ ID NO: 11307 - DNA, 301 bp, Artificial Sequence
  Nf2.3_Pole.2
  crRNA array
  misc_feature (148)..(157): n is a, c, g, or t
cttggctttatatatcttgtggaaaggacgaaacaccgtaatttctactaagtgtagatcgtcgcctcataaataggtctaatttctactaagtgtagatacatcgagacgaccaaactgtaatttctactaagtgtagatttttttnnnnnnnnnnaagcttggcgtggatccgatatcaactagatcttgagacaaatggcagtattcatccacaattttaaaagaaaaggggggattggggggtacagtgcaggggaaagaatagtagacataatagcaacagacatacaaactaaag

SEQ ID NO: 11308 - DNA, 301 bp, Artificial Sequence
  Nf2.3_Pole.3
  crRNA array
  misc_feature (148)..(157): n is a, c, g, or t
cttggctttatatatcttgtggaaaggacgaaacaccgtaatttctactaagtgtagatcgtcgcctcataaataggtctaatttctactaagtgtagatctgctgcaacgagtcgagaataatttctactaagtgtagatttttttnnnnnnnnnnaagcttggcgtggatccgatatcaactagatcttgagacaaatggcagtattcatccacaattttaaaagaaaaggggggattggggggtacagtgcaggggaaagaatagtagacataatagcaacagacatacaaactaaag

SEQ ID NO: 11309 - DNA, 301 bp, Artificial Sequence
  Nf2.3_Pole.4
  crRNA array
  misc_feature (148)..(157): n is a, c, g, or t
cttggctttatatatcttgtggaaaggacgaaacaccgtaatttctactaagtgtagatcgtcgcctcataaataggtctaatttctactaagtgtagatgggagatgatatagcggcagtaatttctactaagtgtagatttttttnnnnnnnnnnaagcttggcgtggatccgatatcaactagatcttgagacaaatggcagtattcatccacaattttaaaagaaaaggggggattggggggtacagtgcaggggaaagaatagtagacataatagcaacagacatacaaactaaag

SEQ ID NO: 11310 - DNA, 301 bp, Artificial Sequence
  Nf2.4_Pole.1
  crRNA array
  misc_feature (148)..(157): n is a, c, g, or t
cttggctttatatatcttgtggaaaggacgaaacaccgtaatttctactaagtgtagataaggcctcgatctccgtctttaatttctactaagtgtagatgcgcgctctccacgtgctcttaatttctactaagtgtagatttttttnnnnnnnnnnaagcttggcgtggatccgatatcaactagatcttgagacaaatggcagtattcatccacaattttaaaagaaaaggggggattggggggtacagtgcaggggaaagaatagtagacataatagcaacagacatacaaactaaag

SEQ ID NO: 11311 - DNA, 301 bp, Artificial Sequence
  Nf2.4_Pole.2
  crRNA array
  misc_feature (148)..(157): n is a, c, g, or t
cttggctttatatatcttgtggaaaggacgaaacaccgtaatttctactaagtgtagataaggcctcgatctccgtctttaatttctactaagtgtagatacatcgagacgaccaaactgtaatttctactaagtgtagatttttttnnnnnnnnnnaagcttggcgtggatccgatatcaactagatcttgagacaaatggcagtattcatccacaattttaaaagaaaaggggggattggggggtacagtgcaggggaaagaatagtagacataatagcaacagacatacaaactaaag

SEQ ID NO: 11312 - DNA, 301 bp, Artificial Sequence
  Nf2.4_Pole.3
  crRNA array
  misc_feature (148)..(157): n is a, c, g, or t
cttggctttatatatcttgtggaaaggacgaaacaccgtaatttctactaagtgtagataaggcctcgatctccgtctttaatttctactaagtgtagatctgctgcaacgagtcgagaataatttctactaagtgtagatttttttnnnnnnnnnnaagcttggcgtggatccgatatcaactagatcttgagacaaatggcagtattcatccacaattttaaaagaaaaggggggattggggggtacagtgcaggggaaagaatagtagacataatagcaacagacatacaaactaaag

SEQ ID NO: 11313 - DNA, 301 bp, Artificial Sequence
  Nf2.4_Pole.4
  crRNA array
  misc_feature (148)..(157): n is a, c, g, or t
cttggctttatatatcttgtggaaaggacgaaacaccgtaatttctactaagtgtagataaggcctcgatctccgtctttaatttctactaagtgtagatgggagatgatatagcggcagtaatttctactaagtgtagatttttttnnnnnnnnnnaagcttggcgtggatccgatatcaactagatcttgagacaaatggcagtattcatccacaattttaaaagaaaaggggggattggggggtacagtgcaggggaaagaatagtagacataatagcaacagacatacaaactaaag

SEQ ID NO: 11314 - DNA, 301 bp, Artificial Sequence
  Nf2.1_Notch1.1
  crRNA array
  misc_feature (148)..(157): n is a, c, g, or t
cttggctttatatatcttgtggaaaggacgaaacaccgtaatttctactaagtgtagatcggagtcatctgatagagattaatttctactaagtgtagattgggccaacgatgccaggactaatttctactaagtgtagatttttttnnnnnnnnnnaagcttggcgtggatccgatatcaactagatcttgagacaaatggcagtattcatccacaattttaaaagaaaaggggggattggggggtacagtgcaggggaaagaatagtagacataatagcaacagacatacaaactaaag

SEQ ID NO: 11315 - DNA, 301 bp, Artificial Sequence
  Nf2.1_Notch1.2
  crRNA array
  misc_feature (148)..(157): n is a, c, g, or t
cttggctttatatatcttgtggaaaggacgaaacaccgtaatttctactaagtgtagatcggagtcatctgatagagattaatttctactaagtgtagatgtcgccccagcatcctgaagtaatttctactaagtgtagatttttttnnnnnnnnnnaagcttggcgtggatccgatatcaactagatcttgagacaaatggcagtattcatccacaattttaaaagaaaaggggggattggggggtacagtgcaggggaaagaatagtagacataatagcaacagacatacaaactaaag

SEQ ID NO: 11316 - DNA, 301 bp, Artificial Sequence
  Nf2.1_Notch1.3
  crRNA array
  misc_feature (148)..(157): n is a, c, g, or t
cttggctttatatatcttgtggaaaggacgaaacaccgtaatttctactaagtgtagatcggagtcatctgatagagattaatttctactaagtgtagatagccacccccgccacgcctctaatttctactaagtgtagatttttttnnnnnnnnnnaagcttggcgtggatccgatatcaactagatcttgagacaaatggcagtattcatccacaattttaaaagaaaaggggggattggggggtacagtgcaggggaaagaatagtagacataatagcaacagacatacaaactaaag

SEQ ID NO: 11317 - DNA, 301 bp, Artificial Sequence
  Nf2.1_Notch1.4
  crRNA array
  misc_feature (148)..(157): n is a, c, g, or t
cttggctttatatatcttgtggaaaggacgaaacaccgtaatttctactaagtgtagatcggagtcatctgatagagattaatttctactaagtgtagataaagtgtcagaggccagcaataatttctactaagtgtagatttttttnnnnnnnnnnaagcttggcgtggatccgatatcaactagatcttgagacaaatggcagtattcatccacaattttaaaagaaaaggggggattggggggtacagtgcaggggaaagaatagtagacataatagcaacagacatacaaactaaag

SEQ ID NO: 11318 - DNA, 301 bp, Artificial Sequence
  Nf2.2_Notch1.1
  crRNA array
  misc_feature (148)..(157): n is a, c, g, or t
cttggctttatatatcttgtggaaaggacgaaacaccgtaatttctactaagtgtagattgaggcgacggaaagctgactaatttctactaagtgtagattgggccaacgatgccaggactaatttctactaagtgtagatttttttnnnnnnnnnnaagcttggcgtggatccgatatcaactagatcttgagacaaatggcagtattcatccacaattttaaaagaaaaggggggattggggggtacagtgcaggggaaagaatagtagacataatagcaacagacatacaaactaaag

SEQ ID NO: 11319 - DNA, 301 bp, Artificial Sequence
  Nf2.2_Notch1.2
  crRNA array
  misc_feature (148)..(157): n is a, c, g, or t
cttggctttatatatcttgtggaaaggacgaaacaccgtaatttctactaagtgtagattgaggcgacggaaagctgactaatttctactaagtgtagatgtcgccccagcatcctgaagtaatttctactaagtgtagatttttttnnnnnnnnnnaagcttggcgtggatccgatatcaactagatcttgagacaaatggcagtattcatccacaattttaaaagaaaaggggggattggggggtacagtgcaggggaaagaatagtagacataatagcaacagacatacaaactaaag

SEQ ID NO: 11320 - DNA, 301 bp, Artificial Sequence
  Nf2.2_Notch1.3
  crRNA array
  misc_feature (148)..(157): n is a, c, g, or t
cttggctttatatatcttgtggaaaggacgaaacaccgtaatttctactaagtgtagattgaggcgacggaaagctgactaatttctactaagtgtagatagccacccccgccacgcctctaatttctactaagtgtagatttttttnnnnnnnnnnaagcttggcgtggatccgatatcaactagatcttgagacaaatggcagtattcatccacaattttaaaagaaaaggggggattggggggtacagtgcaggggaaagaatagtagacataatagcaacagacatacaaactaaag

SEQ ID NO: 11321 - DNA, 301 bp, Artificial Sequence
  Nf2.2_Notch1.4
  crRNA array
  misc_feature (148)..(157): n is a, c, g, or t
cttggctttatatatcttgtggaaaggacgaaacaccgtaatttctactaagtgtagattgaggcgacggaaagctgactaatttctactaagtgtagataaagtgtcagaggccagcaataatttctactaagtgtagatttttttnnnnnnnnnnaagcttggcgtggatccgatatcaactagatcttgagacaaatggcagtattcatccacaattttaaaagaaaaggggggattggggggtacagtgcaggggaaagaatagtagacataatagcaacagacatacaaactaaag

SEQ ID NO: 11322 - DNA, 301 bp, Artificial Sequence
  Nf2.3_Notch1.1
  crRNA array
  misc_feature (148)..(157): n is a, c, g, or t
cttggctttatatatcttgtggaaaggacgaaacaccgtaatttctactaagtgtagatcgtcgcctcataaataggtctaatttctactaagtgtagattgggccaacgatgccaggactaatttctactaagtgtagatttttttnnnnnnnnnnaagcttggcgtggatccgatatcaactagatcttgagacaaatggcagtattcatccacaattttaaaagaaaaggggggattggggggtacagtgcaggggaaagaatagtagacataatagcaacagacatacaaactaaag

SEQ ID NO: 11323 - DNA, 301 bp, Artificial Sequence
  Nf2.3_Notch1.2
  crRNA array
  misc_feature (148)..(157): n is a, c, g, or t
cttggctttatatatcttgtggaaaggacgaaacaccgtaatttctactaagtgtagatcgtcgcctcataaataggtctaatttctactaagtgtagatgtcgccccagcatcctgaagtaatttctactaagtgtagatttttttnnnnnnnnnnaagcttggcgtggatccgatatcaactagatcttgagacaaatggcagtattcatccacaattttaaaagaaaaggggggattggggggtacagtgcaggggaaagaatagtagacataatagcaacagacatacaaactaaag

SEQ ID NO: 11324 - DNA, 301 bp, Artificial Sequence
  Nf2.3_Notch1.3
  crRNA array
  misc_feature (148)..(157): n is a, c, g, or t
cttggctttatatatcttgtggaaaggacgaaacaccgtaatttctactaagtgtagatcgtcgcctcataaataggtctaatttctactaagtgtagatagccacccccgccacgcctctaatttctactaagtgtagatttttttnnnnnnnnnnaagcttggcgtggatccgatatcaactagatcttgagacaaatggcagtattcatccacaattttaaaagaaaaggggggattggggggtacagtgcaggggaaagaatagtagacataatagcaacagacatacaaactaaag

SEQ ID NO: 11325 - DNA, 301 bp, Artificial Sequence
  Nf2.3_Notch1.4
  crRNA array
  misc_feature (148)..(157): n is a, c, g, or t
cttggctttatatatcttgtggaaaggacgaaacaccgtaatttctactaagtgtagatcgtcgcctcataaataggtctaatttctactaagtgtagataaagtgtcagaggccagcaataatttctactaagtgtagatttttttnnnnnnnnnnaagcttggcgtggatccgatatcaactagatcttgagacaaatggcagtattcatccacaattttaaaagaaaaggggggattggggggtacagtgcaggggaaagaatagtagacataatagcaacagacatacaaactaaag

SEQ ID NO: 11326 - DNA, 301 bp, Artificial Sequence
  Nf2.4_Notch1.1
  crRNA array
  misc_feature (148)..(157): n is a, c, g, or t
cttggctttatatatcttgtggaaaggacgaaacaccgtaatttctactaagtgtagataaggcctcgatctccgtctttaatttctactaagtgtagattgggccaacgatgccaggactaatttctactaagtgtagatttttttnnnnnnnnnnaagcttggcgtggatccgatatcaactagatcttgagacaaatggcagtattcatccacaattttaaaagaaaaggggggattggggggtacagtgcaggggaaagaatagtagacataatagcaacagacatacaaactaaag

SEQ ID NO: 11327 - DNA, 301 bp, Artificial Sequence
  Nf2.4_Notch1.2
  crRNA array
  misc_feature (148)..(157): n is a, c, g, or t
cttggctttatatatcttgtggaaaggacgaaacaccgtaatttctactaagtgtagataaggcctcgatctccgtctttaatttctactaagtgtagatgtcgccccagcatcctgaagtaatttctactaagtgtagatttttttnnnnnnnnnnaagcttggcgtggatccgatatcaactagatcttgagacaaatggcagtattcatccacaattttaaaagaaaaggggggattggggggtacagtgcaggggaaagaatagtagacataatagcaacagacatacaaactaaag

SEQ ID NO: 11328 - DNA, 301 bp, Artificial Sequence
  Nf2.4_Notch1.3
  crRNA array
  misc_feature (148)..(157): n is a, c, g, or t
cttggctttatatatcttgtggaaaggacgaaacaccgtaatttctactaagtgtagataaggcctcgatctccgtctttaatttctactaagtgtagatagccacccccgccacgcctctaatttctactaagtgtagatttttttnnnnnnnnnnaagcttggcgtggatccgatatcaactagatcttgagacaaatggcagtattcatccacaattttaaaagaaaaggggggattggggggtacagtgcaggggaaagaatagtagacataatagcaacagacatacaaactaaag

SEQ ID NO: 11329 - DNA, 301 bp, Artificial Sequence
  Nf2.4_Notch1.4
  crRNA array
  misc_feature (148)..(157): n is a, c, g, or t
cttggctttatatatcttgtggaaaggacgaaacaccgtaatttctactaagtgtagataaggcctcgatctccgtctttaatttctactaagtgtagataaagtgtcagaggccagcaataatttctactaagtgtagatttttttnnnnnnnnnnaagcttggcgtggatccgatatcaactagatcttgagacaaatggcagtattcatccacaattttaaaagaaaaggggggattggggggtacagtgcaggggaaagaatagtagacataatagcaacagacatacaaactaaag

SEQ ID NO: 11330 - DNA, 301 bp, Artificial Sequence
  Nf2.1_Arid1a.1
  crRNA array
  misc_feature (148)..(157): n is a, c, g, or t
cttggctttatatatcttgtggaaaggacgaaacaccgtaatttctactaagtgtagatcggagtcatctgatagagattaatttctactaagtgtagatcccgcgctcggccgctgccgtaatttctactaagtgtagatttttttnnnnnnnnnnaagcttggcgtggatccgatatcaactagatcttgagacaaatggcagtattcatccacaattttaaaagaaaaggggggattggggggtacagtgcaggggaaagaatagtagacataatagcaacagacatacaaactaaag

SEQ ID NO: 11331 - DNA, 301 bp, Artificial Sequence
  Nf2.1_Arid1a.2
  crRNA array
  misc_feature (148)..(157): n is a, c, g, or t
cttggctttatatatcttgtggaaaggacgaaacaccgtaatttctactaagtgtagatcggagtcatctgatagagattaatttctactaagtgtagatagtgcaagatcgagcgtggataatttctactaagtgtagatttttttnnnnnnnnnnaagcttggcgtggatccgatatcaactagatcttgagacaaatggcagtattcatccacaattttaaaagaaaaggggggattggggggtacagtgcaggggaaagaatagtagacataatagcaacagacatacaaactaaag

SEQ ID NO: 11332 - DNA, 301 bp, Artificial Sequence
  Nf2.1_Arid1a.3
  crRNA array
  misc_feature (148)..(157): n is a, c, g, or t
cttggctttatatatcttgtggaaaggacgaaacaccgtaatttctactaagtgtagatcggagtcatctgatagagattaatttctactaagtgtagatagtgagctggcagcactgcttaatttctactaagtgtagatttttttnnnnnnnnnnaagcttggcgtggatccgatatcaactagatcttgagacaaatggcagtattcatccacaattttaaaagaaaaggggggattggggggtacagtgcaggggaaagaatagtagacataatagcaacagacatacaaactaaag

SEQ ID NO: 11333 - DNA, 301 bp, Artificial Sequence
  Nf2.1_Arid1a.4
  crRNA array
  misc_feature (148)..(157): n is a, c, g, or t
cttggctttatatatcttgtggaaaggacgaaacaccgtaatttctactaagtgtagatcggagtcatctgatagagattaatttctactaagtgtagatgccgagaccgagtctctgcataatttctactaagtgtagatttttttnnnnnnnnnnaagcttggcgtggatccgatatcaactagatcttgagacaaatggcagtattcatccacaattttaaaagaaaaggggggattggggggtacagtgcaggggaaagaatagtagacataatagcaacagacatacaaactaaag

SEQ ID NO: 11334 - DNA, 301 bp, Artificial Sequence
  Nf2.2_Arid1a.1
  crRNA array
  misc_feature (148)..(157): n is a, c, g, or t
cttggctttatatatcttgtggaaaggacgaaacaccgtaatttctactaagtgtagattgaggcgacggaaagctgactaatttctactaagtgtagatcccgcgctcggccgctgccgtaatttctactaagtgtagatttttttnnnnnnnnnnaagcttggcgtggatccgatatcaactagatcttgagacaaatggcagtattcatccacaattttaaaagaaaaggggggattggggggtacagtgcaggggaaagaatagtagacataatagcaacagacatacaaactaaag

SEQ ID NO: 11335 - DNA, 301 bp, Artificial Sequence
  Nf2.2_Arid1a.2
  crRNA array
  misc_feature (148)..(157): n is a, c, g, or t
cttggctttatatatcttgtggaaaggacgaaacaccgtaatttctactaagtgtagattgaggcgacggaaagctgactaatttctactaagtgtagatagtgcaagatcgagcgtggataatttctactaagtgtagatttttttnnnnnnnnnnaagcttggcgtggatccgatatcaactagatcttgagacaaatggcagtattcatccacaattttaaaagaaaaggggggattggggggtacagtgcaggggaaagaatagtagacataatagcaacagacatacaaactaaag

SEQ ID NO: 11336 - DNA, 301 bp, Artificial Sequence
  Nf2.2_Arid1a.3
  crRNA array
  misc_feature (148)..(157): n is a, c, g, or t
cttggctttatatatcttgtggaaaggacgaaacaccgtaatttctactaagtgtagattgaggcgacggaaagctgactaatttctactaagtgtagatagtgagctggcagcactgcttaatttctactaagtgtagatttttttnnnnnnnnnnaagcttggcgtggatccgatatcaactagatcttgagacaaatggcagtattcatccacaattttaaaagaaaaggggggattggggggtacagtgcaggggaaagaatagtagacataatagcaacagacatacaaactaaag

SEQ ID NO: 11337 - DNA, 301 bp, Artificial Sequence
  Nf2.2_Arid1a.4
  crRNA array
  misc_feature (148)..(157): n is a, c, g, or t
cttggctttatatatcttgtggaaaggacgaaacaccgtaatttctactaagtgtagattgaggcgacggaaagctgactaatttctactaagtgtagatgccgagaccgagtctctgcataatttctactaagtgtagatttttttnnnnnnnnnnaagcttggcgtggatccgatatcaactagatcttgagacaaatggcagtattcatccacaattttaaaagaaaaggggggattggggggtacagtgcaggggaaagaatagtagacataatagcaacagacatacaaactaaag

SEQ ID NO: 11338 - DNA, 301 bp, Artificial Sequence
  Nf2.3_Arid1a.1
  crRNA array
  misc_feature (148)..(157): n is a, c, g, or t
cttggctttatatatcttgtggaaaggacgaaacaccgtaatttctactaagtgtagatcgtcgcctcataaataggtctaatttctactaagtgtagatcccgcgctcggccgctgccgtaatttctactaagtgtagatttttttnnnnnnnnnnaagcttggcgtggatccgatatcaactagatcttgagacaaatggcagtattcatccacaattttaaaagaaaaggggggattggggggtacagtgcaggggaaagaatagtagacataatagcaacagacatacaaactaaag

SEQ ID NO: 11339 - DNA, 301 bp, Artificial Sequence
  Nf2.3_Arid1a.2
  crRNA array
  misc_feature (148)..(157): n is a, c, g, or t
cttggctttatatatcttgtggaaaggacgaaacaccgtaatttctactaagtgtagatcgtcgcctcataaataggtctaatttctactaagtgtagatagtgcaagatcgagcgtggataatttctactaagtgtagatttttttnnnnnnnnnnaagcttggcgtggatccgatatcaactagatcttgagacaaatggcagtattcatccacaattttaaaagaaaaggggggattggggggtacagtgcaggggaaagaatagtagacataatagcaacagacatacaaactaaag

SEQ ID NO: 11340 - DNA, 301 bp, Artificial Sequence
  Nf2.3_Arid1a.3
  crRNA array
  misc_feature (148)..(157): n is a, c, g, or t
cttggctttatatatcttgtggaaaggacgaaacaccgtaatttctactaagtgtagatcgtcgcctcataaataggtctaatttctactaagtgtagatagtgagctggcagcactgcttaatttctactaagtgtagatttttttnnnnnnnnnnaagcttggcgtggatccgatatcaactagatcttgagacaaatggcagtattcatccacaattttaaaagaaaaggggggattggggggtacagtgcaggggaaagaatagtagacataatagcaacagacatacaaactaaag

SEQ ID NO: 11341 - DNA, 301 bp, Artificial Sequence
  Nf2.3_Arid1a.4
  crRNA array
  misc_feature (148)..(157): n is a, c, g, or t
cttggctttatatatcttgtggaaaggacgaaacaccgtaatttctactaagtgtagatcgtcgcctcataaataggtctaatttctactaagtgtagatgccgagaccgagtctctgcataatttctactaagtgtagatttttttnnnnnnnnnnaagcttggcgtggatccgatatcaactagatcttgagacaaatggcagtattcatccacaattttaaaagaaaaggggggattggggggtacagtgcaggggaaagaatagtagacataatagcaacagacatacaaactaaag

SEQ ID NO: 11342 - DNA, 301 bp, Artificial Sequence
  Nf2.4_Arid1a.1
  crRNA array
  misc_feature (148)..(157): n is a, c, g, or t
cttggctttatatatcttgtggaaaggacgaaacaccgtaatttctactaagtgtagataaggcctcgatctccgtctttaatttctactaagtgtagatcccgcgctcggccgctgccgtaatttctactaagtgtagatttttttnnnnnnnnnnaagcttggcgtggatccgatatcaactagatcttgagacaaatggcagtattcatccacaattttaaaagaaaaggggggattggggggtacagtgcaggggaaagaatagtagacataatagcaacagacatacaaactaaag

SEQ ID NO: 11343 - DNA, 301 bp, Artificial Sequence
  Nf2.4_Arid1a.2
  crRNA array
  misc_feature (148)..(157): n is a, c, g, or t
cttggctttatatatcttgtggaaaggacgaaacaccgtaatttctactaagtgtagataaggcctcgatctccgtctttaatttctactaagtgtagatagtgcaagatcgagcgtggataatttctactaagtgtagatttttttnnnnnnnnnnaagcttggcgtggatccgatatcaactagatcttgagacaaatggcagtattcatccacaattttaaaagaaaaggggggattggggggtacagtgcaggggaaagaatagtagacataatagcaacagacatacaaactaaag

SEQ ID NO: 11344 - DNA, 301 bp, Artificial Sequence
  Nf2.4_Arid1a.3
  crRNA array
  misc_feature (148)..(157): n is a, c, g, or t
cttggctttatatatcttgtggaaaggacgaaacaccgtaatttctactaagtgtagataaggcctcgatctccgtctttaatttctactaagtgtagatagtgagctggcagcactgcttaatttctactaagtgtagatttttttnnnnnnnnnnaagcttggcgtggatccgatatcaactagatcttgagacaaatggcagtattcatccacaattttaaaagaaaaggggggattggggggtacagtgcaggggaaagaatagtagacataatagcaacagacatacaaactaaag

SEQ ID NO: 11345 - DNA, 301 bp, Artificial Sequence
  Nf2.4_Arid1a.4
  crRNA array
  misc_feature (148)..(157): n is a, c, g, or t
cttggctttatatatcttgtggaaaggacgaaacaccgtaatttctactaagtgtagataaggcctcgatctccgtctttaatttctactaagtgtagatgccgagaccgagtctctgcataatttctactaagtgtagatttttttnnnnnnnnnnaagcttggcgtggatccgatatcaactagatcttgagacaaatggcagtattcatccacaattttaaaagaaaaggggggattggggggtacagtgcaggggaaagaatagtagacataatagcaacagacatacaaactaaag

SEQ ID NO: 11346 - DNA, 301 bp, Artificial Sequence
  Nf2.1_Trim72.1
  crRNA array
  misc_feature (148)..(157): n is a, c, g, or t
cttggctttatatatcttgtggaaaggacgaaacaccgtaatttctactaagtgtagatcggagtcatctgatagagattaatttctactaagtgtagataccccagctctgcgcacccgtaatttctactaagtgtagatttttttnnnnnnnnnnaagcttggcgtggatccgatatcaactagatcttgagacaaatggcagtattcatccacaattttaaaagaaaaggggggattggggggtacagtgcaggggaaagaatagtagacataatagcaacagacatacaaactaaag

SEQ ID NO: 11347 - DNA, 301 bp, Artificial Sequence
  Nf2.1_Trim72.2
  crRNA array
  misc_feature (148)..(157): n is a, c, g, or t
cttggctttatatatcttgtggaaaggacgaaacaccgtaatttctactaagtgtagatcggagtcatctgatagagattaatttctactaagtgtagatcacgagcgtctgcccgggcctaatttctactaagtgtagatttttttnnnnnnnnnnaagcttggcgtggatccgatatcaactagatcttgagacaaatggcagtattcatccacaattttaaaagaaaaggggggattggggggtacagtgcaggggaaagaatagtagacataatagcaacagacatacaaactaaag

SEQ ID NO: 11348 - DNA, 301 bp, Artificial Sequence
  Nf2.1_Trim72.3
  crRNA array
  misc_feature (148)..(157): n is a, c, g, or t
cttggctttatatatcttgtggaaaggacgaaacaccgtaatttctactaagtgtagatcggagtcatctgatagagattaatttctactaagtgtagatacgtgtgctggcacgacaagtaatttctactaagtgtagatttttttnnnnnnnnnnaagcttggcgtggatccgatatcaactagatcttgagacaaatggcagtattcatccacaattttaaaagaaaaggggggattggggggtacagtgcaggggaaagaatagtagacataatagcaacagacatacaaactaaag

SEQ ID NO: 11349 - DNA, 301 bp, Artificial Sequence
  Nf2.1_Trim72.4
  crRNA array
  misc_feature (148)..(157): n is a, c, g, or t
cttggctttatatatcttgtggaaaggacgaaacaccgtaatttctactaagtgtagatcggagtcatctgatagagattaatttctactaagtgtagattgccgtgcctgcctgatccgtaatttctactaagtgtagatttttttnnnnnnnnnnaagcttggcgtggatccgatatcaactagatcttgagacaaatggcagtattcatccacaattttaaaagaaaaggggggattggggggtacagtgcaggggaaagaatagtagacataatagcaacagacatacaaactaaag

SEQ ID NO: 11350 - DNA, 301 bp, Artificial Sequence
  Nf2.2_Trim72.1
  crRNA array
  misc_feature (148)..(157): n is a, c, g, or t
cttggctttatatatcttgtggaaaggacgaaacaccgtaatttctactaagtgtagattgaggcgacggaaagctgactaatttctactaagtgtagataccccagctctgcgcacccgtaatttctactaagtgtagatttttttnnnnnnnnnnaagcttggcgtggatccgatatcaactagatcttgagacaaatggcagtattcatccacaattttaaaagaaaaggggggattggggggtacagtgcaggggaaagaatagtagacataatagcaacagacatacaaactaaag

SEQ ID NO: 11351 - DNA, 301 bp, Artificial Sequence
  Nf2.2_Trim72.2
  crRNA array
  misc_feature (148)..(157): n is a, c, g, or t
cttggctttatatatcttgtggaaaggacgaaacaccgtaatttctactaagtgtagattgaggcgacggaaagctgactaatttctactaagtgtagatcacgagcgtctgcccgggcctaatttctactaagtgtagatttttttnnnnnnnnnnaagcttggcgtggatccgatatcaactagatcttgagacaaatggcagtattcatccacaattttaaaagaaaaggggggattggggggtacagtgcaggggaaagaatagtagacataatagcaacagacatacaaactaaag

SEQ ID NO: 11352 - DNA, 301 bp, Artificial Sequence
  Nf2.2_Trim72.3
  crRNA array
  misc_feature (148)..(157): n is a, c, g, or t
cttggctttatatatcttgtggaaaggacgaaacaccgtaatttctactaagtgtagattgaggcgacggaaagctgactaatttctactaagtgtagatacgtgtgctggcacgacaagtaatttctactaagtgtagatttttttnnnnnnnnnnaagcttggcgtggatccgatatcaactagatcttgagacaaatggcagtattcatccacaattttaaaagaaaaggggggattggggggtacagtgcaggggaaagaatagtagacataatagcaacagacatacaaactaaag

SEQ ID NO: 11353 - DNA, 301 bp, Artificial Sequence
  Nf2.2_Trim72.4
  crRNA array
  misc_feature (148)..(157): n is a, c, g, or t
cttggctttatatatcttgtggaaaggacgaaacaccgtaatttctactaagtgtagattgaggcgacggaaagctgactaatttctactaagtgtagattgccgtgcctgcctgatccgtaatttctactaagtgtagatttttttnnnnnnnnnnaagcttggcgtggatccgatatcaactagatcttgagacaaatggcagtattcatccacaattttaaaagaaaaggggggattggggggtacagtgcaggggaaagaatagtagacataatagcaacagacatacaaactaaag

SEQ ID NO: 11354 - DNA, 301 bp, Artificial Sequence
  Nf2.3_Trim72.1
  crRNA array
  misc_feature (148)..(157): n is a, c, g, or t
cttggctttatatatcttgtggaaaggacgaaacaccgtaatttctactaagtgtagatcgtcgcctcataaataggtctaatttctactaagtgtagataccccagctctgcgcacccgtaatttctactaagtgtagatttttttnnnnnnnnnnaagcttggcgtggatccgatatcaactagatcttgagacaaatggcagtattcatccacaattttaaaagaaaaggggggattggggggtacagtgcaggggaaagaatagtagacataatagcaacagacatacaaactaaag

SEQ ID NO: 11355 - DNA, 301 bp, Artificial Sequence
  Nf2.3_Trim72.2
  crRNA array
  misc_feature (148)..(157): n is a, c, g, or t
cttggctttatatatcttgtggaaaggacgaaacaccgtaatttctactaagtgtagatcgtcgcctcataaataggtctaatttctactaagtgtagatcacgagcgtctgcccgggcctaatttctactaagtgtagatttttttnnnnnnnnnnaagcttggcgtggatccgatatcaactagatcttgagacaaatggcagtattcatccacaattttaaaagaaaaggggggattggggggtacagtgcaggggaaagaatagtagacataatagcaacagacatacaaactaaag

SEQ ID NO: 11356 - DNA, 301 bp, Artificial Sequence
  Nf2.3_Trim72.3
  crRNA array
  misc_feature (148)..(157): n is a, c, g, or t
cttggctttatatatcttgtggaaaggacgaaacaccgtaatttctactaagtgtagatcgtcgcctcataaataggtctaatttctactaagtgtagatacgtgtgctggcacgacaagtaatttctactaagtgtagatttttttnnnnnnnnnnaagcttggcgtggatccgatatcaactagatcttgagacaaatggcagtattcatccacaattttaaaagaaaaggggggattggggggtacagtgcaggggaaagaatagtagacataatagcaacagacatacaaactaaag

SEQ ID NO: 11357 - DNA, 301 bp, Artificial Sequence
  Nf2.3_Trim72.4
  crRNA array
  misc_feature (148)..(157): n is a, c, g, or t
cttggctttatatatcttgtggaaaggacgaaacaccgtaatttctactaagtgtagatcgtcgcctcataaataggtctaatttctactaagtgtagattgccgtgcctgcctgatccgtaatttctactaagtgtagatttttttnnnnnnnnnnaagcttggcgtggatccgatatcaactagatcttgagacaaatggcagtattcatccacaattttaaaagaaaaggggggattggggggtacagtgcaggggaaagaatagtagacataatagcaacagacatacaaactaaag

SEQ ID NO: 11358 - DNA, 301 bp, Artificial Sequence
  Nf2.4_Trim72.1
  crRNA array
  misc_feature (148)..(157): n is a, c, g, or t
cttggctttatatatcttgtggaaaggacgaaacaccgtaatttctactaagtgtagataaggcctcgatctccgtctttaatttctactaagtgtagataccccagctctgcgcacccgtaatttctactaagtgtagatttttttnnnnnnnnnnaagcttggcgtggatccgatatcaactagatcttgagacaaatggcagtattcatccacaattttaaaagaaaaggggggattggggggtacagtgcaggggaaagaatagtagacataatagcaacagacatacaaactaaag

SEQ ID NO: 11359 - DNA, 301 bp, Artificial Sequence
  Nf2.4_Trim72.2
  crRNA array
  misc_feature (148)..(157): n is a, c, g, or t
cttggctttatatatcttgtggaaaggacgaaacaccgtaatttctactaagtgtagataaggcctcgatctccgtctttaatttctactaagtgtagatcacgagcgtctgcccgggcctaatttctactaagtgtagatttttttnnnnnnnnnnaagcttggcgtggatccgatatcaactagatcttgagacaaatggcagtattcatccacaattttaaaagaaaaggggggattggggggtacagtgcaggggaaagaatagtagacataatagcaacagacatacaaactaaag

SEQ ID NO: 11360 - DNA, 301 bp, Artificial Sequence
  Nf2.4_Trim72.3
  crRNA array
  misc_feature (148)..(157): n is a, c, g, or t
cttggctttatatatcttgtggaaaggacgaaacaccgtaatttctactaagtgtagataaggcctcgatctccgtctttaatttctactaagtgtagatacgtgtgctggcacgacaagtaatttctactaagtgtagatttttttnnnnnnnnnnaagcttggcgtggatccgatatcaactagatcttgagacaaatggcagtattcatccacaattttaaaagaaaaggggggattggggggtacagtgcaggggaaagaatagtagacataatagcaacagacatacaaactaaag

SEQ ID NO: 11361 - DNA, 301 bp, Artificial Sequence
  Nf2.4_Trim72.4
  crRNA array
  misc_feature (148)..(157): n is a, c, g, or t
cttggctttatatatcttgtggaaaggacgaaacaccgtaatttctactaagtgtagataaggcctcgatctccgtctttaatttctactaagtgtagattgccgtgcctgcctgatccgtaatttctactaagtgtagatttttttnnnnnnnnnnaagcttggcgtggatccgatatcaactagatcttgagacaaatggcagtattcatccacaattttaaaagaaaaggggggattggggggtacagtgcaggggaaagaatagtagacataatagcaacagacatacaaactaaag

SEQ ID NO: 11362 - DNA, 301 bp, Artificial Sequence
  Nf2.1_Zfhx3.1
  crRNA array
  misc_feature (148)..(157): n is a, c, g, or t
cttggctttatatatcttgtggaaaggacgaaacaccgtaatttctactaagtgtagatcggagtcatctgatagagattaatttctactaagtgtagatcgctgcgaggtgtgtaactataatttctactaagtgtagatttttttnnnnnnnnnnaagcttggcgtggatccgatatcaactagatcttgagacaaatggcagtattcatccacaattttaaaagaaaaggggggattggggggtacagtgcaggggaaagaatagtagacataatagcaacagacatacaaactaaag

SEQ ID NO: 11363 - DNA, 301 bp, Artificial Sequence
  Nf2.1_Zfhx3.2
  crRNA array
  misc_feature (148)..(157): n is a, c, g, or t
cttggctttatatatcttgtggaaaggacgaaacaccgtaatttctactaagtgtagatcggagtcatctgatagagattaatttctactaagtgtagatacgtgcgacacaaaagcaactaatttctactaagtgtagatttttttnnnnnnnnnnaagcttggcgtggatccgatatcaactagatcttgagacaaatggcagtattcatccacaattttaaaagaaaaggggggattggggggtacagtgcaggggaaagaatagtagacataatagcaacagacatacaaactaaag

SEQ ID NO: 11364 - DNA, 301 bp, Artificial Sequence
  Nf2.1_Zfhx3.3
  crRNA array
  misc_feature (148)..(157): n is a, c, g, or t
cttggctttatatatcttgtggaaaggacgaaacaccgtaatttctactaagtgtagatcggagtcatctgatagagattaatttctactaagtgtagattgctctacggcaagaggaaataatttctactaagtgtagatttttttnnnnnnnnnnaagcttggcgtggatccgatatcaactagatcttgagacaaatggcagtattcatccacaattttaaaagaaaaggggggattggggggtacagtgcaggggaaagaatagtagacataatagcaacagacatacaaactaaag

SEQ ID NO: 11365 - DNA, 301 bp, Artificial Sequence
  Nf2.1_Zfhx3.4
  crRNA array
  misc_feature (148)..(157): n is a, c, g, or t
cttggctttatatatcttgtggaaaggacgaaacaccgtaatttctactaagtgtagatcggagtcatctgatagagattaatttctactaagtgtagatagtgagcggcagactgcgagtaatttctactaagtgtagatttttttnnnnnnnnnnaagcttggcgtggatccgatatcaactagatcttgagacaaatggcagtattcatccacaattttaaaagaaaaggggggattggggggtacagtgcaggggaaagaatagtagacataatagcaacagacatacaaactaaag

SEQ ID NO: 11366 - DNA, 301 bp, Artificial Sequence
  Nf2.2_Zfhx3.1
  crRNA array
  misc_feature (148)..(157): n is a, c, g, or t
cttggctttatatatcttgtggaaaggacgaaacaccgtaatttctactaagtgtagattgaggcgacggaaagctgactaatttctactaagtgtagatcgctgcgaggtgtgtaactataatttctactaagtgtagatttttttnnnnnnnnnnaagcttggcgtggatccgatatcaactagatcttgagacaaatggcagtattcatccacaattttaaaagaaaaggggggattggggggtacagtgcaggggaaagaatagtagacataatagcaacagacatacaaactaaag

SEQ ID NO: 11367 - DNA, 301 bp, Artificial Sequence
  Nf2.2_Zfhx3.2
  crRNA array
  misc_feature (148)..(157): n is a, c, g, or t
cttggctttatatatcttgtggaaaggacgaaacaccgtaatttctactaagtgtagattgaggcgacggaaagctgactaatttctactaagtgtagatacgtgcgacacaaaagcaactaatttctactaagtgtagatttttttnnnnnnnnnnaagcttggcgtggatccgatatcaactagatcttgagacaaatggcagtattcatccacaattttaaaagaaaaggggggattggggggtacagtgcaggggaaagaatagtagacataatagcaacagacatacaaactaaag

SEQ ID NO: 11368 - DNA, 301 bp, Artificial Sequence
  Nf2.2_Zfhx3.3
  crRNA array
  misc_feature (148)..(157): n is a, c, g, or t
cttggctttatatatcttgtggaaaggacgaaacaccgtaatttctactaagtgtagattgaggcgacggaaagctgactaatttctactaagtgtagattgctctacggcaagaggaaataatttctactaagtgtagatttttttnnnnnnnnnnaagcttggcgtggatccgatatcaactagatcttgagacaaatggcagtattcatccacaattttaaaagaaaaggggggattggggggtacagtgcaggggaaagaatagtagacataatagcaacagacatacaaactaaag

SEQ ID NO: 11369 - DNA, 301 bp, Artificial Sequence
  Nf2.2_Zfhx3.4
  crRNA array
  misc_feature (148)..(157): n is a, c, g, or t
cttggctttatatatcttgtggaaaggacgaaacaccgtaatttctactaagtgtagattgaggcgacggaaagctgactaatttctactaagtgtagatagtgagcggcagactgcgagtaatttctactaagtgtagatttttttnnnnnnnnnnaagcttggcgtggatccgatatcaactagatcttgagacaaatggcagtattcatccacaattttaaaagaaaaggggggattggggggtacagtgcaggggaaagaatagtagacataatagcaacagacatacaaactaaag

SEQ ID NO: 11370 - DNA, 301 bp, Artificial Sequence
  Nf2.3_Zfhx3.1
  crRNA array
  misc_feature (148)..(157): n is a, c, g, or t
cttggctttatatatcttgtggaaaggacgaaacaccgtaatttctactaagtgtagatcgtcgcctcataaataggtctaatttctactaagtgtagatcgctgcgaggtgtgtaactataatttctactaagtgtagatttttttnnnnnnnnnnaagcttggcgtggatccgatatcaactagatcttgagacaaatggcagtattcatccacaattttaaaagaaaaggggggattggggggtacagtgcaggggaaagaatagtagacataatagcaacagacatacaaactaaag

SEQ ID NO: 11371 - DNA, 301 bp, Artificial Sequence
  Nf2.3_Zfhx3.2
  crRNA array
  misc_feature (148)..(157): n is a, c, g, or t
cttggctttatatatcttgtggaaaggacgaaacaccgtaatttctactaagtgtagatcgtcgcctcataaataggtctaatttctactaagtgtagatacgtgcgacacaaaagcaactaatttctactaagtgtagatttttttnnnnnnnnnnaagcttggcgtggatccgatatcaactagatcttgagacaaatggcagtattcatccacaattttaaaagaaaaggggggattggggggtacagtgcaggggaaagaatagtagacataatagcaacagacatacaaactaaag

SEQ ID NO: 11372 - DNA, 301 bp, Artificial Sequence
  Nf2.3_Zfhx3.3
  crRNA array
  misc_feature (148)..(157): n is a, c, g, or t
cttggctttatatatcttgtggaaaggacgaaacaccgtaatttctactaagtgtagatcgtcgcctcataaataggtctaatttctactaagtgtagattgctctacggcaagaggaaataatttctactaagtgtagatttttttnnnnnnnnnnaagcttggcgtggatccgatatcaactagatcttgagacaaatggcagtattcatccacaattttaaaagaaaaggggggattggggggtacagtgcaggggaaagaatagtagacataatagcaacagacatacaaactaaag

SEQ ID NO: 11373 - DNA, 301 bp, Artificial Sequence
  Nf2.3_Zfhx3.4
  crRNA array
  misc_feature (148)..(157): n is a, c, g, or t
cttggctttatatatcttgtggaaaggacgaaacaccgtaatttctactaagtgtagatcgtcgcctcataaataggtctaatttctactaagtgtagatagtgagcggcagactgcgagtaatttctactaagtgtagatttttttnnnnnnnnnnaagcttggcgtggatccgatatcaactagatcttgagacaaatggcagtattcatccacaattttaaaagaaaaggggggattggggggtacagtgcaggggaaagaatagtagacataatagcaacagacatacaaactaaag

SEQ ID NO: 11374 - DNA, 301 bp, Artificial Sequence
  Nf2.4_Zfhx3.1
  crRNA array
  misc_feature (148)..(157): n is a, c, g, or t
cttggctttatatatcttgtggaaaggacgaaacaccgtaatttctactaagtgtagataaggcctcgatctccgtctttaatttctactaagtgtagatcgctgcgaggtgtgtaactataatttctactaagtgtagatttttttnnnnnnnnnnaagcttggcgtggatccgatatcaactagatcttgagacaaatggcagtattcatccacaattttaaaagaaaaggggggattggggggtacagtgcaggggaaagaatagtagacataatagcaacagacatacaaactaaag

SEQ ID NO: 11375 - DNA, 301 bp, Artificial Sequence
  Nf2.4_Zfhx3.2
  crRNA array
  misc_feature (148)..(157): n is a, c, g, or t
cttggctttatatatcttgtggaaaggacgaaacaccgtaatttctactaagtgtagataaggcctcgatctccgtctttaatttctactaagtgtagatacgtgcgacacaaaagcaactaatttctactaagtgtagatttttttnnnnnnnnnnaagcttggcgtggatccgatatcaactagatcttgagacaaatggcagtattcatccacaattttaaaagaaaaggggggattggggggtacagtgcaggggaaagaatagtagacataatagcaacagacatacaaactaaag

SEQ ID NO: 11376 - DNA, 301 bp, Artificial Sequence
  Nf2.4_Zfhx3.3
  crRNA array
  misc_feature (148)..(157): n is a, c, g, or t
cttggctttatatatcttgtggaaaggacgaaacaccgtaatttctactaagtgtagataaggcctcgatctccgtctttaatttctactaagtgtagattgctctacggcaagaggaaataatttctactaagtgtagatttttttnnnnnnnnnnaagcttggcgtggatccgatatcaactagatcttgagacaaatggcagtattcatccacaattttaaaagaaaaggggggattggggggtacagtgcaggggaaagaatagtagacataatagcaacagacatacaaactaaag

SEQ ID NO: 11377 - DNA, 301 bp, Artificial Sequence
  Nf2.4_Zfhx3.4
  crRNA array
  misc_feature (148)..(157): n is a, c, g, or t
cttggctttatatatcttgtggaaaggacgaaacaccgtaatttctactaagtgtagataaggcctcgatctccgtctttaatttctactaagtgtagatagtgagcggcagactgcgagtaatttctactaagtgtagatttttttnnnnnnnnnnaagcttggcgtggatccgatatcaactagatcttgagacaaatggcagtattcatccacaattttaaaagaaaaggggggattggggggtacagtgcaggggaaagaatagtagacataatagcaacagacatacaaactaaag

SEQ ID NO: 11378 - DNA, 301 bp, Artificial Sequence
  Nf2.1_Crebbp.1
  crRNA array
  misc_feature (148)..(157): n is a, c, g, or t
cttggctttatatatcttgtggaaaggacgaaacaccgtaatttctactaagtgtagatcggagtcatctgatagagattaatttctactaagtgtagatctcacggcggcggcgggccgtaatttctactaagtgtagatttttttnnnnnnnnnnaagcttggcgtggatccgatatcaactagatcttgagacaaatggcagtattcatccacaattttaaaagaaaaggggggattggggggtacagtgcaggggaaagaatagtagacataatagcaacagacatacaaactaaag

SEQ ID NO: 11379 - DNA, 301 bp, Artificial Sequence
  Nf2.1_Crebbp.2
  crRNA array
  misc_feature (148)..(157): n is a, c, g, or t
cttggctttatatatcttgtggaaaggacgaaacaccgtaatttctactaagtgtagatcggagtcatctgatagagattaatttctactaagtgtagatcgcgagcaggtgaagatggctaatttctactaagtgtagatttttttnnnnnnnnnnaagcttggcgtggatccgatatcaactagatcttgagacaaatggcagtattcatccacaattttaaaagaaaaggggggattggggggtacagtgcaggggaaagaatagtagacataatagcaacagacatacaaactaaag

SEQ ID NO: 11380 - DNA, 301 bp, Artificial Sequence
  Nf2.1_Crebbp.3
  crRNA array
  misc_feature (148)..(157): n is a, c, g, or t
cttggctttatatatcttgtggaaaggacgaaacaccgtaatttctactaagtgtagatcggagtcatctgatagagattaatttctactaagtgtagatggctccgccgcccgcccgcgtaatttctactaagtgtagatttttttnnnnnnnnnnaagcttggcgtggatccgatatcaactagatcttgagacaaatggcagtattcatccacaattttaaaagaaaaggggggattggggggtacagtgcaggggaaagaatagtagacataatagcaacagacatacaaactaaag

SEQ ID NO: 11381 - DNA, 301 bp, Artificial Sequence
  Nf2.1_Crebbp.4
  crRNA array
  misc_feature (148)..(157): n is a, c, g, or t
cttggctttatatatcttgtggaaaggacgaaacaccgtaatttctactaagtgtagatcggagtcatctgatagagattaatttctactaagtgtagattggactagatgactccgtagtaatttctactaagtgtagatttttttnnnnnnnnnnaagcttggcgtggatccgatatcaactagatcttgagacaaatggcagtattcatccacaattttaaaagaaaaggggggattggggggtacagtgcaggggaaagaatagtagacataatagcaacagacatacaaactaaag

SEQ ID NO: 11382 - DNA, 301 bp, Artificial Sequence
  Nf2.2_Crebbp.1
  crRNA array
  misc_feature (148)..(157): n is a, c, g, or t
cttggctttatatatcttgtggaaaggacgaaacaccgtaatttctactaagtgtagattgaggcgacggaaagctgactaatttctactaagtgtagatctcacggcggcggcgggccgtaatttctactaagtgtagatttttttnnnnnnnnnnaagcttggcgtggatccgatatcaactagatcttgagacaaatggcagtattcatccacaattttaaaagaaaaggggggattggggggtacagtgcaggggaaagaatagtagacataatagcaacagacatacaaactaaag

SEQ ID NO: 11383 - DNA, 301 bp, Artificial Sequence
  Nf2.2_Crebbp.2
  crRNA array
  misc_feature (148)..(157): n is a, c, g, or t
cttggctttatatatcttgtggaaaggacgaaacaccgtaatttctactaagtgtagattgaggcgacggaaagctgactaatttctactaagtgtagatcgcgagcaggtgaagatggctaatttctactaagtgtagatttttttnnnnnnnnnnaagcttggcgtggatccgatatcaactagatcttgagacaaatggcagtattcatccacaattttaaaagaaaaggggggattggggggtacagtgcaggggaaagaatagtagacataatagcaacagacatacaaactaaag

SEQ ID NO: 11384 - DNA, 301 bp, Artificial Sequence
  Nf2.2_Crebbp.3
  crRNA array
  misc_feature (148)..(157): n is a, c, g, or t
cttggctttatatatcttgtggaaaggacgaaacaccgtaatttctactaagtgtagattgaggcgacggaaagctgactaatttctactaagtgtagatggctccgccgcccgcccgcgtaatttctactaagtgtagatttttttnnnnnnnnnnaagcttggcgtggatccgatatcaactagatcttgagacaaatggcagtattcatccacaattttaaaagaaaaggggggattggggggtacagtgcaggggaaagaatagtagacataatagcaacagacatacaaactaaag

SEQ ID NO: 11385 - DNA, 301 bp, Artificial Sequence
  Nf2.2_Crebbp.4
  crRNA array
  misc_feature (148)..(157): n is a, c, g, or t
cttggctttatatatcttgtggaaaggacgaaacaccgtaatttctactaagtgtagattgaggcgacggaaagctgactaatttctactaagtgtagattggactagatgactccgtagtaatttctactaagtgtagatttttttnnnnnnnnnnaagcttggcgtggatccgatatcaactagatcttgagacaaatggcagtattcatccacaattttaaaagaaaaggggggattggggggtacagtgcaggggaaagaatagtagacataatagcaacagacatacaaactaaag

SEQ ID NO: 11386 - DNA, 301 bp, Artificial Sequence
  Nf2.3_Crebbp.1
  crRNA array
  misc_feature (148)..(157): n is a, c, g, or t
cttggctttatatatcttgtggaaaggacgaaacaccgtaatttctactaagtgtagatcgtcgcctcataaataggtctaatttctactaagtgtagatctcacggcggcggcgggccgtaatttctactaagtgtagatttttttnnnnnnnnnnaagcttggcgtggatccgatatcaactagatcttgagacaaatggcagtattcatccacaattttaaaagaaaaggggggattggggggtacagtgcaggggaaagaatagtagacataatagcaacagacatacaaactaaag

SEQ ID NO: 11387 - DNA, 301 bp, Artificial Sequence
  Nf2.3_Crebbp.2
  crRNA array
  misc_feature (148)..(157): n is a, c, g, or t
cttggctttatatatcttgtggaaaggacgaaacaccgtaatttctactaagtgtagatcgtcgcctcataaataggtctaatttctactaagtgtagatcgcgagcaggtgaagatggctaatttctactaagtgtagatttttttnnnnnnnnnnaagcttggcgtggatccgatatcaactagatcttgagacaaatggcagtattcatccacaattttaaaagaaaaggggggattggggggtacagtgcaggggaaagaatagtagacataatagcaacagacatacaaactaaag

SEQ ID NO: 11388 - DNA, 301 bp, Artificial Sequence
  Nf2.3_Crebbp.3
  crRNA array
  misc_feature (148)..(157): n is a, c, g, or t
cttggctttatatatcttgtggaaaggacgaaacaccgtaatttctactaagtgtagatcgtcgcctcataaataggtctaatttctactaagtgtagatggctccgccgcccgcccgcgtaatttctactaagtgtagatttttttnnnnnnnnnnaagcttggcgtggatccgatatcaactagatcttgagacaaatggcagtattcatccacaattttaaaagaaaaggggggattggggggtacagtgcaggggaaagaatagtagacataatagcaacagacatacaaactaaag

SEQ ID NO: 11389 - DNA, 301 bp, Artificial Sequence
  Nf2.3_Crebbp.4
  crRNA array
  misc_feature (148)..(157): n is a, c, g, or t
cttggctttatatatcttgtggaaaggacgaaacaccgtaatttctactaagtgtagatcgtcgcctcataaataggtctaatttctactaagtgtagattggactagatgactccgtagtaatttctactaagtgtagatttttttnnnnnnnnnnaagcttggcgtggatccgatatcaactagatcttgagacaaatggcagtattcatccacaattttaaaagaaaaggggggattggggggtacagtgcaggggaaagaatagtagacataatagcaacagacatacaaactaaag

SEQ ID NO: 11390 - DNA, 301 bp, Artificial Sequence
  Nf2.4_Crebbp.1
  crRNA array
  misc_feature (148)..(157): n is a, c, g, or t
cttggctttatatatcttgtggaaaggacgaaacaccgtaatttctactaagtgtagataaggcctcgatctccgtctttaatttctactaagtgtagatctcacggcggcggcgggccgtaatttctactaagtgtagatttttttnnnnnnnnnnaagcttggcgtggatccgatatcaactagatcttgagacaaatggcagtattcatccacaattttaaaagaaaaggggggattggggggtacagtgcaggggaaagaatagtagacataatagcaacagacatacaaactaaag

SEQ ID NO: 11391 - DNA, 301 bp, Artificial Sequence
  Nf2.4_Crebbp.2
  crRNA array
  misc_feature (148)..(157): n is a, c, g, or t
cttggctttatatatcttgtggaaaggacgaaacaccgtaatttctactaagtgtagataaggcctcgatctccgtctttaatttctactaagtgtagatcgcgagcaggtgaagatggctaatttctactaagtgtagatttttttnnnnnnnnnnaagcttggcgtggatccgatatcaactagatcttgagacaaatggcagtattcatccacaattttaaaagaaaaggggggattggggggtacagtgcaggggaaagaatagtagacataatagcaacagacatacaaactaaag

SEQ ID NO: 11392 - DNA, 301 bp, Artificial Sequence
  Nf2.4_Crebbp.3
  crRNA array
  misc_feature (148)..(157): n is a, c, g, or t
cttggctttatatatcttgtggaaaggacgaaacaccgtaatttctactaagtgtagataaggcctcgatctccgtctttaatttctactaagtgtagatggctccgccgcccgcccgcgtaatttctactaagtgtagatttttttnnnnnnnnnnaagcttggcgtggatccgatatcaactagatcttgagacaaatggcagtattcatccacaattttaaaagaaaaggggggattggggggtacagtgcaggggaaagaatagtagacataatagcaacagacatacaaactaaag

SEQ ID NO: 11393 - DNA, 301 bp, Artificial Sequence
  Nf2.4_Crebbp.4
  crRNA array
  misc_feature (148)..(157): n is a, c, g, or t
cttggctttatatatcttgtggaaaggacgaaacaccgtaatttctactaagtgtagataaggcctcgatctccgtctttaatttctactaagtgtagattggactagatgactccgtagtaatttctactaagtgtagatttttttnnnnnnnnnnaagcttggcgtggatccgatatcaactagatcttgagacaaatggcagtattcatccacaattttaaaagaaaaggggggattggggggtacagtgcaggggaaagaatagtagacataatagcaacagacatacaaactaaag

SEQ ID NO: 11394 - DNA, 301 bp, Artificial Sequence
  Nf2.1_Cdkn2a.1
  crRNA array
  misc_feature (148)..(157): n is a, c, g, or t
cttggctttatatatcttgtggaaaggacgaaacaccgtaatttctactaagtgtagatcggagtcatctgatagagattaatttctactaagtgtagatcaatcacgggagggagcagataatttctactaagtgtagatttttttnnnnnnnnnnaagcttggcgtggatccgatatcaactagatcttgagacaaatggcagtattcatccacaattttaaaagaaaaggggggattggggggtacagtgcaggggaaagaatagtagacataatagcaacagacatacaaactaaag

SEQ ID NO: 11395 - DNA, 301 bp, Artificial Sequence
  Nf2.1_Cdkn2a.2
  crRNA array
  misc_feature (148)..(157): n is a, c, g, or t
cttggctttatatatcttgtggaaaggacgaaacaccgtaatttctactaagtgtagatcggagtcatctgatagagattaatttctactaagtgtagatgcccaacgccccgaactctttaatttctactaagtgtagatttttttnnnnnnnnnnaagcttggcgtggatccgatatcaactagatcttgagacaaatggcagtattcatccacaattttaaaagaaaaggggggattggggggtacagtgcaggggaaagaatagtagacataatagcaacagacatacaaactaaag

SEQ ID NO: 11396 - DNA, 301 bp, Artificial Sequence
  Nf2.1_Cdkn2a.3
  crRNA array
  misc_feature (148)..(157): n is a, c, g, or t
cttggctttatatatcttgtggaaaggacgaaacaccgtaatttctactaagtgtagatcggagtcatctgatagagattaatttctactaagtgtagattgtaccgctgggaacgtcgctaatttctactaagtgtagatttttttnnnnnnnnnnaagcttggcgtggatccgatatcaactagatcttgagacaaatggcagtattcatccacaattttaaaagaaaaggggggattggggggtacagtgcaggggaaagaatagtagacataatagcaacagacatacaaactaaag

SEQ ID NO: 11397 - DNA, 301 bp, Artificial Sequence
  Nf2.1_Cdkn2a.4
  crRNA array
  misc_feature (148)..(157): n is a, c, g, or t
cttggctttatatatcttgtggaaaggacgaaacaccgtaatttctactaagtgtagatcggagtcatctgatagagattaatttctactaagtgtagataagccacatgctagacacgctaatttctactaagtgtagatttttttnnnnnnnnnnaagcttggcgtggatccgatatcaactagatcttgagacaaatggcagtattcatccacaattttaaaagaaaaggggggattggggggtacagtgcaggggaaagaatagtagacataatagcaacagacatacaaactaaag

SEQ ID NO: 11398 - DNA, 301 bp, Artificial Sequence
  Nf2.2_Cdkn2a.1
  crRNA array
  misc_feature (148)..(157): n is a, c, g, or t
cttggctttatatatcttgtggaaaggacgaaacaccgtaatttctactaagtgtagattgaggcgacggaaagctgactaatttctactaagtgtagatcaatcacgggagggagcagataatttctactaagtgtagatttttttnnnnnnnnnnaagcttggcgtggatccgatatcaactagatcttgagacaaatggcagtattcatccacaattttaaaagaaaaggggggattggggggtacagtgcaggggaaagaatagtagacataatagcaacagacatacaaactaaag

SEQ ID NO: 11399 - DNA, 301 bp, Artificial Sequence
  Nf2.2_Cdkn2a.2
  crRNA array
  misc_feature (148)..(157): n is a, c, g, or t
cttggctttatatatcttgtggaaaggacgaaacaccgtaatttctactaagtgtagattgaggcgacggaaagctgactaatttctactaagtgtagatgcccaacgccccgaactctttaatttctactaagtgtagatttttttnnnnnnnnnnaagcttggcgtggatccgatatcaactagatcttgagacaaatggcagtattcatccacaattttaaaagaaaaggggggattggggggtacagtgcaggggaaagaatagtagacataatagcaacagacatacaaactaaag

SEQ ID NO: 11400 - DNA, 301 bp, Artificial Sequence
  Nf2.2_Cdkn2a.3
  crRNA array
  misc_feature (148)..(157): n is a, c, g, or t
cttggctttatatatcttgtggaaaggacgaaacaccgtaatttctactaagtgtagattgaggcgacggaaagctgactaatttctactaagtgtagattgtaccgctgggaacgtcgctaatttctactaagtgtagatttttttnnnnnnnnnnaagcttggcgtggatccgatatcaactagatcttgagacaaatggcagtattcatccacaattttaaaagaaaaggggggattggggggtacagtgcaggggaaagaatagtagacataatagcaacagacatacaaactaaag

SEQ ID NO: 11401 - DNA, 301 bp, Artificial Sequence
  Nf2.2_Cdkn2a.4
  crRNA array
  misc_feature (148)..(157): n is a, c, g, or t
cttggctttatatatcttgtggaaaggacgaaacaccgtaatttctactaagtgtagattgaggcgacggaaagctgactaatttctactaagtgtagataagccacatgctagacacgctaatttctactaagtgtagatttttttnnnnnnnnnnaagcttggcgtggatccgatatcaactagatcttgagacaaatggcagtattcatccacaattttaaaagaaaaggggggattggggggtacagtgcaggggaaagaatagtagacataatagcaacagacatacaaactaaag

SEQ ID NO: 11402 - DNA, 301 bp, Artificial Sequence
  Nf2.3_Cdkn2a.1
  crRNA array
  misc_feature (148)..(157): n is a, c, g, or t
cttggctttatatatcttgtggaaaggacgaaacaccgtaatttctactaagtgtagatcgtcgcctcataaataggtctaatttctactaagtgtagatcaatcacgggagggagcagataatttctactaagtgtagatttttttnnnnnnnnnnaagcttggcgtggatccgatatcaactagatcttgagacaaatggcagtattcatccacaattttaaaagaaaaggggggattggggggtacagtgcaggggaaagaatagtagacataatagcaacagacatacaaactaaag

SEQ ID NO: 11403 - DNA, 301 bp, Artificial Sequence
  Nf2.3_Cdkn2a.2
  crRNA array
  misc_feature (148)..(157): n is a, c, g, or t
cttggctttatatatcttgtggaaaggacgaaacaccgtaatttctactaagtgtagatcgtcgcctcataaataggtctaatttctactaagtgtagatgcccaacgccccgaactctttaatttctactaagtgtagatttttttnnnnnnnnnnaagcttggcgtggatccgatatcaactagatcttgagacaaatggcagtattcatccacaattttaaaagaaaaggggggattggggggtacagtgcaggggaaagaatagtagacataatagcaacagacatacaaactaaag

SEQ ID NO: 11404 - DNA, 301 bp, Artificial Sequence
  Nf2.3_Cdkn2a.3
  crRNA array
  misc_feature (148)..(157): n is a, c, g, or t
cttggctttatatatcttgtggaaaggacgaaacaccgtaatttctactaagtgtagatcgtcgcctcataaataggtctaatttctactaagtgtagattgtaccgctgggaacgtcgctaatttctactaagtgtagatttttttnnnnnnnnnnaagcttggcgtggatccgatatcaactagatcttgagacaaatggcagtattcatccacaattttaaaagaaaaggggggattggggggtacagtgcaggggaaagaatagtagacataatagcaacagacatacaaactaaag

SEQ ID NO: 11405 - DNA, 301 bp, Artificial Sequence
  Nf2.3_Cdkn2a.4
  crRNA array
  misc_feature (148)..(157): n is a, c, g, or t
cttggctttatatatcttgtggaaaggacgaaacaccgtaatttctactaagtgtagatcgtcgcctcataaataggtctaatttctactaagtgtagataagccacatgctagacacgctaatttctactaagtgtagatttttttnnnnnnnnnnaagcttggcgtggatccgatatcaactagatcttgagacaaatggcagtattcatccacaattttaaaagaaaaggggggattggggggtacagtgcaggggaaagaatagtagacataatagcaacagacatacaaactaaag

SEQ ID NO: 11406 - DNA, 301 bp, Artificial Sequence
  Nf2.4_Cdkn2a.1
  crRNA array
  misc_feature (148)..(157): n is a, c, g, or t
cttggctttatatatcttgtggaaaggacgaaacaccgtaatttctactaagtgtagataaggcctcgatctccgtctttaatttctactaagtgtagatcaatcacgggagggagcagataatttctactaagtgtagatttttttnnnnnnnnnnaagcttggcgtggatccgatatcaactagatcttgagacaaatggcagtattcatccacaattttaaaagaaaaggggggattggggggtacagtgcaggggaaagaatagtagacataatagcaacagacatacaaactaaag

SEQ ID NO: 11407 - DNA, 301 bp, Artificial Sequence
  Nf2.4_Cdkn2a.2
  crRNA array
  misc_feature (148)..(157): n is a, c, g, or t
cttggctttatatatcttgtggaaaggacgaaacaccgtaatttctactaagtgtagataaggcctcgatctccgtctttaatttctactaagtgtagatgcccaacgccccgaactctttaatttctactaagtgtagatttttttnnnnnnnnnnaagcttggcgtggatccgatatcaactagatcttgagacaaatggcagtattcatccacaattttaaaagaaaaggggggattggggggtacagtgcaggggaaagaatagtagacataatagcaacagacatacaaactaaag

SEQ ID NO: 11408 - DNA, 301 bp, Artificial Sequence
  Nf2.4_Cdkn2a.3
  crRNA array
  misc_feature (148)..(157): n is a, c, g, or t
cttggctttatatatcttgtggaaaggacgaaacaccgtaatttctactaagtgtagataaggcctcgatctccgtctttaatttctactaagtgtagattgtaccgctgggaacgtcgctaatttctactaagtgtagatttttttnnnnnnnnnnaagcttggcgtggatccgatatcaactagatcttgagacaaatggcagtattcatccacaattttaaaagaaaaggggggattggggggtacagtgcaggggaaagaatagtagacataatagcaacagacatacaaactaaag

SEQ ID NO: 11409 - DNA, 301 bp, Artificial Sequence
  Nf2.4_Cdkn2a.4
  crRNA array
  misc_feature (148)..(157): n is a, c, g, or t
cttggctttatatatcttgtggaaaggacgaaacaccgtaatttctactaagtgtagataaggcctcgatctccgtctttaatttctactaagtgtagataagccacatgctagacacgctaatttctactaagtgtagatttttttnnnnnnnnnnaagcttggcgtggatccgatatcaactagatcttgagacaaatggcagtattcatccacaattttaaaagaaaaggggggattggggggtacagtgcaggggaaagaatagtagacataatagcaacagacatacaaactaaag

SEQ ID NO: 11410 - DNA, 301 bp, Artificial Sequence
  Nf2.1_Wrn.1
  crRNA array
  misc_feature (148)..(157): n is a, c, g, or t
cttggctttatatatcttgtggaaaggacgaaacaccgtaatttctactaagtgtagatcggagtcatctgatagagattaatttctactaagtgtagatgcaaaccactcgggtaattttaatttctactaagtgtagatttttttnnnnnnnnnnaagcttggcgtggatccgatatcaactagatcttgagacaaatggcagtattcatccacaattttaaaagaaaaggggggattggggggtacagtgcaggggaaagaatagtagacataatagcaacagacatacaaactaaag

SEQ ID NO: 11411 - DNA, 301 bp, Artificial Sequence
  Nf2.1_Wrn.2
  crRNA array
  misc_feature (148)..(157): n is a, c, g, or t
cttggctttatatatcttgtggaaaggacgaaacaccgtaatttctactaagtgtagatcggagtcatctgatagagattaatttctactaagtgtagatgccatgtccagcagaacctttaatttctactaagtgtagatttttttnnnnnnnnnnaagcttggcgtggatccgatatcaactagatcttgagacaaatggcagtattcatccacaattttaaaagaaaaggggggattggggggtacagtgcaggggaaagaatagtagacataatagcaacagacatacaaactaaag

SEQ ID NO: 11412 - DNA, 301 bp, Artificial Sequence
  Nf2.1_Wrn.3
  crRNA array
  misc_feature (148)..(157): n is a, c, g, or t
cttggctttatatatcttgtggaaaggacgaaacaccgtaatttctactaagtgtagatcggagtcatctgatagagattaatttctactaagtgtagatctgcagcaggccaccgcaattaatttctactaagtgtagatttttttnnnnnnnnnnaagcttggcgtggatccgatatcaactagatcttgagacaaatggcagtattcatccacaattttaaaagaaaaggggggattggggggtacagtgcaggggaaagaatagtagacataatagcaacagacatacaaactaaag

SEQ ID NO: 11413 - DNA, 301 bp, Artificial Sequence
  Nf2.1_Wrn.4
  crRNA array
  misc_feature (148)..(157): n is a, c, g, or t
cttggctttatatatcttgtggaaaggacgaaacaccgtaatttctactaagtgtagatcggagtcatctgatagagattaatttctactaagtgtagattcgaaggacaatagatgatgtaatttctactaagtgtagatttttttnnnnnnnnnnaagcttggcgtggatccgatatcaactagatcttgagacaaatggcagtattcatccacaattttaaaagaaaaggggggattggggggtacagtgcaggggaaagaatagtagacataatagcaacagacatacaaactaaag

SEQ ID NO: 11414 - DNA, 301 bp, Artificial Sequence
  Nf2.2_Wrn.1
  crRNA array
  misc_feature (148)..(157): n is a, c, g, or t
cttggctttatatatcttgtggaaaggacgaaacaccgtaatttctactaagtgtagattgaggcgacggaaagctgactaatttctactaagtgtagatgcaaaccactcgggtaattttaatttctactaagtgtagatttttttnnnnnnnnnnaagcttggcgtggatccgatatcaactagatcttgagacaaatggcagtattcatccacaattttaaaagaaaaggggggattggggggtacagtgcaggggaaagaatagtagacataatagcaacagacatacaaactaaag

SEQ ID NO: 11415 - DNA, 301 bp, Artificial Sequence
  Nf2.2_Wrn.2
  crRNA array
  misc_feature (148)..(157): n is a, c, g, or t
cttggctttatatatcttgtggaaaggacgaaacaccgtaatttctactaagtgtagattgaggcgacggaaagctgactaatttctactaagtgtagatgccatgtccagcagaacctttaatttctactaagtgtagatttttttnnnnnnnnnnaagcttggcgtggatccgatatcaactagatcttgagacaaatggcagtattcatccacaattttaaaagaaaaggggggattggggggtacagtgcaggggaaagaatagtagacataatagcaacagacatacaaactaaag

SEQ ID NO: 11416 - DNA, 301 bp, Artificial Sequence
  Nf2.2_Wrn.3
  crRNA array
  misc_feature (148)..(157): n is a, c, g, or t
cttggctttatatatcttgtggaaaggacgaaacaccgtaatttctactaagtgtagattgaggcgacggaaagctgactaatttctactaagtgtagatctgcagcaggccaccgcaattaatttctactaagtgtagatttttttnnnnnnnnnnaagcttggcgtggatccgatatcaactagatcttgagacaaatggcagtattcatccacaattttaaaagaaaaggggggattggggggtacagtgcaggggaaagaatagtagacataatagcaacagacatacaaactaaag

SEQ ID NO: 11417 - DNA, 301 bp, Artificial Sequence
  Nf2.2_Wrn.4
  crRNA array
  misc_feature (148)..(157): n is a, c, g, or t
cttggctttatatatcttgtggaaaggacgaaacaccgtaatttctactaagtgtagattgaggcgacggaaagctgactaatttctactaagtgtagattcgaaggacaatagatgatgtaatttctactaagtgtagatttttttnnnnnnnnnnaagcttggcgtggatccgatatcaactagatcttgagacaaatggcagtattcatccacaattttaaaagaaaaggggggattggggggtacagtgcaggggaaagaatagtagacataatagcaacagacatacaaactaaag

SEQ ID NO: 11418 - DNA, 301 bp, Artificial Sequence
  Nf2.3_Wrn.1
  crRNA array
  misc_feature (148)..(157): n is a, c, g, or t
cttggctttatatatcttgtggaaaggacgaaacaccgtaatttctactaagtgtagatcgtcgcctcataaataggtctaatttctactaagtgtagatgcaaaccactcgggtaattttaatttctactaagtgtagatttttttnnnnnnnnnnaagcttggcgtggatccgatatcaactagatcttgagacaaatggcagtattcatccacaattttaaaagaaaaggggggattggggggtacagtgcaggggaaagaatagtagacataatagcaacagacatacaaactaaag

SEQ ID NO: 11419 - DNA, 301 bp, Artificial Sequence
  Nf2.3_Wrn.2
  crRNA array
  misc_feature (148)..(157): n is a, c, g, or t
cttggctttatatatcttgtggaaaggacgaaacaccgtaatttctactaagtgtagatcgtcgcctcataaataggtctaatttctactaagtgtagatgccatgtccagcagaacctttaatttctactaagtgtagatttttttnnnnnnnnnnaagcttggcgtggatccgatatcaactagatcttgagacaaatggcagtattcatccacaattttaaaagaaaaggggggattggggggtacagtgcaggggaaagaatagtagacataatagcaacagacatacaaactaaag

SEQ ID NO: 11420 - DNA, 301 bp, Artificial Sequence
  Nf2.3_Wrn.3
  crRNA array
  misc_feature (148)..(157): n is a, c, g, or t
cttggctttatatatcttgtggaaaggacgaaacaccgtaatttctactaagtgtagatcgtcgcctcataaataggtctaatttctactaagtgtagatctgcagcaggccaccgcaattaatttctactaagtgtagatttttttnnnnnnnnnnaagcttggcgtggatccgatatcaactagatcttgagacaaatggcagtattcatccacaattttaaaagaaaaggggggattggggggtacagtgcaggggaaagaatagtagacataatagcaacagacatacaaactaaag

SEQ ID NO: 11421 - DNA, 301 bp, Artificial Sequence
  Nf2.3_Wrn.4
  crRNA array
  misc_feature (148)..(157): n is a, c, g, or t
cttggctttatatatcttgtggaaaggacgaaacaccgtaatttctactaagtgtagatcgtcgcctcataaataggtctaatttctactaagtgtagattcgaaggacaatagatgatgtaatttctactaagtgtagatttttttnnnnnnnnnnaagcttggcgtggatccgatatcaactagatcttgagacaaatggcagtattcatccacaattttaaaagaaaaggggggattggggggtacagtgcaggggaaagaatagtagacataatagcaacagacatacaaactaaag

SEQ ID NO: 11422 - DNA, 301 bp, Artificial Sequence
  Nf2.4_Wrn.1
  crRNA array
  misc_feature (148)..(157): n is a, c, g, or t
cttggctttatatatcttgtggaaaggacgaaacaccgtaatttctactaagtgtagataaggcctcgatctccgtctttaatttctactaagtgtagatgcaaaccactcgggtaattttaatttctactaagtgtagatttttttnnnnnnnnnnaagcttggcgtggatccgatatcaactagatcttgagacaaatggcagtattcatccacaattttaaaagaaaaggggggattggggggtacagtgcaggggaaagaatagtagacataatagcaacagacatacaaactaaag

SEQ ID NO: 11423 - DNA, 301 bp, Artificial Sequence
  Nf2.4_Wrn.2
  crRNA array
  misc_feature (148)..(157): n is a, c, g, or t
cttggctttatatatcttgtggaaaggacgaaacaccgtaatttctactaagtgtagataaggcctcgatctccgtctttaatttctactaagtgtagatgccatgtccagcagaacctttaatttctactaagtgtagatttttttnnnnnnnnnnaagcttggcgtggatccgatatcaactagatcttgagacaaatggcagtattcatccacaattttaaaagaaaaggggggattggggggtacagtgcaggggaaagaatagtagacataatagcaacagacatacaaactaaag

SEQ ID NO: 11424 - DNA, 301 bp, Artificial Sequence
  Nf2.4_Wrn.3
  crRNA array
  misc_feature (148)..(157): n is a, c, g, or t
cttggctttatatatcttgtggaaaggacgaaacaccgtaatttctactaagtgtagataaggcctcgatctccgtctttaatttctactaagtgtagatctgcagcaggccaccgcaattaatttctactaagtgtagatttttttnnnnnnnnnnaagcttggcgtggatccgatatcaactagatcttgagacaaatggcagtattcatccacaattttaaaagaaaaggggggattggggggtacagtgcaggggaaagaatagtagacataatagcaacagacatacaaactaaag

SEQ ID NO: 11425 - DNA, 301 bp, Artificial Sequence
  Nf2.4_Wrn.4
  crRNA array
  misc_feature (148)..(157): n is a, c, g, or t
cttggctttatatatcttgtggaaaggacgaaacaccgtaatttctactaagtgtagataaggcctcgatctccgtctttaatttctactaagtgtagattcgaaggacaatagatgatgtaatttctactaagtgtagatttttttnnnnnnnnnnaagcttggcgtggatccgatatcaactagatcttgagacaaatggcagtattcatccacaattttaaaagaaaaggggggattggggggtacagtgcaggggaaagaatagtagacataatagcaacagacatacaaactaaag

SEQ ID NO: 11426 - DNA, 301 bp, Artificial Sequence
  Nf2.1_Brca2.1
  crRNA array
  misc_feature (148)..(157): n is a, c, g, or t
cttggctttatatatcttgtggaaaggacgaaacaccgtaatttctactaagtgtagatcggagtcatctgatagagattaatttctactaagtgtagatctaagcgtagaaccagaaattaatttctactaagtgtagatttttttnnnnnnnnnnaagcttggcgtggatccgatatcaactagatcttgagacaaatggcagtattcatccacaattttaaaagaaaaggggggattggggggtacagtgcaggggaaagaatagtagacataatagcaacagacatacaaactaaag

SEQ ID NO: 11427 - DNA, 301 bp, Artificial Sequence
  Nf2.1_Brca2.2
  crRNA array
  misc_feature (148)..(157): n is a, c, g, or t
cttggctttatatatcttgtggaaaggacgaaacaccgtaatttctactaagtgtagatcggagtcatctgatagagattaatttctactaagtgtagatgatccaggtgtaacaagccataatttctactaagtgtagatttttttnnnnnnnnnnaagcttggcgtggatccgatatcaactagatcttgagacaaatggcagtattcatccacaattttaaaagaaaaggggggattggggggtacagtgcaggggaaagaatagtagacataatagcaacagacatacaaactaaag

SEQ ID NO: 11428 - DNA, 301 bp, Artificial Sequence
  Nf2.1_Brca2.3
  crRNA array
  misc_feature (148)..(157): n is a, c, g, or t
cttggctttatatatcttgtggaaaggacgaaacaccgtaatttctactaagtgtagatcggagtcatctgatagagattaatttctactaagtgtagattgaatataaactgggccacttaatttctactaagtgtagatttttttnnnnnnnnnnaagcttggcgtggatccgatatcaactagatcttgagacaaatggcagtattcatccacaattttaaaagaaaaggggggattggggggtacagtgcaggggaaagaatagtagacataatagcaacagacatacaaactaaag

SEQ ID NO: 11429 - DNA, 301 bp, Artificial Sequence
  Nf2.1_Brca2.4
  crRNA array
  misc_feature (148)..(157): n is a, c, g, or t
cttggctttatatatcttgtggaaaggacgaaacaccgtaatttctactaagtgtagatcggagtcatctgatagagattaatttctactaagtgtagatgaaacgccgtatatatagagtaatttctactaagtgtagatttttttnnnnnnnnnnaagcttggcgtggatccgatatcaactagatcttgagacaaatggcagtattcatccacaattttaaaagaaaaggggggattggggggtacagtgcaggggaaagaatagtagacataatagcaacagacatacaaactaaag

SEQ ID NO: 11430 - DNA, 301 bp, Artificial Sequence
  Nf2.2_Brca2.1
  crRNA array
  misc_feature (148)..(157): n is a, c, g, or t
cttggctttatatatcttgtggaaaggacgaaacaccgtaatttctactaagtgtagattgaggcgacggaaagctgactaatttctactaagtgtagatctaagcgtagaaccagaaattaatttctactaagtgtagatttttttnnnnnnnnnnaagcttggcgtggatccgatatcaactagatcttgagacaaatggcagtattcatccacaattttaaaagaaaaggggggattggggggtacagtgcaggggaaagaatagtagacataatagcaacagacatacaaactaaag

SEQ ID NO: 11431 - DNA, 301 bp, Artificial Sequence
  Nf2.2_Brca2.2
  crRNA array
  misc_feature (148)..(157): n is a, c, g, or t
cttggctttatatatcttgtggaaaggacgaaacaccgtaatttctactaagtgtagattgaggcgacggaaagctgactaatttctactaagtgtagatgatccaggtgtaacaagccataatttctactaagtgtagatttttttnnnnnnnnnnaagcttggcgtggatccgatatcaactagatcttgagacaaatggcagtattcatccacaattttaaaagaaaaggggggattggggggtacagtgcaggggaaagaatagtagacataatagcaacagacatacaaactaaag

SEQ ID NO: 11432 - DNA, 301 bp, Artificial Sequence
  Nf2.2_Brca2.3
  crRNA array
  misc_feature (148)..(157): n is a, c, g, or t
cttggctttatatatcttgtggaaaggacgaaacaccgtaatttctactaagtgtagattgaggcgacggaaagctgactaatttctactaagtgtagattgaatataaactgggccacttaatttctactaagtgtagatttttttnnnnnnnnnnaagcttggcgtggatccgatatcaactagatcttgagacaaatggcagtattcatccacaattttaaaagaaaaggggggattggggggtacagtgcaggggaaagaatagtagacataatagcaacagacatacaaactaaag

SEQ ID NO: 11433 - DNA, 301 bp, Artificial Sequence
  Nf2.2_Brca2.4
  crRNA array
  misc_feature (148)..(157): n is a, c, g, or t
cttggctttatatatcttgtggaaaggacgaaacaccgtaatttctactaagtgtagattgaggcgacggaaagctgactaatttctactaagtgtagatgaaacgccgtatatatagagtaatttctactaagtgtagatttttttnnnnnnnnnnaagcttggcgtggatccgatatcaactagatcttgagacaaatggcagtattcatccacaattttaaaagaaaaggggggattggggggtacagtgcaggggaaagaatagtagacataatagcaacagacatacaaactaaag

SEQ ID NO: 11434 - DNA, 301 bp, Artificial Sequence
  Nf2.3_Brca2.1
  crRNA array
  misc_feature (148)..(157): n is a, c, g, or t
cttggctttatatatcttgtggaaaggacgaaacaccgtaatttctactaagtgtagatcgtcgcctcataaataggtctaatttctactaagtgtagatctaagcgtagaaccagaaattaatttctactaagtgtagatttttttnnnnnnnnnnaagcttggcgtggatccgatatcaactagatcttgagacaaatggcagtattcatccacaattttaaaagaaaaggggggattggggggtacagtgcaggggaaagaatagtagacataatagcaacagacatacaaactaaag

SEQ ID NO: 11435 - DNA, 301 bp, Artificial Sequence
  Nf2.3_Brca2.2
  crRNA array
  misc_feature (148)..(157): n is a, c, g, or t
cttggctttatatatcttgtggaaaggacgaaacaccgtaatttctactaagtgtagatcgtcgcctcataaataggtctaatttctactaagtgtagatgatccaggtgtaacaagccataatttctactaagtgtagatttttttnnnnnnnnnnaagcttggcgtggatccgatatcaactagatcttgagacaaatggcagtattcatccacaattttaaaagaaaaggggggattggggggtacagtgcaggggaaagaatagtagacataatagcaacagacatacaaactaaag

SEQ ID NO: 11436 - DNA, 301 bp, Artificial Sequence
  Nf2.3_Brca2.3
  crRNA array
  misc_feature (148)..(157): n is a, c, g, or t
cttggctttatatatcttgtggaaaggacgaaacaccgtaatttctactaagtgtagatcgtcgcctcataaataggtctaatttctactaagtgtagattgaatataaactgggccacttaatttctactaagtgtagatttttttnnnnnnnnnnaagcttggcgtggatccgatatcaactagatcttgagacaaatggcagtattcatccacaattttaaaagaaaaggggggattggggggtacagtgcaggggaaagaatagtagacataatagcaacagacatacaaactaaag

SEQ ID NO: 11437 - DNA, 301 bp, Artificial Sequence
  Nf2.3_Brca2.4
  crRNA array
  misc_feature (148)..(157): n is a, c, g, or t
cttggctttatatatcttgtggaaaggacgaaacaccgtaatttctactaagtgtagatcgtcgcctcataaataggtctaatttctactaagtgtagatgaaacgccgtatatatagagtaatttctactaagtgtagatttttttnnnnnnnnnnaagcttggcgtggatccgatatcaactagatcttgagacaaatggcagtattcatccacaattttaaaagaaaaggggggattggggggtacagtgcaggggaaagaatagtagacataatagcaacagacatacaaactaaag

SEQ ID NO: 11438 - DNA, 301 bp, Artificial Sequence
  Nf2.4_Brca2.1
  crRNA array
  misc_feature (148)..(157): n is a, c, g, or t
cttggctttatatatcttgtggaaaggacgaaacaccgtaatttctactaagtgtagataaggcctcgatctccgtctttaatttctactaagtgtagatctaagcgtagaaccagaaattaatttctactaagtgtagatttttttnnnnnnnnnnaagcttggcgtggatccgatatcaactagatcttgagacaaatggcagtattcatccacaattttaaaagaaaaggggggattggggggtacagtgcaggggaaagaatagtagacataatagcaacagacatacaaactaaag

SEQ ID NO: 11439 - DNA, 301 bp, Artificial Sequence
  Nf2.4_Brca2.2
  crRNA array
  misc_feature (148)..(157): n is a, c, g, or t
cttggctttatatatcttgtggaaaggacgaaacaccgtaatttctactaagtgtagataaggcctcgatctccgtctttaatttctactaagtgtagatgatccaggtgtaacaagccataatttctactaagtgtagatttttttnnnnnnnnnnaagcttggcgtggatccgatatcaactagatcttgagacaaatggcagtattcatccacaattttaaaagaaaaggggggattggggggtacagtgcaggggaaagaatagtagacataatagcaacagacatacaaactaaag

SEQ ID NO: 11440 - DNA, 301 bp, Artificial Sequence
  Nf2.4_Brca2.3
  crRNA array
  misc_feature (148)..(157): n is a, c, g, or t
cttggctttatatatcttgtggaaaggacgaaacaccgtaatttctactaagtgtagataaggcctcgatctccgtctttaatttctactaagtgtagattgaatataaactgggccacttaatttctactaagtgtagatttttttnnnnnnnnnnaagcttggcgtggatccgatatcaactagatcttgagacaaatggcagtattcatccacaattttaaaagaaaaggggggattggggggtacagtgcaggggaaagaatagtagacataatagcaacagacatacaaactaaag

SEQ ID NO: 11441 - DNA, 301 bp, Artificial Sequence
  Nf2.4_Brca2.4
  crRNA array
  misc_feature (148)..(157): n is a, c, g, or t
cttggctttatatatcttgtggaaaggacgaaacaccgtaatttctactaagtgtagataaggcctcgatctccgtctttaatttctactaagtgtagatgaaacgccgtatatatagagtaatttctactaagtgtagatttttttnnnnnnnnnnaagcttggcgtggatccgatatcaactagatcttgagacaaatggcagtattcatccacaattttaaaagaaaaggggggattggggggtacagtgcaggggaaagaatagtagacataatagcaacagacatacaaactaaag

SEQ ID NO: 11442 - DNA, 301 bp, Artificial Sequence
  Nf2.1_Apc.1
  crRNA array
  misc_feature (148)..(157): n is a, c, g, or t
cttggctttatatatcttgtggaaaggacgaaacaccgtaatttctactaagtgtagatcggagtcatctgatagagattaatttctactaagtgtagatgtgatccacacgtgtagctgtaatttctactaagtgtagatttttttnnnnnnnnnnaagcttggcgtggatccgatatcaactagatcttgagacaaatggcagtattcatccacaattttaaaagaaaaggggggattggggggtacagtgcaggggaaagaatagtagacataatagcaacagacatacaaactaaag

SEQ ID NO: 11443 - DNA, 301 bp, Artificial Sequence
  Nf2.1_Apc.2
  crRNA array
  misc_feature (148)..(157): n is a, c, g, or t
cttggctttatatatcttgtggaaaggacgaaacaccgtaatttctactaagtgtagatcggagtcatctgatagagattaatttctactaagtgtagatcatctgctcgccaagacaaataatttctactaagtgtagatttttttnnnnnnnnnnaagcttggcgtggatccgatatcaactagatcttgagacaaatggcagtattcatccacaattttaaaagaaaaggggggattggggggtacagtgcaggggaaagaatagtagacataatagcaacagacatacaaactaaag

SEQ ID NO: 11444 - DNA, 301 bp, Artificial Sequence
  Nf2.1_Apc.3
  crRNA array
  misc_feature (148)..(157): n is a, c, g, or t
cttggctttatatatcttgtggaaaggacgaaacaccgtaatttctactaagtgtagatcggagtcatctgatagagattaatttctactaagtgtagatacgccaatcgacatgatgattaatttctactaagtgtagatttttttnnnnnnnnnnaagcttggcgtggatccgatatcaactagatcttgagacaaatggcagtattcatccacaattttaaaagaaaaggggggattggggggtacagtgcaggggaaagaatagtagacataatagcaacagacatacaaactaaag

SEQ ID NO: 11445 - DNA, 301 bp, Artificial Sequence
  Nf2.1_Apc.4
  crRNA array
  misc_feature (148)..(157): n is a, c, g, or t
cttggctttatatatcttgtggaaaggacgaaacaccgtaatttctactaagtgtagatcggagtcatctgatagagattaatttctactaagtgtagatcaccaggggatgatgtgccctaatttctactaagtgtagatttttttnnnnnnnnnnaagcttggcgtggatccgatatcaactagatcttgagacaaatggcagtattcatccacaattttaaaagaaaaggggggattggggggtacagtgcaggggaaagaatagtagacataatagcaacagacatacaaactaaag

SEQ ID NO: 11446 - DNA, 301 bp, Artificial Sequence
  Nf2.2_Apc.1
  crRNA array
  misc_feature (148)..(157): n is a, c, g, or t
cttggctttatatatcttgtggaaaggacgaaacaccgtaatttctactaagtgtagattgaggcgacggaaagctgactaatttctactaagtgtagatgtgatccacacgtgtagctgtaatttctactaagtgtagatttttttnnnnnnnnnnaagcttggcgtggatccgatatcaactagatcttgagacaaatggcagtattcatccacaattttaaaagaaaaggggggattggggggtacagtgcaggggaaagaatagtagacataatagcaacagacatacaaactaaag

SEQ ID NO: 11447 - DNA, 301 bp, Artificial Sequence
  Nf2.2_Apc.2
  crRNA array
  misc_feature (148)..(157): n is a, c, g, or t
cttggctttatatatcttgtggaaaggacgaaacaccgtaatttctactaagtgtagattgaggcgacggaaagctgactaatttctactaagtgtagatcatctgctcgccaagacaaataatttctactaagtgtagatttttttnnnnnnnnnnaagcttggcgtggatccgatatcaactagatcttgagacaaatggcagtattcatccacaattttaaaagaaaaggggggattggggggtacagtgcaggggaaagaatagtagacataatagcaacagacatacaaactaaag

SEQ ID NO: 11448 - DNA, 301 bp, Artificial Sequence
  Nf2.2_Apc.3
  crRNA array
  misc_feature (148)..(157): n is a, c, g, or t
cttggctttatatatcttgtggaaaggacgaaacaccgtaatttctactaagtgtagattgaggcgacggaaagctgactaatttctactaagtgtagatacgccaatcgacatgatgattaatttctactaagtgtagatttttttnnnnnnnnnnaagcttggcgtggatccgatatcaactagatcttgagacaaatggcagtattcatccacaattttaaaagaaaaggggggattggggggtacagtgcaggggaaagaatagtagacataatagcaacagacatacaaactaaag

SEQ ID NO: 11449 - DNA, 301 bp, Artificial Sequence
  Nf2.2_Apc.4
  crRNA array
  misc_feature (148)..(157): n is a, c, g, or t
cttggctttatatatcttgtggaaaggacgaaacaccgtaatttctactaagtgtagattgaggcgacggaaagctgactaatttctactaagtgtagatcaccaggggatgatgtgccctaatttctactaagtgtagatttttttnnnnnnnnnnaagcttggcgtggatccgatatcaactagatcttgagacaaatggcagtattcatccacaattttaaaagaaaaggggggattggggggtacagtgcaggggaaagaatagtagacataatagcaacagacatacaaactaaag

SEQ ID NO: 11450 - DNA, 301 bp, Artificial Sequence
  Nf2.3_Apc.1
  crRNA array
  misc_feature (148)..(157): n is a, c, g, or t
cttggctttatatatcttgtggaaaggacgaaacaccgtaatttctactaagtgtagatcgtcgcctcataaataggtctaatttctactaagtgtagatgtgatccacacgtgtagctgtaatttctactaagtgtagatttttttnnnnnnnnnnaagcttggcgtggatccgatatcaactagatcttgagacaaatggcagtattcatccacaattttaaaagaaaaggggggattggggggtacagtgcaggggaaagaatagtagacataatagcaacagacatacaaactaaag

SEQ ID NO: 11451 - DNA, 301 bp, Artificial Sequence
  Nf2.3_Apc.2
  crRNA array
  misc_feature (148)..(157): n is a, c, g, or t
cttggctttatatatcttgtggaaaggacgaaacaccgtaatttctactaagtgtagatcgtcgcctcataaataggtctaatttctactaagtgtagatcatctgctcgccaagacaaataatttctactaagtgtagatttttttnnnnnnnnnnaagcttggcgtggatccgatatcaactagatcttgagacaaatggcagtattcatccacaattttaaaagaaaaggggggattggggggtacagtgcaggggaaagaatagtagacataatagcaacagacatacaaactaaag

SEQ ID NO: 11452 - DNA, 301 bp, Artificial Sequence
  Nf2.3_Apc.3
  crRNA array
  misc_feature (148)..(157): n is a, c, g, or t
cttggctttatatatcttgtggaaaggacgaaacaccgtaatttctactaagtgtagatcgtcgcctcataaataggtctaatttctactaagtgtagatacgccaatcgacatgatgattaatttctactaagtgtagatttttttnnnnnnnnnnaagcttggcgtggatccgatatcaactagatcttgagacaaatggcagtattcatccacaattttaaaagaaaaggggggattggggggtacagtgcaggggaaagaatagtagacataatagcaacagacatacaaactaaag

SEQ ID NO: 11453 - DNA, 301 bp, Artificial Sequence
  Nf2.3_Apc.4
  crRNA array
  misc_feature (148)..(157): n is a, c, g, or t
cttggctttatatatcttgtggaaaggacgaaacaccgtaatttctactaagtgtagatcgtcgcctcataaataggtctaatttctactaagtgtagatcaccaggggatgatgtgccctaatttctactaagtgtagatttttttnnnnnnnnnnaagcttggcgtggatccgatatcaactagatcttgagacaaatggcagtattcatccacaattttaaaagaaaaggggggattggggggtacagtgcaggggaaagaatagtagacataatagcaacagacatacaaactaaag

SEQ ID NO: 11454 - DNA, 301 bp, Artificial Sequence
  Nf2.4_Apc.1
  crRNA array
  misc_feature (148)..(157): n is a, c, g, or t
cttggctttatatatcttgtggaaaggacgaaacaccgtaatttctactaagtgtagataaggcctcgatctccgtctttaatttctactaagtgtagatgtgatccacacgtgtagctgtaatttctactaagtgtagatttttttnnnnnnnnnnaagcttggcgtggatccgatatcaactagatcttgagacaaatggcagtattcatccacaattttaaaagaaaaggggggattggggggtacagtgcaggggaaagaatagtagacataatagcaacagacatacaaactaaag

SEQ ID NO: 11455 - DNA, 301 bp, Artificial Sequence
  Nf2.4_Apc.2
  crRNA array
  misc_feature (148)..(157): n is a, c, g, or t
cttggctttatatatcttgtggaaaggacgaaacaccgtaatttctactaagtgtagataaggcctcgatctccgtctttaatttctactaagtgtagatcatctgctcgccaagacaaataatttctactaagtgtagatttttttnnnnnnnnnnaagcttggcgtggatccgatatcaactagatcttgagacaaatggcagtattcatccacaattttaaaagaaaaggggggattggggggtacagtgcaggggaaagaatagtagacataatagcaacagacatacaaactaaag

SEQ ID NO: 11456 - DNA, 301 bp, Artificial Sequence
  Nf2.4_Apc.3
  crRNA array
  misc_feature (148)..(157): n is a, c, g, or t
cttggctttatatatcttgtggaaaggacgaaacaccgtaatttctactaagtgtagataaggcctcgatctccgtctttaatttctactaagtgtagatacgccaatcgacatgatgattaatttctactaagtgtagatttttttnnnnnnnnnnaagcttggcgtggatccgatatcaactagatcttgagacaaatggcagtattcatccacaattttaaaagaaaaggggggattggggggtacagtgcaggggaaagaatagtagacataatagcaacagacatacaaactaaag

SEQ ID NO: 11457 - DNA, 301 bp, Artificial Sequence
  Nf2.4_Apc.4
  crRNA array
  misc_feature (148)..(157): n is a, c, g, or t
cttggctttatatatcttgtggaaaggacgaaacaccgtaatttctactaagtgtagataaggcctcgatctccgtctttaatttctactaagtgtagatcaccaggggatgatgtgccctaatttctactaagtgtagatttttttnnnnnnnnnnaagcttggcgtggatccgatatcaactagatcttgagacaaatggcagtattcatccacaattttaaaagaaaaggggggattggggggtacagtgcaggggaaagaatagtagacataatagcaacagacatacaaactaaag

SEQ ID NO: 11458 - DNA, 301 bp, Artificial Sequence
  Nf2.1_Fanca.1
  crRNA array
  misc_feature (148)..(157): n is a, c, g, or t
cttggctttatatatcttgtggaaaggacgaaacaccgtaatttctactaagtgtagatcggagtcatctgatagagattaatttctactaagtgtagatggaggccccggggcccaccataatttctactaagtgtagatttttttnnnnnnnnnnaagcttggcgtggatccgatatcaactagatcttgagacaaatggcagtattcatccacaattttaaaagaaaaggggggattggggggtacagtgcaggggaaagaatagtagacataatagcaacagacatacaaactaaag

SEQ ID NO: 11459 - DNA, 301 bp, Artificial Sequence
  Nf2.1_Fanca.2
  crRNA array
  misc_feature (148)..(157): n is a, c, g, or t
cttggctttatatatcttgtggaaaggacgaaacaccgtaatttctactaagtgtagatcggagtcatctgatagagattaatttctactaagtgtagatagagctaccacctagacagctaatttctactaagtgtagatttttttnnnnnnnnnnaagcttggcgtggatccgatatcaactagatcttgagacaaatggcagtattcatccacaattttaaaagaaaaggggggattggggggtacagtgcaggggaaagaatagtagacataatagcaacagacatacaaactaaag

SEQ ID NO: 11460 - DNA, 301 bp, Artificial Sequence
  Nf2.1_Fanca.3
  crRNA array
  misc_feature (148)..(157): n is a, c, g, or t
cttggctttatatatcttgtggaaaggacgaaacaccgtaatttctactaagtgtagatcggagtcatctgatagagattaatttctactaagtgtagataccaactgctgtgcctcgggtaatttctactaagtgtagatttttttnnnnnnnnnnaagcttggcgtggatccgatatcaactagatcttgagacaaatggcagtattcatccacaattttaaaagaaaaggggggattggggggtacagtgcaggggaaagaatagtagacataatagcaacagacatacaaactaaag

SEQ ID NO: 11461 - DNA, 301 bp, Artificial Sequence
  Nf2.1_Fanca.4
  crRNA array
  misc_feature (148)..(157): n is a, c, g, or t
cttggctttatatatcttgtggaaaggacgaaacaccgtaatttctactaagtgtagatcggagtcatctgatagagattaatttctactaagtgtagatcacccacccctggtgccaagtaatttctactaagtgtagatttttttnnnnnnnnnnaagcttggcgtggatccgatatcaactagatcttgagacaaatggcagtattcatccacaattttaaaagaaaaggggggattggggggtacagtgcaggggaaagaatagtagacataatagcaacagacatacaaactaaag

SEQ ID NO: 11462 - DNA, 301 bp, Artificial Sequence
  Nf2.2_Fanca.1
  crRNA array
  misc_feature (148)..(157): n is a, c, g, or t
cttggctttatatatcttgtggaaaggacgaaacaccgtaatttctactaagtgtagattgaggcgacggaaagctgactaatttctactaagtgtagatggaggccccggggcccaccataatttctactaagtgtagatttttttnnnnnnnnnnaagcttggcgtggatccgatatcaactagatcttgagacaaatggcagtattcatccacaattttaaaagaaaaggggggattggggggtacagtgcaggggaaagaatagtagacataatagcaacagacatacaaactaaag

SEQ ID NO: 11463 - DNA, 301 bp, Artificial Sequence
  Nf2.2_Fanca.2
  crRNA array
  misc_feature (148)..(157): n is a, c, g, or t
cttggctttatatatcttgtggaaaggacgaaacaccgtaatttctactaagtgtagattgaggcgacggaaagctgactaatttctactaagtgtagatagagctaccacctagacagctaatttctactaagtgtagatttttttnnnnnnnnnnaagcttggcgtggatccgatatcaactagatcttgagacaaatggcagtattcatccacaattttaaaagaaaaggggggattggggggtacagtgcaggggaaagaatagtagacataatagcaacagacatacaaactaaag

SEQ ID NO: 11464 - DNA, 301 bp, Artificial Sequence
  Nf2.2_Fanca.3
  crRNA array
  misc_feature (148)..(157): n is a, c, g, or t
cttggctttatatatcttgtggaaaggacgaaacaccgtaatttctactaagtgtagattgaggcgacggaaagctgactaatttctactaagtgtagataccaactgctgtgcctcgggtaatttctactaagtgtagatttttttnnnnnnnnnnaagcttggcgtggatccgatatcaactagatcttgagacaaatggcagtattcatccacaattttaaaagaaaaggggggattggggggtacagtgcaggggaaagaatagtagacataatagcaacagacatacaaactaaag

SEQ ID NO: 11465 - DNA, 301 bp, Artificial Sequence
  Nf2.2_Fanca.4
  crRNA array
  misc_feature (148)..(157): n is a, c, g, or t
cttggctttatatatcttgtggaaaggacgaaacaccgtaatttctactaagtgtagattgaggcgacggaaagctgactaatttctactaagtgtagatcacccacccctggtgccaagtaatttctactaagtgtagatttttttnnnnnnnnnnaagcttggcgtggatccgatatcaactagatcttgagacaaatggcagtattcatccacaattttaaaagaaaaggggggattggggggtacagtgcaggggaaagaatagtagacataatagcaacagacatacaaactaaag

SEQ ID NO: 11466 - DNA, 301 bp, Artificial Sequence
  Nf2.3_Fanca.1
  crRNA array
  misc_feature (148)..(157): n is a, c, g, or t
cttggctttatatatcttgtggaaaggacgaaacaccgtaatttctactaagtgtagatcgtcgcctcataaataggtctaatttctactaagtgtagatggaggccccggggcccaccataatttctactaagtgtagatttttttnnnnnnnnnnaagcttggcgtggatccgatatcaactagatcttgagacaaatggcagtattcatccacaattttaaaagaaaaggggggattggggggtacagtgcaggggaaagaatagtagacataatagcaacagacatacaaactaaag

SEQ ID NO: 11467 - DNA, 301 bp, Artificial Sequence
  Nf2.3_Fanca.2
  crRNA array
  misc_feature (148)..(157): n is a, c, g, or t
cttggctttatatatcttgtggaaaggacgaaacaccgtaatttctactaagtgtagatcgtcgcctcataaataggtctaatttctactaagtgtagatagagctaccacctagacagctaatttctactaagtgtagatttttttnnnnnnnnnnaagcttggcgtggatccgatatcaactagatcttgagacaaatggcagtattcatccacaattttaaaagaaaaggggggattggggggtacagtgcaggggaaagaatagtagacataatagcaacagacatacaaactaaag

SEQ ID NO: 11468 - DNA, 301 bp, Artificial Sequence
  Nf2.3_Fanca.3
  crRNA array
  misc_feature (148)..(157): n is a, c, g, or t
cttggctttatatatcttgtggaaaggacgaaacaccgtaatttctactaagtgtagatcgtcgcctcataaataggtctaatttctactaagtgtagataccaactgctgtgcctcgggtaatttctactaagtgtagatttttttnnnnnnnnnnaagcttggcgtggatccgatatcaactagatcttgagacaaatggcagtattcatccacaattttaaaagaaaaggggggattggggggtacagtgcaggggaaagaatagtagacataatagcaacagacatacaaactaaag

SEQ ID NO: 11469 - DNA, 301 bp, Artificial Sequence
  Nf2.3_Fanca.4
  crRNA array
  misc_feature (148)..(157): n is a, c, g, or t
cttggctttatatatcttgtggaaaggacgaaacaccgtaatttctactaagtgtagatcgtcgcctcataaataggtctaatttctactaagtgtagatcacccacccctggtgccaagtaatttctactaagtgtagatttttttnnnnnnnnnnaagcttggcgtggatccgatatcaactagatcttgagacaaatggcagtattcatccacaattttaaaagaaaaggggggattggggggtacagtgcaggggaaagaatagtagacataatagcaacagacatacaaactaaag

SEQ ID NO: 11470 - DNA, 301 bp, Artificial Sequence
  Nf2.4_Fanca.1
  crRNA array
  misc_feature (148)..(157): n is a, c, g, or t
cttggctttatatatcttgtggaaaggacgaaacaccgtaatttctactaagtgtagataaggcctcgatctccgtctttaatttctactaagtgtagatggaggccccggggcccaccataatttctactaagtgtagatttttttnnnnnnnnnnaagcttggcgtggatccgatatcaactagatcttgagacaaatggcagtattcatccacaattttaaaagaaaaggggggattggggggtacagtgcaggggaaagaatagtagacataatagcaacagacatacaaactaaag

SEQ ID NO: 11471 - DNA, 301 bp, Artificial Sequence
  Nf2.4_Fanca.2
  crRNA array
  misc_feature (148)..(157): n is a, c, g, or t
cttggctttatatatcttgtggaaaggacgaaacaccgtaatttctactaagtgtagataaggcctcgatctccgtctttaatttctactaagtgtagatagagctaccacctagacagctaatttctactaagtgtagatttttttnnnnnnnnnnaagcttggcgtggatccgatatcaactagatcttgagacaaatggcagtattcatccacaattttaaaagaaaaggggggattggggggtacagtgcaggggaaagaatagtagacataatagcaacagacatacaaactaaag

SEQ ID NO: 11472 - DNA, 301 bp, Artificial Sequence
  Nf2.4_Fanca.3
  crRNA array
  misc_feature (148)..(157): n is a, c, g, or t
cttggctttatatatcttgtggaaaggacgaaacaccgtaatttctactaagtgtagataaggcctcgatctccgtctttaatttctactaagtgtagataccaactgctgtgcctcgggtaatttctactaagtgtagatttttttnnnnnnnnnnaagcttggcgtggatccgatatcaactagatcttgagacaaatggcagtattcatccacaattttaaaagaaaaggggggattggggggtacagtgcaggggaaagaatagtagacataatagcaacagacatacaaactaaag

SEQ ID NO: 11473 - DNA, 301 bp, Artificial Sequence
  Nf2.4_Fanca.4
  crRNA array
  misc_feature (148)..(157): n is a, c, g, or t
cttggctttatatatcttgtggaaaggacgaaacaccgtaatttctactaagtgtagataaggcctcgatctccgtctttaatttctactaagtgtagatcacccacccctggtgccaagtaatttctactaagtgtagatttttttnnnnnnnnnnaagcttggcgtggatccgatatcaactagatcttgagacaaatggcagtattcatccacaattttaaaagaaaaggggggattggggggtacagtgcaggggaaagaatagtagacataatagcaacagacatacaaactaaag

SEQ ID NO: 11474 - DNA, 301 bp, Artificial Sequence
  Nf2.1_Nf1.1
  crRNA array
  misc_feature (148)..(157): n is a, c, g, or t
cttggctttatatatcttgtggaaaggacgaaacaccgtaatttctactaagtgtagatcggagtcatctgatagagattaatttctactaagtgtagattggcgatccggaatcctctgtaatttctactaagtgtagatttttttnnnnnnnnnnaagcttggcgtggatccgatatcaactagatcttgagacaaatggcagtattcatccacaattttaaaagaaaaggggggattggggggtacagtgcaggggaaagaatagtagacataatagcaacagacatacaaactaaag

SEQ ID NO: 11475 - DNA, 301 bp, Artificial Sequence
  Nf2.1_Nf1.2
  crRNA array
  misc_feature (148)..(157): n is a, c, g, or t
cttggctttatatatcttgtggaaaggacgaaacaccgtaatttctactaagtgtagatcggagtcatctgatagagattaatttctactaagtgtagatggaaacacaacgctggcctctaatttctactaagtgtagatttttttnnnnnnnnnnaagcttggcgtggatccgatatcaactagatcttgagacaaatggcagtattcatccacaattttaaaagaaaaggggggattggggggtacagtgcaggggaaagaatagtagacataatagcaacagacatacaaactaaag

SEQ ID NO: 11476 - DNA, 301 bp, Artificial Sequence
  Nf2.1_Nf1.3
  crRNA array
  misc_feature (148)..(157): n is a, c, g, or t
cttggctttatatatcttgtggaaaggacgaaacaccgtaatttctactaagtgtagatcggagtcatctgatagagattaatttctactaagtgtagataatgatggaacgcagtcgcataatttctactaagtgtagatttttttnnnnnnnnnnaagcttggcgtggatccgatatcaactagatcttgagacaaatggcagtattcatccacaattttaaaagaaaaggggggattggggggtacagtgcaggggaaagaatagtagacataatagcaacagacatacaaactaaag

SEQ ID NO: 11477 - DNA, 301 bp, Artificial Sequence
  Nf2.1_Nf1.4
  crRNA array
  misc_feature (148)..(157): n is a, c, g, or t
cttggctttatatatcttgtggaaaggacgaaacaccgtaatttctactaagtgtagatcggagtcatctgatagagattaatttctactaagtgtagattgcaaaaccatccaccaagttaatttctactaagtgtagatttttttnnnnnnnnnnaagcttggcgtggatccgatatcaactagatcttgagacaaatggcagtattcatccacaattttaaaagaaaaggggggattggggggtacagtgcaggggaaagaatagtagacataatagcaacagacatacaaactaaag

SEQ ID NO: 11478 - DNA, 301 bp, Artificial Sequence
  Nf2.2_Nf1.1
  crRNA array
  misc_feature (148)..(157): n is a, c, g, or t
cttggctttatatatcttgtggaaaggacgaaacaccgtaatttctactaagtgtagattgaggcgacggaaagctgactaatttctactaagtgtagattggcgatccggaatcctctgtaatttctactaagtgtagatttttttnnnnnnnnnnaagcttggcgtggatccgatatcaactagatcttgagacaaatggcagtattcatccacaattttaaaagaaaaggggggattggggggtacagtgcaggggaaagaatagtagacataatagcaacagacatacaaactaaag

SEQ ID NO: 11479 - DNA, 301 bp, Artificial Sequence
  Nf2.2_Nf1.2
  crRNA array
  misc_feature (148)..(157): n is a, c, g, or t
cttggctttatatatcttgtggaaaggacgaaacaccgtaatttctactaagtgtagattgaggcgacggaaagctgactaatttctactaagtgtagatggaaacacaacgctggcctctaatttctactaagtgtagatttttttnnnnnnnnnnaagcttggcgtggatccgatatcaactagatcttgagacaaatggcagtattcatccacaattttaaaagaaaaggggggattggggggtacagtgcaggggaaagaatagtagacataatagcaacagacatacaaactaaag

SEQ ID NO: 11480 - DNA, 301 bp, Artificial Sequence
  Nf2.2_Nf1.3
  crRNA array
  misc_feature (148)..(157): n is a, c, g, or t
cttggctttatatatcttgtggaaaggacgaaacaccgtaatttctactaagtgtagattgaggcgacggaaagctgactaatttctactaagtgtagataatgatggaacgcagtcgcataatttctactaagtgtagatttttttnnnnnnnnnnaagcttggcgtggatccgatatcaactagatcttgagacaaatggcagtattcatccacaattttaaaagaaaaggggggattggggggtacagtgcaggggaaagaatagtagacataatagcaacagacatacaaactaaag

SEQ ID NO: 11481 - DNA, 301 bp, Artificial Sequence
  Nf2.2_Nf1.4
  crRNA array
  misc_feature (148)..(157): n is a, c, g, or t
cttggctttatatatcttgtggaaaggacgaaacaccgtaatttctactaagtgtagattgaggcgacggaaagctgactaatttctactaagtgtagattgcaaaaccatccaccaagttaatttctactaagtgtagatttttttnnnnnnnnnnaagcttggcgtggatccgatatcaactagatcttgagacaaatggcagtattcatccacaattttaaaagaaaaggggggattggggggtacagtgcaggggaaagaatagtagacataatagcaacagacatacaaactaaag

SEQ ID NO: 11482 - DNA, 301 bp, Artificial Sequence
  Nf2.3_Nf1.1
  crRNA array
  misc_feature (148)..(157): n is a, c, g, or t
cttggctttatatatcttgtggaaaggacgaaacaccgtaatttctactaagtgtagatcgtcgcctcataaataggtctaatttctactaagtgtagattggcgatccggaatcctctgtaatttctactaagtgtagatttttttnnnnnnnnnnaagcttggcgtggatccgatatcaactagatcttgagacaaatggcagtattcatccacaattttaaaagaaaaggggggattggggggtacagtgcaggggaaagaatagtagacataatagcaacagacatacaaactaaag

SEQ ID NO: 11483 - DNA, 301 bp, Artificial Sequence
  Nf2.3_Nf1.2
  crRNA array
  misc_feature (148)..(157): n is a, c, g, or t
cttggctttatatatcttgtggaaaggacgaaacaccgtaatttctactaagtgtagatcgtcgcctcataaataggtctaatttctactaagtgtagatggaaacacaacgctggcctctaatttctactaagtgtagatttttttnnnnnnnnnnaagcttggcgtggatccgatatcaactagatcttgagacaaatggcagtattcatccacaattttaaaagaaaaggggggattggggggtacagtgcaggggaaagaatagtagacataatagcaacagacatacaaactaaag

SEQ ID NO: 11484 - DNA, 301 bp, Artificial Sequence
  Nf2.3_Nf1.3
  crRNA array
  misc_feature (148)..(157): n is a, c, g, or t
cttggctttatatatcttgtggaaaggacgaaacaccgtaatttctactaagtgtagatcgtcgcctcataaataggtctaatttctactaagtgtagataatgatggaacgcagtcgcataatttctactaagtgtagatttttttnnnnnnnnnnaagcttggcgtggatccgatatcaactagatcttgagacaaatggcagtattcatccacaattttaaaagaaaaggggggattggggggtacagtgcaggggaaagaatagtagacataatagcaacagacatacaaactaaag

SEQ ID NO: 11485 - DNA, 301 bp, Artificial Sequence
  Nf2.3_Nf1.4
  crRNA array
  misc_feature (148)..(157): n is a, c, g, or t
cttggctttatatatcttgtggaaaggacgaaacaccgtaatttctactaagtgtagatcgtcgcctcataaataggtctaatttctactaagtgtagattgcaaaaccatccaccaagttaatttctactaagtgtagatttttttnnnnnnnnnnaagcttggcgtggatccgatatcaactagatcttgagacaaatggcagtattcatccacaattttaaaagaaaaggggggattggggggtacagtgcaggggaaagaatagtagacataatagcaacagacatacaaactaaag

SEQ ID NO: 11486 - DNA, 301 bp, Artificial Sequence
  Nf2.4_Nf1.1
  crRNA array
  misc_feature (148)..(157): n is a, c, g, or t
cttggctttatatatcttgtggaaaggacgaaacaccgtaatttctactaagtgtagataaggcctcgatctccgtctttaatttctactaagtgtagattggcgatccggaatcctctgtaatttctactaagtgtagatttttttnnnnnnnnnnaagcttggcgtggatccgatatcaactagatcttgagacaaatggcagtattcatccacaattttaaaagaaaaggggggattggggggtacagtgcaggggaaagaatagtagacataatagcaacagacatacaaactaaag

SEQ ID NO: 11487 - DNA, 301 bp, Artificial Sequence
  Nf2.4_Nf1.2
  crRNA array
  misc_feature (148)..(157): n is a, c, g, or t
cttggctttatatatcttgtggaaaggacgaaacaccgtaatttctactaagtgtagataaggcctcgatctccgtctttaatttctactaagtgtagatggaaacacaacgctggcctctaatttctactaagtgtagatttttttnnnnnnnnnnaagcttggcgtggatccgatatcaactagatcttgagacaaatggcagtattcatccacaattttaaaagaaaaggggggattggggggtacagtgcaggggaaagaatagtagacataatagcaacagacatacaaactaaag

SEQ ID NO: 11488 - DNA, 301 bp, Artificial Sequence
  Nf2.4_Nf1.3
  crRNA array
  misc_feature (148)..(157): n is a, c, g, or t
cttggctttatatatcttgtggaaaggacgaaacaccgtaatttctactaagtgtagataaggcctcgatctccgtctttaatttctactaagtgtagataatgatggaacgcagtcgcataatttctactaagtgtagatttttttnnnnnnnnnnaagcttggcgtggatccgatatcaactagatcttgagacaaatggcagtattcatccacaattttaaaagaaaaggggggattggggggtacagtgcaggggaaagaatagtagacataatagcaacagacatacaaactaaag

SEQ ID NO: 11489 - DNA, 301 bp, Artificial Sequence
  Nf2.4_Nf1.4
  crRNA array
  misc_feature (148)..(157): n is a, c, g, or t
cttggctttatatatcttgtggaaaggacgaaacaccgtaatttctactaagtgtagataaggcctcgatctccgtctttaatttctactaagtgtagattgcaaaaccatccaccaagttaatttctactaagtgtagatttttttnnnnnnnnnnaagcttggcgtggatccgatatcaactagatcttgagacaaatggcagtattcatccacaattttaaaagaaaaggggggattggggggtacagtgcaggggaaagaatagtagacataatagcaacagacatacaaactaaag

SEQ ID NO: 11490 - DNA, 301 bp, Artificial Sequence
  Nf2.1_Kdm6a.1
  crRNA array
  misc_feature (148)..(157): n is a, c, g, or t
cttggctttatatatcttgtggaaaggacgaaacaccgtaatttctactaagtgtagatcggagtcatctgatagagattaatttctactaagtgtagatgctgccgcctctcgcggcagtaatttctactaagtgtagatttttttnnnnnnnnnnaagcttggcgtggatccgatatcaactagatcttgagacaaatggcagtattcatccacaattttaaaagaaaaggggggattggggggtacagtgcaggggaaagaatagtagacataatagcaacagacatacaaactaaag

SEQ ID NO: 11491 - DNA, 301 bp, Artificial Sequence
  Nf2.1_Kdm6a.2
  crRNA array
  misc_feature (148)..(157): n is a, c, g, or t
cttggctttatatatcttgtggaaaggacgaaacaccgtaatttctactaagtgtagatcggagtcatctgatagagattaatttctactaagtgtagatgctgcaggtaaggcacgttttaatttctactaagtgtagatttttttnnnnnnnnnnaagcttggcgtggatccgatatcaactagatcttgagacaaatggcagtattcatccacaattttaaaagaaaaggggggattggggggtacagtgcaggggaaagaatagtagacataatagcaacagacatacaaactaaag

SEQ ID NO: 11492 - DNA, 301 bp, Artificial Sequence
  Nf2.1_Kdm6a.3
  crRNA array
  misc_feature (148)..(157): n is a, c, g, or t
cttggctttatatatcttgtggaaaggacgaaacaccgtaatttctactaagtgtagatcggagtcatctgatagagattaatttctactaagtgtagattgctggtgccggggaagttttaatttctactaagtgtagatttttttnnnnnnnnnnaagcttggcgtggatccgatatcaactagatcttgagacaaatggcagtattcatccacaattttaaaagaaaaggggggattggggggtacagtgcaggggaaagaatagtagacataatagcaacagacatacaaactaaag

SEQ ID NO: 11493 - DNA, 301 bp, Artificial Sequence
  Nf2.1_Kdm6a.4
  crRNA array
  misc_feature (148)..(157): n is a, c, g, or t
cttggctttatatatcttgtggaaaggacgaaacaccgtaatttctactaagtgtagatcggagtcatctgatagagattaatttctactaagtgtagattgtctcctacgaatcccccctaatttctactaagtgtagatttttttnnnnnnnnnnaagcttggcgtggatccgatatcaactagatcttgagacaaatggcagtattcatccacaattttaaaagaaaaggggggattggggggtacagtgcaggggaaagaatagtagacataatagcaacagacatacaaactaaag

SEQ ID NO: 11494 - DNA, 301 bp, Artificial Sequence
  Nf2.2_Kdm6a.1
  crRNA array
  misc_feature (148)..(157): n is a, c, g, or t
cttggctttatatatcttgtggaaaggacgaaacaccgtaatttctactaagtgtagattgaggcgacggaaagctgactaatttctactaagtgtagatgctgccgcctctcgcggcagtaatttctactaagtgtagatttttttnnnnnnnnnnaagcttggcgtggatccgatatcaactagatcttgagacaaatggcagtattcatccacaattttaaaagaaaaggggggattggggggtacagtgcaggggaaagaatagtagacataatagcaacagacatacaaactaaag

SEQ ID NO: 11495 - DNA, 301 bp, Artificial Sequence
  Nf2.2_Kdm6a.2
  crRNA array
  misc_feature (148)..(157): n is a, c, g, or t
cttggctttatatatcttgtggaaaggacgaaacaccgtaatttctactaagtgtagattgaggcgacggaaagctgactaatttctactaagtgtagatgctgcaggtaaggcacgttttaatttctactaagtgtagatttttttnnnnnnnnnnaagcttggcgtggatccgatatcaactagatcttgagacaaatggcagtattcatccacaattttaaaagaaaaggggggattggggggtacagtgcaggggaaagaatagtagacataatagcaacagacatacaaactaaag

SEQ ID NO: 11496 - DNA, 301 bp, Artificial Sequence
  Nf2.2_Kdm6a.3
  crRNA array
  misc_feature (148)..(157): n is a, c, g, or t
cttggctttatatatcttgtggaaaggacgaaacaccgtaatttctactaagtgtagattgaggcgacggaaagctgactaatttctactaagtgtagattgctggtgccggggaagttttaatttctactaagtgtagatttttttnnnnnnnnnnaagcttggcgtggatccgatatcaactagatcttgagacaaatggcagtattcatccacaattttaaaagaaaaggggggattggggggtacagtgcaggggaaagaatagtagacataatagcaacagacatacaaactaaag

SEQ ID NO: 11497 - DNA, 301 bp, Artificial Sequence
  Nf2.2_Kdm6a.4
  crRNA array
  misc_feature (148)..(157): n is a, c, g, or t
cttggctttatatatcttgtggaaaggacgaaacaccgtaatttctactaagtgtagattgaggcgacggaaagctgactaatttctactaagtgtagattgtctcctacgaatcccccctaatttctactaagtgtagatttttttnnnnnnnnnnaagcttggcgtggatccgatatcaactagatcttgagacaaatggcagtattcatccacaattttaaaagaaaaggggggattggggggtacagtgcaggggaaagaatagtagacataatagcaacagacatacaaactaaag

SEQ ID NO: 11498 - DNA, 301 bp, Artificial Sequence
  Nf2.3_Kdm6a.1
  crRNA array
  misc_feature (148)..(157): n is a, c, g, or t
cttggctttatatatcttgtggaaaggacgaaacaccgtaatttctactaagtgtagatcgtcgcctcataaataggtctaatttctactaagtgtagatgctgccgcctctcgcggcagtaatttctactaagtgtagatttttttnnnnnnnnnnaagcttggcgtggatccgatatcaactagatcttgagacaaatggcagtattcatccacaattttaaaagaaaaggggggattggggggtacagtgcaggggaaagaatagtagacataatagcaacagacatacaaactaaag

SEQ ID NO: 11499 - DNA, 301 bp, Artificial Sequence
  Nf2.3_Kdm6a.2
  crRNA array
  misc_feature (148)..(157): n is a, c, g, or t
cttggctttatatatcttgtggaaaggacgaaacaccgtaatttctactaagtgtagatcgtcgcctcataaataggtctaatttctactaagtgtagatgctgcaggtaaggcacgttttaatttctactaagtgtagatttttttnnnnnnnnnnaagcttggcgtggatccgatatcaactagatcttgagacaaatggcagtattcatccacaattttaaaagaaaaggggggattggggggtacagtgcaggggaaagaatagtagacataatagcaacagacatacaaactaaag

SEQ ID NO: 11500 - DNA, 301 bp, Artificial Sequence
  Nf2.3_Kdm6a.3
  crRNA array
  misc_feature (148)..(157): n is a, c, g, or t
cttggctttatatatcttgtggaaaggacgaaacaccgtaatttctactaagtgtagatcgtcgcctcataaataggtctaatttctactaagtgtagattgctggtgccggggaagttttaatttctactaagtgtagatttttttnnnnnnnnnnaagcttggcgtggatccgatatcaactagatcttgagacaaatggcagtattcatccacaattttaaaagaaaaggggggattggggggtacagtgcaggggaaagaatagtagacataatagcaacagacatacaaactaaag

SEQ ID NO: 11501 - DNA, 301 bp, Artificial Sequence
  Nf2.3_Kdm6a.4
  crRNA array
  misc_feature (148)..(157): n is a, c, g, or t
cttggctttatatatcttgtggaaaggacgaaacaccgtaatttctactaagtgtagatcgtcgcctcataaataggtctaatttctactaagtgtagattgtctcctacgaatcccccctaatttctactaagtgtagatttttttnnnnnnnnnnaagcttggcgtggatccgatatcaactagatcttgagacaaatggcagtattcatccacaattttaaaagaaaaggggggattggggggtacagtgcaggggaaagaatagtagacataatagcaacagacatacaaactaaag

SEQ ID NO: 11502 - DNA, 301 bp, Artificial Sequence
  Nf2.4_Kdm6a.1
  crRNA array
  misc_feature (148)..(157): n is a, c, g, or t
cttggctttatatatcttgtggaaaggacgaaacaccgtaatttctactaagtgtagataaggcctcgatctccgtctttaatttctactaagtgtagatgctgccgcctctcgcggcagtaatttctactaagtgtagatttttttnnnnnnnnnnaagcttggcgtggatccgatatcaactagatcttgagacaaatggcagtattcatccacaattttaaaagaaaaggggggattggggggtacagtgcaggggaaagaatagtagacataatagcaacagacatacaaactaaag

SEQ ID NO: 11503 - DNA, 301 bp, Artificial Sequence
  Nf2.4_Kdm6a.2
  crRNA array
  misc_feature (148)..(157): n is a, c, g, or t
cttggctttatatatcttgtggaaaggacgaaacaccgtaatttctactaagtgtagataaggcctcgatctccgtctttaatttctactaagtgtagatgctgcaggtaaggcacgttttaatttctactaagtgtagatttttttnnnnnnnnnnaagcttggcgtggatccgatatcaactagatcttgagacaaatggcagtattcatccacaattttaaaagaaaaggggggattggggggtacagtgcaggggaaagaatagtagacataatagcaacagacatacaaactaaag

SEQ ID NO: 11504 - DNA, 301 bp, Artificial Sequence
  Nf2.4_Kdm6a.3
  crRNA array
  misc_feature (148)..(157): n is a, c, g, or t
cttggctttatatatcttgtggaaaggacgaaacaccgtaatttctactaagtgtagataaggcctcgatctccgtctttaatttctactaagtgtagattgctggtgccggggaagttttaatttctactaagtgtagatttttttnnnnnnnnnnaagcttggcgtggatccgatatcaactagatcttgagacaaatggcagtattcatccacaattttaaaagaaaaggggggattggggggtacagtgcaggggaaagaatagtagacataatagcaacagacatacaaactaaag

SEQ ID NO: 11505 - DNA, 301 bp, Artificial Sequence
  Nf2.4_Kdm6a.4
  crRNA array
  misc_feature (148)..(157): n is a, c, g, or t
cttggctttatatatcttgtggaaaggacgaaacaccgtaatttctactaagtgtagataaggcctcgatctccgtctttaatttctactaagtgtagattgtctcctacgaatcccccctaatttctactaagtgtagatttttttnnnnnnnnnnaagcttggcgtggatccgatatcaactagatcttgagacaaatggcagtattcatccacaattttaaaagaaaaggggggattggggggtacagtgcaggggaaagaatagtagacataatagcaacagacatacaaactaaag

SEQ ID NO: 11506 - DNA, 301 bp, Artificial Sequence
  Nf2.1_Ercc5.1
  crRNA array
  misc_feature (148)..(157): n is a, c, g, or t
cttggctttatatatcttgtggaaaggacgaaacaccgtaatttctactaagtgtagatcggagtcatctgatagagattaatttctactaagtgtagatacggcacgagcaagagacactaatttctactaagtgtagatttttttnnnnnnnnnnaagcttggcgtggatccgatatcaactagatcttgagacaaatggcagtattcatccacaattttaaaagaaaaggggggattggggggtacagtgcaggggaaagaatagtagacataatagcaacagacatacaaactaaag

SEQ ID NO: 11507 - DNA, 301 bp, Artificial Sequence
  Nf2.1_Ercc5.2
  crRNA array
  misc_feature (148)..(157): n is a, c, g, or t
cttggctttatatatcttgtggaaaggacgaaacaccgtaatttctactaagtgtagatcggagtcatctgatagagattaatttctactaagtgtagatgagtatcacatcggtgactctaatttctactaagtgtagatttttttnnnnnnnnnnaagcttggcgtggatccgatatcaactagatcttgagacaaatggcagtattcatccacaattttaaaagaaaaggggggattggggggtacagtgcaggggaaagaatagtagacataatagcaacagacatacaaactaaag

SEQ ID NO: 11508 - DNA, 301 bp, Artificial Sequence
  Nf2.1_Ercc5.3
  crRNA array
  misc_feature (148)..(157): n is a, c, g, or t
cttggctttatatatcttgtggaaaggacgaaacaccgtaatttctactaagtgtagatcggagtcatctgatagagattaatttctactaagtgtagatggagtgggtccaggcctcgttaatttctactaagtgtagatttttttnnnnnnnnnnaagcttggcgtggatccgatatcaactagatcttgagacaaatggcagtattcatccacaattttaaaagaaaaggggggattggggggtacagtgcaggggaaagaatagtagacataatagcaacagacatacaaactaaag

SEQ ID NO: 11509 - DNA, 301 bp, Artificial Sequence
  Nf2.1_Ercc5.4
  crRNA array
  misc_feature (148)..(157): n is a, c, g, or t
cttggctttatatatcttgtggaaaggacgaaacaccgtaatttctactaagtgtagatcggagtcatctgatagagattaatttctactaagtgtagatcagagccggtggaataatgttaatttctactaagtgtagatttttttnnnnnnnnnnaagcttggcgtggatccgatatcaactagatcttgagacaaatggcagtattcatccacaattttaaaagaaaaggggggattggggggtacagtgcaggggaaagaatagtagacataatagcaacagacatacaaactaaag

SEQ ID NO: 11510 - DNA, 301 bp, Artificial Sequence
  Nf2.2_Ercc5.1
  crRNA array
  misc_feature (148)..(157): n is a, c, g, or t
cttggctttatatatcttgtggaaaggacgaaacaccgtaatttctactaagtgtagattgaggcgacggaaagctgactaatttctactaagtgtagatacggcacgagcaagagacactaatttctactaagtgtagatttttttnnnnnnnnnnaagcttggcgtggatccgatatcaactagatcttgagacaaatggcagtattcatccacaattttaaaagaaaaggggggattggggggtacagtgcaggggaaagaatagtagacataatagcaacagacatacaaactaaag

SEQ ID NO: 11511 - DNA, 301 bp, Artificial Sequence
  Nf2.2_Ercc5.2
  crRNA array
  misc_feature (148)..(157): n is a, c, g, or t
cttggctttatatatcttgtggaaaggacgaaacaccgtaatttctactaagtgtagattgaggcgacggaaagctgactaatttctactaagtgtagatgagtatcacatcggtgactctaatttctactaagtgtagatttttttnnnnnnnnnnaagcttggcgtggatccgatatcaactagatcttgagacaaatggcagtattcatccacaattttaaaagaaaaggggggattggggggtacagtgcaggggaaagaatagtagacataatagcaacagacatacaaactaaag

SEQ ID NO: 11512 - DNA, 301 bp, Artificial Sequence
  Nf2.2_Ercc5.3
  crRNA array
  misc_feature (148)..(157): n is a, c, g, or t
cttggctttatatatcttgtggaaaggacgaaacaccgtaatttctactaagtgtagattgaggcgacggaaagctgactaatttctactaagtgtagatggagtgggtccaggcctcgttaatttctactaagtgtagatttttttnnnnnnnnnnaagcttggcgtggatccgatatcaactagatcttgagacaaatggcagtattcatccacaattttaaaagaaaaggggggattggggggtacagtgcaggggaaagaatagtagacataatagcaacagacatacaaactaaag

SEQ ID NO: 11513 - DNA, 301 bp, Artificial Sequence
  Nf2.2_Ercc5.4
  crRNA array
  misc_feature (148)..(157): n is a, c, g, or t
cttggctttatatatcttgtggaaaggacgaaacaccgtaatttctactaagtgtagattgaggcgacggaaagctgactaatttctactaagtgtagatcagagccggtggaataatgttaatttctactaagtgtagatttttttnnnnnnnnnnaagcttggcgtggatccgatatcaactagatcttgagacaaatggcagtattcatccacaattttaaaagaaaaggggggattggggggtacagtgcaggggaaagaatagtagacataatagcaacagacatacaaactaaag

SEQ ID NO: 11514 - DNA, 301 bp, Artificial Sequence
  Nf2.3_Ercc5.1
  crRNA array
  misc_feature (148)..(157): n is a, c, g, or t
cttggctttatatatcttgtggaaaggacgaaacaccgtaatttctactaagtgtagatcgtcgcctcataaataggtctaatttctactaagtgtagatacggcacgagcaagagacactaatttctactaagtgtagatttttttnnnnnnnnnnaagcttggcgtggatccgatatcaactagatcttgagacaaatggcagtattcatccacaattttaaaagaaaaggggggattggggggtacagtgcaggggaaagaatagtagacataatagcaacagacatacaaactaaag

SEQ ID NO: 11515 - DNA, 301 bp, Artificial Sequence
  Nf2.3_Ercc5.2
  crRNA array
  misc_feature (148)..(157): n is a, c, g, or t
cttggctttatatatcttgtggaaaggacgaaacaccgtaatttctactaagtgtagatcgtcgcctcataaataggtctaatttctactaagtgtagatgagtatcacatcggtgactctaatttctactaagtgtagatttttttnnnnnnnnnnaagcttggcgtggatccgatatcaactagatcttgagacaaatggcagtattcatccacaattttaaaagaaaaggggggattggggggtacagtgcaggggaaagaatagtagacataatagcaacagacatacaaactaaag

SEQ ID NO: 11516 - DNA, 301 bp, Artificial Sequence
  Nf2.3_Ercc5.3
  crRNA array
  misc_feature (148)..(157): n is a, c, g, or t
cttggctttatatatcttgtggaaaggacgaaacaccgtaatttctactaagtgtagatcgtcgcctcataaataggtctaatttctactaagtgtagatggagtgggtccaggcctcgttaatttctactaagtgtagatttttttnnnnnnnnnnaagcttggcgtggatccgatatcaactagatcttgagacaaatggcagtattcatccacaattttaaaagaaaaggggggattggggggtacagtgcaggggaaagaatagtagacataatagcaacagacatacaaactaaag

SEQ ID NO: 11517 - DNA, 301 bp, Artificial Sequence
  Nf2.3_Ercc5.4
  crRNA array
  misc_feature (148)..(157): n is a, c, g, or t
cttggctttatatatcttgtggaaaggacgaaacaccgtaatttctactaagtgtagatcgtcgcctcataaataggtctaatttctactaagtgtagatcagagccggtggaataatgttaatttctactaagtgtagatttttttnnnnnnnnnnaagcttggcgtggatccgatatcaactagatcttgagacaaatggcagtattcatccacaattttaaaagaaaaggggggattggggggtacagtgcaggggaaagaatagtagacataatagcaacagacatacaaactaaag

SEQ ID NO: 11518 - DNA, 301 bp, Artificial Sequence
  Nf2.4_Ercc5.1
  crRNA array
  misc_feature (148)..(157): n is a, c, g, or t
cttggctttatatatcttgtggaaaggacgaaacaccgtaatttctactaagtgtagataaggcctcgatctccgtctttaatttctactaagtgtagatacggcacgagcaagagacactaatttctactaagtgtagatttttttnnnnnnnnnnaagcttggcgtggatccgatatcaactagatcttgagacaaatggcagtattcatccacaattttaaaagaaaaggggggattggggggtacagtgcaggggaaagaatagtagacataatagcaacagacatacaaactaaag

SEQ ID NO: 11519 - DNA, 301 bp, Artificial Sequence
  Nf2.4_Ercc5.2
  crRNA array
  misc_feature (148)..(157): n is a, c, g, or t
cttggctttatatatcttgtggaaaggacgaaacaccgtaatttctactaagtgtagataaggcctcgatctccgtctttaatttctactaagtgtagatgagtatcacatcggtgactctaatttctactaagtgtagatttttttnnnnnnnnnnaagcttggcgtggatccgatatcaactagatcttgagacaaatggcagtattcatccacaattttaaaagaaaaggggggattggggggtacagtgcaggggaaagaatagtagacataatagcaacagacatacaaactaaag

SEQ ID NO: 11520 - DNA, 301 bp, Artificial Sequence
  Nf2.4_Ercc5.3
  crRNA array
  misc_feature (148)..(157): n is a, c, g, or t
cttggctttatatatcttgtggaaaggacgaaacaccgtaatttctactaagtgtagataaggcctcgatctccgtctttaatttctactaagtgtagatggagtgggtccaggcctcgttaatttctactaagtgtagatttttttnnnnnnnnnnaagcttggcgtggatccgatatcaactagatcttgagacaaatggcagtattcatccacaattttaaaagaaaaggggggattggggggtacagtgcaggggaaagaatagtagacataatagcaacagacatacaaactaaag

SEQ ID NO: 11521 - DNA, 301 bp, Artificial Sequence
  Nf2.4_Ercc5.4
  crRNA array
  misc_feature (148)..(157): n is a, c, g, or t
cttggctttatatatcttgtggaaaggacgaaacaccgtaatttctactaagtgtagataaggcctcgatctccgtctttaatttctactaagtgtagatcagagccggtggaataatgttaatttctactaagtgtagatttttttnnnnnnnnnnaagcttggcgtggatccgatatcaactagatcttgagacaaatggcagtattcatccacaattttaaaagaaaaggggggattggggggtacagtgcaggggaaagaatagtagacataatagcaacagacatacaaactaaag

SEQ ID NO: 11522 - DNA, 301 bp, Artificial Sequence
  Nf2.1_Arid1b.1
  crRNA array
  misc_feature (148)..(157): n is a, c, g, or t
cttggctttatatatcttgtggaaaggacgaaacaccgtaatttctactaagtgtagatcggagtcatctgatagagattaatttctactaagtgtagatgctgctgctgtagtgcgtggtaatttctactaagtgtagatttttttnnnnnnnnnnaagcttggcgtggatccgatatcaactagatcttgagacaaatggcagtattcatccacaattttaaaagaaaaggggggattggggggtacagtgcaggggaaagaatagtagacataatagcaacagacatacaaactaaag

SEQ ID NO: 11523 - DNA, 301 bp, Artificial Sequence
  Nf2.1_Arid1b.2
  crRNA array
  misc_feature (148)..(157): n is a, c, g, or t
cttggctttatatatcttgtggaaaggacgaaacaccgtaatttctactaagtgtagatcggagtcatctgatagagattaatttctactaagtgtagatagtgcaaaactgagcgcgggtaatttctactaagtgtagatttttttnnnnnnnnnnaagcttggcgtggatccgatatcaactagatcttgagacaaatggcagtattcatccacaattttaaaagaaaaggggggattggggggtacagtgcaggggaaagaatagtagacataatagcaacagacatacaaactaaag

SEQ ID NO: 11524 - DNA, 301 bp, Artificial Sequence
  Nf2.1_Arid1b.3
  crRNA array
  misc_feature (148)..(157): n is a, c, g, or t
cttggctttatatatcttgtggaaaggacgaaacaccgtaatttctactaagtgtagatcggagtcatctgatagagattaatttctactaagtgtagatcactcaaaggcgaacaggtataatttctactaagtgtagatttttttnnnnnnnnnnaagcttggcgtggatccgatatcaactagatcttgagacaaatggcagtattcatccacaattttaaaagaaaaggggggattggggggtacagtgcaggggaaagaatagtagacataatagcaacagacatacaaactaaag

SEQ ID NO: 11525 - DNA, 301 bp, Artificial Sequence
  Nf2.1_Arid1b.4
  crRNA array
  misc_feature (148)..(157): n is a, c, g, or t
cttggctttatatatcttgtggaaaggacgaaacaccgtaatttctactaagtgtagatcggagtcatctgatagagattaatttctactaagtgtagatctcctggctccgtagaagcataatttctactaagtgtagatttttttnnnnnnnnnnaagcttggcgtggatccgatatcaactagatcttgagacaaatggcagtattcatccacaattttaaaagaaaaggggggattggggggtacagtgcaggggaaagaatagtagacataatagcaacagacatacaaactaaag

SEQ ID NO: 11526 - DNA, 301 bp, Artificial Sequence
  Nf2.2_Arid1b.1
  crRNA array
  misc_feature (148)..(157): n is a, c, g, or t
cttggctttatatatcttgtggaaaggacgaaacaccgtaatttctactaagtgtagattgaggcgacggaaagctgactaatttctactaagtgtagatgctgctgctgtagtgcgtggtaatttctactaagtgtagatttttttnnnnnnnnnnaagcttggcgtggatccgatatcaactagatcttgagacaaatggcagtattcatccacaattttaaaagaaaaggggggattggggggtacagtgcaggggaaagaatagtagacataatagcaacagacatacaaactaaag

SEQ ID NO: 11527 - DNA, 301 bp, Artificial Sequence
  Nf2.2_Arid1b.2
  crRNA array
  misc_feature (148)..(157): n is a, c, g, or t
cttggctttatatatcttgtggaaaggacgaaacaccgtaatttctactaagtgtagattgaggcgacggaaagctgactaatttctactaagtgtagatagtgcaaaactgagcgcgggtaatttctactaagtgtagatttttttnnnnnnnnnnaagcttggcgtggatccgatatcaactagatcttgagacaaatggcagtattcatccacaattttaaaagaaaaggggggattggggggtacagtgcaggggaaagaatagtagacataatagcaacagacatacaaactaaag

SEQ ID NO: 11528 - DNA, 301 bp, Artificial Sequence
  Nf2.2_Arid1b.3
  crRNA array
  misc_feature (148)..(157): n is a, c, g, or t
cttggctttatatatcttgtggaaaggacgaaacaccgtaatttctactaagtgtagattgaggcgacggaaagctgactaatttctactaagtgtagatcactcaaaggcgaacaggtataatttctactaagtgtagatttttttnnnnnnnnnnaagcttggcgtggatccgatatcaactagatcttgagacaaatggcagtattcatccacaattttaaaagaaaaggggggattggggggtacagtgcaggggaaagaatagtagacataatagcaacagacatacaaactaaag

SEQ ID NO: 11529 - DNA, 301 bp, Artificial Sequence
  Nf2.2_Arid1b.4
  crRNA array
  misc_feature (148)..(157): n is a, c, g, or t
cttggctttatatatcttgtggaaaggacgaaacaccgtaatttctactaagtgtagattgaggcgacggaaagctgactaatttctactaagtgtagatctcctggctccgtagaagcataatttctactaagtgtagatttttttnnnnnnnnnnaagcttggcgtggatccgatatcaactagatcttgagacaaatggcagtattcatccacaattttaaaagaaaaggggggattggggggtacagtgcaggggaaagaatagtagacataatagcaacagacatacaaactaaag

SEQ ID NO: 11530 - DNA, 301 bp, Artificial Sequence
  Nf2.3_Arid1b.1
  crRNA array
  misc_feature (148)..(157): n is a, c, g, or t
cttggctttatatatcttgtggaaaggacgaaacaccgtaatttctactaagtgtagatcgtcgcctcataaataggtctaatttctactaagtgtagatgctgctgctgtagtgcgtggtaatttctactaagtgtagatttttttnnnnnnnnnnaagcttggcgtggatccgatatcaactagatcttgagacaaatggcagtattcatccacaattttaaaagaaaaggggggattggggggtacagtgcaggggaaagaatagtagacataatagcaacagacatacaaactaaag

SEQ ID NO: 11531 - DNA, 301 bp, Artificial Sequence
  Nf2.3_Arid1b.2
  crRNA array
  misc_feature (148)..(157): n is a, c, g, or t
cttggctttatatatcttgtggaaaggacgaaacaccgtaatttctactaagtgtagatcgtcgcctcataaataggtctaatttctactaagtgtagatagtgcaaaactgagcgcgggtaatttctactaagtgtagatttttttnnnnnnnnnnaagcttggcgtggatccgatatcaactagatcttgagacaaatggcagtattcatccacaattttaaaagaaaaggggggattggggggtacagtgcaggggaaagaatagtagacataatagcaacagacatacaaactaaag

SEQ ID NO: 11532 - DNA, 301 bp, Artificial Sequence
  Nf2.3_Arid1b.3
  crRNA array
  misc_feature (148)..(157): n is a, c, g, or t
cttggctttatatatcttgtggaaaggacgaaacaccgtaatttctactaagtgtagatcgtcgcctcataaataggtctaatttctactaagtgtagatcactcaaaggcgaacaggtataatttctactaagtgtagatttttttnnnnnnnnnnaagcttggcgtggatccgatatcaactagatcttgagacaaatggcagtattcatccacaattttaaaagaaaaggggggattggggggtacagtgcaggggaaagaatagtagacataatagcaacagacatacaaactaaag

SEQ ID NO: 11533 - DNA, 301 bp, Artificial Sequence
  Nf2.3_Arid1b.4
  crRNA array
  misc_feature (148)..(157): n is a, c, g, or t
cttggctttatatatcttgtggaaaggacgaaacaccgtaatttctactaagtgtagatcgtcgcctcataaataggtctaatttctactaagtgtagatctcctggctccgtagaagcataatttctactaagtgtagatttttttnnnnnnnnnnaagcttggcgtggatccgatatcaactagatcttgagacaaatggcagtattcatccacaattttaaaagaaaaggggggattggggggtacagtgcaggggaaagaatagtagacataatagcaacagacatacaaactaaag

SEQ ID NO: 11534 - DNA, 301 bp, Artificial Sequence
  Nf2.4_Arid1b.1
  crRNA array
  misc_feature (148)..(157): n is a, c, g, or t
cttggctttatatatcttgtggaaaggacgaaacaccgtaatttctactaagtgtagataaggcctcgatctccgtctttaatttctactaagtgtagatgctgctgctgtagtgcgtggtaatttctactaagtgtagatttttttnnnnnnnnnnaagcttggcgtggatccgatatcaactagatcttgagacaaatggcagtattcatccacaattttaaaagaaaaggggggattggggggtacagtgcaggggaaagaatagtagacataatagcaacagacatacaaactaaag

SEQ ID NO: 11535 - DNA, 301 bp, Artificial Sequence
  Nf2.4_Arid1b.2
  crRNA array
  misc_feature (148)..(157): n is a, c, g, or t
cttggctttatatatcttgtggaaaggacgaaacaccgtaatttctactaagtgtagataaggcctcgatctccgtctttaatttctactaagtgtagatagtgcaaaactgagcgcgggtaatttctactaagtgtagatttttttnnnnnnnnnnaagcttggcgtggatccgatatcaactagatcttgagacaaatggcagtattcatccacaattttaaaagaaaaggggggattggggggtacagtgcaggggaaagaatagtagacataatagcaacagacatacaaactaaag

SEQ ID NO: 11536 - DNA, 301 bp, Artificial Sequence
  Nf2.4_Arid1b.3
  crRNA array
  misc_feature (148)..(157): n is a, c, g, or t
cttggctttatatatcttgtggaaaggacgaaacaccgtaatttctactaagtgtagataaggcctcgatctccgtctttaatttctactaagtgtagatcactcaaaggcgaacaggtataatttctactaagtgtagatttttttnnnnnnnnnnaagcttggcgtggatccgatatcaactagatcttgagacaaatggcagtattcatccacaattttaaaagaaaaggggggattggggggtacagtgcaggggaaagaatagtagacataatagcaacagacatacaaactaaag

SEQ ID NO: 11537 - DNA, 301 bp, Artificial Sequence
  Nf2.4_Arid1b.4
  crRNA array
  misc_feature (148)..(157): n is a, c, g, or t
cttggctttatatatcttgtggaaaggacgaaacaccgtaatttctactaagtgtagataaggcctcgatctccgtctttaatttctactaagtgtagatctcctggctccgtagaagcataatttctactaagtgtagatttttttnnnnnnnnnnaagcttggcgtggatccgatatcaactagatcttgagacaaatggcagtattcatccacaattttaaaagaaaaggggggattggggggtacagtgcaggggaaagaatagtagacataatagcaacagacatacaaactaaag

SEQ ID NO: 11538 - DNA, 301 bp, Artificial Sequence
  Nf2.1_Rb1.1
  crRNA array
  misc_feature (148)..(157): n is a, c, g, or t
cttggctttatatatcttgtggaaaggacgaaacaccgtaatttctactaagtgtagatcggagtcatctgatagagattaatttctactaagtgtagattctgacatgatcgggtaccttaatttctactaagtgtagatttttttnnnnnnnnnnaagcttggcgtggatccgatatcaactagatcttgagacaaatggcagtattcatccacaattttaaaagaaaaggggggattggggggtacagtgcaggggaaagaatagtagacataatagcaacagacatacaaactaaag

SEQ ID NO: 11539 - DNA, 301 bp, Artificial Sequence
  Nf2.1_Rb1.2
  crRNA array
  misc_feature (148)..(157): n is a, c, g, or t
cttggctttatatatcttgtggaaaggacgaaacaccgtaatttctactaagtgtagatcggagtcatctgatagagattaatttctactaagtgtagatgtctctgcatgaaaacggagtaatttctactaagtgtagatttttttnnnnnnnnnnaagcttggcgtggatccgatatcaactagatcttgagacaaatggcagtattcatccacaattttaaaagaaaaggggggattggggggtacagtgcaggggaaagaatagtagacataatagcaacagacatacaaactaaag

SEQ ID NO: 11540 - DNA, 301 bp, Artificial Sequence
  Nf2.1_Rb1.3
  crRNA array
  misc_feature (148)..(157): n is a, c, g, or t
cttggctttatatatcttgtggaaaggacgaaacaccgtaatttctactaagtgtagatcggagtcatctgatagagattaatttctactaagtgtagatagccaatctggtctaataactaatttctactaagtgtagatttttttnnnnnnnnnnaagcttggcgtggatccgatatcaactagatcttgagacaaatggcagtattcatccacaattttaaaagaaaaggggggattggggggtacagtgcaggggaaagaatagtagacataatagcaacagacatacaaactaaag

SEQ ID NO: 11541 - DNA, 301 bp, Artificial Sequence
  Nf2.1_Rb1.4
  crRNA array
  misc_feature (148)..(157): n is a, c, g, or t
cttggctttatatatcttgtggaaaggacgaaacaccgtaatttctactaagtgtagatcggagtcatctgatagagattaatttctactaagtgtagattgtagctcagtaaaagtgaataatttctactaagtgtagatttttttnnnnnnnnnnaagcttggcgtggatccgatatcaactagatcttgagacaaatggcagtattcatccacaattttaaaagaaaaggggggattggggggtacagtgcaggggaaagaatagtagacataatagcaacagacatacaaactaaag

SEQ ID NO: 11542 - DNA, 301 bp, Artificial Sequence
  Nf2.2_Rb1.1
  crRNA array
  misc_feature (148)..(157): n is a, c, g, or t
cttggctttatatatcttgtggaaaggacgaaacaccgtaatttctactaagtgtagattgaggcgacggaaagctgactaatttctactaagtgtagattctgacatgatcgggtaccttaatttctactaagtgtagatttttttnnnnnnnnnnaagcttggcgtggatccgatatcaactagatcttgagacaaatggcagtattcatccacaattttaaaagaaaaggggggattggggggtacagtgcaggggaaagaatagtagacataatagcaacagacatacaaactaaag

SEQ ID NO: 11543 - DNA, 301 bp, Artificial Sequence
  Nf2.2_Rb1.2
  crRNA array
  misc_feature (148)..(157): n is a, c, g, or t
cttggctttatatatcttgtggaaaggacgaaacaccgtaatttctactaagtgtagattgaggcgacggaaagctgactaatttctactaagtgtagatgtctctgcatgaaaacggagtaatttctactaagtgtagatttttttnnnnnnnnnnaagcttggcgtggatccgatatcaactagatcttgagacaaatggcagtattcatccacaattttaaaagaaaaggggggattggggggtacagtgcaggggaaagaatagtagacataatagcaacagacatacaaactaaag

SEQ ID NO: 11544 - DNA, 301 bp, Artificial Sequence
  Nf2.2_Rb1.3
  crRNA array
  misc_feature (148)..(157): n is a, c, g, or t
cttggctttatatatcttgtggaaaggacgaaacaccgtaatttctactaagtgtagattgaggcgacggaaagctgactaatttctactaagtgtagatagccaatctggtctaataactaatttctactaagtgtagatttttttnnnnnnnnnnaagcttggcgtggatccgatatcaactagatcttgagacaaatggcagtattcatccacaattttaaaagaaaaggggggattggggggtacagtgcaggggaaagaatagtagacataatagcaacagacatacaaactaaag

SEQ ID NO: 11545 - DNA, 301 bp, Artificial Sequence
  Nf2.2_Rb1.4
  crRNA array
  misc_feature (148)..(157): n is a, c, g, or t
cttggctttatatatcttgtggaaaggacgaaacaccgtaatttctactaagtgtagattgaggcgacggaaagctgactaatttctactaagtgtagattgtagctcagtaaaagtgaataatttctactaagtgtagatttttttnnnnnnnnnnaagcttggcgtggatccgatatcaactagatcttgagacaaatggcagtattcatccacaattttaaaagaaaaggggggattggggggtacagtgcaggggaaagaatagtagacataatagcaacagacatacaaactaaag

SEQ ID NO: 11546 - DNA, 301 bp, Artificial Sequence
  Nf2.3_Rb1.1
  crRNA array
  misc_feature (148)..(157): n is a, c, g, or t
cttggctttatatatcttgtggaaaggacgaaacaccgtaatttctactaagtgtagatcgtcgcctcataaataggtctaatttctactaagtgtagattctgacatgatcgggtaccttaatttctactaagtgtagatttttttnnnnnnnnnnaagcttggcgtggatccgatatcaactagatcttgagacaaatggcagtattcatccacaattttaaaagaaaaggggggattggggggtacagtgcaggggaaagaatagtagacataatagcaacagacatacaaactaaag

SEQ ID NO: 11547 - DNA, 301 bp, Artificial Sequence
  Nf2.3_Rb1.2
  crRNA array
  misc_feature (148)..(157): n is a, c, g, or t
cttggctttatatatcttgtggaaaggacgaaacaccgtaatttctactaagtgtagatcgtcgcctcataaataggtctaatttctactaagtgtagatgtctctgcatgaaaacggagtaatttctactaagtgtagatttttttnnnnnnnnnnaagcttggcgtggatccgatatcaactagatcttgagacaaatggcagtattcatccacaattttaaaagaaaaggggggattggggggtacagtgcaggggaaagaatagtagacataatagcaacagacatacaaactaaag

SEQ ID NO: 11548 - DNA, 301 bp, Artificial Sequence
  Nf2.3_Rb1.3
  crRNA array
  misc_feature (148)..(157): n is a, c, g, or t
cttggctttatatatcttgtggaaaggacgaaacaccgtaatttctactaagtgtagatcgtcgcctcataaataggtctaatttctactaagtgtagatagccaatctggtctaataactaatttctactaagtgtagatttttttnnnnnnnnnnaagcttggcgtggatccgatatcaactagatcttgagacaaatggcagtattcatccacaattttaaaagaaaaggggggattggggggtacagtgcaggggaaagaatagtagacataatagcaacagacatacaaactaaag

SEQ ID NO: 11549 - DNA, 301 bp, Artificial Sequence
  Nf2.3_Rb1.4
  crRNA array
  misc_feature (148)..(157): n is a, c, g, or t
cttggctttatatatcttgtggaaaggacgaaacaccgtaatttctactaagtgtagatcgtcgcctcataaataggtctaatttctactaagtgtagattgtagctcagtaaaagtgaataatttctactaagtgtagatttttttnnnnnnnnnnaagcttggcgtggatccgatatcaactagatcttgagacaaatggcagtattcatccacaattttaaaagaaaaggggggattggggggtacagtgcaggggaaagaatagtagacataatagcaacagacatacaaactaaag

SEQ ID NO: 11550 - DNA, 301 bp, Artificial Sequence
  Nf2.4_Rb1.1
  crRNA array
  misc_feature (148)..(157): n is a, c, g, or t
cttggctttatatatcttgtggaaaggacgaaacaccgtaatttctactaagtgtagataaggcctcgatctccgtctttaatttctactaagtgtagattctgacatgatcgggtaccttaatttctactaagtgtagatttttttnnnnnnnnnnaagcttggcgtggatccgatatcaactagatcttgagacaaatggcagtattcatccacaattttaaaagaaaaggggggattggggggtacagtgcaggggaaagaatagtagacataatagcaacagacatacaaactaaag

SEQ ID NO: 11551 - DNA, 301 bp, Artificial Sequence
  Nf2.4_Rb1.2
  crRNA array
  misc_feature (148)..(157): n is a, c, g, or t
cttggctttatatatcttgtggaaaggacgaaacaccgtaatttctactaagtgtagataaggcctcgatctccgtctttaatttctactaagtgtagatgtctctgcatgaaaacggagtaatttctactaagtgtagatttttttnnnnnnnnnnaagcttggcgtggatccgatatcaactagatcttgagacaaatggcagtattcatccacaattttaaaagaaaaggggggattggggggtacagtgcaggggaaagaatagtagacataatagcaacagacatacaaactaaag

SEQ ID NO: 11552 - DNA, 301 bp, Artificial Sequence
  Nf2.4_Rb1.3
  crRNA array
  misc_feature (148)..(157): n is a, c, g, or t
cttggctttatatatcttgtggaaaggacgaaacaccgtaatttctactaagtgtagataaggcctcgatctccgtctttaatttctactaagtgtagatagccaatctggtctaataactaatttctactaagtgtagatttttttnnnnnnnnnnaagcttggcgtggatccgatatcaactagatcttgagacaaatggcagtattcatccacaattttaaaagaaaaggggggattggggggtacagtgcaggggaaagaatagtagacataatagcaacagacatacaaactaaag

SEQ ID NO: 11553 - DNA, 301 bp, Artificial Sequence
  Nf2.4_Rb1.4
  crRNA array
  misc_feature (148)..(157): n is a, c, g, or t
cttggctttatatatcttgtggaaaggacgaaacaccgtaatttctactaagtgtagataaggcctcgatctccgtctttaatttctactaagtgtagattgtagctcagtaaaagtgaataatttctactaagtgtagatttttttnnnnnnnnnnaagcttggcgtggatccgatatcaactagatcttgagacaaatggcagtattcatccacaattttaaaagaaaaggggggattggggggtacagtgcaggggaaagaatagtagacataatagcaacagacatacaaactaaag

SEQ ID NO: 11554 - DNA, 301 bp, Artificial Sequence
  Nf2.1_Kmt2c.1
  crRNA array
  misc_feature (148)..(157): n is a, c, g, or t
cttggctttatatatcttgtggaaaggacgaaacaccgtaatttctactaagtgtagatcggagtcatctgatagagattaatttctactaagtgtagatactcgacctccacctccctataatttctactaagtgtagatttttttnnnnnnnnnnaagcttggcgtggatccgatatcaactagatcttgagacaaatggcagtattcatccacaattttaaaagaaaaggggggattggggggtacagtgcaggggaaagaatagtagacataatagcaacagacatacaaactaaag

SEQ ID NO: 11555 - DNA, 301 bp, Artificial Sequence
  Nf2.1_Kmt2c.2
  crRNA array
  misc_feature (148)..(157): n is a, c, g, or t
cttggctttatatatcttgtggaaaggacgaaacaccgtaatttctactaagtgtagatcggagtcatctgatagagattaatttctactaagtgtagatcccaaagatcagcgtggacctaatttctactaagtgtagatttttttnnnnnnnnnnaagcttggcgtggatccgatatcaactagatcttgagacaaatggcagtattcatccacaattttaaaagaaaaggggggattggggggtacagtgcaggggaaagaatagtagacataatagcaacagacatacaaactaaag

SEQ ID NO: 11556 - DNA, 301 bp, Artificial Sequence
  Nf2.1_Kmt2c.3
  crRNA array
  misc_feature (148)..(157): n is a, c, g, or t
cttggctttatatatcttgtggaaaggacgaaacaccgtaatttctactaagtgtagatcggagtcatctgatagagattaatttctactaagtgtagataaaagatccgaatcgatgcgtaatttctactaagtgtagatttttttnnnnnnnnnnaagcttggcgtggatccgatatcaactagatcttgagacaaatggcagtattcatccacaattttaaaagaaaaggggggattggggggtacagtgcaggggaaagaatagtagacataatagcaacagacatacaaactaaag

SEQ ID NO: 11557 - DNA, 301 bp, Artificial Sequence
  Nf2.1_Kmt2c.4
  crRNA array
  misc_feature (148)..(157): n is a, c, g, or t
cttggctttatatatcttgtggaaaggacgaaacaccgtaatttctactaagtgtagatcggagtcatctgatagagattaatttctactaagtgtagatctgaggcacatggaagcgattaatttctactaagtgtagatttttttnnnnnnnnnnaagcttggcgtggatccgatatcaactagatcttgagacaaatggcagtattcatccacaattttaaaagaaaaggggggattggggggtacagtgcaggggaaagaatagtagacataatagcaacagacatacaaactaaag

SEQ ID NO: 11558 - DNA, 301 bp, Artificial Sequence
  Nf2.2_Kmt2c.1
  crRNA array
  misc_feature (148)..(157): n is a, c, g, or t
cttggctttatatatcttgtggaaaggacgaaacaccgtaatttctactaagtgtagattgaggcgacggaaagctgactaatttctactaagtgtagatactcgacctccacctccctataatttctactaagtgtagatttttttnnnnnnnnnnaagcttggcgtggatccgatatcaactagatcttgagacaaatggcagtattcatccacaattttaaaagaaaaggggggattggggggtacagtgcaggggaaagaatagtagacataatagcaacagacatacaaactaaag

SEQ ID NO: 11559 - DNA, 301 bp, Artificial Sequence
  Nf2.2_Kmt2c.2
  crRNA array
  misc_feature (148)..(157): n is a, c, g, or t
cttggctttatatatcttgtggaaaggacgaaacaccgtaatttctactaagtgtagattgaggcgacggaaagctgactaatttctactaagtgtagatcccaaagatcagcgtggacctaatttctactaagtgtagatttttttnnnnnnnnnnaagcttggcgtggatccgatatcaactagatcttgagacaaatggcagtattcatccacaattttaaaagaaaaggggggattggggggtacagtgcaggggaaagaatagtagacataatagcaacagacatacaaactaaag

SEQ ID NO: 11560 - DNA, 301 bp, Artificial Sequence
  Nf2.2_Kmt2c.3
  crRNA array
  misc_feature (148)..(157): n is a, c, g, or t
cttggctttatatatcttgtggaaaggacgaaacaccgtaatttctactaagtgtagattgaggcgacggaaagctgactaatttctactaagtgtagataaaagatccgaatcgatgcgtaatttctactaagtgtagatttttttnnnnnnnnnnaagcttggcgtggatccgatatcaactagatcttgagacaaatggcagtattcatccacaattttaaaagaaaaggggggattggggggtacagtgcaggggaaagaatagtagacataatagcaacagacatacaaactaaag

SEQ ID NO: 11561 - DNA, 301 bp, Artificial Sequence
  Nf2.2_Kmt2c.4
  crRNA array
  misc_feature (148)..(157): n is a, c, g, or t
cttggctttatatatcttgtggaaaggacgaaacaccgtaatttctactaagtgtagattgaggcgacggaaagctgactaatttctactaagtgtagatctgaggcacatggaagcgattaatttctactaagtgtagatttttttnnnnnnnnnnaagcttggcgtggatccgatatcaactagatcttgagacaaatggcagtattcatccacaattttaaaagaaaaggggggattggggggtacagtgcaggggaaagaatagtagacataatagcaacagacatacaaactaaag

SEQ ID NO: 11562 - DNA, 301 bp, Artificial Sequence
  Nf2.3_Kmt2c.1
  crRNA array
  misc_feature (148)..(157): n is a, c, g, or t
cttggctttatatatcttgtggaaaggacgaaacaccgtaatttctactaagtgtagatcgtcgcctcataaataggtctaatttctactaagtgtagatactcgacctccacctccctataatttctactaagtgtagatttttttnnnnnnnnnnaagcttggcgtggatccgatatcaactagatcttgagacaaatggcagtattcatccacaattttaaaagaaaaggggggattggggggtacagtgcaggggaaagaatagtagacataatagcaacagacatacaaactaaag

SEQ ID NO: 11563 - DNA, 301 bp, Artificial Sequence
  Nf2.3_Kmt2c.2
  crRNA array
  misc_feature (148)..(157): n is a, c, g, or t
cttggctttatatatcttgtggaaaggacgaaacaccgtaatttctactaagtgtagatcgtcgcctcataaataggtctaatttctactaagtgtagatcccaaagatcagcgtggacctaatttctactaagtgtagatttttttnnnnnnnnnnaagcttggcgtggatccgatatcaactagatcttgagacaaatggcagtattcatccacaattttaaaagaaaaggggggattggggggtacagtgcaggggaaagaatagtagacataatagcaacagacatacaaactaaag

SEQ ID NO: 11564 - DNA, 301 bp, Artificial Sequence
  Nf2.3_Kmt2c.3
  crRNA array
  misc_feature (148)..(157): n is a, c, g, or t
cttggctttatatatcttgtggaaaggacgaaacaccgtaatttctactaagtgtagatcgtcgcctcataaataggtctaatttctactaagtgtagataaaagatccgaatcgatgcgtaatttctactaagtgtagatttttttnnnnnnnnnnaagcttggcgtggatccgatatcaactagatcttgagacaaatggcagtattcatccacaattttaaaagaaaaggggggattggggggtacagtgcaggggaaagaatagtagacataatagcaacagacatacaaactaaag

SEQ ID NO: 11565 - DNA, 301 bp, Artificial Sequence
  Nf2.3_Kmt2c.4
  crRNA array
  misc_feature (148)..(157): n is a, c, g, or t
cttggctttatatatcttgtggaaaggacgaaacaccgtaatttctactaagtgtagatcgtcgcctcataaataggtctaatttctactaagtgtagatctgaggcacatggaagcgattaatttctactaagtgtagatttttttnnnnnnnnnnaagcttggcgtggatccgatatcaactagatcttgagacaaatggcagtattcatccacaattttaaaagaaaaggggggattggggggtacagtgcaggggaaagaatagtagacataatagcaacagacatacaaactaaag

SEQ ID NO: 11566 - DNA, 301 bp, Artificial Sequence
  Nf2.4_Kmt2c.1
  crRNA array
  misc_feature (148)..(157): n is a, c, g, or t
cttggctttatatatcttgtggaaaggacgaaacaccgtaatttctactaagtgtagataaggcctcgatctccgtctttaatttctactaagtgtagatactcgacctccacctccctataatttctactaagtgtagatttttttnnnnnnnnnnaagcttggcgtggatccgatatcaactagatcttgagacaaatggcagtattcatccacaattttaaaagaaaaggggggattggggggtacagtgcaggggaaagaatagtagacataatagcaacagacatacaaactaaag

SEQ ID NO: 11567 - DNA, 301 bp, Artificial Sequence
  Nf2.4_Kmt2c.2
  crRNA array
  misc_feature (148)..(157): n is a, c, g, or t
cttggctttatatatcttgtggaaaggacgaaacaccgtaatttctactaagtgtagataaggcctcgatctccgtctttaatttctactaagtgtagatcccaaagatcagcgtggacctaatttctactaagtgtagatttttttnnnnnnnnnnaagcttggcgtggatccgatatcaactagatcttgagacaaatggcagtattcatccacaattttaaaagaaaaggggggattggggggtacagtgcaggggaaagaatagtagacataatagcaacagacatacaaactaaag

SEQ ID NO: 11568 - DNA, 301 bp, Artificial Sequence
  Nf2.4_Kmt2c.3
  crRNA array
  misc_feature (148)..(157): n is a, c, g, or t
cttggctttatatatcttgtggaaaggacgaaacaccgtaatttctactaagtgtagataaggcctcgatctccgtctttaatttctactaagtgtagataaaagatccgaatcgatgcgtaatttctactaagtgtagatttttttnnnnnnnnnnaagcttggcgtggatccgatatcaactagatcttgagacaaatggcagtattcatccacaattttaaaagaaaaggggggattggggggtacagtgcaggggaaagaatagtagacataatagcaacagacatacaaactaaag

SEQ ID NO: 11569 - DNA, 301 bp, Artificial Sequence
  Nf2.4_Kmt2c.4
  crRNA array
  misc_feature (148)..(157): n is a, c, g, or t
cttggctttatatatcttgtggaaaggacgaaacaccgtaatttctactaagtgtagataaggcctcgatctccgtctttaatttctactaagtgtagatctgaggcacatggaagcgattaatttctactaagtgtagatttttttnnnnnnnnnnaagcttggcgtggatccgatatcaactagatcttgagacaaatggcagtattcatccacaattttaaaagaaaaggggggattggggggtacagtgcaggggaaagaatagtagacataatagcaacagacatacaaactaaag

SEQ ID NO: 11570 - DNA, 301 bp, Artificial Sequence
  Nf2.1_Pten.1
  crRNA array
  misc_feature (148)..(157): n is a, c, g, or t
cttggctttatatatcttgtggaaaggacgaaacaccgtaatttctactaagtgtagatcggagtcatctgatagagattaatttctactaagtgtagataagcgtggtgcgtgacgcactaatttctactaagtgtagatttttttnnnnnnnnnnaagcttggcgtggatccgatatcaactagatcttgagacaaatggcagtattcatccacaattttaaaagaaaaggggggattggggggtacagtgcaggggaaagaatagtagacataatagcaacagacatacaaactaaag

SEQ ID NO: 11571 - DNA, 301 bp, Artificial Sequence
  Nf2.1_Pten.2
  crRNA array
  misc_feature (148)..(157): n is a, c, g, or t
cttggctttatatatcttgtggaaaggacgaaacaccgtaatttctactaagtgtagatcggagtcatctgatagagattaatttctactaagtgtagattgtcaccagctgaagtggcttaatttctactaagtgtagatttttttnnnnnnnnnnaagcttggcgtggatccgatatcaactagatcttgagacaaatggcagtattcatccacaattttaaaagaaaaggggggattggggggtacagtgcaggggaaagaatagtagacataatagcaacagacatacaaactaaag

SEQ ID NO: 11572 - DNA, 301 bp, Artificial Sequence
  Nf2.1_Pten.3
  crRNA array
  misc_feature (148)..(157): n is a, c, g, or t
cttggctttatatatcttgtggaaaggacgaaacaccgtaatttctactaagtgtagatcggagtcatctgatagagattaatttctactaagtgtagatggagtcaagaggctgatttttaatttctactaagtgtagatttttttnnnnnnnnnnaagcttggcgtggatccgatatcaactagatcttgagacaaatggcagtattcatccacaattttaaaagaaaaggggggattggggggtacagtgcaggggaaagaatagtagacataatagcaacagacatacaaactaaag

SEQ ID NO: 11573 - DNA, 301 bp, Artificial Sequence
  Nf2.1_Pten.4
  crRNA array
  misc_feature (148)..(157): n is a, c, g, or t
cttggctttatatatcttgtggaaaggacgaaacaccgtaatttctactaagtgtagatcggagtcatctgatagagattaatttctactaagtgtagatctgtaagctaaaccactacataatttctactaagtgtagatttttttnnnnnnnnnnaagcttggcgtggatccgatatcaactagatcttgagacaaatggcagtattcatccacaattttaaaagaaaaggggggattggggggtacagtgcaggggaaagaatagtagacataatagcaacagacatacaaactaaag

SEQ ID NO: 11574 - DNA, 301 bp, Artificial Sequence
  Nf2.2_Pten.1
  crRNA array
  misc_feature (148)..(157): n is a, c, g, or t
cttggctttatatatcttgtggaaaggacgaaacaccgtaatttctactaagtgtagattgaggcgacggaaagctgactaatttctactaagtgtagataagcgtggtgcgtgacgcactaatttctactaagtgtagatttttttnnnnnnnnnnaagcttggcgtggatccgatatcaactagatcttgagacaaatggcagtattcatccacaattttaaaagaaaaggggggattggggggtacagtgcaggggaaagaatagtagacataatagcaacagacatacaaactaaag

SEQ ID NO: 11575 - DNA, 301 bp, Artificial Sequence
  Nf2.2_Pten.2
  crRNA array
  misc_feature (148)..(157): n is a, c, g, or t
cttggctttatatatcttgtggaaaggacgaaacaccgtaatttctactaagtgtagattgaggcgacggaaagctgactaatttctactaagtgtagattgtcaccagctgaagtggcttaatttctactaagtgtagatttttttnnnnnnnnnnaagcttggcgtggatccgatatcaactagatcttgagacaaatggcagtattcatccacaattttaaaagaaaaggggggattggggggtacagtgcaggggaaagaatagtagacataatagcaacagacatacaaactaaag

SEQ ID NO: 11576 - DNA, 301 bp, Artificial Sequence
  Nf2.2_Pten.3
  crRNA array
  misc_feature (148)..(157): n is a, c, g, or t
cttggctttatatatcttgtggaaaggacgaaacaccgtaatttctactaagtgtagattgaggcgacggaaagctgactaatttctactaagtgtagatggagtcaagaggctgatttttaatttctactaagtgtagatttttttnnnnnnnnnnaagcttggcgtggatccgatatcaactagatcttgagacaaatggcagtattcatccacaattttaaaagaaaaggggggattggggggtacagtgcaggggaaagaatagtagacataatagcaacagacatacaaactaaag

SEQ ID NO: 11577 - DNA, 301 bp, Artificial Sequence
  Nf2.2_Pten.4
  crRNA array
  misc_feature (148)..(157): n is a, c, g, or t
cttggctttatatatcttgtggaaaggacgaaacaccgtaatttctactaagtgtagattgaggcgacggaaagctgactaatttctactaagtgtagatctgtaagctaaaccactacataatttctactaagtgtagatttttttnnnnnnnnnnaagcttggcgtggatccgatatcaactagatcttgagacaaatggcagtattcatccacaattttaaaagaaaaggggggattggggggtacagtgcaggggaaagaatagtagacataatagcaacagacatacaaactaaag

SEQ ID NO: 11578 - DNA, 301 bp, Artificial Sequence
  Nf2.3_Pten.1
  crRNA array
  misc_feature (148)..(157): n is a, c, g, or t
cttggctttatatatcttgtggaaaggacgaaacaccgtaatttctactaagtgtagatcgtcgcctcataaataggtctaatttctactaagtgtagataagcgtggtgcgtgacgcactaatttctactaagtgtagatttttttnnnnnnnnnnaagcttggcgtggatccgatatcaactagatcttgagacaaatggcagtattcatccacaattttaaaagaaaaggggggattggggggtacagtgcaggggaaagaatagtagacataatagcaacagacatacaaactaaag

SEQ ID NO: 11579 - DNA, 301 bp, Artificial Sequence
  Nf2.3_Pten.2
  crRNA array
  misc_feature (148)..(157): n is a, c, g, or t
cttggctttatatatcttgtggaaaggacgaaacaccgtaatttctactaagtgtagatcgtcgcctcataaataggtctaatttctactaagtgtagattgtcaccagctgaagtggcttaatttctactaagtgtagatttttttnnnnnnnnnnaagcttggcgtggatccgatatcaactagatcttgagacaaatggcagtattcatccacaattttaaaagaaaaggggggattggggggtacagtgcaggggaaagaatagtagacataatagcaacagacatacaaactaaag

SEQ ID NO: 11580 - DNA, 301 bp, Artificial Sequence
  Nf2.3_Pten.3
  crRNA array
  misc_feature (148)..(157): n is a, c, g, or t
cttggctttatatatcttgtggaaaggacgaaacaccgtaatttctactaagtgtagatcgtcgcctcataaataggtctaatttctactaagtgtagatggagtcaagaggctgatttttaatttctactaagtgtagatttttttnnnnnnnnnnaagcttggcgtggatccgatatcaactagatcttgagacaaatggcagtattcatccacaattttaaaagaaaaggggggattggggggtacagtgcaggggaaagaatagtagacataatagcaacagacatacaaactaaag

SEQ ID NO: 11581 - DNA, 301 bp, Artificial Sequence
  Nf2.3_Pten.4
  crRNA array
  misc_feature (148)..(157): n is a, c, g, or t
cttggctttatatatcttgtggaaaggacgaaacaccgtaatttctactaagtgtagatcgtcgcctcataaataggtctaatttctactaagtgtagatctgtaagctaaaccactacataatttctactaagtgtagatttttttnnnnnnnnnnaagcttggcgtggatccgatatcaactagatcttgagacaaatggcagtattcatccacaattttaaaagaaaaggggggattggggggtacagtgcaggggaaagaatagtagacataatagcaacagacatacaaactaaag

SEQ ID NO: 11582 - DNA, 301 bp, Artificial Sequence
  Nf2.4_Pten.1
  crRNA array
  misc_feature (148)..(157): n is a, c, g, or t
cttggctttatatatcttgtggaaaggacgaaacaccgtaatttctactaagtgtagataaggcctcgatctccgtctttaatttctactaagtgtagataagcgtggtgcgtgacgcactaatttctactaagtgtagatttttttnnnnnnnnnnaagcttggcgtggatccgatatcaactagatcttgagacaaatggcagtattcatccacaattttaaaagaaaaggggggattggggggtacagtgcaggggaaagaatagtagacataatagcaacagacatacaaactaaag

SEQ ID NO: 11583 - DNA, 301 bp, Artificial Sequence
  Nf2.4_Pten.2
  crRNA array
  misc_feature (148)..(157): n is a, c, g, or t
cttggctttatatatcttgtggaaaggacgaaacaccgtaatttctactaagtgtagataaggcctcgatctccgtctttaatttctactaagtgtagattgtcaccagctgaagtggcttaatttctactaagtgtagatttttttnnnnnnnnnnaagcttggcgtggatccgatatcaactagatcttgagacaaatggcagtattcatccacaattttaaaagaaaaggggggattggggggtacagtgcaggggaaagaatagtagacataatagcaacagacatacaaactaaag

SEQ ID NO: 11584 - DNA, 301 bp, Artificial Sequence
  Nf2.4_Pten.3
  crRNA array
  misc_feature (148)..(157): n is a, c, g, or t
cttggctttatatatcttgtggaaaggacgaaacaccgtaatttctactaagtgtagataaggcctcgatctccgtctttaatttctactaagtgtagatggagtcaagaggctgatttttaatttctactaagtgtagatttttttnnnnnnnnnnaagcttggcgtggatccgatatcaactagatcttgagacaaatggcagtattcatccacaattttaaaagaaaaggggggattggggggtacagtgcaggggaaagaatagtagacataatagcaacagacatacaaactaaag

SEQ ID NO: 11585 - DNA, 301 bp, Artificial Sequence
  Nf2.4_Pten.4
  crRNA array
  misc_feature (148)..(157): n is a, c, g, or t
cttggctttatatatcttgtggaaaggacgaaacaccgtaatttctactaagtgtagataaggcctcgatctccgtctttaatttctactaagtgtagatctgtaagctaaaccactacataatttctactaagtgtagatttttttnnnnnnnnnnaagcttggcgtggatccgatatcaactagatcttgagacaaatggcagtattcatccacaattttaaaagaaaaggggggattggggggtacagtgcaggggaaagaatagtagacataatagcaacagacatacaaactaaag

SEQ ID NO: 11586 - DNA, 301 bp, Artificial Sequence
  Nf2.1_Atm.1
  crRNA array
  misc_feature (148)..(157): n is a, c, g, or t
cttggctttatatatcttgtggaaaggacgaaacaccgtaatttctactaagtgtagatcggagtcatctgatagagattaatttctactaagtgtagatgagaaagtctccgaatcgtttaatttctactaagtgtagatttttttnnnnnnnnnnaagcttggcgtggatccgatatcaactagatcttgagacaaatggcagtattcatccacaattttaaaagaaaaggggggattggggggtacagtgcaggggaaagaatagtagacataatagcaacagacatacaaactaaag

SEQ ID NO: 11587 - DNA, 301 bp, Artificial Sequence
  Nf2.1_Atm.2
  crRNA array
  misc_feature (148)..(157): n is a, c, g, or t
cttggctttatatatcttgtggaaaggacgaaacaccgtaatttctactaagtgtagatcggagtcatctgatagagattaatttctactaagtgtagatcctacgagggcacgagagactaatttctactaagtgtagatttttttnnnnnnnnnnaagcttggcgtggatccgatatcaactagatcttgagacaaatggcagtattcatccacaattttaaaagaaaaggggggattggggggtacagtgcaggggaaagaatagtagacataatagcaacagacatacaaactaaag

SEQ ID NO: 11588 - DNA, 301 bp, Artificial Sequence
  Nf2.1_Atm.3
  crRNA array
  misc_feature (148)..(157): n is a, c, g, or t
cttggctttatatatcttgtggaaaggacgaaacaccgtaatttctactaagtgtagatcggagtcatctgatagagattaatttctactaagtgtagattgaaagtctccgatatgccataatttctactaagtgtagatttttttnnnnnnnnnnaagcttggcgtggatccgatatcaactagatcttgagacaaatggcagtattcatccacaattttaaaagaaaaggggggattggggggtacagtgcaggggaaagaatagtagacataatagcaacagacatacaaactaaag

SEQ ID NO: 11589 - DNA, 301 bp, Artificial Sequence
  Nf2.1_Atm.4
  crRNA array
  misc_feature (148)..(157): n is a, c, g, or t
cttggctttatatatcttgtggaaaggacgaaacaccgtaatttctactaagtgtagatcggagtcatctgatagagattaatttctactaagtgtagatggtggtgatcagtcaagtagtaatttctactaagtgtagatttttttnnnnnnnnnnaagcttggcgtggatccgatatcaactagatcttgagacaaatggcagtattcatccacaattttaaaagaaaaggggggattggggggtacagtgcaggggaaagaatagtagacataatagcaacagacatacaaactaaag

SEQ ID NO: 11590 - DNA, 301 bp, Artificial Sequence
  Nf2.2_Atm.1
  crRNA array
  misc_feature (148)..(157): n is a, c, g, or t
cttggctttatatatcttgtggaaaggacgaaacaccgtaatttctactaagtgtagattgaggcgacggaaagctgactaatttctactaagtgtagatgagaaagtctccgaatcgtttaatttctactaagtgtagatttttttnnnnnnnnnnaagcttggcgtggatccgatatcaactagatcttgagacaaatggcagtattcatccacaattttaaaagaaaaggggggattggggggtacagtgcaggggaaagaatagtagacataatagcaacagacatacaaactaaag

SEQ ID NO: 11591 - DNA, 301 bp, Artificial Sequence
  Nf2.2_Atm.2
  crRNA array
  misc_feature (148)..(157): n is a, c, g, or t
cttggctttatatatcttgtggaaaggacgaaacaccgtaatttctactaagtgtagattgaggcgacggaaagctgactaatttctactaagtgtagatcctacgagggcacgagagactaatttctactaagtgtagatttttttnnnnnnnnnnaagcttggcgtggatccgatatcaactagatcttgagacaaatggcagtattcatccacaattttaaaagaaaaggggggattggggggtacagtgcaggggaaagaatagtagacataatagcaacagacatacaaactaaag

SEQ ID NO: 11592 - DNA, 301 bp, Artificial Sequence
  Nf2.2_Atm.3
  crRNA array
  misc_feature (148)..(157): n is a, c, g, or t
cttggctttatatatcttgtggaaaggacgaaacaccgtaatttctactaagtgtagattgaggcgacggaaagctgactaatttctactaagtgtagattgaaagtctccgatatgccataatttctactaagtgtagatttttttnnnnnnnnnnaagcttggcgtggatccgatatcaactagatcttgagacaaatggcagtattcatccacaattttaaaagaaaaggggggattggggggtacagtgcaggggaaagaatagtagacataatagcaacagacatacaaactaaag

SEQ ID NO: 11593 - DNA, 301 bp, Artificial Sequence
  Nf2.2_Atm.4
  crRNA array
  misc_feature (148)..(157): n is a, c, g, or t
cttggctttatatatcttgtggaaaggacgaaacaccgtaatttctactaagtgtagattgaggcgacggaaagctgactaatttctactaagtgtagatggtggtgatcagtcaagtagtaatttctactaagtgtagatttttttnnnnnnnnnnaagcttggcgtggatccgatatcaactagatcttgagacaaatggcagtattcatccacaattttaaaagaaaaggggggattggggggtacagtgcaggggaaagaatagtagacataatagcaacagacatacaaactaaag

SEQ ID NO: 11594 - DNA, 301 bp, Artificial Sequence
  Nf2.3_Atm.1
  crRNA array
  misc_feature (148)..(157): n is a, c, g, or t
cttggctttatatatcttgtggaaaggacgaaacaccgtaatttctactaagtgtagatcgtcgcctcataaataggtctaatttctactaagtgtagatgagaaagtctccgaatcgtttaatttctactaagtgtagatttttttnnnnnnnnnnaagcttggcgtggatccgatatcaactagatcttgagacaaatggcagtattcatccacaattttaaaagaaaaggggggattggggggtacagtgcaggggaaagaatagtagacataatagcaacagacatacaaactaaag

SEQ ID NO: 11595 - DNA, 301 bp, Artificial Sequence
  Nf2.3_Atm.2
  crRNA array
  misc_feature (148)..(157): n is a, c, g, or t
cttggctttatatatcttgtggaaaggacgaaacaccgtaatttctactaagtgtagatcgtcgcctcataaataggtctaatttctactaagtgtagatcctacgagggcacgagagactaatttctactaagtgtagatttttttnnnnnnnnnnaagcttggcgtggatccgatatcaactagatcttgagacaaatggcagtattcatccacaattttaaaagaaaaggggggattggggggtacagtgcaggggaaagaatagtagacataatagcaacagacatacaaactaaag

SEQ ID NO: 11596 - DNA, 301 bp, Artificial Sequence
  Nf2.3_Atm.3
  crRNA array
  misc_feature (148)..(157): n is a, c, g, or t
cttggctttatatatcttgtggaaaggacgaaacaccgtaatttctactaagtgtagatcgtcgcctcataaataggtctaatttctactaagtgtagattgaaagtctccgatatgccataatttctactaagtgtagatttttttnnnnnnnnnnaagcttggcgtggatccgatatcaactagatcttgagacaaatggcagtattcatccacaattttaaaagaaaaggggggattggggggtacagtgcaggggaaagaatagtagacataatagcaacagacatacaaactaaag

SEQ ID NO: 11597 - DNA, 301 bp, Artificial Sequence
  Nf2.3_Atm.4
  crRNA array
  misc_feature (148)..(157): n is a, c, g, or t
cttggctttatatatcttgtggaaaggacgaaacaccgtaatttctactaagtgtagatcgtcgcctcataaataggtctaatttctactaagtgtagatggtggtgatcagtcaagtagtaatttctactaagtgtagatttttttnnnnnnnnnnaagcttggcgtggatccgatatcaactagatcttgagacaaatggcagtattcatccacaattttaaaagaaaaggggggattggggggtacagtgcaggggaaagaatagtagacataatagcaacagacatacaaactaaag

SEQ ID NO: 11598 - DNA, 301 bp, Artificial Sequence
  Nf2.4_Atm.1
  crRNA array
  misc_feature (148)..(157): n is a, c, g, or t
cttggctttatatatcttgtggaaaggacgaaacaccgtaatttctactaagtgtagataaggcctcgatctccgtctttaatttctactaagtgtagatgagaaagtctccgaatcgtttaatttctactaagtgtagatttttttnnnnnnnnnnaagcttggcgtggatccgatatcaactagatcttgagacaaatggcagtattcatccacaattttaaaagaaaaggggggattggggggtacagtgcaggggaaagaatagtagacataatagcaacagacatacaaactaaag

SEQ ID NO: 11599 - DNA, 301 bp, Artificial Sequence
  Nf2.4_Atm.2
  crRNA array
  misc_feature (148)..(157): n is a, c, g, or t
cttggctttatatatcttgtggaaaggacgaaacaccgtaatttctactaagtgtagataaggcctcgatctccgtctttaatttctactaagtgtagatcctacgagggcacgagagactaatttctactaagtgtagatttttttnnnnnnnnnnaagcttggcgtggatccgatatcaactagatcttgagacaaatggcagtattcatccacaattttaaaagaaaaggggggattggggggtacagtgcaggggaaagaatagtagacataatagcaacagacatacaaactaaag

SEQ ID NO: 11600 - DNA, 301 bp, Artificial Sequence
  Nf2.4_Atm.3
  crRNA array
  misc_feature (148)..(157): n is a, c, g, or t
cttggctttatatatcttgtggaaaggacgaaacaccgtaatttctactaagtgtagataaggcctcgatctccgtctttaatttctactaagtgtagattgaaagtctccgatatgccataatttctactaagtgtagatttttttnnnnnnnnnnaagcttggcgtggatccgatatcaactagatcttgagacaaatggcagtattcatccacaattttaaaagaaaaggggggattggggggtacagtgcaggggaaagaatagtagacataatagcaacagacatacaaactaaag

SEQ ID NO: 11601 - DNA, 301 bp, Artificial Sequence
  Nf2.4_Atm.4
  crRNA array
  misc_feature (148)..(157): n is a, c, g, or t
cttggctttatatatcttgtggaaaggacgaaacaccgtaatttctactaagtgtagataaggcctcgatctccgtctttaatttctactaagtgtagatggtggtgatcagtcaagtagtaatttctactaagtgtagatttttttnnnnnnnnnnaagcttggcgtggatccgatatcaactagatcttgagacaaatggcagtattcatccacaattttaaaagaaaaggggggattggggggtacagtgcaggggaaagaatagtagacataatagcaacagacatacaaactaaag

SEQ ID NO: 11602 - DNA, 301 bp, Artificial Sequence
  Jak1.1_Chd1.1
  crRNA array
  misc_feature (148)..(157): n is a, c, g, or t
cttggctttatatatcttgtggaaaggacgaaacaccgtaatttctactaagtgtagatgagcgcaggccgccgcagcctaatttctactaagtgtagatcgccccactctgcaatccattaatttctactaagtgtagatttttttnnnnnnnnnnaagcttggcgtggatccgatatcaactagatcttgagacaaatggcagtattcatccacaattttaaaagaaaaggggggattggggggtacagtgcaggggaaagaatagtagacataatagcaacagacatacaaactaaag

SEQ ID NO: 11603 - DNA, 301 bp, Artificial Sequence
  Jak1.1_Chd1.2
  crRNA array
  misc_feature (148)..(157): n is a, c, g, or t
cttggctttatatatcttgtggaaaggacgaaacaccgtaatttctactaagtgtagatgagcgcaggccgccgcagcctaatttctactaagtgtagattgcagccggcgtctggcagctaatttctactaagtgtagatttttttnnnnnnnnnnaagcttggcgtggatccgatatcaactagatcttgagacaaatggcagtattcatccacaattttaaaagaaaaggggggattggggggtacagtgcaggggaaagaatagtagacataatagcaacagacatacaaactaaag

SEQ ID NO: 11604 - DNA, 301 bp, Artificial Sequence
  Jak1.1_Chd1.3
  crRNA array
  misc_feature (148)..(157): n is a, c, g, or t
cttggctttatatatcttgtggaaaggacgaaacaccgtaatttctactaagtgtagatgagcgcaggccgccgcagcctaatttctactaagtgtagatatcagcaagtatgcaactattaatttctactaagtgtagatttttttnnnnnnnnnnaagcttggcgtggatccgatatcaactagatcttgagacaaatggcagtattcatccacaattttaaaagaaaaggggggattggggggtacagtgcaggggaaagaatagtagacataatagcaacagacatacaaactaaag

SEQ ID NO: 11605 - DNA, 301 bp, Artificial Sequence
  Jak1.1_Chd1.4
  crRNA array
  misc_feature (148)..(157): n is a, c, g, or t
cttggctttatatatcttgtggaaaggacgaaacaccgtaatttctactaagtgtagatgagcgcaggccgccgcagcctaatttctactaagtgtagataaatggcggataactcctcttaatttctactaagtgtagatttttttnnnnnnnnnnaagcttggcgtggatccgatatcaactagatcttgagacaaatggcagtattcatccacaattttaaaagaaaaggggggattggggggtacagtgcaggggaaagaatagtagacataatagcaacagacatacaaactaaag

SEQ ID NO: 11606 - DNA, 301 bp, Artificial Sequence
  Jak1.2_Chd1.1
  crRNA array
  misc_feature (148)..(157): n is a, c, g, or t
cttggctttatatatcttgtggaaaggacgaaacaccgtaatttctactaagtgtagatagggacactggacaaccgaataatttctactaagtgtagatcgccccactctgcaatccattaatttctactaagtgtagatttttttnnnnnnnnnnaagcttggcgtggatccgatatcaactagatcttgagacaaatggcagtattcatccacaattttaaaagaaaaggggggattggggggtacagtgcaggggaaagaatagtagacataatagcaacagacatacaaactaaag

SEQ ID NO: 11607 - DNA, 301 bp, Artificial Sequence
  Jak1.2_Chd1.2
  crRNA array
  misc_feature (148)..(157): n is a, c, g, or t
cttggctttatatatcttgtggaaaggacgaaacaccgtaatttctactaagtgtagatagggacactggacaaccgaataatttctactaagtgtagattgcagccggcgtctggcagctaatttctactaagtgtagatttttttnnnnnnnnnnaagcttggcgtggatccgatatcaactagatcttgagacaaatggcagtattcatccacaattttaaaagaaaaggggggattggggggtacagtgcaggggaaagaatagtagacataatagcaacagacatacaaactaaag

SEQ ID NO: 11608 - DNA, 301 bp, Artificial Sequence
  Jak1.2_Chd1.3
  crRNA array
  misc_feature (148)..(157): n is a, c, g, or t
cttggctttatatatcttgtggaaaggacgaaacaccgtaatttctactaagtgtagatagggacactggacaaccgaataatttctactaagtgtagatatcagcaagtatgcaactattaatttctactaagtgtagatttttttnnnnnnnnnnaagcttggcgtggatccgatatcaactagatcttgagacaaatggcagtattcatccacaattttaaaagaaaaggggggattggggggtacagtgcaggggaaagaatagtagacataatagcaacagacatacaaactaaag

SEQ ID NO: 11609 - DNA, 301 bp, Artificial Sequence
  Jak1.2_Chd1.4
  crRNA array
  misc_feature (148)..(157): n is a, c, g, or t
cttggctttatatatcttgtggaaaggacgaaacaccgtaatttctactaagtgtagatagggacactggacaaccgaataatttctactaagtgtagataaatggcggataactcctcttaatttctactaagtgtagatttttttnnnnnnnnnnaagcttggcgtggatccgatatcaactagatcttgagacaaatggcagtattcatccacaattttaaaagaaaaggggggattggggggtacagtgcaggggaaagaatagtagacataatagcaacagacatacaaactaaag

SEQ ID NO: 11610 - DNA, 301 bp, Artificial Sequence
  Jak1.3_Chd1.1
  crRNA array
  misc_feature (148)..(157): n is a, c, g, or t
cttggctttatatatcttgtggaaaggacgaaacaccgtaatttctactaagtgtagatgcacagaacgccatggcatttaatttctactaagtgtagatcgccccactctgcaatccattaatttctactaagtgtagatttttttnnnnnnnnnnaagcttggcgtggatccgatatcaactagatcttgagacaaatggcagtattcatccacaattttaaaagaaaaggggggattggggggtacagtgcaggggaaagaatagtagacataatagcaacagacatacaaactaaag

SEQ ID NO: 11611 - DNA, 301 bp, Artificial Sequence
  Jak1.3_Chd1.2
  crRNA array
  misc_feature (148)..(157): n is a, c, g, or t
cttggctttatatatcttgtggaaaggacgaaacaccgtaatttctactaagtgtagatgcacagaacgccatggcatttaatttctactaagtgtagattgcagccggcgtctggcagctaatttctactaagtgtagatttttttnnnnnnnnnnaagcttggcgtggatccgatatcaactagatcttgagacaaatggcagtattcatccacaattttaaaagaaaaggggggattggggggtacagtgcaggggaaagaatagtagacataatagcaacagacatacaaactaaag

SEQ ID NO: 11612 - DNA, 301 bp, Artificial Sequence
  Jak1.3_Chd1.3
  crRNA array
  misc_feature (148)..(157): n is a, c, g, or t
cttggctttatatatcttgtggaaaggacgaaacaccgtaatttctactaagtgtagatgcacagaacgccatggcatttaatttctactaagtgtagatatcagcaagtatgcaactattaatttctactaagtgtagatttttttnnnnnnnnnnaagcttggcgtggatccgatatcaactagatcttgagacaaatggcagtattcatccacaattttaaaagaaaaggggggattggggggtacagtgcaggggaaagaatagtagacataatagcaacagacatacaaactaaag

SEQ ID NO: 11613 - DNA, 301 bp, Artificial Sequence
  Jak1.3_Chd1.4
  crRNA array
  misc_feature (148)..(157): n is a, c, g, or t
cttggctttatatatcttgtggaaaggacgaaacaccgtaatttctactaagtgtagatgcacagaacgccatggcatttaatttctactaagtgtagataaatggcggataactcctcttaatttctactaagtgtagatttttttnnnnnnnnnnaagcttggcgtggatccgatatcaactagatcttgagacaaatggcagtattcatccacaattttaaaagaaaaggggggattggggggtacagtgcaggggaaagaatagtagacataatagcaacagacatacaaactaaag

SEQ ID NO: 11614 - DNA, 301 bp, Artificial Sequence
  Jak1.4_Chd1.1
  crRNA array
  misc_feature (148)..(157): n is a, c, g, or t
cttggctttatatatcttgtggaaaggacgaaacaccgtaatttctactaagtgtagattgccgccactggatcccgagtaatttctactaagtgtagatcgccccactctgcaatccattaatttctactaagtgtagatttttttnnnnnnnnnnaagcttggcgtggatccgatatcaactagatcttgagacaaatggcagtattcatccacaattttaaaagaaaaggggggattggggggtacagtgcaggggaaagaatagtagacataatagcaacagacatacaaactaaag

SEQ ID NO: 11615 - DNA, 301 bp, Artificial Sequence
  Jak1.4_Chd1.2
  crRNA array
  misc_feature (148)..(157): n is a, c, g, or t
cttggctttatatatcttgtggaaaggacgaaacaccgtaatttctactaagtgtagattgccgccactggatcccgagtaatttctactaagtgtagattgcagccggcgtctggcagctaatttctactaagtgtagatttttttnnnnnnnnnnaagcttggcgtggatccgatatcaactagatcttgagacaaatggcagtattcatccacaattttaaaagaaaaggggggattggggggtacagtgcaggggaaagaatagtagacataatagcaacagacatacaaactaaag

SEQ ID NO: 11616 - DNA, 301 bp, Artificial Sequence
  Jak1.4_Chd1.3
  crRNA array
  misc_feature (148)..(157): n is a, c, g, or t
cttggctttatatatcttgtggaaaggacgaaacaccgtaatttctactaagtgtagattgccgccactggatcccgagtaatttctactaagtgtagatatcagcaagtatgcaactattaatttctactaagtgtagatttttttnnnnnnnnnnaagcttggcgtggatccgatatcaactagatcttgagacaaatggcagtattcatccacaattttaaaagaaaaggggggattggggggtacagtgcaggggaaagaatagtagacataatagcaacagacatacaaactaaag

SEQ ID NO: 11617 - DNA, 301 bp, Artificial Sequence
  Jak1.4_Chd1.4
  crRNA array
  misc_feature (148)..(157): n is a, c, g, or t
cttggctttatatatcttgtggaaaggacgaaacaccgtaatttctactaagtgtagattgccgccactggatcccgagtaatttctactaagtgtagataaatggcggataactcctcttaatttctactaagtgtagatttttttnnnnnnnnnnaagcttggcgtggatccgatatcaactagatcttgagacaaatggcagtattcatccacaattttaaaagaaaaggggggattggggggtacagtgcaggggaaagaatagtagacataatagcaacagacatacaaactaaag

SEQ ID NO: 11618 - DNA, 301 bp, Artificial Sequence
  Jak1.1_Pole.1
  crRNA array
  misc_feature (148)..(157): n is a, c, g, or t
cttggctttatatatcttgtggaaaggacgaaacaccgtaatttctactaagtgtagatgagcgcaggccgccgcagcctaatttctactaagtgtagatgcgcgctctccacgtgctcttaatttctactaagtgtagatttttttnnnnnnnnnnaagcttggcgtggatccgatatcaactagatcttgagacaaatggcagtattcatccacaattttaaaagaaaaggggggattggggggtacagtgcaggggaaagaatagtagacataatagcaacagacatacaaactaaag

SEQ ID NO: 11619 - DNA, 301 bp, Artificial Sequence
  Jak1.1_Pole.2
  crRNA array
  misc_feature (148)..(157): n is a, c, g, or t
cttggctttatatatcttgtggaaaggacgaaacaccgtaatttctactaagtgtagatgagcgcaggccgccgcagcctaatttctactaagtgtagatacatcgagacgaccaaactgtaatttctactaagtgtagatttttttnnnnnnnnnnaagcttggcgtggatccgatatcaactagatcttgagacaaatggcagtattcatccacaattttaaaagaaaaggggggattggggggtacagtgcaggggaaagaatagtagacataatagcaacagacatacaaactaaag

SEQ ID NO: 11620 - DNA, 301 bp, Artificial Sequence
  Jak1.1_Pole.3
  crRNA array
  misc_feature (148)..(157): n is a, c, g, or t
cttggctttatatatcttgtggaaaggacgaaacaccgtaatttctactaagtgtagatgagcgcaggccgccgcagcctaatttctactaagtgtagatctgctgcaacgagtcgagaataatttctactaagtgtagatttttttnnnnnnnnnnaagcttggcgtggatccgatatcaactagatcttgagacaaatggcagtattcatccacaattttaaaagaaaaggggggattggggggtacagtgcaggggaaagaatagtagacataatagcaacagacatacaaactaaag

SEQ ID NO: 11621 - DNA, 301 bp, Artificial Sequence
  Jak1.1_Pole.4
  crRNA array
  misc_feature (148)..(157): n is a, c, g, or t
cttggctttatatatcttgtggaaaggacgaaacaccgtaatttctactaagtgtagatgagcgcaggccgccgcagcctaatttctactaagtgtagatgggagatgatatagcggcagtaatttctactaagtgtagatttttttnnnnnnnnnnaagcttggcgtggatccgatatcaactagatcttgagacaaatggcagtattcatccacaattttaaaagaaaaggggggattggggggtacagtgcaggggaaagaatagtagacataatagcaacagacatacaaactaaag

SEQ ID NO: 11622 - DNA, 301 bp, Artificial Sequence
  Jak1.2_Pole.1
  crRNA array
  misc_feature (148)..(157): n is a, c, g, or t
cttggctttatatatcttgtggaaaggacgaaacaccgtaatttctactaagtgtagatagggacactggacaaccgaataatttctactaagtgtagatgcgcgctctccacgtgctcttaatttctactaagtgtagatttttttnnnnnnnnnnaagcttggcgtggatccgatatcaactagatcttgagacaaatggcagtattcatccacaattttaaaagaaaaggggggattggggggtacagtgcaggggaaagaatagtagacataatagcaacagacatacaaactaaag

SEQ ID NO: 11623 - DNA, 301 bp, Artificial Sequence
  Jak1.2_Pole.2
  crRNA array
  misc_feature (148)..(157): n is a, c, g, or t
cttggctttatatatcttgtggaaaggacgaaacaccgtaatttctactaagtgtagatagggacactggacaaccgaataatttctactaagtgtagatacatcgagacgaccaaactgtaatttctactaagtgtagatttttttnnnnnnnnnnaagcttggcgtggatccgatatcaactagatcttgagacaaatggcagtattcatccacaattttaaaagaaaaggggggattggggggtacagtgcaggggaaagaatagtagacataatagcaacagacatacaaactaaag

SEQ ID NO: 11624 - DNA, 301 bp, Artificial Sequence
  Jak1.2_Pole.3
  crRNA array
  misc_feature (148)..(157): n is a, c, g, or t
cttggctttatatatcttgtggaaaggacgaaacaccgtaatttctactaagtgtagatagggacactggacaaccgaataatttctactaagtgtagatctgctgcaacgagtcgagaataatttctactaagtgtagatttttttnnnnnnnnnnaagcttggcgtggatccgatatcaactagatcttgagacaaatggcagtattcatccacaattttaaaagaaaaggggggattggggggtacagtgcaggggaaagaatagtagacataatagcaacagacatacaaactaaag

SEQ ID NO: 11625 - DNA, 301 bp, Artificial Sequence
  Jak1.2_Pole.4
  crRNA array
  misc_feature (148)..(157): n is a, c, g, or t
cttggctttatatatcttgtggaaaggacgaaacaccgtaatttctactaagtgtagatagggacactggacaaccgaataatttctactaagtgtagatgggagatgatatagcggcagtaatttctactaagtgtagatttttttnnnnnnnnnnaagcttggcgtggatccgatatcaactagatcttgagacaaatggcagtattcatccacaattttaaaagaaaaggggggattggggggtacagtgcaggggaaagaatagtagacataatagcaacagacatacaaactaaag

SEQ ID NO: 11626 - DNA, 301 bp, Artificial Sequence
  Jak1.3_Pole.1
  crRNA array
  misc_feature (148)..(157): n is a, c, g, or t
cttggctttatatatcttgtggaaaggacgaaacaccgtaatttctactaagtgtagatgcacagaacgccatggcatttaatttctactaagtgtagatgcgcgctctccacgtgctcttaatttctactaagtgtagatttttttnnnnnnnnnnaagcttggcgtggatccgatatcaactagatcttgagacaaatggcagtattcatccacaattttaaaagaaaaggggggattggggggtacagtgcaggggaaagaatagtagacataatagcaacagacatacaaactaaag

SEQ ID NO: 11627 - DNA, 301 bp, Artificial Sequence
  Jak1.3_Pole.2
  crRNA array
  misc_feature (148)..(157): n is a, c, g, or t
cttggctttatatatcttgtggaaaggacgaaacaccgtaatttctactaagtgtagatgcacagaacgccatggcatttaatttctactaagtgtagatacatcgagacgaccaaactgtaatttctactaagtgtagatttttttnnnnnnnnnnaagcttggcgtggatccgatatcaactagatcttgagacaaatggcagtattcatccacaattttaaaagaaaaggggggattggggggtacagtgcaggggaaagaatagtagacataatagcaacagacatacaaactaaag

SEQ ID NO: 11628 - DNA, 301 bp, Artificial Sequence
  Jak1.3_Pole.3
  crRNA array
  misc_feature (148)..(157): n is a, c, g, or t
cttggctttatatatcttgtggaaaggacgaaacaccgtaatttctactaagtgtagatgcacagaacgccatggcatttaatttctactaagtgtagatctgctgcaacgagtcgagaataatttctactaagtgtagatttttttnnnnnnnnnnaagcttggcgtggatccgatatcaactagatcttgagacaaatggcagtattcatccacaattttaaaagaaaaggggggattggggggtacagtgcaggggaaagaatagtagacataatagcaacagacatacaaactaaag

SEQ ID NO: 11629 - DNA, 301 bp, Artificial Sequence
  Jak1.3_Pole.4
  crRNA array
  misc_feature (148)..(157): n is a, c, g, or t
cttggctttatatatcttgtggaaaggacgaaacaccgtaatttctactaagtgtagatgcacagaacgccatggcatttaatttctactaagtgtagatgggagatgatatagcggcagtaatttctactaagtgtagatttttttnnnnnnnnnnaagcttggcgtggatccgatatcaactagatcttgagacaaatggcagtattcatccacaattttaaaagaaaaggggggattggggggtacagtgcaggggaaagaatagtagacataatagcaacagacatacaaactaaag

SEQ ID NO: 11630 - DNA, 301 bp, Artificial Sequence
  Jak1.4_Pole.1
  crRNA array
  misc_feature (148)..(157): n is a, c, g, or t
cttggctttatatatcttgtggaaaggacgaaacaccgtaatttctactaagtgtagattgccgccactggatcccgagtaatttctactaagtgtagatgcgcgctctccacgtgctcttaatttctactaagtgtagatttttttnnnnnnnnnnaagcttggcgtggatccgatatcaactagatcttgagacaaatggcagtattcatccacaattttaaaagaaaaggggggattggggggtacagtgcaggggaaagaatagtagacataatagcaacagacatacaaactaaag

SEQ ID NO: 11631 - DNA, 301 bp, Artificial Sequence
  Jak1.4_Pole.2
  crRNA array
  misc_feature (148)..(157): n is a, c, g, or t
cttggctttatatatcttgtggaaaggacgaaacaccgtaatttctactaagtgtagattgccgccactggatcccgagtaatttctactaagtgtagatacatcgagacgaccaaactgtaatttctactaagtgtagatttttttnnnnnnnnnnaagcttggcgtggatccgatatcaactagatcttgagacaaatggcagtattcatccacaattttaaaagaaaaggggggattggggggtacagtgcaggggaaagaatagtagacataatagcaacagacatacaaactaaag

SEQ ID NO: 11632 - DNA, 301 bp, Artificial Sequence
  Jak1.4_Pole.3
  crRNA array
  misc_feature (148)..(157): n is a, c, g, or t
cttggctttatatatcttgtggaaaggacgaaacaccgtaatttctactaagtgtagattgccgccactggatcccgagtaatttctactaagtgtagatctgctgcaacgagtcgagaataatttctactaagtgtagatttttttnnnnnnnnnnaagcttggcgtggatccgatatcaactagatcttgagacaaatggcagtattcatccacaattttaaaagaaaaggggggattggggggtacagtgcaggggaaagaatagtagacataatagcaacagacatacaaactaaag

SEQ ID NO: 11633 - DNA, 301 bp, Artificial Sequence
  Jak1.4_Pole.4
  crRNA array
  misc_feature (148)..(157): n is a, c, g, or t
cttggctttatatatcttgtggaaaggacgaaacaccgtaatttctactaagtgtagattgccgccactggatcccgagtaatttctactaagtgtagatgggagatgatatagcggcagtaatttctactaagtgtagatttttttnnnnnnnnnnaagcttggcgtggatccgatatcaactagatcttgagacaaatggcagtattcatccacaattttaaaagaaaaggggggattggggggtacagtgcaggggaaagaatagtagacataatagcaacagacatacaaactaaag

SEQ ID NO: 11634 - DNA, 301 bp, Artificial Sequence
  Jak1.1_Notch1.1
  crRNA array
  misc_feature (148)..(157): n is a, c, g, or t
cttggctttatatatcttgtggaaaggacgaaacaccgtaatttctactaagtgtagatgagcgcaggccgccgcagcctaatttctactaagtgtagattgggccaacgatgccaggactaatttctactaagtgtagatttttttnnnnnnnnnnaagcttggcgtggatccgatatcaactagatcttgagacaaatggcagtattcatccacaattttaaaagaaaaggggggattggggggtacagtgcaggggaaagaatagtagacataatagcaacagacatacaaactaaag

SEQ ID NO: 11635 - DNA, 301 bp, Artificial Sequence
  Jak1.1_Notch1.2
  crRNA array
  misc_feature (148)..(157): n is a, c, g, or t
cttggctttatatatcttgtggaaaggacgaaacaccgtaatttctactaagtgtagatgagcgcaggccgccgcagcctaatttctactaagtgtagatgtcgccccagcatcctgaagtaatttctactaagtgtagatttttttnnnnnnnnnnaagcttggcgtggatccgatatcaactagatcttgagacaaatggcagtattcatccacaattttaaaagaaaaggggggattggggggtacagtgcaggggaaagaatagtagacataatagcaacagacatacaaactaaag

SEQ ID NO: 11636 - DNA, 301 bp, Artificial Sequence
  Jak1.1_Notch1.3
  crRNA array
  misc_feature (148)..(157): n is a, c, g, or t
cttggctttatatatcttgtggaaaggacgaaacaccgtaatttctactaagtgtagatgagcgcaggccgccgcagcctaatttctactaagtgtagatagccacccccgccacgcctctaatttctactaagtgtagatttttttnnnnnnnnnnaagcttggcgtggatccgatatcaactagatcttgagacaaatggcagtattcatccacaattttaaaagaaaaggggggattggggggtacagtgcaggggaaagaatagtagacataatagcaacagacatacaaactaaag

SEQ ID NO: 11637 - DNA, 301 bp, Artificial Sequence
  Jak1.1_Notch1.4
  crRNA array
  misc_feature (148)..(157): n is a, c, g, or t
cttggctttatatatcttgtggaaaggacgaaacaccgtaatttctactaagtgtagatgagcgcaggccgccgcagcctaatttctactaagtgtagataaagtgtcagaggccagcaataatttctactaagtgtagatttttttnnnnnnnnnnaagcttggcgtggatccgatatcaactagatcttgagacaaatggcagtattcatccacaattttaaaagaaaaggggggattggggggtacagtgcaggggaaagaatagtagacataatagcaacagacatacaaactaaag

SEQ ID NO: 11638 - DNA, 301 bp, Artificial Sequence
  Jak1.2_Notch1.1
  crRNA array
  misc_feature (148)..(157): n is a, c, g, or t
cttggctttatatatcttgtggaaaggacgaaacaccgtaatttctactaagtgtagatagggacactggacaaccgaataatttctactaagtgtagattgggccaacgatgccaggactaatttctactaagtgtagatttttttnnnnnnnnnnaagcttggcgtggatccgatatcaactagatcttgagacaaatggcagtattcatccacaattttaaaagaaaaggggggattggggggtacagtgcaggggaaagaatagtagacataatagcaacagacatacaaactaaag

SEQ ID NO: 11639 - DNA, 301 bp, Artificial Sequence
  Jak1.2_Notch1.2
  crRNA array
  misc_feature (148)..(157): n is a, c, g, or t
cttggctttatatatcttgtggaaaggacgaaacaccgtaatttctactaagtgtagatagggacactggacaaccgaataatttctactaagtgtagatgtcgccccagcatcctgaagtaatttctactaagtgtagatttttttnnnnnnnnnnaagcttggcgtggatccgatatcaactagatcttgagacaaatggcagtattcatccacaattttaaaagaaaaggggggattggggggtacagtgcaggggaaagaatagtagacataatagcaacagacatacaaactaaag

SEQ ID NO: 11640 - DNA, 301 bp, Artificial Sequence
  Jak1.2_Notch1.3
  crRNA array
  misc_feature (148)..(157): n is a, c, g, or t
cttggctttatatatcttgtggaaaggacgaaacaccgtaatttctactaagtgtagatagggacactggacaaccgaataatttctactaagtgtagatagccacccccgccacgcctctaatttctactaagtgtagatttttttnnnnnnnnnnaagcttggcgtggatccgatatcaactagatcttgagacaaatggcagtattcatccacaattttaaaagaaaaggggggattggggggtacagtgcaggggaaagaatagtagacataatagcaacagacatacaaactaaag

SEQ ID NO: 11641 - DNA, 301 bp, Artificial Sequence
  Jak1.2_Notch1.4
  crRNA array
  misc_feature (148)..(157): n is a, c, g, or t
cttggctttatatatcttgtggaaaggacgaaacaccgtaatttctactaagtgtagatagggacactggacaaccgaataatttctactaagtgtagataaagtgtcagaggccagcaataatttctactaagtgtagatttttttnnnnnnnnnnaagcttggcgtggatccgatatcaactagatcttgagacaaatggcagtattcatccacaattttaaaagaaaaggggggattggggggtacagtgcaggggaaagaatagtagacataatagcaacagacatacaaactaaag

SEQ ID NO: 11642 - DNA, 301 bp, Artificial Sequence
  Jak1.3_Notch1.1
  crRNA array
  misc_feature (148)..(157): n is a, c, g, or t
cttggctttatatatcttgtggaaaggacgaaacaccgtaatttctactaagtgtagatgcacagaacgccatggcatttaatttctactaagtgtagattgggccaacgatgccaggactaatttctactaagtgtagatttttttnnnnnnnnnnaagcttggcgtggatccgatatcaactagatcttgagacaaatggcagtattcatccacaattttaaaagaaaaggggggattggggggtacagtgcaggggaaagaatagtagacataatagcaacagacatacaaactaaag

SEQ ID NO: 11643 - DNA, 301 bp, Artificial Sequence
  Jak1.3_Notch1.2
  crRNA array
  misc_feature (148)..(157): n is a, c, g, or t
cttggctttatatatcttgtggaaaggacgaaacaccgtaatttctactaagtgtagatgcacagaacgccatggcatttaatttctactaagtgtagatgtcgccccagcatcctgaagtaatttctactaagtgtagatttttttnnnnnnnnnnaagcttggcgtggatccgatatcaactagatcttgagacaaatggcagtattcatccacaattttaaaagaaaaggggggattggggggtacagtgcaggggaaagaatagtagacataatagcaacagacatacaaactaaag

SEQ ID NO: 11644 - DNA, 301 bp, Artificial Sequence
  Jak1.3_Notch1.3
  crRNA array
  misc_feature (148)..(157): n is a, c, g, or t
cttggctttatatatcttgtggaaaggacgaaacaccgtaatttctactaagtgtagatgcacagaacgccatggcatttaatttctactaagtgtagatagccacccccgccacgcctctaatttctactaagtgtagatttttttnnnnnnnnnnaagcttggcgtggatccgatatcaactagatcttgagacaaatggcagtattcatccacaattttaaaagaaaaggggggattggggggtacagtgcaggggaaagaatagtagacataatagcaacagacatacaaactaaag

SEQ ID NO: 11645 - DNA, 301 bp, Artificial Sequence
  Jak1.3_Notch1.4
  crRNA array
  misc_feature (148)..(157): n is a, c, g, or t
cttggctttatatatcttgtggaaaggacgaaacaccgtaatttctactaagtgtagatgcacagaacgccatggcatttaatttctactaagtgtagataaagtgtcagaggccagcaataatttctactaagtgtagatttttttnnnnnnnnnnaagcttggcgtggatccgatatcaactagatcttgagacaaatggcagtattcatccacaattttaaaagaaaaggggggattggggggtacagtgcaggggaaagaatagtagacataatagcaacagacatacaaactaaag

SEQ ID NO: 11646 - DNA, 301 bp, Artificial Sequence
  Jak1.4_Notch1.1
  crRNA array
  misc_feature (148)..(157): n is a, c, g, or t
cttggctttatatatcttgtggaaaggacgaaacaccgtaatttctactaagtgtagattgccgccactggatcccgagtaatttctactaagtgtagattgggccaacgatgccaggactaatttctactaagtgtagatttttttnnnnnnnnnnaagcttggcgtggatccgatatcaactagatcttgagacaaatggcagtattcatccacaattttaaaagaaaaggggggattggggggtacagtgcaggggaaagaatagtagacataatagcaacagacatacaaactaaag

SEQ ID NO: 11647 - DNA, 301 bp, Artificial Sequence
  Jak1.4_Notch1.2
  crRNA array
  misc_feature (148)..(157): n is a, c, g, or t
cttggctttatatatcttgtggaaaggacgaaacaccgtaatttctactaagtgtagattgccgccactggatcccgagtaatttctactaagtgtagatgtcgccccagcatcctgaagtaatttctactaagtgtagatttttttnnnnnnnnnnaagcttggcgtggatccgatatcaactagatcttgagacaaatggcagtattcatccacaattttaaaagaaaaggggggattggggggtacagtgcaggggaaagaatagtagacataatagcaacagacatacaaactaaag

SEQ ID NO: 11648 - DNA, 301 bp, Artificial Sequence
  Jak1.4_Notch1.3
  crRNA array
  misc_feature (148)..(157): n is a, c, g, or t
cttggctttatatatcttgtggaaaggacgaaacaccgtaatttctactaagtgtagattgccgccactggatcccgagtaatttctactaagtgtagatagccacccccgccacgcctctaatttctactaagtgtagatttttttnnnnnnnnnnaagcttggcgtggatccgatatcaactagatcttgagacaaatggcagtattcatccacaattttaaaagaaaaggggggattggggggtacagtgcaggggaaagaatagtagacataatagcaacagacatacaaactaaag

SEQ ID NO: 11649 - DNA, 301 bp, Artificial Sequence
  Jak1.4_Notch1.4
  crRNA array
  misc_feature (148)..(157): n is a, c, g, or t
cttggctttatatatcttgtggaaaggacgaaacaccgtaatttctactaagtgtagattgccgccactggatcccgagtaatttctactaagtgtagataaagtgtcagaggccagcaataatttctactaagtgtagatttttttnnnnnnnnnnaagcttggcgtggatccgatatcaactagatcttgagacaaatggcagtattcatccacaattttaaaagaaaaggggggattggggggtacagtgcaggggaaagaatagtagacataatagcaacagacatacaaactaaag

SEQ ID NO: 11650 - DNA, 301 bp, Artificial Sequence
  Jak1.1_Arid1a.1
  crRNA array
  misc_feature (148)..(157): n is a, c, g, or t
cttggctttatatatcttgtggaaaggacgaaacaccgtaatttctactaagtgtagatgagcgcaggccgccgcagcctaatttctactaagtgtagatcccgcgctcggccgctgccgtaatttctactaagtgtagatttttttnnnnnnnnnnaagcttggcgtggatccgatatcaactagatcttgagacaaatggcagtattcatccacaattttaaaagaaaaggggggattggggggtacagtgcaggggaaagaatagtagacataatagcaacagacatacaaactaaag

SEQ ID NO: 11651 - DNA, 301 bp, Artificial Sequence
  Jak1.1_Arid1a.2
  crRNA array
  misc_feature (148)..(157): n is a, c, g, or t
cttggctttatatatcttgtggaaaggacgaaacaccgtaatttctactaagtgtagatgagcgcaggccgccgcagcctaatttctactaagtgtagatagtgcaagatcgagcgtggataatttctactaagtgtagatttttttnnnnnnnnnnaagcttggcgtggatccgatatcaactagatcttgagacaaatggcagtattcatccacaattttaaaagaaaaggggggattggggggtacagtgcaggggaaagaatagtagacataatagcaacagacatacaaactaaag

SEQ ID NO: 11652 - DNA, 301 bp, Artificial Sequence
  Jak1.1_Arid1a.3
  crRNA array
  misc_feature (148)..(157): n is a, c, g, or t
cttggctttatatatcttgtggaaaggacgaaacaccgtaatttctactaagtgtagatgagcgcaggccgccgcagcctaatttctactaagtgtagatagtgagctggcagcactgcttaatttctactaagtgtagatttttttnnnnnnnnnnaagcttggcgtggatccgatatcaactagatcttgagacaaatggcagtattcatccacaattttaaaagaaaaggggggattggggggtacagtgcaggggaaagaatagtagacataatagcaacagacatacaaactaaag

SEQ ID NO: 11653 - DNA, 301 bp, Artificial Sequence
  Jak1.1_Arid1a.4
  crRNA array
  misc_feature (148)..(157): n is a, c, g, or t
cttggctttatatatcttgtggaaaggacgaaacaccgtaatttctactaagtgtagatgagcgcaggccgccgcagcctaatttctactaagtgtagatgccgagaccgagtctctgcataatttctactaagtgtagatttttttnnnnnnnnnnaagcttggcgtggatccgatatcaactagatcttgagacaaatggcagtattcatccacaattttaaaagaaaaggggggattggggggtacagtgcaggggaaagaatagtagacataatagcaacagacatacaaactaaag

SEQ ID NO: 11654 - DNA, 301 bp, Artificial Sequence
  Jak1.2_Arid1a.1
  crRNA array
  misc_feature (148)..(157): n is a, c, g, or t
cttggctttatatatcttgtggaaaggacgaaacaccgtaatttctactaagtgtagatagggacactggacaaccgaataatttctactaagtgtagatcccgcgctcggccgctgccgtaatttctactaagtgtagatttttttnnnnnnnnnnaagcttggcgtggatccgatatcaactagatcttgagacaaatggcagtattcatccacaattttaaaagaaaaggggggattggggggtacagtgcaggggaaagaatagtagacataatagcaacagacatacaaactaaag

SEQ ID NO: 11655 - DNA, 301 bp, Artificial Sequence
  Jak1.2_Arid1a.2
  crRNA array
  misc_feature (148)..(157): n is a, c, g, or t
cttggctttatatatcttgtggaaaggacgaaacaccgtaatttctactaagtgtagatagggacactggacaaccgaataatttctactaagtgtagatagtgcaagatcgagcgtggataatttctactaagtgtagatttttttnnnnnnnnnnaagcttggcgtggatccgatatcaactagatcttgagacaaatggcagtattcatccacaattttaaaagaaaaggggggattggggggtacagtgcaggggaaagaatagtagacataatagcaacagacatacaaactaaag

SEQ ID NO: 11656 - DNA, 301 bp, Artificial Sequence
  Jak1.2_Arid1a.3
  crRNA array
  misc_feature (148)..(157): n is a, c, g, or t
cttggctttatatatcttgtggaaaggacgaaacaccgtaatttctactaagtgtagatagggacactggacaaccgaataatttctactaagtgtagatagtgagctggcagcactgcttaatttctactaagtgtagatttttttnnnnnnnnnnaagcttggcgtggatccgatatcaactagatcttgagacaaatggcagtattcatccacaattttaaaagaaaaggggggattggggggtacagtgcaggggaaagaatagtagacataatagcaacagacatacaaactaaag

SEQ ID NO: 11657 - DNA, 301 bp, Artificial Sequence
  Jak1.2_Arid1a.4
  crRNA array
  misc_feature (148)..(157): n is a, c, g, or t
cttggctttatatatcttgtggaaaggacgaaacaccgtaatttctactaagtgtagatagggacactggacaaccgaataatttctactaagtgtagatgccgagaccgagtctctgcataatttctactaagtgtagatttttttnnnnnnnnnnaagcttggcgtggatccgatatcaactagatcttgagacaaatggcagtattcatccacaattttaaaagaaaaggggggattggggggtacagtgcaggggaaagaatagtagacataatagcaacagacatacaaactaaag

SEQ ID NO: 11658 - DNA, 301 bp, Artificial Sequence
  Jak1.3_Arid1a.1
  crRNA array
  misc_feature (148)..(157): n is a, c, g, or t
cttggctttatatatcttgtggaaaggacgaaacaccgtaatttctactaagtgtagatgcacagaacgccatggcatttaatttctactaagtgtagatcccgcgctcggccgctgccgtaatttctactaagtgtagatttttttnnnnnnnnnnaagcttggcgtggatccgatatcaactagatcttgagacaaatggcagtattcatccacaattttaaaagaaaaggggggattggggggtacagtgcaggggaaagaatagtagacataatagcaacagacatacaaactaaag

SEQ ID NO: 11659 - DNA, 301 bp, Artificial Sequence
  Jak1.3_Arid1a.2
  crRNA array
  misc_feature (148)..(157): n is a, c, g, or t
cttggctttatatatcttgtggaaaggacgaaacaccgtaatttctactaagtgtagatgcacagaacgccatggcatttaatttctactaagtgtagatagtgcaagatcgagcgtggataatttctactaagtgtagatttttttnnnnnnnnnnaagcttggcgtggatccgatatcaactagatcttgagacaaatggcagtattcatccacaattttaaaagaaaaggggggattggggggtacagtgcaggggaaagaatagtagacataatagcaacagacatacaaactaaag

SEQ ID NO: 11660 - DNA, 301 bp, Artificial Sequence
  Jak1.3_Arid1a.3
  crRNA array
  misc_feature (148)..(157): n is a, c, g, or t
cttggctttatatatcttgtggaaaggacgaaacaccgtaatttctactaagtgtagatgcacagaacgccatggcatttaatttctactaagtgtagatagtgagctggcagcactgcttaatttctactaagtgtagatttttttnnnnnnnnnnaagcttggcgtggatccgatatcaactagatcttgagacaaatggcagtattcatccacaattttaaaagaaaaggggggattggggggtacagtgcaggggaaagaatagtagacataatagcaacagacatacaaactaaag

SEQ ID NO: 11661 - DNA, 301 bp, Artificial Sequence
  Jak1.3_Arid1a.4
  crRNA array
  misc_feature (148)..(157): n is a, c, g, or t
cttggctttatatatcttgtggaaaggacgaaacaccgtaatttctactaagtgtagatgcacagaacgccatggcatttaatttctactaagtgtagatgccgagaccgagtctctgcataatttctactaagtgtagatttttttnnnnnnnnnnaagcttggcgtggatccgatatcaactagatcttgagacaaatggcagtattcatccacaattttaaaagaaaaggggggattggggggtacagtgcaggggaaagaatagtagacataatagcaacagacatacaaactaaag

SEQ ID NO: 11662 - DNA, 301 bp, Artificial Sequence
  Jak1.4_Arid1a.1
  crRNA array
  misc_feature (148)..(157): n is a, c, g, or t
cttggctttatatatcttgtggaaaggacgaaacaccgtaatttctactaagtgtagattgccgccactggatcccgagtaatttctactaagtgtagatcccgcgctcggccgctgccgtaatttctactaagtgtagatttttttnnnnnnnnnnaagcttggcgtggatccgatatcaactagatcttgagacaaatggcagtattcatccacaattttaaaagaaaaggggggattggggggtacagtgcaggggaaagaatagtagacataatagcaacagacatacaaactaaag

SEQ ID NO: 11663 - DNA, 301 bp, Artificial Sequence
  Jak1.4_Arid1a.2
  crRNA array
  misc_feature (148)..(157): n is a, c, g, or t
cttggctttatatatcttgtggaaaggacgaaacaccgtaatttctactaagtgtagattgccgccactggatcccgagtaatttctactaagtgtagatagtgcaagatcgagcgtggataatttctactaagtgtagatttttttnnnnnnnnnnaagcttggcgtggatccgatatcaactagatcttgagacaaatggcagtattcatccacaattttaaaagaaaaggggggattggggggtacagtgcaggggaaagaatagtagacataatagcaacagacatacaaactaaag

SEQ ID NO: 11664 - DNA, 301 bp, Artificial Sequence
  Jak1.4_Arid1a.3
  crRNA array
  misc_feature (148)..(157): n is a, c, g, or t
cttggctttatatatcttgtggaaaggacgaaacaccgtaatttctactaagtgtagattgccgccactggatcccgagtaatttctactaagtgtagatagtgagctggcagcactgcttaatttctactaagtgtagatttttttnnnnnnnnnnaagcttggcgtggatccgatatcaactagatcttgagacaaatggcagtattcatccacaattttaaaagaaaaggggggattggggggtacagtgcaggggaaagaatagtagacataatagcaacagacatacaaactaaag

SEQ ID NO: 11665 - DNA, 301 bp, Artificial Sequence
  Jak1.4_Arid1a.4
  crRNA array
  misc_feature (148)..(157): n is a, c, g, or t
cttggctttatatatcttgtggaaaggacgaaacaccgtaatttctactaagtgtagattgccgccactggatcccgagtaatttctactaagtgtagatgccgagaccgagtctctgcataatttctactaagtgtagatttttttnnnnnnnnnnaagcttggcgtggatccgatatcaactagatcttgagacaaatggcagtattcatccacaattttaaaagaaaaggggggattggggggtacagtgcaggggaaagaatagtagacataatagcaacagacatacaaactaaag

SEQ ID NO: 11666 - DNA, 301 bp, Artificial Sequence
  Jak1.1_Trim72.1
  crRNA array
  misc_feature (148)..(157): n is a, c, g, or t
cttggctttatatatcttgtggaaaggacgaaacaccgtaatttctactaagtgtagatgagcgcaggccgccgcagcctaatttctactaagtgtagataccccagctctgcgcacccgtaatttctactaagtgtagatttttttnnnnnnnnnnaagcttggcgtggatccgatatcaactagatcttgagacaaatggcagtattcatccacaattttaaaagaaaaggggggattggggggtacagtgcaggggaaagaatagtagacataatagcaacagacatacaaactaaag

SEQ ID NO: 11667 - DNA, 301 bp, Artificial Sequence
  Jak1.1_Trim72.2
  crRNA array
  misc_feature (148)..(157): n is a, c, g, or t
cttggctttatatatcttgtggaaaggacgaaacaccgtaatttctactaagtgtagatgagcgcaggccgccgcagcctaatttctactaagtgtagatcacgagcgtctgcccgggcctaatttctactaagtgtagatttttttnnnnnnnnnnaagcttggcgtggatccgatatcaactagatcttgagacaaatggcagtattcatccacaattttaaaagaaaaggggggattggggggtacagtgcaggggaaagaatagtagacataatagcaacagacatacaaactaaag

SEQ ID NO: 11668 - DNA, 301 bp, Artificial Sequence
  Jak1.1_Trim72.3
  crRNA array
  misc_feature (148)..(157): n is a, c, g, or t
cttggctttatatatcttgtggaaaggacgaaacaccgtaatttctactaagtgtagatgagcgcaggccgccgcagcctaatttctactaagtgtagatacgtgtgctggcacgacaagtaatttctactaagtgtagatttttttnnnnnnnnnnaagcttggcgtggatccgatatcaactagatcttgagacaaatggcagtattcatccacaattttaaaagaaaaggggggattggggggtacagtgcaggggaaagaatagtagacataatagcaacagacatacaaactaaag

SEQ ID NO: 11669 - DNA, 301 bp, Artificial Sequence
  Jak1.1_Trim72.4
  crRNA array
  misc_feature (148)..(157): n is a, c, g, or t
cttggctttatatatcttgtggaaaggacgaaacaccgtaatttctactaagtgtagatgagcgcaggccgccgcagcctaatttctactaagtgtagattgccgtgcctgcctgatccgtaatttctactaagtgtagatttttttnnnnnnnnnnaagcttggcgtggatccgatatcaactagatcttgagacaaatggcagtattcatccacaattttaaaagaaaaggggggattggggggtacagtgcaggggaaagaatagtagacataatagcaacagacatacaaactaaag

SEQ ID NO: 11670 - DNA, 301 bp, Artificial Sequence
  Jak1.2_Trim72.1
  crRNA array
  misc_feature (148)..(157): n is a, c, g, or t
cttggctttatatatcttgtggaaaggacgaaacaccgtaatttctactaagtgtagatagggacactggacaaccgaataatttctactaagtgtagataccccagctctgcgcacccgtaatttctactaagtgtagatttttttnnnnnnnnnnaagcttggcgtggatccgatatcaactagatcttgagacaaatggcagtattcatccacaattttaaaagaaaaggggggattggggggtacagtgcaggggaaagaatagtagacataatagcaacagacatacaaactaaag

SEQ ID NO: 11671 - DNA, 301 bp, Artificial Sequence
  Jak1.2_Trim72.2
  crRNA array
  misc_feature (148)..(157): n is a, c, g, or t
cttggctttatatatcttgtggaaaggacgaaacaccgtaatttctactaagtgtagatagggacactggacaaccgaataatttctactaagtgtagatcacgagcgtctgcccgggcctaatttctactaagtgtagatttttttnnnnnnnnnnaagcttggcgtggatccgatatcaactagatcttgagacaaatggcagtattcatccacaattttaaaagaaaaggggggattggggggtacagtgcaggggaaagaatagtagacataatagcaacagacatacaaactaaag

SEQ ID NO: 11672 - DNA, 301 bp, Artificial Sequence
  Jak1.2_Trim72.3
  crRNA array
  misc_feature (148)..(157): n is a, c, g, or t
cttggctttatatatcttgtggaaaggacgaaacaccgtaatttctactaagtgtagatagggacactggacaaccgaataatttctactaagtgtagatacgtgtgctggcacgacaagtaatttctactaagtgtagatttttttnnnnnnnnnnaagcttggcgtggatccgatatcaactagatcttgagacaaatggcagtattcatccacaattttaaaagaaaaggggggattggggggtacagtgcaggggaaagaatagtagacataatagcaacagacatacaaactaaag

SEQ ID NO: 11673 - DNA, 301 bp, Artificial Sequence
  Jak1.2_Trim72.4
  crRNA array
  misc_feature (148)..(157): n is a, c, g, or t
cttggctttatatatcttgtggaaaggacgaaacaccgtaatttctactaagtgtagatagggacactggacaaccgaataatttctactaagtgtagattgccgtgcctgcctgatccgtaatttctactaagtgtagatttttttnnnnnnnnnnaagcttggcgtggatccgatatcaactagatcttgagacaaatggcagtattcatccacaattttaaaagaaaaggggggattggggggtacagtgcaggggaaagaatagtagacataatagcaacagacatacaaactaaag

SEQ ID NO: 11674 - DNA, 301 bp, Artificial Sequence
  Jak1.3_Trim72.1
  crRNA array
  misc_feature (148)..(157): n is a, c, g, or t
cttggctttatatatcttgtggaaaggacgaaacaccgtaatttctactaagtgtagatgcacagaacgccatggcatttaatttctactaagtgtagataccccagctctgcgcacccgtaatttctactaagtgtagatttttttnnnnnnnnnnaagcttggcgtggatccgatatcaactagatcttgagacaaatggcagtattcatccacaattttaaaagaaaaggggggattggggggtacagtgcaggggaaagaatagtagacataatagcaacagacatacaaactaaag

SEQ ID NO: 11675 - DNA, 301 bp, Artificial Sequence
  Jak1.3_Trim72.2
  crRNA array
  misc_feature (148)..(157): n is a, c, g, or t
cttggctttatatatcttgtggaaaggacgaaacaccgtaatttctactaagtgtagatgcacagaacgccatggcatttaatttctactaagtgtagatcacgagcgtctgcccgggcctaatttctactaagtgtagatttttttnnnnnnnnnnaagcttggcgtggatccgatatcaactagatcttgagacaaatggcagtattcatccacaattttaaaagaaaaggggggattggggggtacagtgcaggggaaagaatagtagacataatagcaacagacatacaaactaaag

SEQ ID NO: 11676 - DNA, 301 bp, Artificial Sequence
  Jak1.3_Trim72.3
  crRNA array
  misc_feature (148)..(157): n is a, c, g, or t
cttggctttatatatcttgtggaaaggacgaaacaccgtaatttctactaagtgtagatgcacagaacgccatggcatttaatttctactaagtgtagatacgtgtgctggcacgacaagtaatttctactaagtgtagatttttttnnnnnnnnnnaagcttggcgtggatccgatatcaactagatcttgagacaaatggcagtattcatccacaattttaaaagaaaaggggggattggggggtacagtgcaggggaaagaatagtagacataatagcaacagacatacaaactaaag

SEQ ID NO: 11677 - DNA, 301 bp, Artificial Sequence
  Jak1.3_Trim72.4
  crRNA array
  misc_feature (148)..(157): n is a, c, g, or t
cttggctttatatatcttgtggaaaggacgaaacaccgtaatttctactaagtgtagatgcacagaacgccatggcatttaatttctactaagtgtagattgccgtgcctgcctgatccgtaatttctactaagtgtagatttttttnnnnnnnnnnaagcttggcgtggatccgatatcaactagatcttgagacaaatggcagtattcatccacaattttaaaagaaaaggggggattggggggtacagtgcaggggaaagaatagtagacataatagcaacagacatacaaactaaag

SEQ ID NO: 11678 - DNA, 301 bp, Artificial Sequence
  Jak1.4_Trim72.1
  crRNA array
  misc_feature (148)..(157): n is a, c, g, or t
cttggctttatatatcttgtggaaaggacgaaacaccgtaatttctactaagtgtagattgccgccactggatcccgagtaatttctactaagtgtagataccccagctctgcgcacccgtaatttctactaagtgtagatttttttnnnnnnnnnnaagcttggcgtggatccgatatcaactagatcttgagacaaatggcagtattcatccacaattttaaaagaaaaggggggattggggggtacagtgcaggggaaagaatagtagacataatagcaacagacatacaaactaaag

SEQ ID NO: 11679 - DNA, 301 bp, Artificial Sequence
  Jak1.4_Trim72.2
  crRNA array
  misc_feature (148)..(157): n is a, c, g, or t
cttggctttatatatcttgtggaaaggacgaaacaccgtaatttctactaagtgtagattgccgccactggatcccgagtaatttctactaagtgtagatcacgagcgtctgcccgggcctaatttctactaagtgtagatttttttnnnnnnnnnnaagcttggcgtggatccgatatcaactagatcttgagacaaatggcagtattcatccacaattttaaaagaaaaggggggattggggggtacagtgcaggggaaagaatagtagacataatagcaacagacatacaaactaaag

SEQ ID NO: 11680 - DNA, 301 bp, Artificial Sequence
  Jak1.4_Trim72.3
  crRNA array
  misc_feature (148)..(157): n is a, c, g, or t
cttggctttatatatcttgtggaaaggacgaaacaccgtaatttctactaagtgtagattgccgccactggatcccgagtaatttctactaagtgtagatacgtgtgctggcacgacaagtaatttctactaagtgtagatttttttnnnnnnnnnnaagcttggcgtggatccgatatcaactagatcttgagacaaatggcagtattcatccacaattttaaaagaaaaggggggattggggggtacagtgcaggggaaagaatagtagacataatagcaacagacatacaaactaaag

SEQ ID NO: 11681 - DNA, 301 bp, Artificial Sequence
  Jak1.4_Trim72.4
  crRNA array
  misc_feature (148)..(157): n is a, c, g, or t
cttggctttatatatcttgtggaaaggacgaaacaccgtaatttctactaagtgtagattgccgccactggatcccgagtaatttctactaagtgtagattgccgtgcctgcctgatccgtaatttctactaagtgtagatttttttnnnnnnnnnnaagcttggcgtggatccgatatcaactagatcttgagacaaatggcagtattcatccacaattttaaaagaaaaggggggattggggggtacagtgcaggggaaagaatagtagacataatagcaacagacatacaaactaaag

SEQ ID NO: 11682 - DNA, 301 bp, Artificial Sequence
  Jak1.1_Zfhx3.1
  crRNA array
  misc_feature (148)..(157): n is a, c, g, or t
cttggctttatatatcttgtggaaaggacgaaacaccgtaatttctactaagtgtagatgagcgcaggccgccgcagcctaatttctactaagtgtagatcgctgcgaggtgtgtaactataatttctactaagtgtagatttttttnnnnnnnnnnaagcttggcgtggatccgatatcaactagatcttgagacaaatggcagtattcatccacaattttaaaagaaaaggggggattggggggtacagtgcaggggaaagaatagtagacataatagcaacagacatacaaactaaag

SEQ ID NO: 11683 - DNA, 301 bp, Artificial Sequence
  Jak1.1_Zfhx3.2
  crRNA array
  misc_feature (148)..(157): n is a, c, g, or t
cttggctttatatatcttgtggaaaggacgaaacaccgtaatttctactaagtgtagatgagcgcaggccgccgcagcctaatttctactaagtgtagatacgtgcgacacaaaagcaactaatttctactaagtgtagatttttttnnnnnnnnnnaagcttggcgtggatccgatatcaactagatcttgagacaaatggcagtattcatccacaattttaaaagaaaaggggggattggggggtacagtgcaggggaaagaatagtagacataatagcaacagacatacaaactaaag

SEQ ID NO: 11684 - DNA, 301 bp, Artificial Sequence
  Jak1.1_Zfhx3.3
  crRNA array
  misc_feature (148)..(157): n is a, c, g, or t
cttggctttatatatcttgtggaaaggacgaaacaccgtaatttctactaagtgtagatgagcgcaggccgccgcagcctaatttctactaagtgtagattgctctacggcaagaggaaataatttctactaagtgtagatttttttnnnnnnnnnnaagcttggcgtggatccgatatcaactagatcttgagacaaatggcagtattcatccacaattttaaaagaaaaggggggattggggggtacagtgcaggggaaagaatagtagacataatagcaacagacatacaaactaaag

SEQ ID NO: 11685 - DNA, 301 bp, Artificial Sequence
  Jak1.1_Zfhx3.4
  crRNA array
  misc_feature (148)..(157): n is a, c, g, or t
cttggctttatatatcttgtggaaaggacgaaacaccgtaatttctactaagtgtagatgagcgcaggccgccgcagcctaatttctactaagtgtagatagtgagcggcagactgcgagtaatttctactaagtgtagatttttttnnnnnnnnnnaagcttggcgtggatccgatatcaactagatcttgagacaaatggcagtattcatccacaattttaaaagaaaaggggggattggggggtacagtgcaggggaaagaatagtagacataatagcaacagacatacaaactaaag

SEQ ID NO: 11686 - DNA, 301 bp, Artificial Sequence
  Jak1.2_Zfhx3.1
  crRNA array
  misc_feature (148)..(157): n is a, c, g, or t
cttggctttatatatcttgtggaaaggacgaaacaccgtaatttctactaagtgtagatagggacactggacaaccgaataatttctactaagtgtagatcgctgcgaggtgtgtaactataatttctactaagtgtagatttttttnnnnnnnnnnaagcttggcgtggatccgatatcaactagatcttgagacaaatggcagtattcatccacaattttaaaagaaaaggggggattggggggtacagtgcaggggaaagaatagtagacataatagcaacagacatacaaactaaag

SEQ ID NO: 11687 - DNA, 301 bp, Artificial Sequence
  Jak1.2_Zfhx3.2
  crRNA array
  misc_feature (148)..(157): n is a, c, g, or t
cttggctttatatatcttgtggaaaggacgaaacaccgtaatttctactaagtgtagatagggacactggacaaccgaataatttctactaagtgtagatacgtgcgacacaaaagcaactaatttctactaagtgtagatttttttnnnnnnnnnnaagcttggcgtggatccgatatcaactagatcttgagacaaatggcagtattcatccacaattttaaaagaaaaggggggattggggggtacagtgcaggggaaagaatagtagacataatagcaacagacatacaaactaaag

SEQ ID NO: 11688 - DNA, 301 bp, Artificial Sequence
  Jak1.2_Zfhx3.3
  crRNA array
  misc_feature (148)..(157): n is a, c, g, or t
cttggctttatatatcttgtggaaaggacgaaacaccgtaatttctactaagtgtagatagggacactggacaaccgaataatttctactaagtgtagattgctctacggcaagaggaaataatttctactaagtgtagatttttttnnnnnnnnnnaagcttggcgtggatccgatatcaactagatcttgagacaaatggcagtattcatccacaattttaaaagaaaaggggggattggggggtacagtgcaggggaaagaatagtagacataatagcaacagacatacaaactaaag

SEQ ID NO: 11689 - DNA, 301 bp, Artificial Sequence
  Jak1.2_Zfhx3.4
  crRNA array
  misc_feature (148)..(157): n is a, c, g, or t
cttggctttatatatcttgtggaaaggacgaaacaccgtaatttctactaagtgtagatagggacactggacaaccgaataatttctactaagtgtagatagtgagcggcagactgcgagtaatttctactaagtgtagatttttttnnnnnnnnnnaagcttggcgtggatccgatatcaactagatcttgagacaaatggcagtattcatccacaattttaaaagaaaaggggggattggggggtacagtgcaggggaaagaatagtagacataatagcaacagacatacaaactaaag

SEQ ID NO: 11690 - DNA, 301 bp, Artificial Sequence
  Jak1.3_Zfhx3.1
  crRNA array
  misc_feature (148)..(157): n is a, c, g, or t
cttggctttatatatcttgtggaaaggacgaaacaccgtaatttctactaagtgtagatgcacagaacgccatggcatttaatttctactaagtgtagatcgctgcgaggtgtgtaactataatttctactaagtgtagatttttttnnnnnnnnnnaagcttggcgtggatccgatatcaactagatcttgagacaaatggcagtattcatccacaattttaaaagaaaaggggggattggggggtacagtgcaggggaaagaatagtagacataatagcaacagacatacaaactaaag

SEQ ID NO: 11691 - DNA, 301 bp, Artificial Sequence
  Jak1.3_Zfhx3.2
  crRNA array
  misc_feature (148)..(157): n is a, c, g, or t
cttggctttatatatcttgtggaaaggacgaaacaccgtaatttctactaagtgtagatgcacagaacgccatggcatttaatttctactaagtgtagatacgtgcgacacaaaagcaactaatttctactaagtgtagatttttttnnnnnnnnnnaagcttggcgtggatccgatatcaactagatcttgagacaaatggcagtattcatccacaattttaaaagaaaaggggggattggggggtacagtgcaggggaaagaatagtagacataatagcaacagacatacaaactaaag

SEQ ID NO: 11692 - DNA, 301 bp, Artificial Sequence
  Jak1.3_Zfhx3.3
  crRNA array
  misc_feature (148)..(157): n is a, c, g, or t
cttggctttatatatcttgtggaaaggacgaaacaccgtaatttctactaagtgtagatgcacagaacgccatggcatttaatttctactaagtgtagattgctctacggcaagaggaaataatttctactaagtgtagatttttttnnnnnnnnnnaagcttggcgtggatccgatatcaactagatcttgagacaaatggcagtattcatccacaattttaaaagaaaaggggggattggggggtacagtgcaggggaaagaatagtagacataatagcaacagacatacaaactaaag

SEQ ID NO: 11693 - DNA, 301 bp, Artificial Sequence
  Jak1.3_Zfhx3.4
  crRNA array
  misc_feature (148)..(157): n is a, c, g, or t
cttggctttatatatcttgtggaaaggacgaaacaccgtaatttctactaagtgtagatgcacagaacgccatggcatttaatttctactaagtgtagatagtgagcggcagactgcgagtaatttctactaagtgtagatttttttnnnnnnnnnnaagcttggcgtggatccgatatcaactagatcttgagacaaatggcagtattcatccacaattttaaaagaaaaggggggattggggggtacagtgcaggggaaagaatagtagacataatagcaacagacatacaaactaaag

SEQ ID NO: 11694 - DNA, 301 bp, Artificial Sequence
  Jak1.4_Zfhx3.1
  crRNA array
  misc_feature (148)..(157): n is a, c, g, or t
cttggctttatatatcttgtggaaaggacgaaacaccgtaatttctactaagtgtagattgccgccactggatcccgagtaatttctactaagtgtagatcgctgcgaggtgtgtaactataatttctactaagtgtagatttttttnnnnnnnnnnaagcttggcgtggatccgatatcaactagatcttgagacaaatggcagtattcatccacaattttaaaagaaaaggggggattggggggtacagtgcaggggaaagaatagtagacataatagcaacagacatacaaactaaag

SEQ ID NO: 11695 - DNA, 301 bp, Artificial Sequence
  Jak1.4_Zfhx3.2
  crRNA array
  misc_feature (148)..(157): n is a, c, g, or t
cttggctttatatatcttgtggaaaggacgaaacaccgtaatttctactaagtgtagattgccgccactggatcccgagtaatttctactaagtgtagatacgtgcgacacaaaagcaactaatttctactaagtgtagatttttttnnnnnnnnnnaagcttggcgtggatccgatatcaactagatcttgagacaaatggcagtattcatccacaattttaaaagaaaaggggggattggggggtacagtgcaggggaaagaatagtagacataatagcaacagacatacaaactaaag

SEQ ID NO: 11696 - DNA, 301 bp, Artificial Sequence
  Jak1.4_Zfhx3.3
  crRNA array
  misc_feature (148)..(157): n is a, c, g, or t
cttggctttatatatcttgtggaaaggacgaaacaccgtaatttctactaagtgtagattgccgccactggatcccgagtaatttctactaagtgtagattgctctacggcaagaggaaataatttctactaagtgtagatttttttnnnnnnnnnnaagcttggcgtggatccgatatcaactagatcttgagacaaatggcagtattcatccacaattttaaaagaaaaggggggattggggggtacagtgcaggggaaagaatagtagacataatagcaacagacatacaaactaaag

SEQ ID NO: 11697 - DNA, 301 bp, Artificial Sequence
  Jak1.4_Zfhx3.4
  crRNA array
  misc_feature (148)..(157): n is a, c, g, or t
cttggctttatatatcttgtggaaaggacgaaacaccgtaatttctactaagtgtagattgccgccactggatcccgagtaatttctactaagtgtagatagtgagcggcagactgcgagtaatttctactaagtgtagatttttttnnnnnnnnnnaagcttggcgtggatccgatatcaactagatcttgagacaaatggcagtattcatccacaattttaaaagaaaaggggggattggggggtacagtgcaggggaaagaatagtagacataatagcaacagacatacaaactaaag

SEQ ID NO: 11698 - DNA, 301 bp, Artificial Sequence
  Jak1.1_Crebbp.1
  crRNA array
  misc_feature (148)..(157): n is a, c, g, or t
cttggctttatatatcttgtggaaaggacgaaacaccgtaatttctactaagtgtagatgagcgcaggccgccgcagcctaatttctactaagtgtagatctcacggcggcggcgggccgtaatttctactaagtgtagatttttttnnnnnnnnnnaagcttggcgtggatccgatatcaactagatcttgagacaaatggcagtattcatccacaattttaaaagaaaaggggggattggggggtacagtgcaggggaaagaatagtagacataatagcaacagacatacaaactaaag

SEQ ID NO: 11699 - DNA, 301 bp, Artificial Sequence
  Jak1.1_Crebbp.2
  crRNA array
  misc_feature (148)..(157): n is a, c, g, or t
cttggctttatatatcttgtggaaaggacgaaacaccgtaatttctactaagtgtagatgagcgcaggccgccgcagcctaatttctactaagtgtagatcgcgagcaggtgaagatggctaatttctactaagtgtagatttttttnnnnnnnnnnaagcttggcgtggatccgatatcaactagatcttgagacaaatggcagtattcatccacaattttaaaagaaaaggggggattggggggtacagtgcaggggaaagaatagtagacataatagcaacagacatacaaactaaag

SEQ ID NO: 11700 - DNA, 301 bp, Artificial Sequence
  Jak1.1_Crebbp.3
  crRNA array
  misc_feature (148)..(157): n is a, c, g, or t
cttggctttatatatcttgtggaaaggacgaaacaccgtaatttctactaagtgtagatgagcgcaggccgccgcagcctaatttctactaagtgtagatggctccgccgcccgcccgcgtaatttctactaagtgtagatttttttnnnnnnnnnnaagcttggcgtggatccgatatcaactagatcttgagacaaatggcagtattcatccacaattttaaaagaaaaggggggattggggggtacagtgcaggggaaagaatagtagacataatagcaacagacatacaaactaaag

SEQ ID NO: 11701 - DNA, 301 bp, Artificial Sequence
  Jak1.1_Crebbp.4
  crRNA array
  misc_feature (148)..(157): n is a, c, g, or t
cttggctttatatatcttgtggaaaggacgaaacaccgtaatttctactaagtgtagatgagcgcaggccgccgcagcctaatttctactaagtgtagattggactagatgactccgtagtaatttctactaagtgtagatttttttnnnnnnnnnnaagcttggcgtggatccgatatcaactagatcttgagacaaatggcagtattcatccacaattttaaaagaaaaggggggattggggggtacagtgcaggggaaagaatagtagacataatagcaacagacatacaaactaaag

SEQ ID NO: 11702 - DNA, 301 bp, Artificial Sequence
  Jak1.2_Crebbp.1
  crRNA array
  misc_feature (148)..(157): n is a, c, g, or t
cttggctttatatatcttgtggaaaggacgaaacaccgtaatttctactaagtgtagatagggacactggacaaccgaataatttctactaagtgtagatctcacggcggcggcgggccgtaatttctactaagtgtagatttttttnnnnnnnnnnaagcttggcgtggatccgatatcaactagatcttgagacaaatggcagtattcatccacaattttaaaagaaaaggggggattggggggtacagtgcaggggaaagaatagtagacataatagcaacagacatacaaactaaag

SEQ ID NO: 11703 - DNA, 301 bp, Artificial Sequence
  Jak1.2_Crebbp.2
  crRNA array
  misc_feature (148)..(157): n is a, c, g, or t
cttggctttatatatcttgtggaaaggacgaaacaccgtaatttctactaagtgtagatagggacactggacaaccgaataatttctactaagtgtagatcgcgagcaggtgaagatggctaatttctactaagtgtagatttttttnnnnnnnnnnaagcttggcgtggatccgatatcaactagatcttgagacaaatggcagtattcatccacaattttaaaagaaaaggggggattggggggtacagtgcaggggaaagaatagtagacataatagcaacagacatacaaactaaag

SEQ ID NO: 11704 - DNA, 301 bp, Artificial Sequence
  Jak1.2_Crebbp.3
  crRNA array
  misc_feature (148)..(157): n is a, c, g, or t
cttggctttatatatcttgtggaaaggacgaaacaccgtaatttctactaagtgtagatagggacactggacaaccgaataatttctactaagtgtagatggctccgccgcccgcccgcgtaatttctactaagtgtagatttttttnnnnnnnnnnaagcttggcgtggatccgatatcaactagatcttgagacaaatggcagtattcatccacaattttaaaagaaaaggggggattggggggtacagtgcaggggaaagaatagtagacataatagcaacagacatacaaactaaag

SEQ ID NO: 11705 - DNA, 301 bp, Artificial Sequence
  Jak1.2_Crebbp.4
  crRNA array
  misc_feature (148)..(157): n is a, c, g, or t
cttggctttatatatcttgtggaaaggacgaaacaccgtaatttctactaagtgtagatagggacactggacaaccgaataatttctactaagtgtagattggactagatgactccgtagtaatttctactaagtgtagatttttttnnnnnnnnnnaagcttggcgtggatccgatatcaactagatcttgagacaaatggcagtattcatccacaattttaaaagaaaaggggggattggggggtacagtgcaggggaaagaatagtagacataatagcaacagacatacaaactaaag

SEQ ID NO: 11706 - DNA, 301 bp, Artificial Sequence
  Jak1.3_Crebbp.1
  crRNA array
  misc_feature (148)..(157): n is a, c, g, or t
cttggctttatatatcttgtggaaaggacgaaacaccgtaatttctactaagtgtagatgcacagaacgccatggcatttaatttctactaagtgtagatctcacggcggcggcgggccgtaatttctactaagtgtagatttttttnnnnnnnnnnaagcttggcgtggatccgatatcaactagatcttgagacaaatggcagtattcatccacaattttaaaagaaaaggggggattggggggtacagtgcaggggaaagaatagtagacataatagcaacagacatacaaactaaag

SEQ ID NO: 11707 - DNA, 301 bp, Artificial Sequence
  Jak1.3_Crebbp.2
  crRNA array
  misc_feature (148)..(157): n is a, c, g, or t
cttggctttatatatcttgtggaaaggacgaaacaccgtaatttctactaagtgtagatgcacagaacgccatggcatttaatttctactaagtgtagatcgcgagcaggtgaagatggctaatttctactaagtgtagatttttttnnnnnnnnnnaagcttggcgtggatccgatatcaactagatcttgagacaaatggcagtattcatccacaattttaaaagaaaaggggggattggggggtacagtgcaggggaaagaatagtagacataatagcaacagacatacaaactaaag

SEQ ID NO: 11708 - DNA, 301 bp, Artificial Sequence
  Jak1.3_Crebbp.3
  crRNA array
  misc_feature (148)..(157): n is a, c, g, or t
cttggctttatatatcttgtggaaaggacgaaacaccgtaatttctactaagtgtagatgcacagaacgccatggcatttaatttctactaagtgtagatggctccgccgcccgcccgcgtaatttctactaagtgtagatttttttnnnnnnnnnnaagcttggcgtggatccgatatcaactagatcttgagacaaatggcagtattcatccacaattttaaaagaaaaggggggattggggggtacagtgcaggggaaagaatagtagacataatagcaacagacatacaaactaaag

SEQ ID NO: 11709 - DNA, 301 bp, Artificial Sequence
  Jak1.3_Crebbp.4
  crRNA array
  misc_feature (148)..(157): n is a, c, g, or t
cttggctttatatatcttgtggaaaggacgaaacaccgtaatttctactaagtgtagatgcacagaacgccatggcatttaatttctactaagtgtagattggactagatgactccgtagtaatttctactaagtgtagatttttttnnnnnnnnnnaagcttggcgtggatccgatatcaactagatcttgagacaaatggcagtattcatccacaattttaaaagaaaaggggggattggggggtacagtgcaggggaaagaatagtagacataatagcaacagacatacaaactaaag

SEQ ID NO: 11710 - DNA, 301 bp, Artificial Sequence
  Jak1.4_Crebbp.1
  crRNA array
  misc_feature (148)..(157): n is a, c, g, or t
cttggctttatatatcttgtggaaaggacgaaacaccgtaatttctactaagtgtagattgccgccactggatcccgagtaatttctactaagtgtagatctcacggcggcggcgggccgtaatttctactaagtgtagatttttttnnnnnnnnnnaagcttggcgtggatccgatatcaactagatcttgagacaaatggcagtattcatccacaattttaaaagaaaaggggggattggggggtacagtgcaggggaaagaatagtagacataatagcaacagacatacaaactaaag

SEQ ID NO: 11711 - DNA, 301 bp, Artificial Sequence
  Jak1.4_Crebbp.2
  crRNA array
  misc_feature (148)..(157): n is a, c, g, or t
cttggctttatatatcttgtggaaaggacgaaacaccgtaatttctactaagtgtagattgccgccactggatcccgagtaatttctactaagtgtagatcgcgagcaggtgaagatggctaatttctactaagtgtagatttttttnnnnnnnnnnaagcttggcgtggatccgatatcaactagatcttgagacaaatggcagtattcatccacaattttaaaagaaaaggggggattggggggtacagtgcaggggaaagaatagtagacataatagcaacagacatacaaactaaag

SEQ ID NO: 11712 - DNA, 301 bp, Artificial Sequence
  Jak1.4_Crebbp.3
  crRNA array
  misc_feature (148)..(157): n is a, c, g, or t
cttggctttatatatcttgtggaaaggacgaaacaccgtaatttctactaagtgtagattgccgccactggatcccgagtaatttctactaagtgtagatggctccgccgcccgcccgcgtaatttctactaagtgtagatttttttnnnnnnnnnnaagcttggcgtggatccgatatcaactagatcttgagacaaatggcagtattcatccacaattttaaaagaaaaggggggattggggggtacagtgcaggggaaagaatagtagacataatagcaacagacatacaaactaaag

SEQ ID NO: 11713 - DNA, 301 bp, Artificial Sequence
  Jak1.4_Crebbp.4
  crRNA array
  misc_feature (148)..(157): n is a, c, g, or t
cttggctttatatatcttgtggaaaggacgaaacaccgtaatttctactaagtgtagattgccgccactggatcccgagtaatttctactaagtgtagattggactagatgactccgtagtaatttctactaagtgtagatttttttnnnnnnnnnnaagcttggcgtggatccgatatcaactagatcttgagacaaatggcagtattcatccacaattttaaaagaaaaggggggattggggggtacagtgcaggggaaagaatagtagacataatagcaacagacatacaaactaaag

SEQ ID NO: 11714 - DNA, 301 bp, Artificial Sequence
  Jak1.1_Cdkn2a.1
  crRNA array
  misc_feature (148)..(157): n is a, c, g, or t
cttggctttatatatcttgtggaaaggacgaaacaccgtaatttctactaagtgtagatgagcgcaggccgccgcagcctaatttctactaagtgtagatcaatcacgggagggagcagataatttctactaagtgtagatttttttnnnnnnnnnnaagcttggcgtggatccgatatcaactagatcttgagacaaatggcagtattcatccacaattttaaaagaaaaggggggattggggggtacagtgcaggggaaagaatagtagacataatagcaacagacatacaaactaaag

SEQ ID NO: 11715 - DNA, 301 bp, Artificial Sequence
  Jak1.1_Cdkn2a.2
  crRNA array
  misc_feature (148)..(157): n is a, c, g, or t
cttggctttatatatcttgtggaaaggacgaaacaccgtaatttctactaagtgtagatgagcgcaggccgccgcagcctaatttctactaagtgtagatgcccaacgccccgaactctttaatttctactaagtgtagatttttttnnnnnnnnnnaagcttggcgtggatccgatatcaactagatcttgagacaaatggcagtattcatccacaattttaaaagaaaaggggggattggggggtacagtgcaggggaaagaatagtagacataatagcaacagacatacaaactaaag

SEQ ID NO: 11716 - DNA, 301 bp, Artificial Sequence
  Jak1.1_Cdkn2a.3
  crRNA array
  misc_feature (148)..(157): n is a, c, g, or t
cttggctttatatatcttgtggaaaggacgaaacaccgtaatttctactaagtgtagatgagcgcaggccgccgcagcctaatttctactaagtgtagattgtaccgctgggaacgtcgctaatttctactaagtgtagatttttttnnnnnnnnnnaagcttggcgtggatccgatatcaactagatcttgagacaaatggcagtattcatccacaattttaaaagaaaaggggggattggggggtacagtgcaggggaaagaatagtagacataatagcaacagacatacaaactaaag

SEQ ID NO: 11717 - DNA, 301 bp, Artificial Sequence
  Jak1.1_Cdkn2a.4
  crRNA array
  misc_feature (148)..(157): n is a, c, g, or t
cttggctttatatatcttgtggaaaggacgaaacaccgtaatttctactaagtgtagatgagcgcaggccgccgcagcctaatttctactaagtgtagataagccacatgctagacacgctaatttctactaagtgtagatttttttnnnnnnnnnnaagcttggcgtggatccgatatcaactagatcttgagacaaatggcagtattcatccacaattttaaaagaaaaggggggattggggggtacagtgcaggggaaagaatagtagacataatagcaacagacatacaaactaaag

SEQ ID NO: 11718 - DNA, 301 bp, Artificial Sequence
  Jak1.2_Cdkn2a.1
  crRNA array
  misc_feature (148)..(157): n is a, c, g, or t
cttggctttatatatcttgtggaaaggacgaaacaccgtaatttctactaagtgtagatagggacactggacaaccgaataatttctactaagtgtagatcaatcacgggagggagcagataatttctactaagtgtagatttttttnnnnnnnnnnaagcttggcgtggatccgatatcaactagatcttgagacaaatggcagtattcatccacaattttaaaagaaaaggggggattggggggtacagtgcaggggaaagaatagtagacataatagcaacagacatacaaactaaag

SEQ ID NO: 11719 - DNA, 301 bp, Artificial Sequence
  Jak1.2_Cdkn2a.2
  crRNA array
  misc_feature (148)..(157): n is a, c, g, or t
cttggctttatatatcttgtggaaaggacgaaacaccgtaatttctactaagtgtagatagggacactggacaaccgaataatttctactaagtgtagatgcccaacgccccgaactctttaatttctactaagtgtagatttttttnnnnnnnnnnaagcttggcgtggatccgatatcaactagatcttgagacaaatggcagtattcatccacaattttaaaagaaaaggggggattggggggtacagtgcaggggaaagaatagtagacataatagcaacagacatacaaactaaag

SEQ ID NO: 11720 - DNA, 301 bp, Artificial Sequence
  Jak1.2_Cdkn2a.3
  crRNA array
  misc_feature (148)..(157): n is a, c, g, or t
cttggctttatatatcttgtggaaaggacgaaacaccgtaatttctactaagtgtagatagggacactggacaaccgaataatttctactaagtgtagattgtaccgctgggaacgtcgctaatttctactaagtgtagatttttttnnnnnnnnnnaagcttggcgtggatccgatatcaactagatcttgagacaaatggcagtattcatccacaattttaaaagaaaaggggggattggggggtacagtgcaggggaaagaatagtagacataatagcaacagacatacaaactaaag

SEQ ID NO: 11721 - DNA, 301 bp, Artificial Sequence
  Jak1.2_Cdkn2a.4
  crRNA array
  misc_feature (148)..(157): n is a, c, g, or t
cttggctttatatatcttgtggaaaggacgaaacaccgtaatttctactaagtgtagatagggacactggacaaccgaataatttctactaagtgtagataagccacatgctagacacgctaatttctactaagtgtagatttttttnnnnnnnnnnaagcttggcgtggatccgatatcaactagatcttgagacaaatggcagtattcatccacaattttaaaagaaaaggggggattggggggtacagtgcaggggaaagaatagtagacataatagcaacagacatacaaactaaag

SEQ ID NO: 11722 - DNA, 301 bp, Artificial Sequence
  Jak1.3_Cdkn2a.1
  crRNA array
  misc_feature (148)..(157): n is a, c, g, or t
cttggctttatatatcttgtggaaaggacgaaacaccgtaatttctactaagtgtagatgcacagaacgccatggcatttaatttctactaagtgtagatcaatcacgggagggagcagataatttctactaagtgtagatttttttnnnnnnnnnnaagcttggcgtggatccgatatcaactagatcttgagacaaatggcagtattcatccacaattttaaaagaaaaggggggattggggggtacagtgcaggggaaagaatagtagacataatagcaacagacatacaaactaaag

SEQ ID NO: 11723 - DNA, 301 bp, Artificial Sequence
  Jak1.3_Cdkn2a.2
  crRNA array
  misc_feature (148)..(157): n is a, c, g, or t
cttggctttatatatcttgtggaaaggacgaaacaccgtaatttctactaagtgtagatgcacagaacgccatggcatttaatttctactaagtgtagatgcccaacgccccgaactctttaatttctactaagtgtagatttttttnnnnnnnnnnaagcttggcgtggatccgatatcaactagatcttgagacaaatggcagtattcatccacaattttaaaagaaaaggggggattggggggtacagtgcaggggaaagaatagtagacataatagcaacagacatacaaactaaag

SEQ ID NO: 11724 - DNA, 301 bp, Artificial Sequence
  Jak1.3_Cdkn2a.3
  crRNA array
  misc_feature (148)..(157): n is a, c, g, or t
cttggctttatatatcttgtggaaaggacgaaacaccgtaatttctactaagtgtagatgcacagaacgccatggcatttaatttctactaagtgtagattgtaccgctgggaacgtcgctaatttctactaagtgtagatttttttnnnnnnnnnnaagcttggcgtggatccgatatcaactagatcttgagacaaatggcagtattcatccacaattttaaaagaaaaggggggattggggggtacagtgcaggggaaagaatagtagacataatagcaacagacatacaaactaaag

SEQ ID NO: 11725 - DNA, 301 bp, Artificial Sequence
  Jak1.3_Cdkn2a.4
  crRNA array
  misc_feature (148)..(157): n is a, c, g, or t
cttggctttatatatcttgtggaaaggacgaaacaccgtaatttctactaagtgtagatgcacagaacgccatggcatttaatttctactaagtgtagataagccacatgctagacacgctaatttctactaagtgtagatttttttnnnnnnnnnnaagcttggcgtggatccgatatcaactagatcttgagacaaatggcagtattcatccacaattttaaaagaaaaggggggattggggggtacagtgcaggggaaagaatagtagacataatagcaacagacatacaaactaaag

SEQ ID NO: 11726 - DNA, 301 bp, Artificial Sequence
  Jak1.4_Cdkn2a.1
  crRNA array
  misc_feature (148)..(157): n is a, c, g, or t
cttggctttatatatcttgtggaaaggacgaaacaccgtaatttctactaagtgtagattgccgccactggatcccgagtaatttctactaagtgtagatcaatcacgggagggagcagataatttctactaagtgtagatttttttnnnnnnnnnnaagcttggcgtggatccgatatcaactagatcttgagacaaatggcagtattcatccacaattttaaaagaaaaggggggattggggggtacagtgcaggggaaagaatagtagacataatagcaacagacatacaaactaaag

SEQ ID NO: 11727 - DNA, 301 bp, Artificial Sequence
  Jak1.4_Cdkn2a.2
  crRNA array
  misc_feature (148)..(157): n is a, c, g, or t
cttggctttatatatcttgtggaaaggacgaaacaccgtaatttctactaagtgtagattgccgccactggatcccgagtaatttctactaagtgtagatgcccaacgccccgaactctttaatttctactaagtgtagatttttttnnnnnnnnnnaagcttggcgtggatccgatatcaactagatcttgagacaaatggcagtattcatccacaattttaaaagaaaaggggggattggggggtacagtgcaggggaaagaatagtagacataatagcaacagacatacaaactaaag

SEQ ID NO: 11728 - DNA, 301 bp, Artificial Sequence
  Jak1.4_Cdkn2a.3
  crRNA array
  misc_feature (148)..(157): n is a, c, g, or t
cttggctttatatatcttgtggaaaggacgaaacaccgtaatttctactaagtgtagattgccgccactggatcccgagtaatttctactaagtgtagattgtaccgctgggaacgtcgctaatttctactaagtgtagatttttttnnnnnnnnnnaagcttggcgtggatccgatatcaactagatcttgagacaaatggcagtattcatccacaattttaaaagaaaaggggggattggggggtacagtgcaggggaaagaatagtagacataatagcaacagacatacaaactaaag

SEQ ID NO: 11729 - DNA, 301 bp, Artificial Sequence
  Jak1.4_Cdkn2a.4
  crRNA array
  misc_feature (148)..(157): n is a, c, g, or t
cttggctttatatatcttgtggaaaggacgaaacaccgtaatttctactaagtgtagattgccgccactggatcccgagtaatttctactaagtgtagataagccacatgctagacacgctaatttctactaagtgtagatttttttnnnnnnnnnnaagcttggcgtggatccgatatcaactagatcttgagacaaatggcagtattcatccacaattttaaaagaaaaggggggattggggggtacagtgcaggggaaagaatagtagacataatagcaacagacatacaaactaaag

SEQ ID NO: 11730 - DNA, 301 bp, Artificial Sequence
  Jak1.1_Wrn.1
  crRNA array
  misc_feature (148)..(157): n is a, c, g, or t
cttggctttatatatcttgtggaaaggacgaaacaccgtaatttctactaagtgtagatgagcgcaggccgccgcagcctaatttctactaagtgtagatgcaaaccactcgggtaattttaatttctactaagtgtagatttttttnnnnnnnnnnaagcttggcgtggatccgatatcaactagatcttgagacaaatggcagtattcatccacaattttaaaagaaaaggggggattggggggtacagtgcaggggaaagaatagtagacataatagcaacagacatacaaactaaag

SEQ ID NO: 11731 - DNA, 301 bp, Artificial Sequence
  Jak1.1_Wrn.2
  crRNA array
  misc_feature (148)..(157): n is a, c, g, or t
cttggctttatatatcttgtggaaaggacgaaacaccgtaatttctactaagtgtagatgagcgcaggccgccgcagcctaatttctactaagtgtagatgccatgtccagcagaacctttaatttctactaagtgtagatttttttnnnnnnnnnnaagcttggcgtggatccgatatcaactagatcttgagacaaatggcagtattcatccacaattttaaaagaaaaggggggattggggggtacagtgcaggggaaagaatagtagacataatagcaacagacatacaaactaaag

SEQ ID NO: 11732 - DNA, 301 bp, Artificial Sequence
  Jak1.1_Wrn.3
  crRNA array
  misc_feature (148)..(157): n is a, c, g, or t
cttggctttatatatcttgtggaaaggacgaaacaccgtaatttctactaagtgtagatgagcgcaggccgccgcagcctaatttctactaagtgtagatctgcagcaggccaccgcaattaatttctactaagtgtagatttttttnnnnnnnnnnaagcttggcgtggatccgatatcaactagatcttgagacaaatggcagtattcatccacaattttaaaagaaaaggggggattggggggtacagtgcaggggaaagaatagtagacataatagcaacagacatacaaactaaag

SEQ ID NO: 11733 - DNA, 301 bp, Artificial Sequence
  Jak1.1_Wrn.4
  crRNA array
  misc_feature (148)..(157): n is a, c, g, or t
cttggctttatatatcttgtggaaaggacgaaacaccgtaatttctactaagtgtagatgagcgcaggccgccgcagcctaatttctactaagtgtagattcgaaggacaatagatgatgtaatttctactaagtgtagatttttttnnnnnnnnnnaagcttggcgtggatccgatatcaactagatcttgagacaaatggcagtattcatccacaattttaaaagaaaaggggggattggggggtacagtgcaggggaaagaatagtagacataatagcaacagacatacaaactaaag

SEQ ID NO: 11734 - DNA, 301 bp, Artificial Sequence
  Jak1.2_Wrn.1
  crRNA array
  misc_feature (148)..(157): n is a, c, g, or t
cttggctttatatatcttgtggaaaggacgaaacaccgtaatttctactaagtgtagatagggacactggacaaccgaataatttctactaagtgtagatgcaaaccactcgggtaattttaatttctactaagtgtagatttttttnnnnnnnnnnaagcttggcgtggatccgatatcaactagatcttgagacaaatggcagtattcatccacaattttaaaagaaaaggggggattggggggtacagtgcaggggaaagaatagtagacataatagcaacagacatacaaactaaag

SEQ ID NO: 11735 - DNA, 301 bp, Artificial Sequence
  Jak1.2_Wrn.2
  crRNA array
  misc_feature (148)..(157): n is a, c, g, or t
cttggctttatatatcttgtggaaaggacgaaacaccgtaatttctactaagtgtagatagggacactggacaaccgaataatttctactaagtgtagatgccatgtccagcagaacctttaatttctactaagtgtagatttttttnnnnnnnnnnaagcttggcgtggatccgatatcaactagatcttgagacaaatggcagtattcatccacaattttaaaagaaaaggggggattggggggtacagtgcaggggaaagaatagtagacataatagcaacagacatacaaactaaag

SEQ ID NO: 11736 - DNA, 301 bp, Artificial Sequence
  Jak1.2_Wrn.3
  crRNA array
  misc_feature (148)..(157): n is a, c, g, or t
cttggctttatatatcttgtggaaaggacgaaacaccgtaatttctactaagtgtagatagggacactggacaaccgaataatttctactaagtgtagatctgcagcaggccaccgcaattaatttctactaagtgtagatttttttnnnnnnnnnnaagcttggcgtggatccgatatcaactagatcttgagacaaatggcagtattcatccacaattttaaaagaaaaggggggattggggggtacagtgcaggggaaagaatagtagacataatagcaacagacatacaaactaaag

SEQ ID NO: 11737 - DNA, 301 bp, Artificial Sequence
  Jak1.2_Wrn.4
  crRNA array
  misc_feature (148)..(157): n is a, c, g, or t
cttggctttatatatcttgtggaaaggacgaaacaccgtaatttctactaagtgtagatagggacactggacaaccgaataatttctactaagtgtagattcgaaggacaatagatgatgtaatttctactaagtgtagatttttttnnnnnnnnnnaagcttggcgtggatccgatatcaactagatcttgagacaaatggcagtattcatccacaattttaaaagaaaaggggggattggggggtacagtgcaggggaaagaatagtagacataatagcaacagacatacaaactaaag

SEQ ID NO: 11738 - DNA, 301 bp, Artificial Sequence
  Jak1.3_Wrn.1
  crRNA array
  misc_feature (148)..(157): n is a, c, g, or t
cttggctttatatatcttgtggaaaggacgaaacaccgtaatttctactaagtgtagatgcacagaacgccatggcatttaatttctactaagtgtagatgcaaaccactcgggtaattttaatttctactaagtgtagatttttttnnnnnnnnnnaagcttggcgtggatccgatatcaactagatcttgagacaaatggcagtattcatccacaattttaaaagaaaaggggggattggggggtacagtgcaggggaaagaatagtagacataatagcaacagacatacaaactaaag

SEQ ID NO: 11739 - DNA, 301 bp, Artificial Sequence
  Jak1.3_Wrn.2
  crRNA array
  misc_feature (148)..(157): n is a, c, g, or t
cttggctttatatatcttgtggaaaggacgaaacaccgtaatttctactaagtgtagatgcacagaacgccatggcatttaatttctactaagtgtagatgccatgtccagcagaacctttaatttctactaagtgtagatttttttnnnnnnnnnnaagcttggcgtggatccgatatcaactagatcttgagacaaatggcagtattcatccacaattttaaaagaaaaggggggattggggggtacagtgcaggggaaagaatagtagacataatagcaacagacatacaaactaaag

SEQ ID NO: 11740 - DNA, 301 bp, Artificial Sequence
  Jak1.3_Wrn.3
  crRNA array
  misc_feature (148)..(157): n is a, c, g, or t
cttggctttatatatcttgtggaaaggacgaaacaccgtaatttctactaagtgtagatgcacagaacgccatggcatttaatttctactaagtgtagatctgcagcaggccaccgcaattaatttctactaagtgtagatttttttnnnnnnnnnnaagcttggcgtggatccgatatcaactagatcttgagacaaatggcagtattcatccacaattttaaaagaaaaggggggattggggggtacagtgcaggggaaagaatagtagacataatagcaacagacatacaaactaaag

SEQ ID NO: 11741 - DNA, 301 bp, Artificial Sequence
  Jak1.3_Wrn.4
  crRNA array
  misc_feature (148)..(157): n is a, c, g, or t
cttggctttatatatcttgtggaaaggacgaaacaccgtaatttctactaagtgtagatgcacagaacgccatggcatttaatttctactaagtgtagattcgaaggacaatagatgatgtaatttctactaagtgtagatttttttnnnnnnnnnnaagcttggcgtggatccgatatcaactagatcttgagacaaatggcagtattcatccacaattttaaaagaaaaggggggattggggggtacagtgcaggggaaagaatagtagacataatagcaacagacatacaaactaaag

SEQ ID NO: 11742 - DNA, 301 bp, Artificial Sequence
  Jak1.4_Wrn.1
  crRNA array
  misc_feature (148)..(157): n is a, c, g, or t
cttggctttatatatcttgtggaaaggacgaaacaccgtaatttctactaagtgtagattgccgccactggatcccgagtaatttctactaagtgtagatgcaaaccactcgggtaattttaatttctactaagtgtagatttttttnnnnnnnnnnaagcttggcgtggatccgatatcaactagatcttgagacaaatggcagtattcatccacaattttaaaagaaaaggggggattggggggtacagtgcaggggaaagaatagtagacataatagcaacagacatacaaactaaag

SEQ ID NO: 11743 - DNA, 301 bp, Artificial Sequence
  Jak1.4_Wrn.2
  crRNA array
  misc_feature (148)..(157): n is a, c, g, or t
cttggctttatatatcttgtggaaaggacgaaacaccgtaatttctactaagtgtagattgccgccactggatcccgagtaatttctactaagtgtagatgccatgtccagcagaacctttaatttctactaagtgtagatttttttnnnnnnnnnnaagcttggcgtggatccgatatcaactagatcttgagacaaatggcagtattcatccacaattttaaaagaaaaggggggattggggggtacagtgcaggggaaagaatagtagacataatagcaacagacatacaaactaaag

SEQ ID NO: 11744 - DNA, 301 bp, Artificial Sequence
  Jak1.4_Wrn.3
  crRNA array
  misc_feature (148)..(157): n is a, c, g, or t
cttggctttatatatcttgtggaaaggacgaaacaccgtaatttctactaagtgtagattgccgccactggatcccgagtaatttctactaagtgtagatctgcagcaggccaccgcaattaatttctactaagtgtagatttttttnnnnnnnnnnaagcttggcgtggatccgatatcaactagatcttgagacaaatggcagtattcatccacaattttaaaagaaaaggggggattggggggtacagtgcaggggaaagaatagtagacataatagcaacagacatacaaactaaag

SEQ ID NO: 11745 - DNA, 301 bp, Artificial Sequence
  Jak1.4_Wrn.4
  crRNA array
  misc_feature (148)..(157): n is a, c, g, or t
cttggctttatatatcttgtggaaaggacgaaacaccgtaatttctactaagtgtagattgccgccactggatcccgagtaatttctactaagtgtagattcgaaggacaatagatgatgtaatttctactaagtgtagatttttttnnnnnnnnnnaagcttggcgtggatccgatatcaactagatcttgagacaaatggcagtattcatccacaattttaaaagaaaaggggggattggggggtacagtgcaggggaaagaatagtagacataatagcaacagacatacaaactaaag

SEQ ID NO: 11746 - DNA, 301 bp, Artificial Sequence
  Jak1.1_Brca2.1
  crRNA array
  misc_feature (148)..(157): n is a, c, g, or t
cttggctttatatatcttgtggaaaggacgaaacaccgtaatttctactaagtgtagatgagcgcaggccgccgcagcctaatttctactaagtgtagatctaagcgtagaaccagaaattaatttctactaagtgtagatttttttnnnnnnnnnnaagcttggcgtggatccgatatcaactagatcttgagacaaatggcagtattcatccacaattttaaaagaaaaggggggattggggggtacagtgcaggggaaagaatagtagacataatagcaacagacatacaaactaaag

SEQ ID NO: 11747 - DNA, 301 bp, Artificial Sequence
  Jak1.1_Brca2.2
  crRNA array
  misc_feature (148)..(157): n is a, c, g, or t
cttggctttatatatcttgtggaaaggacgaaacaccgtaatttctactaagtgtagatgagcgcaggccgccgcagcctaatttctactaagtgtagatgatccaggtgtaacaagccataatttctactaagtgtagatttttttnnnnnnnnnnaagcttggcgtggatccgatatcaactagatcttgagacaaatggcagtattcatccacaattttaaaagaaaaggggggattggggggtacagtgcaggggaaagaatagtagacataatagcaacagacatacaaactaaag

SEQ ID NO: 11748 - DNA, 301 bp, Artificial Sequence
  Jak1.1_Brca2.3
  crRNA array
  misc_feature (148)..(157): n is a, c, g, or t
cttggctttatatatcttgtggaaaggacgaaacaccgtaatttctactaagtgtagatgagcgcaggccgccgcagcctaatttctactaagtgtagattgaatataaactgggccacttaatttctactaagtgtagatttttttnnnnnnnnnnaagcttggcgtggatccgatatcaactagatcttgagacaaatggcagtattcatccacaattttaaaagaaaaggggggattggggggtacagtgcaggggaaagaatagtagacataatagcaacagacatacaaactaaag

SEQ ID NO: 11749 - DNA, 301 bp, Artificial Sequence
  Jak1.1_Brca2.4
  crRNA array
  misc_feature (148)..(157): n is a, c, g, or t
cttggctttatatatcttgtggaaaggacgaaacaccgtaatttctactaagtgtagatgagcgcaggccgccgcagcctaatttctactaagtgtagatgaaacgccgtatatatagagtaatttctactaagtgtagatttttttnnnnnnnnnnaagcttggcgtggatccgatatcaactagatcttgagacaaatggcagtattcatccacaattttaaaagaaaaggggggattggggggtacagtgcaggggaaagaatagtagacataatagcaacagacatacaaactaaag

SEQ ID NO: 11750 - DNA, 301 bp, Artificial Sequence
  Jak1.2_Brca2.1
  crRNA array
  misc_feature (148)..(157): n is a, c, g, or t
cttggctttatatatcttgtggaaaggacgaaacaccgtaatttctactaagtgtagatagggacactggacaaccgaataatttctactaagtgtagatctaagcgtagaaccagaaattaatttctactaagtgtagatttttttnnnnnnnnnnaagcttggcgtggatccgatatcaactagatcttgagacaaatggcagtattcatccacaattttaaaagaaaaggggggattggggggtacagtgcaggggaaagaatagtagacataatagcaacagacatacaaactaaag

SEQ ID NO: 11751 - DNA, 301 bp, Artificial Sequence
  Jak1.2_Brca2.2
  crRNA array
  misc_feature (148)..(157): n is a, c, g, or t
cttggctttatatatcttgtggaaaggacgaaacaccgtaatttctactaagtgtagatagggacactggacaaccgaataatttctactaagtgtagatgatccaggtgtaacaagccataatttctactaagtgtagatttttttnnnnnnnnnnaagcttggcgtggatccgatatcaactagatcttgagacaaatggcagtattcatccacaattttaaaagaaaaggggggattggggggtacagtgcaggggaaagaatagtagacataatagcaacagacatacaaactaaag

SEQ ID NO: 11752 - DNA, 301 bp, Artificial Sequence
  Jak1.2_Brca2.3
  crRNA array
  misc_feature (148)..(157): n is a, c, g, or t
cttggctttatatatcttgtggaaaggacgaaacaccgtaatttctactaagtgtagatagggacactggacaaccgaataatttctactaagtgtagattgaatataaactgggccacttaatttctactaagtgtagatttttttnnnnnnnnnnaagcttggcgtggatccgatatcaactagatcttgagacaaatggcagtattcatccacaattttaaaagaaaaggggggattggggggtacagtgcaggggaaagaatagtagacataatagcaacagacatacaaactaaag

SEQ ID NO: 11753 - DNA, 301 bp, Artificial Sequence
  Jak1.2_Brca2.4
  crRNA array
  misc_feature (148)..(157): n is a, c, g, or t
cttggctttatatatcttgtggaaaggacgaaacaccgtaatttctactaagtgtagatagggacactggacaaccgaataatttctactaagtgtagatgaaacgccgtatatatagagtaatttctactaagtgtagatttttttnnnnnnnnnnaagcttggcgtggatccgatatcaactagatcttgagacaaatggcagtattcatccacaattttaaaagaaaaggggggattggggggtacagtgcaggggaaagaatagtagacataatagcaacagacatacaaactaaag

SEQ ID NO: 11754 - DNA, 301 bp, Artificial Sequence
  Jak1.3_Brca2.1
  crRNA array
  misc_feature (148)..(157): n is a, c, g, or t
cttggctttatatatcttgtggaaaggacgaaacaccgtaatttctactaagtgtagatgcacagaacgccatggcatttaatttctactaagtgtagatctaagcgtagaaccagaaattaatttctactaagtgtagatttttttnnnnnnnnnnaagcttggcgtggatccgatatcaactagatcttgagacaaatggcagtattcatccacaattttaaaagaaaaggggggattggggggtacagtgcaggggaaagaatagtagacataatagcaacagacatacaaactaaag

SEQ ID NO: 11755 - DNA, 301 bp, Artificial Sequence
  Jak1.3_Brca2.2
  crRNA array
  misc_feature (148)..(157): n is a, c, g, or t
cttggctttatatatcttgtggaaaggacgaaacaccgtaatttctactaagtgtagatgcacagaacgccatggcatttaatttctactaagtgtagatgatccaggtgtaacaagccataatttctactaagtgtagatttttttnnnnnnnnnnaagcttggcgtggatccgatatcaactagatcttgagacaaatggcagtattcatccacaattttaaaagaaaaggggggattggggggtacagtgcaggggaaagaatagtagacataatagcaacagacatacaaactaaag

SEQ ID NO: 11756 - DNA, 301 bp, Artificial Sequence
  Jak1.3_Brca2.3
  crRNA array
  misc_feature (148)..(157): n is a, c, g, or t
cttggctttatatatcttgtggaaaggacgaaacaccgtaatttctactaagtgtagatgcacagaacgccatggcatttaatttctactaagtgtagattgaatataaactgggccacttaatttctactaagtgtagatttttttnnnnnnnnnnaagcttggcgtggatccgatatcaactagatcttgagacaaatggcagtattcatccacaattttaaaagaaaaggggggattggggggtacagtgcaggggaaagaatagtagacataatagcaacagacatacaaactaaag

SEQ ID NO: 11757 - DNA, 301 bp, Artificial Sequence
  Jak1.3_Brca2.4
  crRNA array
  misc_feature (148)..(157): n is a, c, g, or t
cttggctttatatatcttgtggaaaggacgaaacaccgtaatttctactaagtgtagatgcacagaacgccatggcatttaatttctactaagtgtagatgaaacgccgtatatatagagtaatttctactaagtgtagatttttttnnnnnnnnnnaagcttggcgtggatccgatatcaactagatcttgagacaaatggcagtattcatccacaattttaaaagaaaaggggggattggggggtacagtgcaggggaaagaatagtagacataatagcaacagacatacaaactaaag

SEQ ID NO: 11758 - DNA, 301 bp, Artificial Sequence
  Jak1.4_Brca2.1
  crRNA array
  misc_feature (148)..(157): n is a, c, g, or t
cttggctttatatatcttgtggaaaggacgaaacaccgtaatttctactaagtgtagattgccgccactggatcccgagtaatttctactaagtgtagatctaagcgtagaaccagaaattaatttctactaagtgtagatttttttnnnnnnnnnnaagcttggcgtggatccgatatcaactagatcttgagacaaatggcagtattcatccacaattttaaaagaaaaggggggattggggggtacagtgcaggggaaagaatagtagacataatagcaacagacatacaaactaaag

SEQ ID NO: 11759 - DNA, 301 bp, Artificial Sequence
  Jak1.4_Brca2.2
  crRNA array
  misc_feature (148)..(157): n is a, c, g, or t
cttggctttatatatcttgtggaaaggacgaaacaccgtaatttctactaagtgtagattgccgccactggatcccgagtaatttctactaagtgtagatgatccaggtgtaacaagccataatttctactaagtgtagatttttttnnnnnnnnnnaagcttggcgtggatccgatatcaactagatcttgagacaaatggcagtattcatccacaattttaaaagaaaaggggggattggggggtacagtgcaggggaaagaatagtagacataatagcaacagacatacaaactaaag

SEQ ID NO: 11760 - DNA, 301 bp, Artificial Sequence
  Jak1.4_Brca2.3
  crRNA array
  misc_feature (148)..(157): n is a, c, g, or t
cttggctttatatatcttgtggaaaggacgaaacaccgtaatttctactaagtgtagattgccgccactggatcccgagtaatttctactaagtgtagattgaatataaactgggccacttaatttctactaagtgtagatttttttnnnnnnnnnnaagcttggcgtggatccgatatcaactagatcttgagacaaatggcagtattcatccacaattttaaaagaaaaggggggattggggggtacagtgcaggggaaagaatagtagacataatagcaacagacatacaaactaaag

SEQ ID NO: 11761 - DNA, 301 bp, Artificial Sequence
  Jak1.4_Brca2.4
  crRNA array
  misc_feature (148)..(157): n is a, c, g, or t
cttggctttatatatcttgtggaaaggacgaaacaccgtaatttctactaagtgtagattgccgccactggatcccgagtaatttctactaagtgtagatgaaacgccgtatatatagagtaatttctactaagtgtagatttttttnnnnnnnnnnaagcttggcgtggatccgatatcaactagatcttgagacaaatggcagtattcatccacaattttaaaagaaaaggggggattggggggtacagtgcaggggaaagaatagtagacataatagcaacagacatacaaactaaag

SEQ ID NO: 11762 - DNA, 301 bp, Artificial Sequence
  Jak1.1_Apc.1
  crRNA array
  misc_feature (148)..(157): n is a, c, g, or t
cttggctttatatatcttgtggaaaggacgaaacaccgtaatttctactaagtgtagatgagcgcaggccgccgcagcctaatttctactaagtgtagatgtgatccacacgtgtagctgtaatttctactaagtgtagatttttttnnnnnnnnnnaagcttggcgtggatccgatatcaactagatcttgagacaaatggcagtattcatccacaattttaaaagaaaaggggggattggggggtacagtgcaggggaaagaatagtagacataatagcaacagacatacaaactaaag

SEQ ID NO: 11763 - DNA, 301 bp, Artificial Sequence
  Jak1.1_Apc.2
  crRNA array
  misc_feature (148)..(157): n is a, c, g, or t
cttggctttatatatcttgtggaaaggacgaaacaccgtaatttctactaagtgtagatgagcgcaggccgccgcagcctaatttctactaagtgtagatcatctgctcgccaagacaaataatttctactaagtgtagatttttttnnnnnnnnnnaagcttggcgtggatccgatatcaactagatcttgagacaaatggcagtattcatccacaattttaaaagaaaaggggggattggggggtacagtgcaggggaaagaatagtagacataatagcaacagacatacaaactaaag

SEQ ID NO: 11764 - DNA, 301 bp, Artificial Sequence
  Jak1.1_Apc.3
  crRNA array
  misc_feature (148)..(157): n is a, c, g, or t
cttggctttatatatcttgtggaaaggacgaaacaccgtaatttctactaagtgtagatgagcgcaggccgccgcagcctaatttctactaagtgtagatacgccaatcgacatgatgattaatttctactaagtgtagatttttttnnnnnnnnnnaagcttggcgtggatccgatatcaactagatcttgagacaaatggcagtattcatccacaattttaaaagaaaaggggggattggggggtacagtgcaggggaaagaatagtagacataatagcaacagacatacaaactaaag

SEQ ID NO: 11765 - DNA, 301 bp, Artificial Sequence
  Jak1.1_Apc.4
  crRNA array
  misc_feature (148)..(157): n is a, c, g, or t
cttggctttatatatcttgtggaaaggacgaaacaccgtaatttctactaagtgtagatgagcgcaggccgccgcagcctaatttctactaagtgtagatcaccaggggatgatgtgccctaatttctactaagtgtagatttttttnnnnnnnnnnaagcttggcgtggatccgatatcaactagatcttgagacaaatggcagtattcatccacaattttaaaagaaaaggggggattggggggtacagtgcaggggaaagaatagtagacataatagcaacagacatacaaactaaag

SEQ ID NO: 11766 - DNA, 301 bp, Artificial Sequence
  Jak1.2_Apc.1
  crRNA array
  misc_feature (148)..(157): n is a, c, g, or t
cttggctttatatatcttgtggaaaggacgaaacaccgtaatttctactaagtgtagatagggacactggacaaccgaataatttctactaagtgtagatgtgatccacacgtgtagctgtaatttctactaagtgtagatttttttnnnnnnnnnnaagcttggcgtggatccgatatcaactagatcttgagacaaatggcagtattcatccacaattttaaaagaaaaggggggattggggggtacagtgcaggggaaagaatagtagacataatagcaacagacatacaaactaaag

SEQ ID NO: 11767 - DNA, 301 bp, Artificial Sequence
  Jak1.2_Apc.2
  crRNA array
  misc_feature (148)..(157): n is a, c, g, or t
cttggctttatatatcttgtggaaaggacgaaacaccgtaatttctactaagtgtagatagggacactggacaaccgaataatttctactaagtgtagatcatctgctcgccaagacaaataatttctactaagtgtagatttttttnnnnnnnnnnaagcttggcgtggatccgatatcaactagatcttgagacaaatggcagtattcatccacaattttaaaagaaaaggggggattggggggtacagtgcaggggaaagaatagtagacataatagcaacagacatacaaactaaag

SEQ ID NO: 11768 - DNA, 301 bp, Artificial Sequence
  Jak1.2_Apc.3
  crRNA array
  misc_feature (148)..(157): n is a, c, g, or t
cttggctttatatatcttgtggaaaggacgaaacaccgtaatttctactaagtgtagatagggacactggacaaccgaataatttctactaagtgtagatacgccaatcgacatgatgattaatttctactaagtgtagatttttttnnnnnnnnnnaagcttggcgtggatccgatatcaactagatcttgagacaaatggcagtattcatccacaattttaaaagaaaaggggggattggggggtacagtgcaggggaaagaatagtagacataatagcaacagacatacaaactaaag

SEQ ID NO: 11769 - DNA, 301 bp, Artificial Sequence
  Jak1.2_Apc.4
  crRNA array
  misc_feature (148)..(157): n is a, c, g, or t
cttggctttatatatcttgtggaaaggacgaaacaccgtaatttctactaagtgtagatagggacactggacaaccgaataatttctactaagtgtagatcaccaggggatgatgtgccctaatttctactaagtgtagatttttttnnnnnnnnnnaagcttggcgtggatccgatatcaactagatcttgagacaaatggcagtattcatccacaattttaaaagaaaaggggggattggggggtacagtgcaggggaaagaatagtagacataatagcaacagacatacaaactaaag

SEQ ID NO: 11770 - DNA, 301 bp, Artificial Sequence
  Jak1.3_Apc.1
  crRNA array
  misc_feature (148)..(157): n is a, c, g, or t
cttggctttatatatcttgtggaaaggacgaaacaccgtaatttctactaagtgtagatgcacagaacgccatggcatttaatttctactaagtgtagatgtgatccacacgtgtagctgtaatttctactaagtgtagatttttttnnnnnnnnnnaagcttggcgtggatccgatatcaactagatcttgagacaaatggcagtattcatccacaattttaaaagaaaaggggggattggggggtacagtgcaggggaaagaatagtagacataatagcaacagacatacaaactaaag

SEQ ID NO: 11771 - DNA, 301 bp, Artificial Sequence
  Jak1.3_Apc.2
  crRNA array
  misc_feature (148)..(157): n is a, c, g, or t
cttggctttatatatcttgtggaaaggacgaaacaccgtaatttctactaagtgtagatgcacagaacgccatggcatttaatttctactaagtgtagatcatctgctcgccaagacaaataatttctactaagtgtagatttttttnnnnnnnnnnaagcttggcgtggatccgatatcaactagatcttgagacaaatggcagtattcatccacaattttaaaagaaaaggggggattggggggtacagtgcaggggaaagaatagtagacataatagcaacagacatacaaactaaag

SEQ ID NO: 11772 - DNA, 301 bp, Artificial Sequence
  Jak1.3_Apc.3
  crRNA array
  misc_feature (148)..(157): n is a, c, g, or t
cttggctttatatatcttgtggaaaggacgaaacaccgtaatttctactaagtgtagatgcacagaacgccatggcatttaatttctactaagtgtagatacgccaatcgacatgatgattaatttctactaagtgtagatttttttnnnnnnnnnnaagcttggcgtggatccgatatcaactagatcttgagacaaatggcagtattcatccacaattttaaaagaaaaggggggattggggggtacagtgcaggggaaagaatagtagacataatagcaacagacatacaaactaaag

SEQ ID NO: 11773 - DNA, 301 bp, Artificial Sequence
  Jak1.3_Apc.4
  crRNA array
  misc_feature (148)..(157): n is a, c, g, or t
cttggctttatatatcttgtggaaaggacgaaacaccgtaatttctactaagtgtagatgcacagaacgccatggcatttaatttctactaagtgtagatcaccaggggatgatgtgccctaatttctactaagtgtagatttttttnnnnnnnnnnaagcttggcgtggatccgatatcaactagatcttgagacaaatggcagtattcatccacaattttaaaagaaaaggggggattggggggtacagtgcaggggaaagaatagtagacataatagcaacagacatacaaactaaag

SEQ ID NO: 11774 - DNA, 301 bp, Artificial Sequence
  Jak1.4_Apc.1
  crRNA array
  misc_feature (148)..(157): n is a, c, g, or t
cttggctttatatatcttgtggaaaggacgaaacaccgtaatttctactaagtgtagattgccgccactggatcccgagtaatttctactaagtgtagatgtgatccacacgtgtagctgtaatttctactaagtgtagatttttttnnnnnnnnnnaagcttggcgtggatccgatatcaactagatcttgagacaaatggcagtattcatccacaattttaaaagaaaaggggggattggggggtacagtgcaggggaaagaatagtagacataatagcaacagacatacaaactaaag

SEQ ID NO: 11775 - DNA, 301 bp, Artificial Sequence
  Jak1.4_Apc.2
  crRNA array
  misc_feature (148)..(157): n is a, c, g, or t
cttggctttatatatcttgtggaaaggacgaaacaccgtaatttctactaagtgtagattgccgccactggatcccgagtaatttctactaagtgtagatcatctgctcgccaagacaaataatttctactaagtgtagatttttttnnnnnnnnnnaagcttggcgtggatccgatatcaactagatcttgagacaaatggcagtattcatccacaattttaaaagaaaaggggggattggggggtacagtgcaggggaaagaatagtagacataatagcaacagacatacaaactaaag

SEQ ID NO: 11776 - DNA, 301 bp, Artificial Sequence
  Jak1.4_Apc.3
  crRNA array
  misc_feature (148)..(157): n is a, c, g, or t
cttggctttatatatcttgtggaaaggacgaaacaccgtaatttctactaagtgtagattgccgccactggatcccgagtaatttctactaagtgtagatacgccaatcgacatgatgattaatttctactaagtgtagatttttttnnnnnnnnnnaagcttggcgtggatccgatatcaactagatcttgagacaaatggcagtattcatccacaattttaaaagaaaaggggggattggggggtacagtgcaggggaaagaatagtagacataatagcaacagacatacaaactaaag

SEQ ID NO: 11777 - DNA, 301 bp, Artificial Sequence
  Jak1.4_Apc.4
  crRNA array
  misc_feature (148)..(157): n is a, c, g, or t
cttggctttatatatcttgtggaaaggacgaaacaccgtaatttctactaagtgtagattgccgccactggatcccgagtaatttctactaagtgtagatcaccaggggatgatgtgccctaatttctactaagtgtagatttttttnnnnnnnnnnaagcttggcgtggatccgatatcaactagatcttgagacaaatggcagtattcatccacaattttaaaagaaaaggggggattggggggtacagtgcaggggaaagaatagtagacataatagcaacagacatacaaactaaag

SEQ ID NO: 11778 - DNA, 301 bp, Artificial Sequence
  Jak1.1_Fanca.1
  crRNA array
  misc_feature (148)..(157): n is a, c, g, or t
cttggctttatatatcttgtggaaaggacgaaacaccgtaatttctactaagtgtagatgagcgcaggccgccgcagcctaatttctactaagtgtagatggaggccccggggcccaccataatttctactaagtgtagatttttttnnnnnnnnnnaagcttggcgtggatccgatatcaactagatcttgagacaaatggcagtattcatccacaattttaaaagaaaaggggggattggggggtacagtgcaggggaaagaatagtagacataatagcaacagacatacaaactaaag

SEQ ID NO: 11779 - DNA, 301 bp, Artificial Sequence
  Jak1.1_Fanca.2
  crRNA array
  misc_feature (148)..(157): n is a, c, g, or t
cttggctttatatatcttgtggaaaggacgaaacaccgtaatttctactaagtgtagatgagcgcaggccgccgcagcctaatttctactaagtgtagatagagctaccacctagacagctaatttctactaagtgtagatttttttnnnnnnnnnnaagcttggcgtggatccgatatcaactagatcttgagacaaatggcagtattcatccacaattttaaaagaaaaggggggattggggggtacagtgcaggggaaagaatagtagacataatagcaacagacatacaaactaaag

SEQ ID NO: 11780 - DNA, 301 bp, Artificial Sequence
  Jak1.1_Fanca.3
  crRNA array
  misc_feature (148)..(157): n is a, c, g, or t
cttggctttatatatcttgtggaaaggacgaaacaccgtaatttctactaagtgtagatgagcgcaggccgccgcagcctaatttctactaagtgtagataccaactgctgtgcctcgggtaatttctactaagtgtagatttttttnnnnnnnnnnaagcttggcgtggatccgatatcaactagatcttgagacaaatggcagtattcatccacaattttaaaagaaaaggggggattggggggtacagtgcaggggaaagaatagtagacataatagcaacagacatacaaactaaag

SEQ ID NO: 11781 - DNA, 301 bp, Artificial Sequence
  Jak1.1_Fanca.4
  crRNA array
  misc_feature (148)..(157): n is a, c, g, or t
cttggctttatatatcttgtggaaaggacgaaacaccgtaatttctactaagtgtagatgagcgcaggccgccgcagcctaatttctactaagtgtagatcacccacccctggtgccaagtaatttctactaagtgtagatttttttnnnnnnnnnnaagcttggcgtggatccgatatcaactagatcttgagacaaatggcagtattcatccacaattttaaaagaaaaggggggattggggggtacagtgcaggggaaagaatagtagacataatagcaacagacatacaaactaaag

SEQ ID NO: 11782 - DNA, 301 bp, Artificial Sequence
  Jak1.2_Fanca.1
  crRNA array
  misc_feature (148)..(157): n is a, c, g, or t
cttggctttatatatcttgtggaaaggacgaaacaccgtaatttctactaagtgtagatagggacactggacaaccgaataatttctactaagtgtagatggaggccccggggcccaccataatttctactaagtgtagatttttttnnnnnnnnnnaagcttggcgtggatccgatatcaactagatcttgagacaaatggcagtattcatccacaattttaaaagaaaaggggggattggggggtacagtgcaggggaaagaatagtagacataatagcaacagacatacaaactaaag

SEQ ID NO: 11783 - DNA, 301 bp, Artificial Sequence
  Jak1.2_Fanca.2
  crRNA array
  misc_feature (148)..(157): n is a, c, g, or t
cttggctttatatatcttgtggaaaggacgaaacaccgtaatttctactaagtgtagatagggacactggacaaccgaataatttctactaagtgtagatagagctaccacctagacagctaatttctactaagtgtagatttttttnnnnnnnnnnaagcttggcgtggatccgatatcaactagatcttgagacaaatggcagtattcatccacaattttaaaagaaaaggggggattggggggtacagtgcaggggaaagaatagtagacataatagcaacagacatacaaactaaag

SEQ ID NO: 11784 - DNA, 301 bp, Artificial Sequence
  Jak1.2_Fanca.3
  crRNA array
  misc_feature (148)..(157): n is a, c, g, or t
cttggctttatatatcttgtggaaaggacgaaacaccgtaatttctactaagtgtagatagggacactggacaaccgaataatttctactaagtgtagataccaactgctgtgcctcgggtaatttctactaagtgtagatttttttnnnnnnnnnnaagcttggcgtggatccgatatcaactagatcttgagacaaatggcagtattcatccacaattttaaaagaaaaggggggattggggggtacagtgcaggggaaagaatagtagacataatagcaacagacatacaaactaaag

SEQ ID NO: 11785 - DNA, 301 bp, Artificial Sequence
  Jak1.2_Fanca.4
  crRNA array
  misc_feature (148)..(157): n is a, c, g, or t
cttggctttatatatcttgtggaaaggacgaaacaccgtaatttctactaagtgtagatagggacactggacaaccgaataatttctactaagtgtagatcacccacccctggtgccaagtaatttctactaagtgtagatttttttnnnnnnnnnnaagcttggcgtggatccgatatcaactagatcttgagacaaatggcagtattcatccacaattttaaaagaaaaggggggattggggggtacagtgcaggggaaagaatagtagacataatagcaacagacatacaaactaaag

SEQ ID NO: 11786 - DNA, 301 bp, Artificial Sequence
  Jak1.3_Fanca.1
  crRNA array
  misc_feature (148)..(157): n is a, c, g, or t
cttggctttatatatcttgtggaaaggacgaaacaccgtaatttctactaagtgtagatgcacagaacgccatggcatttaatttctactaagtgtagatggaggccccggggcccaccataatttctactaagtgtagatttttttnnnnnnnnnnaagcttggcgtggatccgatatcaactagatcttgagacaaatggcagtattcatccacaattttaaaagaaaaggggggattggggggtacagtgcaggggaaagaatagtagacataatagcaacagacatacaaactaaag

SEQ ID NO: 11787 - DNA, 301 bp, Artificial Sequence
  Jak1.3_Fanca.2
  crRNA array
  misc_feature (148)..(157): n is a, c, g, or t
cttggctttatatatcttgtggaaaggacgaaacaccgtaatttctactaagtgtagatgcacagaacgccatggcatttaatttctactaagtgtagatagagctaccacctagacagctaatttctactaagtgtagatttttttnnnnnnnnnnaagcttggcgtggatccgatatcaactagatcttgagacaaatggcagtattcatccacaattttaaaagaaaaggggggattggggggtacagtgcaggggaaagaatagtagacataatagcaacagacatacaaactaaag

SEQ ID NO: 11788 - DNA, 301 bp, Artificial Sequence
  Jak1.3_Fanca.3
  crRNA array
  misc_feature (148)..(157): n is a, c, g, or t
cttggctttatatatcttgtggaaaggacgaaacaccgtaatttctactaagtgtagatgcacagaacgccatggcatttaatttctactaagtgtagataccaactgctgtgcctcgggtaatttctactaagtgtagatttttttnnnnnnnnnnaagcttggcgtggatccgatatcaactagatcttgagacaaatggcagtattcatccacaattttaaaagaaaaggggggattggggggtacagtgcaggggaaagaatagtagacataatagcaacagacatacaaactaaag

SEQ ID NO: 11789 - DNA, 301 bp, Artificial Sequence
  Jak1.3_Fanca.4
  crRNA array
  misc_feature (148)..(157): n is a, c, g, or t
cttggctttatatatcttgtggaaaggacgaaacaccgtaatttctactaagtgtagatgcacagaacgccatggcatttaatttctactaagtgtagatcacccacccctggtgccaagtaatttctactaagtgtagatttttttnnnnnnnnnnaagcttggcgtggatccgatatcaactagatcttgagacaaatggcagtattcatccacaattttaaaagaaaaggggggattggggggtacagtgcaggggaaagaatagtagacataatagcaacagacatacaaactaaag

SEQ ID NO: 11790 - DNA, 301 bp, Artificial Sequence
  Jak1.4_Fanca.1
  crRNA array
  misc_feature (148)..(157): n is a, c, g, or t
cttggctttatatatcttgtggaaaggacgaaacaccgtaatttctactaagtgtagattgccgccactggatcccgagtaatttctactaagtgtagatggaggccccggggcccaccataatttctactaagtgtagatttttttnnnnnnnnnnaagcttggcgtggatccgatatcaactagatcttgagacaaatggcagtattcatccacaattttaaaagaaaaggggggattggggggtacagtgcaggggaaagaatagtagacataatagcaacagacatacaaactaaag

SEQ ID NO: 11791 - DNA, 301 bp, Artificial Sequence
  Jak1.4_Fanca.2
  crRNA array
  misc_feature (148)..(157): n is a, c, g, or t
cttggctttatatatcttgtggaaaggacgaaacaccgtaatttctactaagtgtagattgccgccactggatcccgagtaatttctactaagtgtagatagagctaccacctagacagctaatttctactaagtgtagatttttttnnnnnnnnnnaagcttggcgtggatccgatatcaactagatcttgagacaaatggcagtattcatccacaattttaaaagaaaaggggggattggggggtacagtgcaggggaaagaatagtagacataatagcaacagacatacaaactaaag

SEQ ID NO: 11792 - DNA, 301 bp, Artificial Sequence
  Jak1.4_Fanca.3
  crRNA array
  misc_feature (148)..(157): n is a, c, g, or t
cttggctttatatatcttgtggaaaggacgaaacaccgtaatttctactaagtgtagattgccgccactggatcccgagtaatttctactaagtgtagataccaactgctgtgcctcgggtaatttctactaagtgtagatttttttnnnnnnnnnnaagcttggcgtggatccgatatcaactagatcttgagacaaatggcagtattcatccacaattttaaaagaaaaggggggattggggggtacagtgcaggggaaagaatagtagacataatagcaacagacatacaaactaaag

SEQ ID NO: 11793 - DNA, 301 bp, Artificial Sequence
  Jak1.4_Fanca.4
  crRNA array
  misc_feature (148)..(157): n is a, c, g, or t
cttggctttatatatcttgtggaaaggacgaaacaccgtaatttctactaagtgtagattgccgccactggatcccgagtaatttctactaagtgtagatcacccacccctggtgccaagtaatttctactaagtgtagatttttttnnnnnnnnnnaagcttggcgtggatccgatatcaactagatcttgagacaaatggcagtattcatccacaattttaaaagaaaaggggggattggggggtacagtgcaggggaaagaatagtagacataatagcaacagacatacaaactaaag

SEQ ID NO: 11794 - DNA, 301 bp, Artificial Sequence
  Jak1.1_Nf1.1
  crRNA array
  misc_feature (148)..(157): n is a, c, g, or t
cttggctttatatatcttgtggaaaggacgaaacaccgtaatttctactaagtgtagatgagcgcaggccgccgcagcctaatttctactaagtgtagattggcgatccggaatcctctgtaatttctactaagtgtagatttttttnnnnnnnnnnaagcttggcgtggatccgatatcaactagatcttgagacaaatggcagtattcatccacaattttaaaagaaaaggggggattggggggtacagtgcaggggaaagaatagtagacataatagcaacagacatacaaactaaag

SEQ ID NO: 11795 - DNA, 301 bp, Artificial Sequence
  Jak1.1_Nf1.2
  crRNA array
  misc_feature (148)..(157): n is a, c, g, or t
cttggctttatatatcttgtggaaaggacgaaacaccgtaatttctactaagtgtagatgagcgcaggccgccgcagcctaatttctactaagtgtagatggaaacacaacgctggcctctaatttctactaagtgtagatttttttnnnnnnnnnnaagcttggcgtggatccgatatcaactagatcttgagacaaatggcagtattcatccacaattttaaaagaaaaggggggattggggggtacagtgcaggggaaagaatagtagacataatagcaacagacatacaaactaaag

SEQ ID NO: 11796 - DNA, 301 bp, Artificial Sequence
  Jak1.1_Nf1.3
  crRNA array
  misc_feature (148)..(157): n is a, c, g, or t
cttggctttatatatcttgtggaaaggacgaaacaccgtaatttctactaagtgtagatgagcgcaggccgccgcagcctaatttctactaagtgtagataatgatggaacgcagtcgcataatttctactaagtgtagatttttttnnnnnnnnnnaagcttggcgtggatccgatatcaactagatcttgagacaaatggcagtattcatccacaattttaaaagaaaaggggggattggggggtacagtgcaggggaaagaatagtagacataatagcaacagacatacaaactaaag

SEQ ID NO: 11797 - DNA, 301 bp, Artificial Sequence
  Jak1.1_Nf1.4
  crRNA array
  misc_feature (148)..(157): n is a, c, g, or t
cttggctttatatatcttgtggaaaggacgaaacaccgtaatttctactaagtgtagatgagcgcaggccgccgcagcctaatttctactaagtgtagattgcaaaaccatccaccaagttaatttctactaagtgtagatttttttnnnnnnnnnnaagcttggcgtggatccgatatcaactagatcttgagacaaatggcagtattcatccacaattttaaaagaaaaggggggattggggggtacagtgcaggggaaagaatagtagacataatagcaacagacatacaaactaaag

SEQ ID NO: 11798 - DNA, 301 bp, Artificial Sequence
  Jak1.2_Nf1.1
  crRNA array
  misc_feature (148)..(157): n is a, c, g, or t
cttggctttatatatcttgtggaaaggacgaaacaccgtaatttctactaagtgtagatagggacactggacaaccgaataatttctactaagtgtagattggcgatccggaatcctctgtaatttctactaagtgtagatttttttnnnnnnnnnnaagcttggcgtggatccgatatcaactagatcttgagacaaatggcagtattcatccacaattttaaaagaaaaggggggattggggggtacagtgcaggggaaagaatagtagacataatagcaacagacatacaaactaaag

SEQ ID NO: 11799 - DNA, 301 bp, Artificial Sequence
  Jak1.2_Nf1.2
  crRNA array
  misc_feature (148)..(157): n is a, c, g, or t
cttggctttatatatcttgtggaaaggacgaaacaccgtaatttctactaagtgtagatagggacactggacaaccgaataatttctactaagtgtagatggaaacacaacgctggcctctaatttctactaagtgtagatttttttnnnnnnnnnnaagcttggcgtggatccgatatcaactagatcttgagacaaatggcagtattcatccacaattttaaaagaaaaggggggattggggggtacagtgcaggggaaagaatagtagacataatagcaacagacatacaaactaaag

SEQ ID NO: 11800 - DNA, 301 bp, Artificial Sequence
  Jak1.2_Nf1.3
  crRNA array
  misc_feature (148)..(157): n is a, c, g, or t
cttggctttatatatcttgtggaaaggacgaaacaccgtaatttctactaagtgtagatagggacactggacaaccgaataatttctactaagtgtagataatgatggaacgcagtcgcataatttctactaagtgtagatttttttnnnnnnnnnnaagcttggcgtggatccgatatcaactagatcttgagacaaatggcagtattcatccacaattttaaaagaaaaggggggattggggggtacagtgcaggggaaagaatagtagacataatagcaacagacatacaaactaaag

SEQ ID NO: 11801 - DNA, 301 bp, Artificial Sequence
  Jak1.2_Nf1.4
  crRNA array
  misc_feature (148)..(157): n is a, c, g, or t
cttggctttatatatcttgtggaaaggacgaaacaccgtaatttctactaagtgtagatagggacactggacaaccgaataatttctactaagtgtagattgcaaaaccatccaccaagttaatttctactaagtgtagatttttttnnnnnnnnnnaagcttggcgtggatccgatatcaactagatcttgagacaaatggcagtattcatccacaattttaaaagaaaaggggggattggggggtacagtgcaggggaaagaatagtagacataatagcaacagacatacaaactaaag

SEQ ID NO: 11802 - DNA, 301 bp, Artificial Sequence
  Jak1.3_Nf1.1
  crRNA array
  misc_feature (148)..(157): n is a, c, g, or t
cttggctttatatatcttgtggaaaggacgaaacaccgtaatttctactaagtgtagatgcacagaacgccatggcatttaatttctactaagtgtagattggcgatccggaatcctctgtaatttctactaagtgtagatttttttnnnnnnnnnnaagcttggcgtggatccgatatcaactagatcttgagacaaatggcagtattcatccacaattttaaaagaaaaggggggattggggggtacagtgcaggggaaagaatagtagacataatagcaacagacatacaaactaaag

SEQ ID NO: 11803 - DNA, 301 bp, Artificial Sequence
  Jak1.3_Nf1.2
  crRNA array
  misc_feature (148)..(157): n is a, c, g, or t
cttggctttatatatcttgtggaaaggacgaaacaccgtaatttctactaagtgtagatgcacagaacgccatggcatttaatttctactaagtgtagatggaaacacaacgctggcctctaatttctactaagtgtagatttttttnnnnnnnnnnaagcttggcgtggatccgatatcaactagatcttgagacaaatggcagtattcatccacaattttaaaagaaaaggggggattggggggtacagtgcaggggaaagaatagtagacataatagcaacagacatacaaactaaag

SEQ ID NO: 11804 - DNA, 301 bp, Artificial Sequence
  Jak1.3_Nf1.3
  crRNA array
  misc_feature (148)..(157): n is a, c, g, or t
cttggctttatatatcttgtggaaaggacgaaacaccgtaatttctactaagtgtagatgcacagaacgccatggcatttaatttctactaagtgtagataatgatggaacgcagtcgcataatttctactaagtgtagatttttttnnnnnnnnnnaagcttggcgtggatccgatatcaactagatcttgagacaaatggcagtattcatccacaattttaaaagaaaaggggggattggggggtacagtgcaggggaaagaatagtagacataatagcaacagacatacaaactaaag

SEQ ID NO: 11805 - DNA, 301 bp, Artificial Sequence
  Jak1.3_Nf1.4
  crRNA array
  misc_feature (148)..(157): n is a, c, g, or t
cttggctttatatatcttgtggaaaggacgaaacaccgtaatttctactaagtgtagatgcacagaacgccatggcatttaatttctactaagtgtagattgcaaaaccatccaccaagttaatttctactaagtgtagatttttttnnnnnnnnnnaagcttggcgtggatccgatatcaactagatcttgagacaaatggcagtattcatccacaattttaaaagaaaaggggggattggggggtacagtgcaggggaaagaatagtagacataatagcaacagacatacaaactaaag

SEQ ID NO: 11806 - DNA, 301 bp, Artificial Sequence
  Jak1.4_Nf1.1
  crRNA array
  misc_feature (148)..(157): n is a, c, g, or t
cttggctttatatatcttgtggaaaggacgaaacaccgtaatttctactaagtgtagattgccgccactggatcccgagtaatttctactaagtgtagattggcgatccggaatcctctgtaatttctactaagtgtagatttttttnnnnnnnnnnaagcttggcgtggatccgatatcaactagatcttgagacaaatggcagtattcatccacaattttaaaagaaaaggggggattggggggtacagtgcaggggaaagaatagtagacataatagcaacagacatacaaactaaag

SEQ ID NO: 11807 - DNA, 301 bp, Artificial Sequence
  Jak1.4_Nf1.2
  crRNA array
  misc_feature (148)..(157): n is a, c, g, or t
cttggctttatatatcttgtggaaaggacgaaacaccgtaatttctactaagtgtagattgccgccactggatcccgagtaatttctactaagtgtagatggaaacacaacgctggcctctaatttctactaagtgtagatttttttnnnnnnnnnnaagcttggcgtggatccgatatcaactagatcttgagacaaatggcagtattcatccacaattttaaaagaaaaggggggattggggggtacagtgcaggggaaagaatagtagacataatagcaacagacatacaaactaaag

SEQ ID NO: 11808 - DNA, 301 bp, Artificial Sequence
  Jak1.4_Nf1.3
  crRNA array
  misc_feature (148)..(157): n is a, c, g, or t
cttggctttatatatcttgtggaaaggacgaaacaccgtaatttctactaagtgtagattgccgccactggatcccgagtaatttctactaagtgtagataatgatggaacgcagtcgcataatttctactaagtgtagatttttttnnnnnnnnnnaagcttggcgtggatccgatatcaactagatcttgagacaaatggcagtattcatccacaattttaaaagaaaaggggggattggggggtacagtgcaggggaaagaatagtagacataatagcaacagacatacaaactaaag

SEQ ID NO: 11809 - DNA, 301 bp, Artificial Sequence
  Jak1.4_Nf1.4
  crRNA array
  misc_feature (148)..(157): n is a, c, g, or t
cttggctttatatatcttgtggaaaggacgaaacaccgtaatttctactaagtgtagattgccgccactggatcccgagtaatttctactaagtgtagattgcaaaaccatccaccaagttaatttctactaagtgtagatttttttnnnnnnnnnnaagcttggcgtggatccgatatcaactagatcttgagacaaatggcagtattcatccacaattttaaaagaaaaggggggattggggggtacagtgcaggggaaagaatagtagacataatagcaacagacatacaaactaaag

SEQ ID NO: 11810 - DNA, 301 bp, Artificial Sequence
  Jak1.1_Kdm6a.1
  crRNA array
  misc_feature (148)..(157): n is a, c, g, or t
cttggctttatatatcttgtggaaaggacgaaacaccgtaatttctactaagtgtagatgagcgcaggccgccgcagcctaatttctactaagtgtagatgctgccgcctctcgcggcagtaatttctactaagtgtagatttttttnnnnnnnnnnaagcttggcgtggatccgatatcaactagatcttgagacaaatggcagtattcatccacaattttaaaagaaaaggggggattggggggtacagtgcaggggaaagaatagtagacataatagcaacagacatacaaactaaag

SEQ ID NO: 11811 - DNA, 301 bp, Artificial Sequence
  Jak1.1_Kdm6a.2
  crRNA array
  misc_feature (148)..(157): n is a, c, g, or t
cttggctttatatatcttgtggaaaggacgaaacaccgtaatttctactaagtgtagatgagcgcaggccgccgcagcctaatttctactaagtgtagatgctgcaggtaaggcacgttttaatttctactaagtgtagatttttttnnnnnnnnnnaagcttggcgtggatccgatatcaactagatcttgagacaaatggcagtattcatccacaattttaaaagaaaaggggggattggggggtacagtgcaggggaaagaatagtagacataatagcaacagacatacaaactaaag

SEQ ID NO: 11812 - DNA, 301 bp, Artificial Sequence
  Jak1.1_Kdm6a.3
  crRNA array
  misc_feature (148)..(157): n is a, c, g, or t
cttggctttatatatcttgtggaaaggacgaaacaccgtaatttctactaagtgtagatgagcgcaggccgccgcagcctaatttctactaagtgtagattgctggtgccggggaagttttaatttctactaagtgtagatttttttnnnnnnnnnnaagcttggcgtggatccgatatcaactagatcttgagacaaatggcagtattcatccacaattttaaaagaaaaggggggattggggggtacagtgcaggggaaagaatagtagacataatagcaacagacatacaaactaaag

SEQ ID NO: 11813 - DNA, 301 bp, Artificial Sequence
  Jak1.1_Kdm6a.4
  crRNA array
  misc_feature (148)..(157): n is a, c, g, or t
cttggctttatatatcttgtggaaaggacgaaacaccgtaatttctactaagtgtagatgagcgcaggccgccgcagcctaatttctactaagtgtagattgtctcctacgaatcccccctaatttctactaagtgtagatttttttnnnnnnnnnnaagcttggcgtggatccgatatcaactagatcttgagacaaatggcagtattcatccacaattttaaaagaaaaggggggattggggggtacagtgcaggggaaagaatagtagacataatagcaacagacatacaaactaaag

SEQ ID NO: 11814 - DNA, 301 bp, Artificial Sequence
  Jak1.2_Kdm6a.1
  crRNA array
  misc_feature (148)..(157): n is a, c, g, or t
cttggctttatatatcttgtggaaaggacgaaacaccgtaatttctactaagtgtagatagggacactggacaaccgaataatttctactaagtgtagatgctgccgcctctcgcggcagtaatttctactaagtgtagatttttttnnnnnnnnnnaagcttggcgtggatccgatatcaactagatcttgagacaaatggcagtattcatccacaattttaaaagaaaaggggggattggggggtacagtgcaggggaaagaatagtagacataatagcaacagacatacaaactaaag

SEQ ID NO: 11815 - DNA, 301 bp, Artificial Sequence
  Jak1.2_Kdm6a.2
  crRNA array
  misc_feature (148)..(157): n is a, c, g, or t
cttggctttatatatcttgtggaaaggacgaaacaccgtaatttctactaagtgtagatagggacactggacaaccgaataatttctactaagtgtagatgctgcaggtaaggcacgttttaatttctactaagtgtagatttttttnnnnnnnnnnaagcttggcgtggatccgatatcaactagatcttgagacaaatggcagtattcatccacaattttaaaagaaaaggggggattggggggtacagtgcaggggaaagaatagtagacataatagcaacagacatacaaactaaag

SEQ ID NO: 11816 - DNA, 301 bp, Artificial Sequence
  Jak1.2_Kdm6a.3
  crRNA array
  misc_feature (148)..(157): n is a, c, g, or t
cttggctttatatatcttgtggaaaggacgaaacaccgtaatttctactaagtgtagatagggacactggacaaccgaataatttctactaagtgtagattgctggtgccggggaagttttaatttctactaagtgtagatttttttnnnnnnnnnnaagcttggcgtggatccgatatcaactagatcttgagacaaatggcagtattcatccacaattttaaaagaaaaggggggattggggggtacagtgcaggggaaagaatagtagacataatagcaacagacatacaaactaaag

SEQ ID NO: 11817 - DNA, 301 bp, Artificial Sequence
  Jak1.2_Kdm6a.4
  crRNA array
  misc_feature (148)..(157): n is a, c, g, or t
cttggctttatatatcttgtggaaaggacgaaacaccgtaatttctactaagtgtagatagggacactggacaaccgaataatttctactaagtgtagattgtctcctacgaatcccccctaatttctactaagtgtagatttttttnnnnnnnnnnaagcttggcgtggatccgatatcaactagatcttgagacaaatggcagtattcatccacaattttaaaagaaaaggggggattggggggtacagtgcaggggaaagaatagtagacataatagcaacagacatacaaactaaag

SEQ ID NO: 11818 - DNA, 301 bp, Artificial Sequence
  Jak1.3_Kdm6a.1
  crRNA array
  misc_feature (148)..(157): n is a, c, g, or t
cttggctttatatatcttgtggaaaggacgaaacaccgtaatttctactaagtgtagatgcacagaacgccatggcatttaatttctactaagtgtagatgctgccgcctctcgcggcagtaatttctactaagtgtagatttttttnnnnnnnnnnaagcttggcgtggatccgatatcaactagatcttgagacaaatggcagtattcatccacaattttaaaagaaaaggggggattggggggtacagtgcaggggaaagaatagtagacataatagcaacagacatacaaactaaag

SEQ ID NO: 11819 - DNA, 301 bp, Artificial Sequence
  Jak1.3_Kdm6a.2
  crRNA array
  misc_feature (148)..(157): n is a, c, g, or t
cttggctttatatatcttgtggaaaggacgaaacaccgtaatttctactaagtgtagatgcacagaacgccatggcatttaatttctactaagtgtagatgctgcaggtaaggcacgttttaatttctactaagtgtagatttttttnnnnnnnnnnaagcttggcgtggatccgatatcaactagatcttgagacaaatggcagtattcatccacaattttaaaagaaaaggggggattggggggtacagtgcaggggaaagaatagtagacataatagcaacagacatacaaactaaag

SEQ ID NO: 11820 - DNA, 301 bp, Artificial Sequence
  Jak1.3_Kdm6a.3
  crRNA array
  misc_feature (148)..(157): n is a, c, g, or t
cttggctttatatatcttgtggaaaggacgaaacaccgtaatttctactaagtgtagatgcacagaacgccatggcatttaatttctactaagtgtagattgctggtgccggggaagttttaatttctactaagtgtagatttttttnnnnnnnnnnaagcttggcgtggatccgatatcaactagatcttgagacaaatggcagtattcatccacaattttaaaagaaaaggggggattggggggtacagtgcaggggaaagaatagtagacataatagcaacagacatacaaactaaag

SEQ ID NO: 11821 - DNA, 301 bp, Artificial Sequence
  Jak1.3_Kdm6a.4
  crRNA array
  misc_feature (148)..(157): n is a, c, g, or t
cttggctttatatatcttgtggaaaggacgaaacaccgtaatttctactaagtgtagatgcacagaacgccatggcatttaatttctactaagtgtagattgtctcctacgaatcccccctaatttctactaagtgtagatttttttnnnnnnnnnnaagcttggcgtggatccgatatcaactagatcttgagacaaatggcagtattcatccacaattttaaaagaaaaggggggattggggggtacagtgcaggggaaagaatagtagacataatagcaacagacatacaaactaaag

SEQ ID NO: 11822 - DNA, 301 bp, Artificial Sequence
  Jak1.4_Kdm6a.1
  crRNA array
  misc_feature (148)..(157): n is a, c, g, or t
cttggctttatatatcttgtggaaaggacgaaacaccgtaatttctactaagtgtagattgccgccactggatcccgagtaatttctactaagtgtagatgctgccgcctctcgcggcagtaatttctactaagtgtagatttttttnnnnnnnnnnaagcttggcgtggatccgatatcaactagatcttgagacaaatggcagtattcatccacaattttaaaagaaaaggggggattggggggtacagtgcaggggaaagaatagtagacataatagcaacagacatacaaactaaag

SEQ ID NO: 11823 - DNA, 301 bp, Artificial Sequence
  Jak1.4_Kdm6a.2
  crRNA array
  misc_feature (148)..(157): n is a, c, g, or t
cttggctttatatatcttgtggaaaggacgaaacaccgtaatttctactaagtgtagattgccgccactggatcccgagtaatttctactaagtgtagatgctgcaggtaaggcacgttttaatttctactaagtgtagatttttttnnnnnnnnnnaagcttggcgtggatccgatatcaactagatcttgagacaaatggcagtattcatccacaattttaaaagaaaaggggggattggggggtacagtgcaggggaaagaatagtagacataatagcaacagacatacaaactaaag

SEQ ID NO: 11824 - DNA, 301 bp, Artificial Sequence
  Jak1.4_Kdm6a.3
  crRNA array
  misc_feature (148)..(157): n is a, c, g, or t
cttggctttatatatcttgtggaaaggacgaaacaccgtaatttctactaagtgtagattgccgccactggatcccgagtaatttctactaagtgtagattgctggtgccggggaagttttaatttctactaagtgtagatttttttnnnnnnnnnnaagcttggcgtggatccgatatcaactagatcttgagacaaatggcagtattcatccacaattttaaaagaaaaggggggattggggggtacagtgcaggggaaagaatagtagacataatagcaacagacatacaaactaaag

SEQ ID NO: 11825 - DNA, 301 bp, Artificial Sequence
  Jak1.4_Kdm6a.4
  crRNA array
  misc_feature (148)..(157): n is a, c, g, or t
cttggctttatatatcttgtggaaaggacgaaacaccgtaatttctactaagtgtagattgccgccactggatcccgagtaatttctactaagtgtagattgtctcctacgaatcccccctaatttctactaagtgtagatttttttnnnnnnnnnnaagcttggcgtggatccgatatcaactagatcttgagacaaatggcagtattcatccacaattttaaaagaaaaggggggattggggggtacagtgcaggggaaagaatagtagacataatagcaacagacatacaaactaaag

SEQ ID NO: 11826 - DNA, 301 bp, Artificial Sequence
  Jak1.1_Ercc5.1
  crRNA array
  misc_feature (148)..(157): n is a, c, g, or t
cttggctttatatatcttgtggaaaggacgaaacaccgtaatttctactaagtgtagatgagcgcaggccgccgcagcctaatttctactaagtgtagatacggcacgagcaagagacactaatttctactaagtgtagatttttttnnnnnnnnnnaagcttggcgtggatccgatatcaactagatcttgagacaaatggcagtattcatccacaattttaaaagaaaaggggggattggggggtacagtgcaggggaaagaatagtagacataatagcaacagacatacaaactaaag

SEQ ID NO: 11827 - DNA, 301 bp, Artificial Sequence
  Jak1.1_Ercc5.2
  crRNA array
  misc_feature (148)..(157): n is a, c, g, or t
cttggctttatatatcttgtggaaaggacgaaacaccgtaatttctactaagtgtagatgagcgcaggccgccgcagcctaatttctactaagtgtagatgagtatcacatcggtgactctaatttctactaagtgtagatttttttnnnnnnnnnnaagcttggcgtggatccgatatcaactagatcttgagacaaatggcagtattcatccacaattttaaaagaaaaggggggattggggggtacagtgcaggggaaagaatagtagacataatagcaacagacatacaaactaaag

SEQ ID NO: 11828 - DNA, 301 bp, Artificial Sequence
  Jak1.1_Ercc5.3
  crRNA array
  misc_feature (148)..(157): n is a, c, g, or t
cttggctttatatatcttgtggaaaggacgaaacaccgtaatttctactaagtgtagatgagcgcaggccgccgcagcctaatttctactaagtgtagatggagtgggtccaggcctcgttaatttctactaagtgtagatttttttnnnnnnnnnnaagcttggcgtggatccgatatcaactagatcttgagacaaatggcagtattcatccacaattttaaaagaaaaggggggattggggggtacagtgcaggggaaagaatagtagacataatagcaacagacatacaaactaaag

SEQ ID NO: 11829 - DNA, 301 bp, Artificial Sequence
  Jak1.1_Ercc5.4
  crRNA array
  misc_feature (148)..(157): n is a, c, g, or t
cttggctttatatatcttgtggaaaggacgaaacaccgtaatttctactaagtgtagatgagcgcaggccgccgcagcctaatttctactaagtgtagatcagagccggtggaataatgttaatttctactaagtgtagatttttttnnnnnnnnnnaagcttggcgtggatccgatatcaactagatcttgagacaaatggcagtattcatccacaattttaaaagaaaaggggggattggggggtacagtgcaggggaaagaatagtagacataatagcaacagacatacaaactaaag

SEQ ID NO: 11830 - DNA, 301 bp, Artificial Sequence
  Jak1.2_Ercc5.1
  crRNA array
  misc_feature (148)..(157): n is a, c, g, or t
cttggctttatatatcttgtggaaaggacgaaacaccgtaatttctactaagtgtagatagggacactggacaaccgaataatttctactaagtgtagatacggcacgagcaagagacactaatttctactaagtgtagatttttttnnnnnnnnnnaagcttggcgtggatccgatatcaactagatcttgagacaaatggcagtattcatccacaattttaaaagaaaaggggggattggggggtacagtgcaggggaaagaatagtagacataatagcaacagacatacaaactaaag

SEQ ID NO: 11831 - DNA, 301 bp, Artificial Sequence
  Jak1.2_Ercc5.2
  crRNA array
  misc_feature (148)..(157): n is a, c, g, or t
cttggctttatatatcttgtggaaaggacgaaacaccgtaatttctactaagtgtagatagggacactggacaaccgaataatttctactaagtgtagatgagtatcacatcggtgactctaatttctactaagtgtagatttttttnnnnnnnnnnaagcttggcgtggatccgatatcaactagatcttgagacaaatggcagtattcatccacaattttaaaagaaaaggggggattggggggtacagtgcaggggaaagaatagtagacataatagcaacagacatacaaactaaag

SEQ ID NO: 11832 - DNA, 301 bp, Artificial Sequence
  Jak1.2_Ercc5.3
  crRNA array
  misc_feature (148)..(157): n is a, c, g, or t
cttggctttatatatcttgtggaaaggacgaaacaccgtaatttctactaagtgtagatagggacactggacaaccgaataatttctactaagtgtagatggagtgggtccaggcctcgttaatttctactaagtgtagatttttttnnnnnnnnnnaagcttggcgtggatccgatatcaactagatcttgagacaaatggcagtattcatccacaattttaaaagaaaaggggggattggggggtacagtgcaggggaaagaatagtagacataatagcaacagacatacaaactaaag

SEQ ID NO: 11833 - DNA, 301 bp, Artificial Sequence
  Jak1.2_Ercc5.4
  crRNA array
  misc_feature (148)..(157): n is a, c, g, or t
cttggctttatatatcttgtggaaaggacgaaacaccgtaatttctactaagtgtagatagggacactggacaaccgaataatttctactaagtgtagatcagagccggtggaataatgttaatttctactaagtgtagatttttttnnnnnnnnnnaagcttggcgtggatccgatatcaactagatcttgagacaaatggcagtattcatccacaattttaaaagaaaaggggggattggggggtacagtgcaggggaaagaatagtagacataatagcaacagacatacaaactaaag

SEQ ID NO: 11834 - DNA, 301 bp, Artificial Sequence
  Jak1.3_Ercc5.1
  crRNA array
  misc_feature (148)..(157): n is a, c, g, or t
cttggctttatatatcttgtggaaaggacgaaacaccgtaatttctactaagtgtagatgcacagaacgccatggcatttaatttctactaagtgtagatacggcacgagcaagagacactaatttctactaagtgtagatttttttnnnnnnnnnnaagcttggcgtggatccgatatcaactagatcttgagacaaatggcagtattcatccacaattttaaaagaaaaggggggattggggggtacagtgcaggggaaagaatagtagacataatagcaacagacatacaaactaaag

SEQ ID NO: 11835 - DNA, 301 bp, Artificial Sequence
  Jak1.3_Ercc5.2
  crRNA array
  misc_feature (148)..(157): n is a, c, g, or t
cttggctttatatatcttgtggaaaggacgaaacaccgtaatttctactaagtgtagatgcacagaacgccatggcatttaatttctactaagtgtagatgagtatcacatcggtgactctaatttctactaagtgtagatttttttnnnnnnnnnnaagcttggcgtggatccgatatcaactagatcttgagacaaatggcagtattcatccacaattttaaaagaaaaggggggattggggggtacagtgcaggggaaagaatagtagacataatagcaacagacatacaaactaaag

SEQ ID NO: 11836 - DNA, 301 bp, Artificial Sequence
  Jak1.3_Ercc5.3
  crRNA array
  misc_feature (148)..(157): n is a, c, g, or t
cttggctttatatatcttgtggaaaggacgaaacaccgtaatttctactaagtgtagatgcacagaacgccatggcatttaatttctactaagtgtagatggagtgggtccaggcctcgttaatttctactaagtgtagatttttttnnnnnnnnnnaagcttggcgtggatccgatatcaactagatcttgagacaaatggcagtattcatccacaattttaaaagaaaaggggggattggggggtacagtgcaggggaaagaatagtagacataatagcaacagacatacaaactaaag

SEQ ID NO: 11837 - DNA, 301 bp, Artificial Sequence
  Jak1.3_Ercc5.4
  crRNA array
  misc_feature (148)..(157): n is a, c, g, or t
cttggctttatatatcttgtggaaaggacgaaacaccgtaatttctactaagtgtagatgcacagaacgccatggcatttaatttctactaagtgtagatcagagccggtggaataatgttaatttctactaagtgtagatttttttnnnnnnnnnnaagcttggcgtggatccgatatcaactagatcttgagacaaatggcagtattcatccacaattttaaaagaaaaggggggattggggggtacagtgcaggggaaagaatagtagacataatagcaacagacatacaaactaaag

SEQ ID NO: 11838 - DNA, 301 bp, Artificial Sequence
  Jak1.4_Ercc5.1
  crRNA array
  misc_feature (148)..(157): n is a, c, g, or t
cttggctttatatatcttgtggaaaggacgaaacaccgtaatttctactaagtgtagattgccgccactggatcccgagtaatttctactaagtgtagatacggcacgagcaagagacactaatttctactaagtgtagatttttttnnnnnnnnnnaagcttggcgtggatccgatatcaactagatcttgagacaaatggcagtattcatccacaattttaaaagaaaaggggggattggggggtacagtgcaggggaaagaatagtagacataatagcaacagacatacaaactaaag

SEQ ID NO: 11839 - DNA, 301 bp, Artificial Sequence
  Jak1.4_Ercc5.2
  crRNA array
  misc_feature (148)..(157): n is a, c, g, or t
cttggctttatatatcttgtggaaaggacgaaacaccgtaatttctactaagtgtagattgccgccactggatcccgagtaatttctactaagtgtagatgagtatcacatcggtgactctaatttctactaagtgtagatttttttnnnnnnnnnnaagcttggcgtggatccgatatcaactagatcttgagacaaatggcagtattcatccacaattttaaaagaaaaggggggattggggggtacagtgcaggggaaagaatagtagacataatagcaacagacatacaaactaaag

SEQ ID NO: 11840 - DNA, 301 bp, Artificial Sequence
  Jak1.4_Ercc5.3
  crRNA array
  misc_feature (148)..(157): n is a, c, g, or t
cttggctttatatatcttgtggaaaggacgaaacaccgtaatttctactaagtgtagattgccgccactggatcccgagtaatttctactaagtgtagatggagtgggtccaggcctcgttaatttctactaagtgtagatttttttnnnnnnnnnnaagcttggcgtggatccgatatcaactagatcttgagacaaatggcagtattcatccacaattttaaaagaaaaggggggattggggggtacagtgcaggggaaagaatagtagacataatagcaacagacatacaaactaaag

SEQ ID NO: 11841 - DNA, 301 bp, Artificial Sequence
  Jak1.4_Ercc5.4
  crRNA array
  misc_feature (148)..(157): n is a, c, g, or t
cttggctttatatatcttgtggaaaggacgaaacaccgtaatttctactaagtgtagattgccgccactggatcccgagtaatttctactaagtgtagatcagagccggtggaataatgttaatttctactaagtgtagatttttttnnnnnnnnnnaagcttggcgtggatccgatatcaactagatcttgagacaaatggcagtattcatccacaattttaaaagaaaaggggggattggggggtacagtgcaggggaaagaatagtagacataatagcaacagacatacaaactaaag

SEQ ID NO: 11842 - DNA, 301 bp, Artificial Sequence
  Jak1.1_Arid1b.1
  crRNA array
  misc_feature (148)..(157): n is a, c, g, or t
cttggctttatatatcttgtggaaaggacgaaacaccgtaatttctactaagtgtagatgagcgcaggccgccgcagcctaatttctactaagtgtagatgctgctgctgtagtgcgtggtaatttctactaagtgtagatttttttnnnnnnnnnnaagcttggcgtggatccgatatcaactagatcttgagacaaatggcagtattcatccacaattttaaaagaaaaggggggattggggggtacagtgcaggggaaagaatagtagacataatagcaacagacatacaaactaaag

SEQ ID NO: 11843 - DNA, 301 bp, Artificial Sequence
  Jak1.1_Arid1b.2
  crRNA array
  misc_feature (148)..(157): n is a, c, g, or t
cttggctttatatatcttgtggaaaggacgaaacaccgtaatttctactaagtgtagatgagcgcaggccgccgcagcctaatttctactaagtgtagatagtgcaaaactgagcgcgggtaatttctactaagtgtagatttttttnnnnnnnnnnaagcttggcgtggatccgatatcaactagatcttgagacaaatggcagtattcatccacaattttaaaagaaaaggggggattggggggtacagtgcaggggaaagaatagtagacataatagcaacagacatacaaactaaag

SEQ ID NO: 11844 - DNA, 301 bp, Artificial Sequence
  Jak1.1_Arid1b.3
  crRNA array
  misc_feature (148)..(157): n is a, c, g, or t
cttggctttatatatcttgtggaaaggacgaaacaccgtaatttctactaagtgtagatgagcgcaggccgccgcagcctaatttctactaagtgtagatcactcaaaggcgaacaggtataatttctactaagtgtagatttttttnnnnnnnnnnaagcttggcgtggatccgatatcaactagatcttgagacaaatggcagtattcatccacaattttaaaagaaaaggggggattggggggtacagtgcaggggaaagaatagtagacataatagcaacagacatacaaactaaag

SEQ ID NO: 11845 - DNA, 301 bp, Artificial Sequence
  Jak1.1_Arid1b.4
  crRNA array
  misc_feature (148)..(157): n is a, c, g, or t
cttggctttatatatcttgtggaaaggacgaaacaccgtaatttctactaagtgtagatgagcgcaggccgccgcagcctaatttctactaagtgtagatctcctggctccgtagaagcataatttctactaagtgtagatttttttnnnnnnnnnnaagcttggcgtggatccgatatcaactagatcttgagacaaatggcagtattcatccacaattttaaaagaaaaggggggattggggggtacagtgcaggggaaagaatagtagacataatagcaacagacatacaaactaaag

SEQ ID NO: 11846 - DNA, 301 bp, Artificial Sequence
  Jak1.2_Arid1b.1
  crRNA array
  misc_feature (148)..(157): n is a, c, g, or t
cttggctttatatatcttgtggaaaggacgaaacaccgtaatttctactaagtgtagatagggacactggacaaccgaataatttctactaagtgtagatgctgctgctgtagtgcgtggtaatttctactaagtgtagatttttttnnnnnnnnnnaagcttggcgtggatccgatatcaactagatcttgagacaaatggcagtattcatccacaattttaaaagaaaaggggggattggggggtacagtgcaggggaaagaatagtagacataatagcaacagacatacaaactaaag

SEQ ID NO: 11847 - DNA, 301 bp, Artificial Sequence
  Jak1.2_Arid1b.2
  crRNA array
  misc_feature (148)..(157): n is a, c, g, or t
cttggctttatatatcttgtggaaaggacgaaacaccgtaatttctactaagtgtagatagggacactggacaaccgaataatttctactaagtgtagatagtgcaaaactgagcgcgggtaatttctactaagtgtagatttttttnnnnnnnnnnaagcttggcgtggatccgatatcaactagatcttgagacaaatggcagtattcatccacaattttaaaagaaaaggggggattggggggtacagtgcaggggaaagaatagtagacataatagcaacagacatacaaactaaag

SEQ ID NO: 11848 - DNA, 301 bp, Artificial Sequence
  Jak1.2_Arid1b.3
  crRNA array
  misc_feature (148)..(157): n is a, c, g, or t
cttggctttatatatcttgtggaaaggacgaaacaccgtaatttctactaagtgtagatagggacactggacaaccgaataatttctactaagtgtagatcactcaaaggcgaacaggtataatttctactaagtgtagatttttttnnnnnnnnnnaagcttggcgtggatccgatatcaactagatcttgagacaaatggcagtattcatccacaattttaaaagaaaaggggggattggggggtacagtgcaggggaaagaatagtagacataatagcaacagacatacaaactaaag

SEQ ID NO: 11849 - DNA, 301 bp, Artificial Sequence
  Jak1.2_Arid1b.4
  crRNA array
  misc_feature (148)..(157): n is a, c, g, or t
cttggctttatatatcttgtggaaaggacgaaacaccgtaatttctactaagtgtagatagggacactggacaaccgaataatttctactaagtgtagatctcctggctccgtagaagcataatttctactaagtgtagatttttttnnnnnnnnnnaagcttggcgtggatccgatatcaactagatcttgagacaaatggcagtattcatccacaattttaaaagaaaaggggggattggggggtacagtgcaggggaaagaatagtagacataatagcaacagacatacaaactaaag

SEQ ID NO: 11850 - DNA, 301 bp, Artificial Sequence
  Jak1.3_Arid1b.1
  crRNA array
  misc_feature (148)..(157): n is a, c, g, or t
cttggctttatatatcttgtggaaaggacgaaacaccgtaatttctactaagtgtagatgcacagaacgccatggcatttaatttctactaagtgtagatgctgctgctgtagtgcgtggtaatttctactaagtgtagatttttttnnnnnnnnnnaagcttggcgtggatccgatatcaactagatcttgagacaaatggcagtattcatccacaattttaaaagaaaaggggggattggggggtacagtgcaggggaaagaatagtagacataatagcaacagacatacaaactaaag

SEQ ID NO: 11851 - DNA, 301 bp, Artificial Sequence
  Jak1.3_Arid1b.2
  crRNA array
  misc_feature (148)..(157): n is a, c, g, or t
cttggctttatatatcttgtggaaaggacgaaacaccgtaatttctactaagtgtagatgcacagaacgccatggcatttaatttctactaagtgtagatagtgcaaaactgagcgcgggtaatttctactaagtgtagatttttttnnnnnnnnnnaagcttggcgtggatccgatatcaactagatcttgagacaaatggcagtattcatccacaattttaaaagaaaaggggggattggggggtacagtgcaggggaaagaatagtagacataatagcaacagacatacaaactaaag

SEQ ID NO: 11852 - DNA, 301 bp, Artificial Sequence
  Jak1.3_Arid1b.3
  crRNA array
  misc_feature (148)..(157): n is a, c, g, or t
cttggctttatatatcttgtggaaaggacgaaacaccgtaatttctactaagtgtagatgcacagaacgccatggcatttaatttctactaagtgtagatcactcaaaggcgaacaggtataatttctactaagtgtagatttttttnnnnnnnnnnaagcttggcgtggatccgatatcaactagatcttgagacaaatggcagtattcatccacaattttaaaagaaaaggggggattggggggtacagtgcaggggaaagaatagtagacataatagcaacagacatacaaactaaag

SEQ ID NO: 11853 - DNA, 301 bp, Artificial Sequence
  Jak1.3_Arid1b.4
  crRNA array
  misc_feature (148)..(157): n is a, c, g, or t
cttggctttatatatcttgtggaaaggacgaaacaccgtaatttctactaagtgtagatgcacagaacgccatggcatttaatttctactaagtgtagatctcctggctccgtagaagcataatttctactaagtgtagatttttttnnnnnnnnnnaagcttggcgtggatccgatatcaactagatcttgagacaaatggcagtattcatccacaattttaaaagaaaaggggggattggggggtacagtgcaggggaaagaatagtagacataatagcaacagacatacaaactaaag

SEQ ID NO: 11854 - DNA, 301 bp, Artificial Sequence
  Jak1.4_Arid1b.1
  crRNA array
  misc_feature (148)..(157): n is a, c, g, or t
cttggctttatatatcttgtggaaaggacgaaacaccgtaatttctactaagtgtagattgccgccactggatcccgagtaatttctactaagtgtagatgctgctgctgtagtgcgtggtaatttctactaagtgtagatttttttnnnnnnnnnnaagcttggcgtggatccgatatcaactagatcttgagacaaatggcagtattcatccacaattttaaaagaaaaggggggattggggggtacagtgcaggggaaagaatagtagacataatagcaacagacatacaaactaaag

SEQ ID NO: 11855 - DNA, 301 bp, Artificial Sequence
  Jak1.4_Arid1b.2
  crRNA array
  misc_feature (148)..(157): n is a, c, g, or t
cttggctttatatatcttgtggaaaggacgaaacaccgtaatttctactaagtgtagattgccgccactggatcccgagtaatttctactaagtgtagatagtgcaaaactgagcgcgggtaatttctactaagtgtagatttttttnnnnnnnnnnaagcttggcgtggatccgatatcaactagatcttgagacaaatggcagtattcatccacaattttaaaagaaaaggggggattggggggtacagtgcaggggaaagaatagtagacataatagcaacagacatacaaactaaag

SEQ ID NO: 11856 - DNA, 301 bp, Artificial Sequence
  Jak1.4_Arid1b.3
  crRNA array
  misc_feature (148)..(157): n is a, c, g, or t
cttggctttatatatcttgtggaaaggacgaaacaccgtaatttctactaagtgtagattgccgccactggatcccgagtaatttctactaagtgtagatcactcaaaggcgaacaggtataatttctactaagtgtagatttttttnnnnnnnnnnaagcttggcgtggatccgatatcaactagatcttgagacaaatggcagtattcatccacaattttaaaagaaaaggggggattggggggtacagtgcaggggaaagaatagtagacataatagcaacagacatacaaactaaag

SEQ ID NO: 11857 - DNA, 301 bp, Artificial Sequence
  Jak1.4_Arid1b.4
  crRNA array
  misc_feature (148)..(157): n is a, c, g, or t
cttggctttatatatcttgtggaaaggacgaaacaccgtaatttctactaagtgtagattgccgccactggatcccgagtaatttctactaagtgtagatctcctggctccgtagaagcataatttctactaagtgtagatttttttnnnnnnnnnnaagcttggcgtggatccgatatcaactagatcttgagacaaatggcagtattcatccacaattttaaaagaaaaggggggattggggggtacagtgcaggggaaagaatagtagacataatagcaacagacatacaaactaaag

SEQ ID NO: 11858 - DNA, 301 bp, Artificial Sequence
  Jak1.1_Rb1.1
  crRNA array
  misc_feature (148)..(157): n is a, c, g, or t
cttggctttatatatcttgtggaaaggacgaaacaccgtaatttctactaagtgtagatgagcgcaggccgccgcagcctaatttctactaagtgtagattctgacatgatcgggtaccttaatttctactaagtgtagatttttttnnnnnnnnnnaagcttggcgtggatccgatatcaactagatcttgagacaaatggcagtattcatccacaattttaaaagaaaaggggggattggggggtacagtgcaggggaaagaatagtagacataatagcaacagacatacaaactaaag

SEQ ID NO: 11859 - DNA, 301 bp, Artificial Sequence
  Jak1.1_Rb1.2
  crRNA array
  misc_feature (148)..(157): n is a, c, g, or t
cttggctttatatatcttgtggaaaggacgaaacaccgtaatttctactaagtgtagatgagcgcaggccgccgcagcctaatttctactaagtgtagatgtctctgcatgaaaacggagtaatttctactaagtgtagatttttttnnnnnnnnnnaagcttggcgtggatccgatatcaactagatcttgagacaaatggcagtattcatccacaattttaaaagaaaaggggggattggggggtacagtgcaggggaaagaatagtagacataatagcaacagacatacaaactaaag

SEQ ID NO: 11860 - DNA, 301 bp, Artificial Sequence
  Jak1.1_Rb1.3
  crRNA array
  misc_feature (148)..(157): n is a, c, g, or t
cttggctttatatatcttgtggaaaggacgaaacaccgtaatttctactaagtgtagatgagcgcaggccgccgcagcctaatttctactaagtgtagatagccaatctggtctaataactaatttctactaagtgtagatttttttnnnnnnnnnnaagcttggcgtggatccgatatcaactagatcttgagacaaatggcagtattcatccacaattttaaaagaaaaggggggattggggggtacagtgcaggggaaagaatagtagacataatagcaacagacatacaaactaaag

SEQ ID NO: 11861 - DNA, 301 bp, Artificial Sequence
  Jak1.1_Rb1.4
  crRNA array
  misc_feature (148)..(157): n is a, c, g, or t
cttggctttatatatcttgtggaaaggacgaaacaccgtaatttctactaagtgtagatgagcgcaggccgccgcagcctaatttctactaagtgtagattgtagctcagtaaaagtgaataatttctactaagtgtagatttttttnnnnnnnnnnaagcttggcgtggatccgatatcaactagatcttgagacaaatggcagtattcatccacaattttaaaagaaaaggggggattggggggtacagtgcaggggaaagaatagtagacataatagcaacagacatacaaactaaag

SEQ ID NO: 11862 - DNA, 301 bp, Artificial Sequence
  Jak1.2_Rb1.1
  crRNA array
  misc_feature (148)..(157): n is a, c, g, or t
cttggctttatatatcttgtggaaaggacgaaacaccgtaatttctactaagtgtagatagggacactggacaaccgaataatttctactaagtgtagattctgacatgatcgggtaccttaatttctactaagtgtagatttttttnnnnnnnnnnaagcttggcgtggatccgatatcaactagatcttgagacaaatggcagtattcatccacaattttaaaagaaaaggggggattggggggtacagtgcaggggaaagaatagtagacataatagcaacagacatacaaactaaag

SEQ ID NO: 11863 - DNA, 301 bp, Artificial Sequence
  Jak1.2_Rb1.2
  crRNA array
  misc_feature (148)..(157): n is a, c, g, or t
cttggctttatatatcttgtggaaaggacgaaacaccgtaatttctactaagtgtagatagggacactggacaaccgaataatttctactaagtgtagatgtctctgcatgaaaacggagtaatttctactaagtgtagatttttttnnnnnnnnnnaagcttggcgtggatccgatatcaactagatcttgagacaaatggcagtattcatccacaattttaaaagaaaaggggggattggggggtacagtgcaggggaaagaatagtagacataatagcaacagacatacaaactaaag

SEQ ID NO: 11864 - DNA, 301 bp, Artificial Sequence
  Jak1.2_Rb1.3
  crRNA array
  misc_feature (148)..(157): n is a, c, g, or t
cttggctttatatatcttgtggaaaggacgaaacaccgtaatttctactaagtgtagatagggacactggacaaccgaataatttctactaagtgtagatagccaatctggtctaataactaatttctactaagtgtagatttttttnnnnnnnnnnaagcttggcgtggatccgatatcaactagatcttgagacaaatggcagtattcatccacaattttaaaagaaaaggggggattggggggtacagtgcaggggaaagaatagtagacataatagcaacagacatacaaactaaag

SEQ ID NO: 11865 - DNA, 301 bp, Artificial Sequence
  Jak1.2_Rb1.4
  crRNA array
  misc_feature (148)..(157): n is a, c, g, or t
cttggctttatatatcttgtggaaaggacgaaacaccgtaatttctactaagtgtagatagggacactggacaaccgaataatttctactaagtgtagattgtagctcagtaaaagtgaataatttctactaagtgtagatttttttnnnnnnnnnnaagcttggcgtggatccgatatcaactagatcttgagacaaatggcagtattcatccacaattttaaaagaaaaggggggattggggggtacagtgcaggggaaagaatagtagacataatagcaacagacatacaaactaaag

SEQ ID NO: 11866 - DNA, 301 bp, Artificial Sequence
  Jak1.3_Rb1.1
  crRNA array
  misc_feature (148)..(157): n is a, c, g, or t
cttggctttatatatcttgtggaaaggacgaaacaccgtaatttctactaagtgtagatgcacagaacgccatggcatttaatttctactaagtgtagattctgacatgatcgggtaccttaatttctactaagtgtagatttttttnnnnnnnnnnaagcttggcgtggatccgatatcaactagatcttgagacaaatggcagtattcatccacaattttaaaagaaaaggggggattggggggtacagtgcaggggaaagaatagtagacataatagcaacagacatacaaactaaag

SEQ ID NO: 11867 - DNA, 301 bp, Artificial Sequence
  Jak1.3_Rb1.2
  crRNA array
  misc_feature (148)..(157): n is a, c, g, or t
cttggctttatatatcttgtggaaaggacgaaacaccgtaatttctactaagtgtagatgcacagaacgccatggcatttaatttctactaagtgtagatgtctctgcatgaaaacggagtaatttctactaagtgtagatttttttnnnnnnnnnnaagcttggcgtggatccgatatcaactagatcttgagacaaatggcagtattcatccacaattttaaaagaaaaggggggattggggggtacagtgcaggggaaagaatagtagacataatagcaacagacatacaaactaaag

SEQ ID NO: 11868 - DNA, 301 bp, Artificial Sequence
  Jak1.3_Rb1.3
  crRNA array
  misc_feature (148)..(157): n is a, c, g, or t
cttggctttatatatcttgtggaaaggacgaaacaccgtaatttctactaagtgtagatgcacagaacgccatggcatttaatttctactaagtgtagatagccaatctggtctaataactaatttctactaagtgtagatttttttnnnnnnnnnnaagcttggcgtggatccgatatcaactagatcttgagacaaatggcagtattcatccacaattttaaaagaaaaggggggattggggggtacagtgcaggggaaagaatagtagacataatagcaacagacatacaaactaaag

SEQ ID NO: 11869 - DNA, 301 bp, Artificial Sequence
  Jak1.3_Rb1.4
  crRNA array
  misc_feature (148)..(157): n is a, c, g, or t
cttggctttatatatcttgtggaaaggacgaaacaccgtaatttctactaagtgtagatgcacagaacgccatggcatttaatttctactaagtgtagattgtagctcagtaaaagtgaataatttctactaagtgtagatttttttnnnnnnnnnnaagcttggcgtggatccgatatcaactagatcttgagacaaatggcagtattcatccacaattttaaaagaaaaggggggattggggggtacagtgcaggggaaagaatagtagacataatagcaacagacatacaaactaaag

SEQ ID NO: 11870 - DNA, 301 bp, Artificial Sequence
  Jak1.4_Rb1.1
  crRNA array
  misc_feature (148)..(157): n is a, c, g, or t
cttggctttatatatcttgtggaaaggacgaaacaccgtaatttctactaagtgtagattgccgccactggatcccgagtaatttctactaagtgtagattctgacatgatcgggtaccttaatttctactaagtgtagatttttttnnnnnnnnnnaagcttggcgtggatccgatatcaactagatcttgagacaaatggcagtattcatccacaattttaaaagaaaaggggggattggggggtacagtgcaggggaaagaatagtagacataatagcaacagacatacaaactaaag

SEQ ID NO: 11871 - DNA, 301 bp, Artificial Sequence
  Jak1.4_Rb1.2
  crRNA array
  misc_feature (148)..(157): n is a, c, g, or t
cttggctttatatatcttgtggaaaggacgaaacaccgtaatttctactaagtgtagattgccgccactggatcccgagtaatttctactaagtgtagatgtctctgcatgaaaacggagtaatttctactaagtgtagatttttttnnnnnnnnnnaagcttggcgtggatccgatatcaactagatcttgagacaaatggcagtattcatccacaattttaaaagaaaaggggggattggggggtacagtgcaggggaaagaatagtagacataatagcaacagacatacaaactaaag

SEQ ID NO: 11872 - DNA, 301 bp, Artificial Sequence
  Jak1.4_Rb1.3
  crRNA array
  misc_feature (148)..(157): n is a, c, g, or t
cttggctttatatatcttgtggaaaggacgaaacaccgtaatttctactaagtgtagattgccgccactggatcccgagtaatttctactaagtgtagatagccaatctggtctaataactaatttctactaagtgtagatttttttnnnnnnnnnnaagcttggcgtggatccgatatcaactagatcttgagacaaatggcagtattcatccacaattttaaaagaaaaggggggattggggggtacagtgcaggggaaagaatagtagacataatagcaacagacatacaaactaaag

SEQ ID NO: 11873 - DNA, 301 bp, Artificial Sequence
  Jak1.4_Rb1.4
  crRNA array
  misc_feature (148)..(157): n is a, c, g, or t
cttggctttatatatcttgtggaaaggacgaaacaccgtaatttctactaagtgtagattgccgccactggatcccgagtaatttctactaagtgtagattgtagctcagtaaaagtgaataatttctactaagtgtagatttttttnnnnnnnnnnaagcttggcgtggatccgatatcaactagatcttgagacaaatggcagtattcatccacaattttaaaagaaaaggggggattggggggtacagtgcaggggaaagaatagtagacataatagcaacagacatacaaactaaag

SEQ ID NO: 11874 - DNA, 301 bp, Artificial Sequence
  Jak1.1_Kmt2c.1
  crRNA array
  misc_feature (148)..(157): n is a, c, g, or t
cttggctttatatatcttgtggaaaggacgaaacaccgtaatttctactaagtgtagatgagcgcaggccgccgcagcctaatttctactaagtgtagatactcgacctccacctccctataatttctactaagtgtagatttttttnnnnnnnnnnaagcttggcgtggatccgatatcaactagatcttgagacaaatggcagtattcatccacaattttaaaagaaaaggggggattggggggtacagtgcaggggaaagaatagtagacataatagcaacagacatacaaactaaag

SEQ ID NO: 11875 - DNA, 301 bp, Artificial Sequence
  Jak1.1_Kmt2c.2
  crRNA array
  misc_feature (148)..(157): n is a, c, g, or t
cttggctttatatatcttgtggaaaggacgaaacaccgtaatttctactaagtgtagatgagcgcaggccgccgcagcctaatttctactaagtgtagatcccaaagatcagcgtggacctaatttctactaagtgtagatttttttnnnnnnnnnnaagcttggcgtggatccgatatcaactagatcttgagacaaatggcagtattcatccacaattttaaaagaaaaggggggattggggggtacagtgcaggggaaagaatagtagacataatagcaacagacatacaaactaaag

SEQ ID NO: 11876 - DNA, 301 bp, Artificial Sequence
  Jak1.1_Kmt2c.3
  crRNA array
  misc_feature (148)..(157): n is a, c, g, or t
cttggctttatatatcttgtggaaaggacgaaacaccgtaatttctactaagtgtagatgagcgcaggccgccgcagcctaatttctactaagtgtagataaaagatccgaatcgatgcgtaatttctactaagtgtagatttttttnnnnnnnnnnaagcttggcgtggatccgatatcaactagatcttgagacaaatggcagtattcatccacaattttaaaagaaaaggggggattggggggtacagtgcaggggaaagaatagtagacataatagcaacagacatacaaactaaag

SEQ ID NO: 11877 - DNA, 301 bp, Artificial Sequence
  Jak1.1_Kmt2c.4
  crRNA array
  misc_feature (148)..(157): n is a, c, g, or t
cttggctttatatatcttgtggaaaggacgaaacaccgtaatttctactaagtgtagatgagcgcaggccgccgcagcctaatttctactaagtgtagatctgaggcacatggaagcgattaatttctactaagtgtagatttttttnnnnnnnnnnaagcttggcgtggatccgatatcaactagatcttgagacaaatggcagtattcatccacaattttaaaagaaaaggggggattggggggtacagtgcaggggaaagaatagtagacataatagcaacagacatacaaactaaag

SEQ ID NO: 11878 - DNA, 301 bp, Artificial Sequence
  Jak1.2_Kmt2c.1
  crRNA array
  misc_feature (148)..(157): n is a, c, g, or t
cttggctttatatatcttgtggaaaggacgaaacaccgtaatttctactaagtgtagatagggacactggacaaccgaataatttctactaagtgtagatactcgacctccacctccctataatttctactaagtgtagatttttttnnnnnnnnnnaagcttggcgtggatccgatatcaactagatcttgagacaaatggcagtattcatccacaattttaaaagaaaaggggggattggggggtacagtgcaggggaaagaatagtagacataatagcaacagacatacaaactaaag

SEQ ID NO: 11879 - DNA, 301 bp, Artificial Sequence
  Jak1.2_Kmt2c.2
  crRNA array
  misc_feature (148)..(157): n is a, c, g, or t
cttggctttatatatcttgtggaaaggacgaaacaccgtaatttctactaagtgtagatagggacactggacaaccgaataatttctactaagtgtagatcccaaagatcagcgtggacctaatttctactaagtgtagatttttttnnnnnnnnnnaagcttggcgtggatccgatatcaactagatcttgagacaaatggcagtattcatccacaattttaaaagaaaaggggggattggggggtacagtgcaggggaaagaatagtagacataatagcaacagacatacaaactaaag

SEQ ID NO: 11880 - DNA, 301 bp, Artificial Sequence
  Jak1.2_Kmt2c.3
  crRNA array
  misc_feature (148)..(157): n is a, c, g, or t
cttggctttatatatcttgtggaaaggacgaaacaccgtaatttctactaagtgtagatagggacactggacaaccgaataatttctactaagtgtagataaaagatccgaatcgatgcgtaatttctactaagtgtagatttttttnnnnnnnnnnaagcttggcgtggatccgatatcaactagatcttgagacaaatggcagtattcatccacaattttaaaagaaaaggggggattggggggtacagtgcaggggaaagaatagtagacataatagcaacagacatacaaactaaag

SEQ ID NO: 11881 - DNA, 301 bp, Artificial Sequence
  Jak1.2_Kmt2c.4
  crRNA array
  misc_feature (148)..(157): n is a, c, g, or t
cttggctttatatatcttgtggaaaggacgaaacaccgtaatttctactaagtgtagatagggacactggacaaccgaataatttctactaagtgtagatctgaggcacatggaagcgattaatttctactaagtgtagatttttttnnnnnnnnnnaagcttggcgtggatccgatatcaactagatcttgagacaaatggcagtattcatccacaattttaaaagaaaaggggggattggggggtacagtgcaggggaaagaatagtagacataatagcaacagacatacaaactaaag

SEQ ID NO: 11882 - DNA, 301 bp, Artificial Sequence
  Jak1.3_Kmt2c.1
  crRNA array
  misc_feature (148)..(157): n is a, c, g, or t
cttggctttatatatcttgtggaaaggacgaaacaccgtaatttctactaagtgtagatgcacagaacgccatggcatttaatttctactaagtgtagatactcgacctccacctccctataatttctactaagtgtagatttttttnnnnnnnnnnaagcttggcgtggatccgatatcaactagatcttgagacaaatggcagtattcatccacaattttaaaagaaaaggggggattggggggtacagtgcaggggaaagaatagtagacataatagcaacagacatacaaactaaag

SEQ ID NO: 11883 - DNA, 301 bp, Artificial Sequence
  Jak1.3_Kmt2c.2
  crRNA array
  misc_feature (148)..(157): n is a, c, g, or t
cttggctttatatatcttgtggaaaggacgaaacaccgtaatttctactaagtgtagatgcacagaacgccatggcatttaatttctactaagtgtagatcccaaagatcagcgtggacctaatttctactaagtgtagatttttttnnnnnnnnnnaagcttggcgtggatccgatatcaactagatcttgagacaaatggcagtattcatccacaattttaaaagaaaaggggggattggggggtacagtgcaggggaaagaatagtagacataatagcaacagacatacaaactaaag

SEQ ID NO: 11884 - DNA, 301 bp, Artificial Sequence
  Jak1.3_Kmt2c.3
  crRNA array
  misc_feature (148)..(157): n is a, c, g, or t
cttggctttatatatcttgtggaaaggacgaaacaccgtaatttctactaagtgtagatgcacagaacgccatggcatttaatttctactaagtgtagataaaagatccgaatcgatgcgtaatttctactaagtgtagatttttttnnnnnnnnnnaagcttggcgtggatccgatatcaactagatcttgagacaaatggcagtattcatccacaattttaaaagaaaaggggggattggggggtacagtgcaggggaaagaatagtagacataatagcaacagacatacaaactaaag

SEQ ID NO: 11885 - DNA, 301 bp, Artificial Sequence
  Jak1.3_Kmt2c.4
  crRNA array
  misc_feature (148)..(157): n is a, c, g, or t
cttggctttatatatcttgtggaaaggacgaaacaccgtaatttctactaagtgtagatgcacagaacgccatggcatttaatttctactaagtgtagatctgaggcacatggaagcgattaatttctactaagtgtagatttttttnnnnnnnnnnaagcttggcgtggatccgatatcaactagatcttgagacaaatggcagtattcatccacaattttaaaagaaaaggggggattggggggtacagtgcaggggaaagaatagtagacataatagcaacagacatacaaactaaag

SEQ ID NO: 11886 - DNA, 301 bp, Artificial Sequence
  Jak1.4_Kmt2c.1
  crRNA array
  misc_feature (148)..(157): n is a, c, g, or t
cttggctttatatatcttgtggaaaggacgaaacaccgtaatttctactaagtgtagattgccgccactggatcccgagtaatttctactaagtgtagatactcgacctccacctccctataatttctactaagtgtagatttttttnnnnnnnnnnaagcttggcgtggatccgatatcaactagatcttgagacaaatggcagtattcatccacaattttaaaagaaaaggggggattggggggtacagtgcaggggaaagaatagtagacataatagcaacagacatacaaactaaag

SEQ ID NO: 11887 - DNA, 301 bp, Artificial Sequence
  Jak1.4_Kmt2c.2
  crRNA array
  misc_feature (148)..(157): n is a, c, g, or t
cttggctttatatatcttgtggaaaggacgaaacaccgtaatttctactaagtgtagattgccgccactggatcccgagtaatttctactaagtgtagatcccaaagatcagcgtggacctaatttctactaagtgtagatttttttnnnnnnnnnnaagcttggcgtggatccgatatcaactagatcttgagacaaatggcagtattcatccacaattttaaaagaaaaggggggattggggggtacagtgcaggggaaagaatagtagacataatagcaacagacatacaaactaaag

SEQ ID NO: 11888 - DNA, 301 bp, Artificial Sequence
  Jak1.4_Kmt2c.3
  crRNA array
  misc_feature (148)..(157): n is a, c, g, or t
cttggctttatatatcttgtggaaaggacgaaacaccgtaatttctactaagtgtagattgccgccactggatcccgagtaatttctactaagtgtagataaaagatccgaatcgatgcgtaatttctactaagtgtagatttttttnnnnnnnnnnaagcttggcgtggatccgatatcaactagatcttgagacaaatggcagtattcatccacaattttaaaagaaaaggggggattggggggtacagtgcaggggaaagaatagtagacataatagcaacagacatacaaactaaag

SEQ ID NO: 11889 - DNA, 301 bp, Artificial Sequence
  Jak1.4_Kmt2c.4
  crRNA array
  misc_feature (148)..(157): n is a, c, g, or t
cttggctttatatatcttgtggaaaggacgaaacaccgtaatttctactaagtgtagattgccgccactggatcccgagtaatttctactaagtgtagatctgaggcacatggaagcgattaatttctactaagtgtagatttttttnnnnnnnnnnaagcttggcgtggatccgatatcaactagatcttgagacaaatggcagtattcatccacaattttaaaagaaaaggggggattggggggtacagtgcaggggaaagaatagtagacataatagcaacagacatacaaactaaag

SEQ ID NO: 11890 - DNA, 301 bp, Artificial Sequence
  Jak1.1_Pten.1
  crRNA array
  misc_feature (148)..(157): n is a, c, g, or t
cttggctttatatatcttgtggaaaggacgaaacaccgtaatttctactaagtgtagatgagcgcaggccgccgcagcctaatttctactaagtgtagataagcgtggtgcgtgacgcactaatttctactaagtgtagatttttttnnnnnnnnnnaagcttggcgtggatccgatatcaactagatcttgagacaaatggcagtattcatccacaattttaaaagaaaaggggggattggggggtacagtgcaggggaaagaatagtagacataatagcaacagacatacaaactaaag

SEQ ID NO: 11891 - DNA, 301 bp, Artificial Sequence
  Jak1.1_Pten.2
  crRNA array
  misc_feature (148)..(157): n is a, c, g, or t
cttggctttatatatcttgtggaaaggacgaaacaccgtaatttctactaagtgtagatgagcgcaggccgccgcagcctaatttctactaagtgtagattgtcaccagctgaagtggcttaatttctactaagtgtagatttttttnnnnnnnnnnaagcttggcgtggatccgatatcaactagatcttgagacaaatggcagtattcatccacaattttaaaagaaaaggggggattggggggtacagtgcaggggaaagaatagtagacataatagcaacagacatacaaactaaag

SEQ ID NO: 11892 - DNA, 301 bp, Artificial Sequence
  Jak1.1_Pten.3
  crRNA array
  misc_feature (148)..(157): n is a, c, g, or t
cttggctttatatatcttgtggaaaggacgaaacaccgtaatttctactaagtgtagatgagcgcaggccgccgcagcctaatttctactaagtgtagatggagtcaagaggctgatttttaatttctactaagtgtagatttttttnnnnnnnnnnaagcttggcgtggatccgatatcaactagatcttgagacaaatggcagtattcatccacaattttaaaagaaaaggggggattggggggtacagtgcaggggaaagaatagtagacataatagcaacagacatacaaactaaag

SEQ ID NO: 11893 - DNA, 301 bp, Artificial Sequence
  Jak1.1_Pten.4
  crRNA array
  misc_feature (148)..(157): n is a, c, g, or t
cttggctttatatatcttgtggaaaggacgaaacaccgtaatttctactaagtgtagatgagcgcaggccgccgcagcctaatttctactaagtgtagatctgtaagctaaaccactacataatttctactaagtgtagatttttttnnnnnnnnnnaagcttggcgtggatccgatatcaactagatcttgagacaaatggcagtattcatccacaattttaaaagaaaaggggggattggggggtacagtgcaggggaaagaatagtagacataatagcaacagacatacaaactaaag

SEQ ID NO: 11894 - DNA, 301 bp, Artificial Sequence
  Jak1.2_Pten.1
  crRNA array
  misc_feature (148)..(157): n is a, c, g, or t
cttggctttatatatcttgtggaaaggacgaaacaccgtaatttctactaagtgtagatagggacactggacaaccgaataatttctactaagtgtagataagcgtggtgcgtgacgcactaatttctactaagtgtagatttttttnnnnnnnnnnaagcttggcgtggatccgatatcaactagatcttgagacaaatggcagtattcatccacaattttaaaagaaaaggggggattggggggtacagtgcaggggaaagaatagtagacataatagcaacagacatacaaactaaag

SEQ ID NO: 11895 - DNA, 301 bp, Artificial Sequence
  Jak1.2_Pten.2
  crRNA array
  misc_feature (148)..(157): n is a, c, g, or t
cttggctttatatatcttgtggaaaggacgaaacaccgtaatttctactaagtgtagatagggacactggacaaccgaataatttctactaagtgtagattgtcaccagctgaagtggcttaatttctactaagtgtagatttttttnnnnnnnnnnaagcttggcgtggatccgatatcaactagatcttgagacaaatggcagtattcatccacaattttaaaagaaaaggggggattggggggtacagtgcaggggaaagaatagtagacataatagcaacagacatacaaactaaag

SEQ ID NO: 11896 - DNA, 301 bp, Artificial Sequence
  Jak1.2_Pten.3
  crRNA array
  misc_feature (148)..(157): n is a, c, g, or t
cttggctttatatatcttgtggaaaggacgaaacaccgtaatttctactaagtgtagatagggacactggacaaccgaataatttctactaagtgtagatggagtcaagaggctgatttttaatttctactaagtgtagatttttttnnnnnnnnnnaagcttggcgtggatccgatatcaactagatcttgagacaaatggcagtattcatccacaattttaaaagaaaaggggggattggggggtacagtgcaggggaaagaatagtagacataatagcaacagacatacaaactaaag

SEQ ID NO: 11897 - DNA, 301 bp, Artificial Sequence
  Jak1.2_Pten.4
  crRNA array
  misc_feature (148)..(157): n is a, c, g, or t
cttggctttatatatcttgtggaaaggacgaaacaccgtaatttctactaagtgtagatagggacactggacaaccgaataatttctactaagtgtagatctgtaagctaaaccactacataatttctactaagtgtagatttttttnnnnnnnnnnaagcttggcgtggatccgatatcaactagatcttgagacaaatggcagtattcatccacaattttaaaagaaaaggggggattggggggtacagtgcaggggaaagaatagtagacataatagcaacagacatacaaactaaag

SEQ ID NO: 11898 - DNA, 301 bp, Artificial Sequence
  Jak1.3_Pten.1
  crRNA array
  misc_feature (148)..(157): n is a, c, g, or t
cttggctttatatatcttgtggaaaggacgaaacaccgtaatttctactaagtgtagatgcacagaacgccatggcatttaatttctactaagtgtagataagcgtggtgcgtgacgcactaatttctactaagtgtagatttttttnnnnnnnnnnaagcttggcgtggatccgatatcaactagatcttgagacaaatggcagtattcatccacaattttaaaagaaaaggggggattggggggtacagtgcaggggaaagaatagtagacataatagcaacagacatacaaactaaag

SEQ ID NO: 11899 - DNA, 301 bp, Artificial Sequence
  Jak1.3_Pten.2
  crRNA array
  misc_feature (148)..(157): n is a, c, g, or t
cttggctttatatatcttgtggaaaggacgaaacaccgtaatttctactaagtgtagatgcacagaacgccatggcatttaatttctactaagtgtagattgtcaccagctgaagtggcttaatttctactaagtgtagatttttttnnnnnnnnnnaagcttggcgtggatccgatatcaactagatcttgagacaaatggcagtattcatccacaattttaaaagaaaaggggggattggggggtacagtgcaggggaaagaatagtagacataatagcaacagacatacaaactaaag

SEQ ID NO: 11900 - DNA, 301 bp, Artificial Sequence
  Jak1.3_Pten.3
  crRNA array
  misc_feature (148)..(157): n is a, c, g, or t
cttggctttatatatcttgtggaaaggacgaaacaccgtaatttctactaagtgtagatgcacagaacgccatggcatttaatttctactaagtgtagatggagtcaagaggctgatttttaatttctactaagtgtagatttttttnnnnnnnnnnaagcttggcgtggatccgatatcaactagatcttgagacaaatggcagtattcatccacaattttaaaagaaaaggggggattggggggtacagtgcaggggaaagaatagtagacataatagcaacagacatacaaactaaag

SEQ ID NO: 11901 - DNA, 301 bp, Artificial Sequence
  Jak1.3_Pten.4
  crRNA array
  misc_feature (148)..(157): n is a, c, g, or t
cttggctttatatatcttgtggaaaggacgaaacaccgtaatttctactaagtgtagatgcacagaacgccatggcatttaatttctactaagtgtagatctgtaagctaaaccactacataatttctactaagtgtagatttttttnnnnnnnnnnaagcttggcgtggatccgatatcaactagatcttgagacaaatggcagtattcatccacaattttaaaagaaaaggggggattggggggtacagtgcaggggaaagaatagtagacataatagcaacagacatacaaactaaag

SEQ ID NO: 11902 - DNA, 301 bp, Artificial Sequence
  Jak1.4_Pten.1
  crRNA array
  misc_feature (148)..(157): n is a, c, g, or t
cttggctttatatatcttgtggaaaggacgaaacaccgtaatttctactaagtgtagattgccgccactggatcccgagtaatttctactaagtgtagataagcgtggtgcgtgacgcactaatttctactaagtgtagatttttttnnnnnnnnnnaagcttggcgtggatccgatatcaactagatcttgagacaaatggcagtattcatccacaattttaaaagaaaaggggggattggggggtacagtgcaggggaaagaatagtagacataatagcaacagacatacaaactaaag

SEQ ID NO: 11903 - DNA, 301 bp, Artificial Sequence
  Jak1.4_Pten.2
  crRNA array
  misc_feature (148)..(157): n is a, c, g, or t
cttggctttatatatcttgtggaaaggacgaaacaccgtaatttctactaagtgtagattgccgccactggatcccgagtaatttctactaagtgtagattgtcaccagctgaagtggcttaatttctactaagtgtagatttttttnnnnnnnnnnaagcttggcgtggatccgatatcaactagatcttgagacaaatggcagtattcatccacaattttaaaagaaaaggggggattggggggtacagtgcaggggaaagaatagtagacataatagcaacagacatacaaactaaag

SEQ ID NO: 11904 - DNA, 301 bp, Artificial Sequence
  Jak1.4_Pten.3
  crRNA array
  misc_feature (148)..(157): n is a, c, g, or t
cttggctttatatatcttgtggaaaggacgaaacaccgtaatttctactaagtgtagattgccgccactggatcccgagtaatttctactaagtgtagatggagtcaagaggctgatttttaatttctactaagtgtagatttttttnnnnnnnnnnaagcttggcgtggatccgatatcaactagatcttgagacaaatggcagtattcatccacaattttaaaagaaaaggggggattggggggtacagtgcaggggaaagaatagtagacataatagcaacagacatacaaactaaag

SEQ ID NO: 11905 - DNA, 301 bp, Artificial Sequence
  Jak1.4_Pten.4
  crRNA array
  misc_feature (148)..(157): n is a, c, g, or t
cttggctttatatatcttgtggaaaggacgaaacaccgtaatttctactaagtgtagattgccgccactggatcccgagtaatttctactaagtgtagatctgtaagctaaaccactacataatttctactaagtgtagatttttttnnnnnnnnnnaagcttggcgtggatccgatatcaactagatcttgagacaaatggcagtattcatccacaattttaaaagaaaaggggggattggggggtacagtgcaggggaaagaatagtagacataatagcaacagacatacaaactaaag

SEQ ID NO: 11906 - DNA, 301 bp, Artificial Sequence
  Jak1.1_Atm.1
  crRNA array
  misc_feature (148)..(157): n is a, c, g, or t
cttggctttatatatcttgtggaaaggacgaaacaccgtaatttctactaagtgtagatgagcgcaggccgccgcagcctaatttctactaagtgtagatgagaaagtctccgaatcgtttaatttctactaagtgtagatttttttnnnnnnnnnnaagcttggcgtggatccgatatcaactagatcttgagacaaatggcagtattcatccacaattttaaaagaaaaggggggattggggggtacagtgcaggggaaagaatagtagacataatagcaacagacatacaaactaaag

SEQ ID NO: 11907 - DNA, 301 bp, Artificial Sequence
  Jak1.1_Atm.2
  crRNA array
  misc_feature (148)..(157): n is a, c, g, or t
cttggctttatatatcttgtggaaaggacgaaacaccgtaatttctactaagtgtagatgagcgcaggccgccgcagcctaatttctactaagtgtagatcctacgagggcacgagagactaatttctactaagtgtagatttttttnnnnnnnnnnaagcttggcgtggatccgatatcaactagatcttgagacaaatggcagtattcatccacaattttaaaagaaaaggggggattggggggtacagtgcaggggaaagaatagtagacataatagcaacagacatacaaactaaag

SEQ ID NO: 11908 - DNA, 301 bp, Artificial Sequence
  Jak1.1_Atm.3
  crRNA array
  misc_feature (148)..(157): n is a, c, g, or t
cttggctttatatatcttgtggaaaggacgaaacaccgtaatttctactaagtgtagatgagcgcaggccgccgcagcctaatttctactaagtgtagattgaaagtctccgatatgccataatttctactaagtgtagatttttttnnnnnnnnnnaagcttggcgtggatccgatatcaactagatcttgagacaaatggcagtattcatccacaattttaaaagaaaaggggggattggggggtacagtgcaggggaaagaatagtagacataatagcaacagacatacaaactaaag

SEQ ID NO: 11909 - DNA, 301 bp, Artificial Sequence
  Jak1.1_Atm.4
  crRNA array
  misc_feature (148)..(157): n is a, c, g, or t
cttggctttatatatcttgtggaaaggacgaaacaccgtaatttctactaagtgtagatgagcgcaggccgccgcagcctaatttctactaagtgtagatggtggtgatcagtcaagtagtaatttctactaagtgtagatttttttnnnnnnnnnnaagcttggcgtggatccgatatcaactagatcttgagacaaatggcagtattcatccacaattttaaaagaaaaggggggattggggggtacagtgcaggggaaagaatagtagacataatagcaacagacatacaaactaaag

SEQ ID NO: 11910 - DNA, 301 bp, Artificial Sequence
  Jak1.2_Atm.1
  crRNA array
  misc_feature (148)..(157): n is a, c, g, or t
cttggctttatatatcttgtggaaaggacgaaacaccgtaatttctactaagtgtagatagggacactggacaaccgaataatttctactaagtgtagatgagaaagtctccgaatcgtttaatttctactaagtgtagatttttttnnnnnnnnnnaagcttggcgtggatccgatatcaactagatcttgagacaaatggcagtattcatccacaattttaaaagaaaaggggggattggggggtacagtgcaggggaaagaatagtagacataatagcaacagacatacaaactaaag

SEQ ID NO: 11911 - DNA, 301 bp, Artificial Sequence
  Jak1.2_Atm.2
  crRNA array
  misc_feature (148)..(157): n is a, c, g, or t
cttggctttatatatcttgtggaaaggacgaaacaccgtaatttctactaagtgtagatagggacactggacaaccgaataatttctactaagtgtagatcctacgagggcacgagagactaatttctactaagtgtagatttttttnnnnnnnnnnaagcttggcgtggatccgatatcaactagatcttgagacaaatggcagtattcatccacaattttaaaagaaaaggggggattggggggtacagtgcaggggaaagaatagtagacataatagcaacagacatacaaactaaag

SEQ ID NO: 11912 - DNA, 301 bp, Artificial Sequence
  Jak1.2_Atm.3
  crRNA array
  misc_feature (148)..(157): n is a, c, g, or t
cttggctttatatatcttgtggaaaggacgaaacaccgtaatttctactaagtgtagatagggacactggacaaccgaataatttctactaagtgtagattgaaagtctccgatatgccataatttctactaagtgtagatttttttnnnnnnnnnnaagcttggcgtggatccgatatcaactagatcttgagacaaatggcagtattcatccacaattttaaaagaaaaggggggattggggggtacagtgcaggggaaagaatagtagacataatagcaacagacatacaaactaaag

SEQ ID NO: 11913 - DNA, 301 bp, Artificial Sequence
  Jak1.2_Atm.4
  crRNA array
  misc_feature (148)..(157): n is a, c, g, or t
cttggctttatatatcttgtggaaaggacgaaacaccgtaatttctactaagtgtagatagggacactggacaaccgaataatttctactaagtgtagatggtggtgatcagtcaagtagtaatttctactaagtgtagatttttttnnnnnnnnnnaagcttggcgtggatccgatatcaactagatcttgagacaaatggcagtattcatccacaattttaaaagaaaaggggggattggggggtacagtgcaggggaaagaatagtagacataatagcaacagacatacaaactaaag

SEQ ID NO: 11914 - DNA, 301 bp, Artificial Sequence
  Jak1.3_Atm.1
  crRNA array
  misc_feature (148)..(157): n is a, c, g, or t
cttggctttatatatcttgtggaaaggacgaaacaccgtaatttctactaagtgtagatgcacagaacgccatggcatttaatttctactaagtgtagatgagaaagtctccgaatcgtttaatttctactaagtgtagatttttttnnnnnnnnnnaagcttggcgtggatccgatatcaactagatcttgagacaaatggcagtattcatccacaattttaaaagaaaaggggggattggggggtacagtgcaggggaaagaatagtagacataatagcaacagacatacaaactaaag

SEQ ID NO: 11915 - DNA, 301 bp, Artificial Sequence
  Jak1.3_Atm.2
  crRNA array
  misc_feature (148)..(157): n is a, c, g, or t
cttggctttatatatcttgtggaaaggacgaaacaccgtaatttctactaagtgtagatgcacagaacgccatggcatttaatttctactaagtgtagatcctacgagggcacgagagactaatttctactaagtgtagatttttttnnnnnnnnnnaagcttggcgtggatccgatatcaactagatcttgagacaaatggcagtattcatccacaattttaaaagaaaaggggggattggggggtacagtgcaggggaaagaatagtagacataatagcaacagacatacaaactaaag

SEQ ID NO: 11916 - DNA, 301 bp, Artificial Sequence
  Jak1.3_Atm.3
  crRNA array
  misc_feature (148)..(157): n is a, c, g, or t
cttggctttatatatcttgtggaaaggacgaaacaccgtaatttctactaagtgtagatgcacagaacgccatggcatttaatttctactaagtgtagattgaaagtctccgatatgccataatttctactaagtgtagatttttttnnnnnnnnnnaagcttggcgtggatccgatatcaactagatcttgagacaaatggcagtattcatccacaattttaaaagaaaaggggggattggggggtacagtgcaggggaaagaatagtagacataatagcaacagacatacaaactaaag

SEQ ID NO: 11917 - DNA, 301 bp, Artificial Sequence
  Jak1.3_Atm.4
  crRNA array
  misc_feature (148)..(157): n is a, c, g, or t
cttggctttatatatcttgtggaaaggacgaaacaccgtaatttctactaagtgtagatgcacagaacgccatggcatttaatttctactaagtgtagatggtggtgatcagtcaagtagtaatttctactaagtgtagatttttttnnnnnnnnnnaagcttggcgtggatccgatatcaactagatcttgagacaaatggcagtattcatccacaattttaaaagaaaaggggggattggggggtacagtgcaggggaaagaatagtagacataatagcaacagacatacaaactaaag

SEQ ID NO: 11918 - DNA, 301 bp, Artificial Sequence
  Jak1.4_Atm.1
  crRNA array
  misc_feature (148)..(157): n is a, c, g, or t
cttggctttatatatcttgtggaaaggacgaaacaccgtaatttctactaagtgtagattgccgccactggatcccgagtaatttctactaagtgtagatgagaaagtctccgaatcgtttaatttctactaagtgtagatttttttnnnnnnnnnnaagcttggcgtggatccgatatcaactagatcttgagacaaatggcagtattcatccacaattttaaaagaaaaggggggattggggggtacagtgcaggggaaagaatagtagacataatagcaacagacatacaaactaaag

SEQ ID NO: 11919 - DNA, 301 bp, Artificial Sequence
  Jak1.4_Atm.2
  crRNA array
  misc_feature (148)..(157): n is a, c, g, or t
cttggctttatatatcttgtggaaaggacgaaacaccgtaatttctactaagtgtagattgccgccactggatcccgagtaatttctactaagtgtagatcctacgagggcacgagagactaatttctactaagtgtagatttttttnnnnnnnnnnaagcttggcgtggatccgatatcaactagatcttgagacaaatggcagtattcatccacaattttaaaagaaaaggggggattggggggtacagtgcaggggaaagaatagtagacataatagcaacagacatacaaactaaag

SEQ ID NO: 11920 - DNA, 301 bp, Artificial Sequence
  Jak1.4_Atm.3
  crRNA array
  misc_feature (148)..(157): n is a, c, g, or t
cttggctttatatatcttgtggaaaggacgaaacaccgtaatttctactaagtgtagattgccgccactggatcccgagtaatttctactaagtgtagattgaaagtctccgatatgccataatttctactaagtgtagatttttttnnnnnnnnnnaagcttggcgtggatccgatatcaactagatcttgagacaaatggcagtattcatccacaattttaaaagaaaaggggggattggggggtacagtgcaggggaaagaatagtagacataatagcaacagacatacaaactaaag

SEQ ID NO: 11921 - DNA, 301 bp, Artificial Sequence
  Jak1.4_Atm.4
  crRNA array
  misc_feature (148)..(157): n is a, c, g, or t
cttggctttatatatcttgtggaaaggacgaaacaccgtaatttctactaagtgtagattgccgccactggatcccgagtaatttctactaagtgtagatggtggtgatcagtcaagtagtaatttctactaagtgtagatttttttnnnnnnnnnnaagcttggcgtggatccgatatcaactagatcttgagacaaatggcagtattcatccacaattttaaaagaaaaggggggattggggggtacagtgcaggggaaagaatagtagacataatagcaacagacatacaaactaaag

SEQ ID NO: 11922 - DNA, 301 bp, Artificial Sequence
  Chd1.1_Pole.1
  crRNA array
  misc_feature (148)..(157): n is a, c, g, or t
cttggctttatatatcttgtggaaaggacgaaacaccgtaatttctactaagtgtagatcgccccactctgcaatccattaatttctactaagtgtagatgcgcgctctccacgtgctcttaatttctactaagtgtagatttttttnnnnnnnnnnaagcttggcgtggatccgatatcaactagatcttgagacaaatggcagtattcatccacaattttaaaagaaaaggggggattggggggtacagtgcaggggaaagaatagtagacataatagcaacagacatacaaactaaag

SEQ ID NO: 11923 - DNA, 301 bp, Artificial Sequence
  Chd1.1_Pole.2
  crRNA array
  misc_feature (148)..(157): n is a, c, g, or t
cttggctttatatatcttgtggaaaggacgaaacaccgtaatttctactaagtgtagatcgccccactctgcaatccattaatttctactaagtgtagatacatcgagacgaccaaactgtaatttctactaagtgtagatttttttnnnnnnnnnnaagcttggcgtggatccgatatcaactagatcttgagacaaatggcagtattcatccacaattttaaaagaaaaggggggattggggggtacagtgcaggggaaagaatagtagacataatagcaacagacatacaaactaaag

SEQ ID NO: 11924 - DNA, 301 bp, Artificial Sequence
  Chd1.1_Pole.3
  crRNA array
  misc_feature (148)..(157): n is a, c, g, or t
cttggctttatatatcttgtggaaaggacgaaacaccgtaatttctactaagtgtagatcgccccactctgcaatccattaatttctactaagtgtagatctgctgcaacgagtcgagaataatttctactaagtgtagatttttttnnnnnnnnnnaagcttggcgtggatccgatatcaactagatcttgagacaaatggcagtattcatccacaattttaaaagaaaaggggggattggggggtacagtgcaggggaaagaatagtagacataatagcaacagacatacaaactaaag

SEQ ID NO: 11925 - DNA, 301 bp, Artificial Sequence
  Chd1.1_Pole.4
  crRNA array
  misc_feature (148)..(157): n is a, c, g, or t
cttggctttatatatcttgtggaaaggacgaaacaccgtaatttctactaagtgtagatcgccccactctgcaatccattaatttctactaagtgtagatgggagatgatatagcggcagtaatttctactaagtgtagatttttttnnnnnnnnnnaagcttggcgtggatccgatatcaactagatcttgagacaaatggcagtattcatccacaattttaaaagaaaaggggggattggggggtacagtgcaggggaaagaatagtagacataatagcaacagacatacaaactaaag

SEQ ID NO: 11926 - DNA, 301 bp, Artificial Sequence
  Chd1.2_Pole.1
  crRNA array
  misc_feature (148)..(157): n is a, c, g, or t
cttggctttatatatcttgtggaaaggacgaaacaccgtaatttctactaagtgtagattgcagccggcgtctggcagctaatttctactaagtgtagatgcgcgctctccacgtgctcttaatttctactaagtgtagatttttttnnnnnnnnnnaagcttggcgtggatccgatatcaactagatcttgagacaaatggcagtattcatccacaattttaaaagaaaaggggggattggggggtacagtgcaggggaaagaatagtagacataatagcaacagacatacaaactaaag

SEQ ID NO: 11927 - DNA, 301 bp, Artificial Sequence
  Chd1.2_Pole.2
  crRNA array
  misc_feature (148)..(157): n is a, c, g, or t
cttggctttatatatcttgtggaaaggacgaaacaccgtaatttctactaagtgtagattgcagccggcgtctggcagctaatttctactaagtgtagatacatcgagacgaccaaactgtaatttctactaagtgtagatttttttnnnnnnnnnnaagcttggcgtggatccgatatcaactagatcttgagacaaatggcagtattcatccacaattttaaaagaaaaggggggattggggggtacagtgcaggggaaagaatagtagacataatagcaacagacatacaaactaaag

SEQ ID NO: 11928 - DNA, 301 bp, Artificial Sequence
  Chd1.2_Pole.3
  crRNA array
  misc_feature (148)..(157): n is a, c, g, or t
cttggctttatatatcttgtggaaaggacgaaacaccgtaatttctactaagtgtagattgcagccggcgtctggcagctaatttctactaagtgtagatctgctgcaacgagtcgagaataatttctactaagtgtagatttttttnnnnnnnnnnaagcttggcgtggatccgatatcaactagatcttgagacaaatggcagtattcatccacaattttaaaagaaaaggggggattggggggtacagtgcaggggaaagaatagtagacataatagcaacagacatacaaactaaag

SEQ ID NO: 11929 - DNA, 301 bp, Artificial Sequence
  Chd1.2_Pole.4
  crRNA array
  misc_feature (148)..(157): n is a, c, g, or t
cttggctttatatatcttgtggaaaggacgaaacaccgtaatttctactaagtgtagattgcagccggcgtctggcagctaatttctactaagtgtagatgggagatgatatagcggcagtaatttctactaagtgtagatttttttnnnnnnnnnnaagcttggcgtggatccgatatcaactagatcttgagacaaatggcagtattcatccacaattttaaaagaaaaggggggattggggggtacagtgcaggggaaagaatagtagacataatagcaacagacatacaaactaaag

SEQ ID NO: 11930 - DNA, 301 bp, Artificial Sequence
  Chd1.3_Pole.1
  crRNA array
  misc_feature (148)..(157): n is a, c, g, or t
cttggctttatatatcttgtggaaaggacgaaacaccgtaatttctactaagtgtagatatcagcaagtatgcaactattaatttctactaagtgtagatgcgcgctctccacgtgctcttaatttctactaagtgtagatttttttnnnnnnnnnnaagcttggcgtggatccgatatcaactagatcttgagacaaatggcagtattcatccacaattttaaaagaaaaggggggattggggggtacagtgcaggggaaagaatagtagacataatagcaacagacatacaaactaaag

SEQ ID NO: 11931 - DNA, 301 bp, Artificial Sequence
  Chd1.3_Pole.2
  crRNA array
  misc_feature (148)..(157): n is a, c, g, or t
cttggctttatatatcttgtggaaaggacgaaacaccgtaatttctactaagtgtagatatcagcaagtatgcaactattaatttctactaagtgtagatacatcgagacgaccaaactgtaatttctactaagtgtagatttttttnnnnnnnnnnaagcttggcgtggatccgatatcaactagatcttgagacaaatggcagtattcatccacaattttaaaagaaaaggggggattggggggtacagtgcaggggaaagaatagtagacataatagcaacagacatacaaactaaag

SEQ ID NO: 11932 - DNA, 301 bp, Artificial Sequence
  Chd1.3_Pole.3
  crRNA array
  misc_feature (148)..(157): n is a, c, g, or t
cttggctttatatatcttgtggaaaggacgaaacaccgtaatttctactaagtgtagatatcagcaagtatgcaactattaatttctactaagtgtagatctgctgcaacgagtcgagaataatttctactaagtgtagatttttttnnnnnnnnnnaagcttggcgtggatccgatatcaactagatcttgagacaaatggcagtattcatccacaattttaaaagaaaaggggggattggggggtacagtgcaggggaaagaatagtagacataatagcaacagacatacaaactaaag

SEQ ID NO: 11933 - DNA, 301 bp, Artificial Sequence
  Chd1.3_Pole.4
  crRNA array
  misc_feature (148)..(157): n is a, c, g, or t
cttggctttatatatcttgtggaaaggacgaaacaccgtaatttctactaagtgtagatatcagcaagtatgcaactattaatttctactaagtgtagatgggagatgatatagcggcagtaatttctactaagtgtagatttttttnnnnnnnnnnaagcttggcgtggatccgatatcaactagatcttgagacaaatggcagtattcatccacaattttaaaagaaaaggggggattggggggtacagtgcaggggaaagaatagtagacataatagcaacagacatacaaactaaag

SEQ ID NO: 11934 - DNA, 301 bp, Artificial Sequence
  Chd1.4_Pole.1
  crRNA array
  misc_feature (148)..(157): n is a, c, g, or t
cttggctttatatatcttgtggaaaggacgaaacaccgtaatttctactaagtgtagataaatggcggataactcctcttaatttctactaagtgtagatgcgcgctctccacgtgctcttaatttctactaagtgtagatttttttnnnnnnnnnnaagcttggcgtggatccgatatcaactagatcttgagacaaatggcagtattcatccacaattttaaaagaaaaggggggattggggggtacagtgcaggggaaagaatagtagacataatagcaacagacatacaaactaaag

SEQ ID NO: 11935 - DNA, 301 bp, Artificial Sequence
  Chd1.4_Pole.2
  crRNA array
  misc_feature (148)..(157): n is a, c, g, or t
cttggctttatatatcttgtggaaaggacgaaacaccgtaatttctactaagtgtagataaatggcggataactcctcttaatttctactaagtgtagatacatcgagacgaccaaactgtaatttctactaagtgtagatttttttnnnnnnnnnnaagcttggcgtggatccgatatcaactagatcttgagacaaatggcagtattcatccacaattttaaaagaaaaggggggattggggggtacagtgcaggggaaagaatagtagacataatagcaacagacatacaaactaaag

SEQ ID NO: 11936 - DNA, 301 bp, Artificial Sequence
  Chd1.4_Pole.3
  crRNA array
  misc_feature (148)..(157): n is a, c, g, or t
cttggctttatatatcttgtggaaaggacgaaacaccgtaatttctactaagtgtagataaatggcggataactcctcttaatttctactaagtgtagatctgctgcaacgagtcgagaataatttctactaagtgtagatttttttnnnnnnnnnnaagcttggcgtggatccgatatcaactagatcttgagacaaatggcagtattcatccacaattttaaaagaaaaggggggattggggggtacagtgcaggggaaagaatagtagacataatagcaacagacatacaaactaaag

SEQ ID NO: 11937 - DNA, 301 bp, Artificial Sequence
  Chd1.4_Pole.4
  crRNA array
  misc_feature (148)..(157): n is a, c, g, or t
cttggctttatatatcttgtggaaaggacgaaacaccgtaatttctactaagtgtagataaatggcggataactcctcttaatttctactaagtgtagatgggagatgatatagcggcagtaatttctactaagtgtagatttttttnnnnnnnnnnaagcttggcgtggatccgatatcaactagatcttgagacaaatggcagtattcatccacaattttaaaagaaaaggggggattggggggtacagtgcaggggaaagaatagtagacataatagcaacagacatacaaactaaag

SEQ ID NO: 11938 - DNA, 301 bp, Artificial Sequence
  Chd1.1_Notch1.1
  crRNA array
  misc_feature (148)..(157): n is a, c, g, or t
cttggctttatatatcttgtggaaaggacgaaacaccgtaatttctactaagtgtagatcgccccactctgcaatccattaatttctactaagtgtagattgggccaacgatgccaggactaatttctactaagtgtagatttttttnnnnnnnnnnaagcttggcgtggatccgatatcaactagatcttgagacaaatggcagtattcatccacaattttaaaagaaaaggggggattggggggtacagtgcaggggaaagaatagtagacataatagcaacagacatacaaactaaag

SEQ ID NO: 11939 - DNA, 301 bp, Artificial Sequence
  Chd1.1_Notch1.2
  crRNA array
  misc_feature (148)..(157): n is a, c, g, or t
cttggctttatatatcttgtggaaaggacgaaacaccgtaatttctactaagtgtagatcgccccactctgcaatccattaatttctactaagtgtagatgtcgccccagcatcctgaagtaatttctactaagtgtagatttttttnnnnnnnnnnaagcttggcgtggatccgatatcaactagatcttgagacaaatggcagtattcatccacaattttaaaagaaaaggggggattggggggtacagtgcaggggaaagaatagtagacataatagcaacagacatacaaactaaag

SEQ ID NO: 11940 - DNA, 301 bp, Artificial Sequence
  Chd1.1_Notch1.3
  crRNA array
  misc_feature (148)..(157): n is a, c, g, or t
cttggctttatatatcttgtggaaaggacgaaacaccgtaatttctactaagtgtagatcgccccactctgcaatccattaatttctactaagtgtagatagccacccccgccacgcctctaatttctactaagtgtagatttttttnnnnnnnnnnaagcttggcgtggatccgatatcaactagatcttgagacaaatggcagtattcatccacaattttaaaagaaaaggggggattggggggtacagtgcaggggaaagaatagtagacataatagcaacagacatacaaactaaag

SEQ ID NO: 11941 - DNA, 301 bp, Artificial Sequence
  Chd1.1_Notch1.4
  crRNA array
  misc_feature (148)..(157): n is a, c, g, or t
cttggctttatatatcttgtggaaaggacgaaacaccgtaatttctactaagtgtagatcgccccactctgcaatccattaatttctactaagtgtagataaagtgtcagaggccagcaataatttctactaagtgtagatttttttnnnnnnnnnnaagcttggcgtggatccgatatcaactagatcttgagacaaatggcagtattcatccacaattttaaaagaaaaggggggattggggggtacagtgcaggggaaagaatagtagacataatagcaacagacatacaaactaaag

SEQ ID NO: 11942 - DNA, 301 bp, Artificial Sequence
  Chd1.2_Notch1.1
  crRNA array
  misc_feature (148)..(157): n is a, c, g, or t
cttggctttatatatcttgtggaaaggacgaaacaccgtaatttctactaagtgtagattgcagccggcgtctggcagctaatttctactaagtgtagattgggccaacgatgccaggactaatttctactaagtgtagatttttttnnnnnnnnnnaagcttggcgtggatccgatatcaactagatcttgagacaaatggcagtattcatccacaattttaaaagaaaaggggggattggggggtacagtgcaggggaaagaatagtagacataatagcaacagacatacaaactaaag

SEQ ID NO: 11943 - DNA, 301 bp, Artificial Sequence
  Chd1.2_Notch1.2
  crRNA array
  misc_feature (148)..(157): n is a, c, g, or t
cttggctttatatatcttgtggaaaggacgaaacaccgtaatttctactaagtgtagattgcagccggcgtctggcagctaatttctactaagtgtagatgtcgccccagcatcctgaagtaatttctactaagtgtagatttttttnnnnnnnnnnaagcttggcgtggatccgatatcaactagatcttgagacaaatggcagtattcatccacaattttaaaagaaaaggggggattggggggtacagtgcaggggaaagaatagtagacataatagcaacagacatacaaactaaag

SEQ ID NO: 11944 - DNA, 301 bp, Artificial Sequence
  Chd1.2_Notch1.3
  crRNA array
  misc_feature (148)..(157): n is a, c, g, or t
cttggctttatatatcttgtggaaaggacgaaacaccgtaatttctactaagtgtagattgcagccggcgtctggcagctaatttctactaagtgtagatagccacccccgccacgcctctaatttctactaagtgtagatttttttnnnnnnnnnnaagcttggcgtggatccgatatcaactagatcttgagacaaatggcagtattcatccacaattttaaaagaaaaggggggattggggggtacagtgcaggggaaagaatagtagacataatagcaacagacatacaaactaaag

SEQ ID NO: 11945 - DNA, 301 bp, Artificial Sequence
  Chd1.2_Notch1.4
  crRNA array
  misc_feature (148)..(157): n is a, c, g, or t
cttggctttatatatcttgtggaaaggacgaaacaccgtaatttctactaagtgtagattgcagccggcgtctggcagctaatttctactaagtgtagataaagtgtcagaggccagcaataatttctactaagtgtagatttttttnnnnnnnnnnaagcttggcgtggatccgatatcaactagatcttgagacaaatggcagtattcatccacaattttaaaagaaaaggggggattggggggtacagtgcaggggaaagaatagtagacataatagcaacagacatacaaactaaag

SEQ ID NO: 11946 - DNA, 301 bp, Artificial Sequence
  Chd1.3_Notch1.1
  crRNA array
  misc_feature (148)..(157): n is a, c, g, or t
cttggctttatatatcttgtggaaaggacgaaacaccgtaatttctactaagtgtagatatcagcaagtatgcaactattaatttctactaagtgtagattgggccaacgatgccaggactaatttctactaagtgtagatttttttnnnnnnnnnnaagcttggcgtggatccgatatcaactagatcttgagacaaatggcagtattcatccacaattttaaaagaaaaggggggattggggggtacagtgcaggggaaagaatagtagacataatagcaacagacatacaaactaaag

SEQ ID NO: 11947 - DNA, 301 bp, Artificial Sequence
  Chd1.3_Notch1.2
  crRNA array
  misc_feature (148)..(157): n is a, c, g, or t
cttggctttatatatcttgtggaaaggacgaaacaccgtaatttctactaagtgtagatatcagcaagtatgcaactattaatttctactaagtgtagatgtcgccccagcatcctgaagtaatttctactaagtgtagatttttttnnnnnnnnnnaagcttggcgtggatccgatatcaactagatcttgagacaaatggcagtattcatccacaattttaaaagaaaaggggggattggggggtacagtgcaggggaaagaatagtagacataatagcaacagacatacaaactaaag

SEQ ID NO: 11948 - DNA, 301 bp, Artificial Sequence
  Chd1.3_Notch1.3
  crRNA array
  misc_feature (148)..(157): n is a, c, g, or t
cttggctttatatatcttgtggaaaggacgaaacaccgtaatttctactaagtgtagatatcagcaagtatgcaactattaatttctactaagtgtagatagccacccccgccacgcctctaatttctactaagtgtagatttttttnnnnnnnnnnaagcttggcgtggatccgatatcaactagatcttgagacaaatggcagtattcatccacaattttaaaagaaaaggggggattggggggtacagtgcaggggaaagaatagtagacataatagcaacagacatacaaactaaag

SEQ ID NO: 11949 - DNA, 301 bp, Artificial Sequence
  Chd1.3_Notch1.4
  crRNA array
  misc_feature (148)..(157): n is a, c, g, or t
cttggctttatatatcttgtggaaaggacgaaacaccgtaatttctactaagtgtagatatcagcaagtatgcaactattaatttctactaagtgtagataaagtgtcagaggccagcaataatttctactaagtgtagatttttttnnnnnnnnnnaagcttggcgtggatccgatatcaactagatcttgagacaaatggcagtattcatccacaattttaaaagaaaaggggggattggggggtacagtgcaggggaaagaatagtagacataatagcaacagacatacaaactaaag

SEQ ID NO: 11950 - DNA, 301 bp, Artificial Sequence
  Chd1.4_Notch1.1
  crRNA array
  misc_feature (148)..(157): n is a, c, g, or t
cttggctttatatatcttgtggaaaggacgaaacaccgtaatttctactaagtgtagataaatggcggataactcctcttaatttctactaagtgtagattgggccaacgatgccaggactaatttctactaagtgtagatttttttnnnnnnnnnnaagcttggcgtggatccgatatcaactagatcttgagacaaatggcagtattcatccacaattttaaaagaaaaggggggattggggggtacagtgcaggggaaagaatagtagacataatagcaacagacatacaaactaaag

SEQ ID NO: 11951 - DNA, 301 bp, Artificial Sequence
  Chd1.4_Notch1.2
  crRNA array
  misc_feature (148)..(157): n is a, c, g, or t
cttggctttatatatcttgtggaaaggacgaaacaccgtaatttctactaagtgtagataaatggcggataactcctcttaatttctactaagtgtagatgtcgccccagcatcctgaagtaatttctactaagtgtagatttttttnnnnnnnnnnaagcttggcgtggatccgatatcaactagatcttgagacaaatggcagtattcatccacaattttaaaagaaaaggggggattggggggtacagtgcaggggaaagaatagtagacataatagcaacagacatacaaactaaag

SEQ ID NO: 11952 - DNA, 301 bp, Artificial Sequence
  Chd1.4_Notch1.3
  crRNA array
  misc_feature (148)..(157): n is a, c, g, or t
cttggctttatatatcttgtggaaaggacgaaacaccgtaatttctactaagtgtagataaatggcggataactcctcttaatttctactaagtgtagatagccacccccgccacgcctctaatttctactaagtgtagatttttttnnnnnnnnnnaagcttggcgtggatccgatatcaactagatcttgagacaaatggcagtattcatccacaattttaaaagaaaaggggggattggggggtacagtgcaggggaaagaatagtagacataatagcaacagacatacaaactaaag

SEQ ID NO: 11953 - DNA, 301 bp, Artificial Sequence
  Chd1.4_Notch1.4
  crRNA array
  misc_feature (148)..(157): n is a, c, g, or t
cttggctttatatatcttgtggaaaggacgaaacaccgtaatttctactaagtgtagataaatggcggataactcctcttaatttctactaagtgtagataaagtgtcagaggccagcaataatttctactaagtgtagatttttttnnnnnnnnnnaagcttggcgtggatccgatatcaactagatcttgagacaaatggcagtattcatccacaattttaaaagaaaaggggggattggggggtacagtgcaggggaaagaatagtagacataatagcaacagacatacaaactaaag

SEQ ID NO: 11954 - DNA, 301 bp, Artificial Sequence
  Chd1.1_Arid1a.1
  crRNA array
  misc_feature (148)..(157): n is a, c, g, or t
cttggctttatatatcttgtggaaaggacgaaacaccgtaatttctactaagtgtagatcgccccactctgcaatccattaatttctactaagtgtagatcccgcgctcggccgctgccgtaatttctactaagtgtagatttttttnnnnnnnnnnaagcttggcgtggatccgatatcaactagatcttgagacaaatggcagtattcatccacaattttaaaagaaaaggggggattggggggtacagtgcaggggaaagaatagtagacataatagcaacagacatacaaactaaag

SEQ ID NO: 11955 - DNA, 301 bp, Artificial Sequence
  Chd1.1_Arid1a.2
  crRNA array
  misc_feature (148)..(157): n is a, c, g, or t
cttggctttatatatcttgtggaaaggacgaaacaccgtaatttctactaagtgtagatcgccccactctgcaatccattaatttctactaagtgtagatagtgcaagatcgagcgtggataatttctactaagtgtagatttttttnnnnnnnnnnaagcttggcgtggatccgatatcaactagatcttgagacaaatggcagtattcatccacaattttaaaagaaaaggggggattggggggtacagtgcaggggaaagaatagtagacataatagcaacagacatacaaactaaag

SEQ ID NO: 11956 - DNA, 301 bp, Artificial Sequence
  Chd1.1_Arid1a.3
  crRNA array
  misc_feature (148)..(157): n is a, c, g, or t
cttggctttatatatcttgtggaaaggacgaaacaccgtaatttctactaagtgtagatcgccccactctgcaatccattaatttctactaagtgtagatagtgagctggcagcactgcttaatttctactaagtgtagatttttttnnnnnnnnnnaagcttggcgtggatccgatatcaactagatcttgagacaaatggcagtattcatccacaattttaaaagaaaaggggggattggggggtacagtgcaggggaaagaatagtagacataatagcaacagacatacaaactaaag

SEQ ID NO: 11957 - DNA, 301 bp, Artificial Sequence
  Chd1.1_Arid1a.4
  crRNA array
  misc_feature (148)..(157): n is a, c, g, or t
cttggctttatatatcttgtggaaaggacgaaacaccgtaatttctactaagtgtagatcgccccactctgcaatccattaatttctactaagtgtagatgccgagaccgagtctctgcataatttctactaagtgtagatttttttnnnnnnnnnnaagcttggcgtggatccgatatcaactagatcttgagacaaatggcagtattcatccacaattttaaaagaaaaggggggattggggggtacagtgcaggggaaagaatagtagacataatagcaacagacatacaaactaaag

SEQ ID NO: 11958 - DNA, 301 bp, Artificial Sequence
  Chd1.2_Arid1a.1
  crRNA array
  misc_feature (148)..(157): n is a, c, g, or t
cttggctttatatatcttgtggaaaggacgaaacaccgtaatttctactaagtgtagattgcagccggcgtctggcagctaatttctactaagtgtagatcccgcgctcggccgctgccgtaatttctactaagtgtagatttttttnnnnnnnnnnaagcttggcgtggatccgatatcaactagatcttgagacaaatggcagtattcatccacaattttaaaagaaaaggggggattggggggtacagtgcaggggaaagaatagtagacataatagcaacagacatacaaactaaag

SEQ ID NO: 11959 - DNA, 301 bp, Artificial Sequence
  Chd1.2_Arid1a.2
  crRNA array
  misc_feature (148)..(157): n is a, c, g, or t
cttggctttatatatcttgtggaaaggacgaaacaccgtaatttctactaagtgtagattgcagccggcgtctggcagctaatttctactaagtgtagatagtgcaagatcgagcgtggataatttctactaagtgtagatttttttnnnnnnnnnnaagcttggcgtggatccgatatcaactagatcttgagacaaatggcagtattcatccacaattttaaaagaaaaggggggattggggggtacagtgcaggggaaagaatagtagacataatagcaacagacatacaaactaaag

SEQ ID NO: 11960 - DNA, 301 bp, Artificial Sequence
  Chd1.2_Arid1a.3
  crRNA array
  misc_feature (148)..(157): n is a, c, g, or t
cttggctttatatatcttgtggaaaggacgaaacaccgtaatttctactaagtgtagattgcagccggcgtctggcagctaatttctactaagtgtagatagtgagctggcagcactgcttaatttctactaagtgtagatttttttnnnnnnnnnnaagcttggcgtggatccgatatcaactagatcttgagacaaatggcagtattcatccacaattttaaaagaaaaggggggattggggggtacagtgcaggggaaagaatagtagacataatagcaacagacatacaaactaaag

SEQ ID NO: 11961 - DNA, 301 bp, Artificial Sequence
  Chd1.2_Arid1a.4
  crRNA array
  misc_feature (148)..(157): n is a, c, g, or t
cttggctttatatatcttgtggaaaggacgaaacaccgtaatttctactaagtgtagattgcagccggcgtctggcagctaatttctactaagtgtagatgccgagaccgagtctctgcataatttctactaagtgtagatttttttnnnnnnnnnnaagcttggcgtggatccgatatcaactagatcttgagacaaatggcagtattcatccacaattttaaaagaaaaggggggattggggggtacagtgcaggggaaagaatagtagacataatagcaacagacatacaaactaaag

SEQ ID NO: 11962 - DNA, 301 bp, Artificial Sequence
  Chd1.3_Arid1a.1
  crRNA array
  misc_feature (148)..(157): n is a, c, g, or t
cttggctttatatatcttgtggaaaggacgaaacaccgtaatttctactaagtgtagatatcagcaagtatgcaactattaatttctactaagtgtagatcccgcgctcggccgctgccgtaatttctactaagtgtagatttttttnnnnnnnnnnaagcttggcgtggatccgatatcaactagatcttgagacaaatggcagtattcatccacaattttaaaagaaaaggggggattggggggtacagtgcaggggaaagaatagtagacataatagcaacagacatacaaactaaag

SEQ ID NO: 11963 - DNA, 301 bp, Artificial Sequence
  Chd1.3_Arid1a.2
  crRNA array
  misc_feature (148)..(157): n is a, c, g, or t
cttggctttatatatcttgtggaaaggacgaaacaccgtaatttctactaagtgtagatatcagcaagtatgcaactattaatttctactaagtgtagatagtgcaagatcgagcgtggataatttctactaagtgtagatttttttnnnnnnnnnnaagcttggcgtggatccgatatcaactagatcttgagacaaatggcagtattcatccacaattttaaaagaaaaggggggattggggggtacagtgcaggggaaagaatagtagacataatagcaacagacatacaaactaaag

SEQ ID NO: 11964 - DNA, 301 bp, Artificial Sequence
  Chd1.3_Arid1a.3
  crRNA array
  misc_feature (148)..(157): n is a, c, g, or t
cttggctttatatatcttgtggaaaggacgaaacaccgtaatttctactaagtgtagatatcagcaagtatgcaactattaatttctactaagtgtagatagtgagctggcagcactgcttaatttctactaagtgtagatttttttnnnnnnnnnnaagcttggcgtggatccgatatcaactagatcttgagacaaatggcagtattcatccacaattttaaaagaaaaggggggattggggggtacagtgcaggggaaagaatagtagacataatagcaacagacatacaaactaaag

SEQ ID NO: 11965 - DNA, 301 bp, Artificial Sequence
  Chd1.3_Arid1a.4
  crRNA array
  misc_feature (148)..(157): n is a, c, g, or t
cttggctttatatatcttgtggaaaggacgaaacaccgtaatttctactaagtgtagatatcagcaagtatgcaactattaatttctactaagtgtagatgccgagaccgagtctctgcataatttctactaagtgtagatttttttnnnnnnnnnnaagcttggcgtggatccgatatcaactagatcttgagacaaatggcagtattcatccacaattttaaaagaaaaggggggattggggggtacagtgcaggggaaagaatagtagacataatagcaacagacatacaaactaaag

SEQ ID NO: 11966 - DNA, 301 bp, Artificial Sequence
  Chd1.4_Arid1a.1
  crRNA array
  misc_feature (148)..(157): n is a, c, g, or t
cttggctttatatatcttgtggaaaggacgaaacaccgtaatttctactaagtgtagataaatggcggataactcctcttaatttctactaagtgtagatcccgcgctcggccgctgccgtaatttctactaagtgtagatttttttnnnnnnnnnnaagcttggcgtggatccgatatcaactagatcttgagacaaatggcagtattcatccacaattttaaaagaaaaggggggattggggggtacagtgcaggggaaagaatagtagacataatagcaacagacatacaaactaaag

SEQ ID NO: 11967 - DNA, 301 bp, Artificial Sequence
  Chd1.4_Arid1a.2
  crRNA array
  misc_feature (148)..(157): n is a, c, g, or t
cttggctttatatatcttgtggaaaggacgaaacaccgtaatttctactaagtgtagataaatggcggataactcctcttaatttctactaagtgtagatagtgcaagatcgagcgtggataatttctactaagtgtagatttttttnnnnnnnnnnaagcttggcgtggatccgatatcaactagatcttgagacaaatggcagtattcatccacaattttaaaagaaaaggggggattggggggtacagtgcaggggaaagaatagtagacataatagcaacagacatacaaactaaag

SEQ ID NO: 11968 - DNA, 301 bp, Artificial Sequence
  Chd1.4_Arid1a.3
  crRNA array
  misc_feature (148)..(157): n is a, c, g, or t
cttggctttatatatcttgtggaaaggacgaaacaccgtaatttctactaagtgtagataaatggcggataactcctcttaatttctactaagtgtagatagtgagctggcagcactgcttaatttctactaagtgtagatttttttnnnnnnnnnnaagcttggcgtggatccgatatcaactagatcttgagacaaatggcagtattcatccacaattttaaaagaaaaggggggattggggggtacagtgcaggggaaagaatagtagacataatagcaacagacatacaaactaaag

SEQ ID NO: 11969 - DNA, 301 bp, Artificial Sequence
  Chd1.4_Arid1a.4
  crRNA array
  misc_feature (148)..(157): n is a, c, g, or t
cttggctttatatatcttgtggaaaggacgaaacaccgtaatttctactaagtgtagataaatggcggataactcctcttaatttctactaagtgtagatgccgagaccgagtctctgcataatttctactaagtgtagatttttttnnnnnnnnnnaagcttggcgtggatccgatatcaactagatcttgagacaaatggcagtattcatccacaattttaaaagaaaaggggggattggggggtacagtgcaggggaaagaatagtagacataatagcaacagacatacaaactaaag

SEQ ID NO: 11970 - DNA, 301 bp, Artificial Sequence
  Chd1.1_Trim72.1
  crRNA array
  misc_feature (148)..(157): n is a, c, g, or t
cttggctttatatatcttgtggaaaggacgaaacaccgtaatttctactaagtgtagatcgccccactctgcaatccattaatttctactaagtgtagataccccagctctgcgcacccgtaatttctactaagtgtagatttttttnnnnnnnnnnaagcttggcgtggatccgatatcaactagatcttgagacaaatggcagtattcatccacaattttaaaagaaaaggggggattggggggtacagtgcaggggaaagaatagtagacataatagcaacagacatacaaactaaag

SEQ ID NO: 11971 - DNA, 301 bp, Artificial Sequence
  Chd1.1_Trim72.2
  crRNA array
  misc_feature (148)..(157): n is a, c, g, or t
cttggctttatatatcttgtggaaaggacgaaacaccgtaatttctactaagtgtagatcgccccactctgcaatccattaatttctactaagtgtagatcacgagcgtctgcccgggcctaatttctactaagtgtagatttttttnnnnnnnnnnaagcttggcgtggatccgatatcaactagatcttgagacaaatggcagtattcatccacaattttaaaagaaaaggggggattggggggtacagtgcaggggaaagaatagtagacataatagcaacagacatacaaactaaag

SEQ ID NO: 11972 - DNA, 301 bp, Artificial Sequence
  Chd1.1_Trim72.3
  crRNA array
  misc_feature (148)..(157): n is a, c, g, or t
cttggctttatatatcttgtggaaaggacgaaacaccgtaatttctactaagtgtagatcgccccactctgcaatccattaatttctactaagtgtagatacgtgtgctggcacgacaagtaatttctactaagtgtagatttttttnnnnnnnnnnaagcttggcgtggatccgatatcaactagatcttgagacaaatggcagtattcatccacaattttaaaagaaaaggggggattggggggtacagtgcaggggaaagaatagtagacataatagcaacagacatacaaactaaag

SEQ ID NO: 11973 - DNA, 301 bp, Artificial Sequence
  Chd1.1_Trim72.4
  crRNA array
  misc_feature (148)..(157): n is a, c, g, or t
cttggctttatatatcttgtggaaaggacgaaacaccgtaatttctactaagtgtagatcgccccactctgcaatccattaatttctactaagtgtagattgccgtgcctgcctgatccgtaatttctactaagtgtagatttttttnnnnnnnnnnaagcttggcgtggatccgatatcaactagatcttgagacaaatggcagtattcatccacaattttaaaagaaaaggggggattggggggtacagtgcaggggaaagaatagtagacataatagcaacagacatacaaactaaag

SEQ ID NO: 11974 - DNA, 301 bp, Artificial Sequence
  Chd1.2_Trim72.1
  crRNA array
  misc_feature (148)..(157): n is a, c, g, or t
cttggctttatatatcttgtggaaaggacgaaacaccgtaatttctactaagtgtagattgcagccggcgtctggcagctaatttctactaagtgtagataccccagctctgcgcacccgtaatttctactaagtgtagatttttttnnnnnnnnnnaagcttggcgtggatccgatatcaactagatcttgagacaaatggcagtattcatccacaattttaaaagaaaaggggggattggggggtacagtgcaggggaaagaatagtagacataatagcaacagacatacaaactaaag

SEQ ID NO: 11975 - DNA, 301 bp, Artificial Sequence
  Chd1.2_Trim72.2
  crRNA array
  misc_feature (148)..(157): n is a, c, g, or t
cttggctttatatatcttgtggaaaggacgaaacaccgtaatttctactaagtgtagattgcagccggcgtctggcagctaatttctactaagtgtagatcacgagcgtctgcccgggcctaatttctactaagtgtagatttttttnnnnnnnnnnaagcttggcgtggatccgatatcaactagatcttgagacaaatggcagtattcatccacaattttaaaagaaaaggggggattggggggtacagtgcaggggaaagaatagtagacataatagcaacagacatacaaactaaag

SEQ ID NO: 11976 - DNA, 301 bp, Artificial Sequence
  Chd1.2_Trim72.3
  crRNA array
  misc_feature (148)..(157): n is a, c, g, or t
cttggctttatatatcttgtggaaaggacgaaacaccgtaatttctactaagtgtagattgcagccggcgtctggcagctaatttctactaagtgtagatacgtgtgctggcacgacaagtaatttctactaagtgtagatttttttnnnnnnnnnnaagcttggcgtggatccgatatcaactagatcttgagacaaatggcagtattcatccacaattttaaaagaaaaggggggattggggggtacagtgcaggggaaagaatagtagacataatagcaacagacatacaaactaaag

SEQ ID NO: 11977 - DNA, 301 bp, Artificial Sequence
  Chd1.2_Trim72.4
  crRNA array
  misc_feature (148)..(157): n is a, c, g, or t
cttggctttatatatcttgtggaaaggacgaaacaccgtaatttctactaagtgtagattgcagccggcgtctggcagctaatttctactaagtgtagattgccgtgcctgcctgatccgtaatttctactaagtgtagatttttttnnnnnnnnnnaagcttggcgtggatccgatatcaactagatcttgagacaaatggcagtattcatccacaattttaaaagaaaaggggggattggggggtacagtgcaggggaaagaatagtagacataatagcaacagacatacaaactaaag

SEQ ID NO: 11978 - DNA, 301 bp, Artificial Sequence
  Chd1.3_Trim72.1
  crRNA array
  misc_feature (148)..(157): n is a, c, g, or t
cttggctttatatatcttgtggaaaggacgaaacaccgtaatttctactaagtgtagatatcagcaagtatgcaactattaatttctactaagtgtagataccccagctctgcgcacccgtaatttctactaagtgtagatttttttnnnnnnnnnnaagcttggcgtggatccgatatcaactagatcttgagacaaatggcagtattcatccacaattttaaaagaaaaggggggattggggggtacagtgcaggggaaagaatagtagacataatagcaacagacatacaaactaaag

SEQ ID NO: 11979 - DNA, 301 bp, Artificial Sequence
  Chd1.3_Trim72.2
  crRNA array
  misc_feature (148)..(157): n is a, c, g, or t
cttggctttatatatcttgtggaaaggacgaaacaccgtaatttctactaagtgtagatatcagcaagtatgcaactattaatttctactaagtgtagatcacgagcgtctgcccgggcctaatttctactaagtgtagatttttttnnnnnnnnnnaagcttggcgtggatccgatatcaactagatcttgagacaaatggcagtattcatccacaattttaaaagaaaaggggggattggggggtacagtgcaggggaaagaatagtagacataatagcaacagacatacaaactaaag

SEQ ID NO: 11980 - DNA, 301 bp, Artificial Sequence
  Chd1.3_Trim72.3
  crRNA array
  misc_feature (148)..(157): n is a, c, g, or t
cttggctttatatatcttgtggaaaggacgaaacaccgtaatttctactaagtgtagatatcagcaagtatgcaactattaatttctactaagtgtagatacgtgtgctggcacgacaagtaatttctactaagtgtagatttttttnnnnnnnnnnaagcttggcgtggatccgatatcaactagatcttgagacaaatggcagtattcatccacaattttaaaagaaaaggggggattggggggtacagtgcaggggaaagaatagtagacataatagcaacagacatacaaactaaag

SEQ ID NO: 11981 - DNA, 301 bp, Artificial Sequence
  Chd1.3_Trim72.4
  crRNA array
  misc_feature (148)..(157): n is a, c, g, or t
cttggctttatatatcttgtggaaaggacgaaacaccgtaatttctactaagtgtagatatcagcaagtatgcaactattaatttctactaagtgtagattgccgtgcctgcctgatccgtaatttctactaagtgtagatttttttnnnnnnnnnnaagcttggcgtggatccgatatcaactagatcttgagacaaatggcagtattcatccacaattttaaaagaaaaggggggattggggggtacagtgcaggggaaagaatagtagacataatagcaacagacatacaaactaaag

SEQ ID NO: 11982 - DNA, 301 bp, Artificial Sequence
  Chd1.4_Trim72.1
  crRNA array
  misc_feature (148)..(157): n is a, c, g, or t
cttggctttatatatcttgtggaaaggacgaaacaccgtaatttctactaagtgtagataaatggcggataactcctcttaatttctactaagtgtagataccccagctctgcgcacccgtaatttctactaagtgtagatttttttnnnnnnnnnnaagcttggcgtggatccgatatcaactagatcttgagacaaatggcagtattcatccacaattttaaaagaaaaggggggattggggggtacagtgcaggggaaagaatagtagacataatagcaacagacatacaaactaaag

SEQ ID NO: 11983 - DNA, 301 bp, Artificial Sequence
  Chd1.4_Trim72.2
  crRNA array
  misc_feature (148)..(157): n is a, c, g, or t
cttggctttatatatcttgtggaaaggacgaaacaccgtaatttctactaagtgtagataaatggcggataactcctcttaatttctactaagtgtagatcacgagcgtctgcccgggcctaatttctactaagtgtagatttttttnnnnnnnnnnaagcttggcgtggatccgatatcaactagatcttgagacaaatggcagtattcatccacaattttaaaagaaaaggggggattggggggtacagtgcaggggaaagaatagtagacataatagcaacagacatacaaactaaag

SEQ ID NO: 11984 - DNA, 301 bp, Artificial Sequence
  Chd1.4_Trim72.3
  crRNA array
  misc_feature (148)..(157): n is a, c, g, or t
cttggctttatatatcttgtggaaaggacgaaacaccgtaatttctactaagtgtagataaatggcggataactcctcttaatttctactaagtgtagatacgtgtgctggcacgacaagtaatttctactaagtgtagatttttttnnnnnnnnnnaagcttggcgtggatccgatatcaactagatcttgagacaaatggcagtattcatccacaattttaaaagaaaaggggggattggggggtacagtgcaggggaaagaatagtagacataatagcaacagacatacaaactaaag

SEQ ID NO: 11985 - DNA, 301 bp, Artificial Sequence
  Chd1.4_Trim72.4
  crRNA array
  misc_feature (148)..(157): n is a, c, g, or t
cttggctttatatatcttgtggaaaggacgaaacaccgtaatttctactaagtgtagataaatggcggataactcctcttaatttctactaagtgtagattgccgtgcctgcctgatccgtaatttctactaagtgtagatttttttnnnnnnnnnnaagcttggcgtggatccgatatcaactagatcttgagacaaatggcagtattcatccacaattttaaaagaaaaggggggattggggggtacagtgcaggggaaagaatagtagacataatagcaacagacatacaaactaaag

SEQ ID NO: 11986 - DNA, 301 bp, Artificial Sequence
  Chd1.1_Zfhx3.1
  crRNA array
  misc_feature (148)..(157): n is a, c, g, or t
cttggctttatatatcttgtggaaaggacgaaacaccgtaatttctactaagtgtagatcgccccactctgcaatccattaatttctactaagtgtagatcgctgcgaggtgtgtaactataatttctactaagtgtagatttttttnnnnnnnnnnaagcttggcgtggatccgatatcaactagatcttgagacaaatggcagtattcatccacaattttaaaagaaaaggggggattggggggtacagtgcaggggaaagaatagtagacataatagcaacagacatacaaactaaag

SEQ ID NO: 11987 - DNA, 301 bp, Artificial Sequence
  Chd1.1_Zfhx3.2
  crRNA array
  misc_feature (148)..(157): n is a, c, g, or t
cttggctttatatatcttgtggaaaggacgaaacaccgtaatttctactaagtgtagatcgccccactctgcaatccattaatttctactaagtgtagatacgtgcgacacaaaagcaactaatttctactaagtgtagatttttttnnnnnnnnnnaagcttggcgtggatccgatatcaactagatcttgagacaaatggcagtattcatccacaattttaaaagaaaaggggggattggggggtacagtgcaggggaaagaatagtagacataatagcaacagacatacaaactaaag

SEQ ID NO: 11988 - DNA, 301 bp, Artificial Sequence
  Chd1.1_Zfhx3.3
  crRNA array
  misc_feature (148)..(157): n is a, c, g, or t
cttggctttatatatcttgtggaaaggacgaaacaccgtaatttctactaagtgtagatcgccccactctgcaatccattaatttctactaagtgtagattgctctacggcaagaggaaataatttctactaagtgtagatttttttnnnnnnnnnnaagcttggcgtggatccgatatcaactagatcttgagacaaatggcagtattcatccacaattttaaaagaaaaggggggattggggggtacagtgcaggggaaagaatagtagacataatagcaacagacatacaaactaaag

SEQ ID NO: 11989 - DNA, 301 bp, Artificial Sequence
  Chd1.1_Zfhx3.4
  crRNA array
  misc_feature (148)..(157): n is a, c, g, or t
cttggctttatatatcttgtggaaaggacgaaacaccgtaatttctactaagtgtagatcgccccactctgcaatccattaatttctactaagtgtagatagtgagcggcagactgcgagtaatttctactaagtgtagatttttttnnnnnnnnnnaagcttggcgtggatccgatatcaactagatcttgagacaaatggcagtattcatccacaattttaaaagaaaaggggggattggggggtacagtgcaggggaaagaatagtagacataatagcaacagacatacaaactaaag

SEQ ID NO: 11990 - DNA, 301 bp, Artificial Sequence
  Chd1.2_Zfhx3.1
  crRNA array
  misc_feature (148)..(157): n is a, c, g, or t
cttggctttatatatcttgtggaaaggacgaaacaccgtaatttctactaagtgtagattgcagccggcgtctggcagctaatttctactaagtgtagatcgctgcgaggtgtgtaactataatttctactaagtgtagatttttttnnnnnnnnnnaagcttggcgtggatccgatatcaactagatcttgagacaaatggcagtattcatccacaattttaaaagaaaaggggggattggggggtacagtgcaggggaaagaatagtagacataatagcaacagacatacaaactaaag

SEQ ID NO: 11991 - DNA, 301 bp, Artificial Sequence
  Chd1.2_Zfhx3.2
  crRNA array
  misc_feature (148)..(157): n is a, c, g, or t
cttggctttatatatcttgtggaaaggacgaaacaccgtaatttctactaagtgtagattgcagccggcgtctggcagctaatttctactaagtgtagatacgtgcgacacaaaagcaactaatttctactaagtgtagatttttttnnnnnnnnnnaagcttggcgtggatccgatatcaactagatcttgagacaaatggcagtattcatccacaattttaaaagaaaaggggggattggggggtacagtgcaggggaaagaatagtagacataatagcaacagacatacaaactaaag

SEQ ID NO: 11992 - DNA, 301 bp, Artificial Sequence
  Chd1.2_Zfhx3.3
  crRNA array
  misc_feature (148)..(157): n is a, c, g, or t
cttggctttatatatcttgtggaaaggacgaaacaccgtaatttctactaagtgtagattgcagccggcgtctggcagctaatttctactaagtgtagattgctctacggcaagaggaaataatttctactaagtgtagatttttttnnnnnnnnnnaagcttggcgtggatccgatatcaactagatcttgagacaaatggcagtattcatccacaattttaaaagaaaaggggggattggggggtacagtgcaggggaaagaatagtagacataatagcaacagacatacaaactaaag

SEQ ID NO: 11993 - DNA, 301 bp, Artificial Sequence
  Chd1.2_Zfhx3.4
  crRNA array
  misc_feature (148)..(157): n is a, c, g, or t
cttggctttatatatcttgtggaaaggacgaaacaccgtaatttctactaagtgtagattgcagccggcgtctggcagctaatttctactaagtgtagatagtgagcggcagactgcgagtaatttctactaagtgtagatttttttnnnnnnnnnnaagcttggcgtggatccgatatcaactagatcttgagacaaatggcagtattcatccacaattttaaaagaaaaggggggattggggggtacagtgcaggggaaagaatagtagacataatagcaacagacatacaaactaaag

SEQ ID NO: 11994 - DNA, 301 bp, Artificial Sequence
  Chd1.3_Zfhx3.1
  crRNA array
  misc_feature (148)..(157): n is a, c, g, or t
cttggctttatatatcttgtggaaaggacgaaacaccgtaatttctactaagtgtagatatcagcaagtatgcaactattaatttctactaagtgtagatcgctgcgaggtgtgtaactataatttctactaagtgtagatttttttnnnnnnnnnnaagcttggcgtggatccgatatcaactagatcttgagacaaatggcagtattcatccacaattttaaaagaaaaggggggattggggggtacagtgcaggggaaagaatagtagacataatagcaacagacatacaaactaaag

SEQ ID NO: 11995 - DNA, 301 bp, Artificial Sequence
  Chd1.3_Zfhx3.2
  crRNA array
  misc_feature (148)..(157): n is a, c, g, or t
cttggctttatatatcttgtggaaaggacgaaacaccgtaatttctactaagtgtagatatcagcaagtatgcaactattaatttctactaagtgtagatacgtgcgacacaaaagcaactaatttctactaagtgtagatttttttnnnnnnnnnnaagcttggcgtggatccgatatcaactagatcttgagacaaatggcagtattcatccacaattttaaaagaaaaggggggattggggggtacagtgcaggggaaagaatagtagacataatagcaacagacatacaaactaaag

SEQ ID NO: 11996 - DNA, 301 bp, Artificial Sequence
  Chd1.3_Zfhx3.3
  crRNA array
  misc_feature (148)..(157): n is a, c, g, or t
cttggctttatatatcttgtggaaaggacgaaacaccgtaatttctactaagtgtagatatcagcaagtatgcaactattaatttctactaagtgtagattgctctacggcaagaggaaataatttctactaagtgtagatttttttnnnnnnnnnnaagcttggcgtggatccgatatcaactagatcttgagacaaatggcagtattcatccacaattttaaaagaaaaggggggattggggggtacagtgcaggggaaagaatagtagacataatagcaacagacatacaaactaaag

SEQ ID NO: 11997 - DNA, 301 bp, Artificial Sequence
  Chd1.3_Zfhx3.4
  crRNA array
  misc_feature (148)..(157): n is a, c, g, or t
cttggctttatatatcttgtggaaaggacgaaacaccgtaatttctactaagtgtagatatcagcaagtatgcaactattaatttctactaagtgtagatagtgagcggcagactgcgagtaatttctactaagtgtagatttttttnnnnnnnnnnaagcttggcgtggatccgatatcaactagatcttgagacaaatggcagtattcatccacaattttaaaagaaaaggggggattggggggtacagtgcaggggaaagaatagtagacataatagcaacagacatacaaactaaag

SEQ ID NO: 11998 - DNA, 301 bp, Artificial Sequence
  Chd1.4_Zfhx3.1
  crRNA array
  misc_feature (148)..(157): n is a, c, g, or t
cttggctttatatatcttgtggaaaggacgaaacaccgtaatttctactaagtgtagataaatggcggataactcctcttaatttctactaagtgtagatcgctgcgaggtgtgtaactataatttctactaagtgtagatttttttnnnnnnnnnnaagcttggcgtggatccgatatcaactagatcttgagacaaatggcagtattcatccacaattttaaaagaaaaggggggattggggggtacagtgcaggggaaagaatagtagacataatagcaacagacatacaaactaaag

SEQ ID NO: 11999 - DNA, 301 bp, Artificial Sequence
  Chd1.4_Zfhx3.2
  crRNA array
  misc_feature (148)..(157): n is a, c, g, or t
cttggctttatatatcttgtggaaaggacgaaacaccgtaatttctactaagtgtagataaatggcggataactcctcttaatttctactaagtgtagatacgtgcgacacaaaagcaactaatttctactaagtgtagatttttttnnnnnnnnnnaagcttggcgtggatccgatatcaactagatcttgagacaaatggcagtattcatccacaattttaaaagaaaaggggggattggggggtacagtgcaggggaaagaatagtagacataatagcaacagacatacaaactaaag

SEQ ID NO: 12000 - DNA, 301 bp, Artificial Sequence
  Chd1.4_Zfhx3.3
  crRNA array
  misc_feature (148)..(157): n is a, c, g, or t
cttggctttatatatcttgtggaaaggacgaaacaccgtaatttctactaagtgtagataaatggcggataactcctcttaatttctactaagtgtagattgctctacggcaagaggaaataatttctactaagtgtagatttttttnnnnnnnnnnaagcttggcgtggatccgatatcaactagatcttgagacaaatggcagtattcatccacaattttaaaagaaaaggggggattggggggtacagtgcaggggaaagaatagtagacataatagcaacagacatacaaactaaag

SEQ ID NO: 12001 - DNA, 301 bp, Artificial Sequence
  Chd1.4_Zfhx3.4
  crRNA array
  misc_feature (148)..(157): n is a, c, g, or t
cttggctttatatatcttgtggaaaggacgaaacaccgtaatttctactaagtgtagataaatggcggataactcctcttaatttctactaagtgtagatagtgagcggcagactgcgagtaatttctactaagtgtagatttttttnnnnnnnnnnaagcttggcgtggatccgatatcaactagatcttgagacaaatggcagtattcatccacaattttaaaagaaaaggggggattggggggtacagtgcaggggaaagaatagtagacataatagcaacagacatacaaactaaag

SEQ ID NO: 12002 - DNA, 301 bp, Artificial Sequence
  Chd1.1_Crebbp.1
  crRNA array
  misc_feature (148)..(157): n is a, c, g, or t
cttggctttatatatcttgtggaaaggacgaaacaccgtaatttctactaagtgtagatcgccccactctgcaatccattaatttctactaagtgtagatctcacggcggcggcgggccgtaatttctactaagtgtagatttttttnnnnnnnnnnaagcttggcgtggatccgatatcaactagatcttgagacaaatggcagtattcatccacaattttaaaagaaaaggggggattggggggtacagtgcaggggaaagaatagtagacataatagcaacagacatacaaactaaag

SEQ ID NO: 12003 - DNA, 301 bp, Artificial Sequence
  Chd1.1_Crebbp.2
  crRNA array
  misc_feature (148)..(157): n is a, c, g, or t
cttggctttatatatcttgtggaaaggacgaaacaccgtaatttctactaagtgtagatcgccccactctgcaatccattaatttctactaagtgtagatcgcgagcaggtgaagatggctaatttctactaagtgtagatttttttnnnnnnnnnnaagcttggcgtggatccgatatcaactagatcttgagacaaatggcagtattcatccacaattttaaaagaaaaggggggattggggggtacagtgcaggggaaagaatagtagacataatagcaacagacatacaaactaaag

SEQ ID NO: 12004 - DNA, 301 bp, Artificial Sequence
  Chd1.1_Crebbp.3
  crRNA array
  misc_feature (148)..(157): n is a, c, g, or t
cttggctttatatatcttgtggaaaggacgaaacaccgtaatttctactaagtgtagatcgccccactctgcaatccattaatttctactaagtgtagatggctccgccgcccgcccgcgtaatttctactaagtgtagatttttttnnnnnnnnnnaagcttggcgtggatccgatatcaactagatcttgagacaaatggcagtattcatccacaattttaaaagaaaaggggggattggggggtacagtgcaggggaaagaatagtagacataatagcaacagacatacaaactaaag

SEQ ID NO: 12005 - DNA, 301 bp, Artificial Sequence
  Chd1.1_Crebbp.4
  crRNA array
  misc_feature (148)..(157): n is a, c, g, or t
cttggctttatatatcttgtggaaaggacgaaacaccgtaatttctactaagtgtagatcgccccactctgcaatccattaatttctactaagtgtagattggactagatgactccgtagtaatttctactaagtgtagatttttttnnnnnnnnnnaagcttggcgtggatccgatatcaactagatcttgagacaaatggcagtattcatccacaattttaaaagaaaaggggggattggggggtacagtgcaggggaaagaatagtagacataatagcaacagacatacaaactaaag

SEQ ID NO: 12006 - DNA, 301 bp, Artificial Sequence
  Chd1.2_Crebbp.1
  crRNA array
  misc_feature (148)..(157): n is a, c, g, or t
cttggctttatatatcttgtggaaaggacgaaacaccgtaatttctactaagtgtagattgcagccggcgtctggcagctaatttctactaagtgtagatctcacggcggcggcgggccgtaatttctactaagtgtagatttttttnnnnnnnnnnaagcttggcgtggatccgatatcaactagatcttgagacaaatggcagtattcatccacaattttaaaagaaaaggggggattggggggtacagtgcaggggaaagaatagtagacataatagcaacagacatacaaactaaag

SEQ ID NO: 12007 - DNA, 301 bp, Artificial Sequence
  Chd1.2_Crebbp.2
  crRNA array
  misc_feature (148)..(157): n is a, c, g, or t
cttggctttatatatcttgtggaaaggacgaaacaccgtaatttctactaagtgtagattgcagccggcgtctggcagctaatttctactaagtgtagatcgcgagcaggtgaagatggctaatttctactaagtgtagatttttttnnnnnnnnnnaagcttggcgtggatccgatatcaactagatcttgagacaaatggcagtattcatccacaattttaaaagaaaaggggggattggggggtacagtgcaggggaaagaatagtagacataatagcaacagacatacaaactaaag

SEQ ID NO: 12008 - DNA, 301 bp, Artificial Sequence
  Chd1.2_Crebbp.3
  crRNA array
  misc_feature (148)..(157): n is a, c, g, or t
cttggctttatatatcttgtggaaaggacgaaacaccgtaatttctactaagtgtagattgcagccggcgtctggcagctaatttctactaagtgtagatggctccgccgcccgcccgcgtaatttctactaagtgtagatttttttnnnnnnnnnnaagcttggcgtggatccgatatcaactagatcttgagacaaatggcagtattcatccacaattttaaaagaaaaggggggattggggggtacagtgcaggggaaagaatagtagacataatagcaacagacatacaaactaaag

SEQ ID NO: 12009 - DNA, 301 bp, Artificial Sequence
  Chd1.2_Crebbp.4
  crRNA array
  misc_feature (148)..(157): n is a, c, g, or t
cttggctttatatatcttgtggaaaggacgaaacaccgtaatttctactaagtgtagattgcagccggcgtctggcagctaatttctactaagtgtagattggactagatgactccgtagtaatttctactaagtgtagatttttttnnnnnnnnnnaagcttggcgtggatccgatatcaactagatcttgagacaaatggcagtattcatccacaattttaaaagaaaaggggggattggggggtacagtgcaggggaaagaatagtagacataatagcaacagacatacaaactaaag

SEQ ID NO: 12010 - DNA, 301 bp, Artificial Sequence
  Chd1.3_Crebbp.1
  crRNA array
  misc_feature (148)..(157): n is a, c, g, or t
cttggctttatatatcttgtggaaaggacgaaacaccgtaatttctactaagtgtagatatcagcaagtatgcaactattaatttctactaagtgtagatctcacggcggcggcgggccgtaatttctactaagtgtagatttttttnnnnnnnnnnaagcttggcgtggatccgatatcaactagatcttgagacaaatggcagtattcatccacaattttaaaagaaaaggggggattggggggtacagtgcaggggaaagaatagtagacataatagcaacagacatacaaactaaag

SEQ ID NO: 12011 - DNA, 301 bp, Artificial Sequence
  Chd1.3_Crebbp.2
  crRNA array
  misc_feature (148)..(157): n is a, c, g, or t
cttggctttatatatcttgtggaaaggacgaaacaccgtaatttctactaagtgtagatatcagcaagtatgcaactattaatttctactaagtgtagatcgcgagcaggtgaagatggctaatttctactaagtgtagatttttttnnnnnnnnnnaagcttggcgtggatccgatatcaactagatcttgagacaaatggcagtattcatccacaattttaaaagaaaaggggggattggggggtacagtgcaggggaaagaatagtagacataatagcaacagacatacaaactaaag

SEQ ID NO: 12012 - DNA, 301 bp, Artificial Sequence
  Chd1.3_Crebbp.3
  crRNA array
  misc_feature (148)..(157): n is a, c, g, or t
cttggctttatatatcttgtggaaaggacgaaacaccgtaatttctactaagtgtagatatcagcaagtatgcaactattaatttctactaagtgtagatggctccgccgcccgcccgcgtaatttctactaagtgtagatttttttnnnnnnnnnnaagcttggcgtggatccgatatcaactagatcttgagacaaatggcagtattcatccacaattttaaaagaaaaggggggattggggggtacagtgcaggggaaagaatagtagacataatagcaacagacatacaaactaaag

SEQ ID NO: 12013 - DNA, 301 bp, Artificial Sequence
  Chd1.3_Crebbp.4
  crRNA array
  misc_feature (148)..(157): n is a, c, g, or t
cttggctttatatatcttgtggaaaggacgaaacaccgtaatttctactaagtgtagatatcagcaagtatgcaactattaatttctactaagtgtagattggactagatgactccgtagtaatttctactaagtgtagatttttttnnnnnnnnnnaagcttggcgtggatccgatatcaactagatcttgagacaaatggcagtattcatccacaattttaaaagaaaaggggggattggggggtacagtgcaggggaaagaatagtagacataatagcaacagacatacaaactaaag

SEQ ID NO: 12014 - DNA, 301 bp, Artificial Sequence
  Chd1.4_Crebbp.1
  crRNA array
  misc_feature (148)..(157): n is a, c, g, or t
cttggctttatatatcttgtggaaaggacgaaacaccgtaatttctactaagtgtagataaatggcggataactcctcttaatttctactaagtgtagatctcacggcggcggcgggccgtaatttctactaagtgtagatttttttnnnnnnnnnnaagcttggcgtggatccgatatcaactagatcttgagacaaatggcagtattcatccacaattttaaaagaaaaggggggattggggggtacagtgcaggggaaagaatagtagacataatagcaacagacatacaaactaaag

SEQ ID NO: 12015 - DNA, 301 bp, Artificial Sequence
  Chd1.4_Crebbp.2
  crRNA array
  misc_feature (148)..(157): n is a, c, g, or t
cttggctttatatatcttgtggaaaggacgaaacaccgtaatttctactaagtgtagataaatggcggataactcctcttaatttctactaagtgtagatcgcgagcaggtgaagatggctaatttctactaagtgtagatttttttnnnnnnnnnnaagcttggcgtggatccgatatcaactagatcttgagacaaatggcagtattcatccacaattttaaaagaaaaggggggattggggggtacagtgcaggggaaagaatagtagacataatagcaacagacatacaaactaaag

SEQ ID NO: 12016 - DNA, 301 bp, Artificial Sequence
  Chd1.4_Crebbp.3
  crRNA array
  misc_feature (148)..(157): n is a, c, g, or t
cttggctttatatatcttgtggaaaggacgaaacaccgtaatttctactaagtgtagataaatggcggataactcctcttaatttctactaagtgtagatggctccgccgcccgcccgcgtaatttctactaagtgtagatttttttnnnnnnnnnnaagcttggcgtggatccgatatcaactagatcttgagacaaatggcagtattcatccacaattttaaaagaaaaggggggattggggggtacagtgcaggggaaagaatagtagacataatagcaacagacatacaaactaaag

SEQ ID NO: 12017 - DNA, 301 bp, Artificial Sequence
  Chd1.4_Crebbp.4
  crRNA array
  misc_feature (148)..(157): n is a, c, g, or t
cttggctttatatatcttgtggaaaggacgaaacaccgtaatttctactaagtgtagataaatggcggataactcctcttaatttctactaagtgtagattggactagatgactccgtagtaatttctactaagtgtagatttttttnnnnnnnnnnaagcttggcgtggatccgatatcaactagatcttgagacaaatggcagtattcatccacaattttaaaagaaaaggggggattggggggtacagtgcaggggaaagaatagtagacataatagcaacagacatacaaactaaag

SEQ ID NO: 12018 - DNA, 301 bp, Artificial Sequence
  Chd1.1_Cdkn2a.1
  crRNA array
  misc_feature (148)..(157): n is a, c, g, or t
cttggctttatatatcttgtggaaaggacgaaacaccgtaatttctactaagtgtagatcgccccactctgcaatccattaatttctactaagtgtagatcaatcacgggagggagcagataatttctactaagtgtagatttttttnnnnnnnnnnaagcttggcgtggatccgatatcaactagatcttgagacaaatggcagtattcatccacaattttaaaagaaaaggggggattggggggtacagtgcaggggaaagaatagtagacataatagcaacagacatacaaactaaag

SEQ ID NO: 12019 - DNA, 301 bp, Artificial Sequence
  Chd1.1_Cdkn2a.2
  crRNA array
  misc_feature (148)..(157): n is a, c, g, or t
cttggctttatatatcttgtggaaaggacgaaacaccgtaatttctactaagtgtagatcgccccactctgcaatccattaatttctactaagtgtagatgcccaacgccccgaactctttaatttctactaagtgtagatttttttnnnnnnnnnnaagcttggcgtggatccgatatcaactagatcttgagacaaatggcagtattcatccacaattttaaaagaaaaggggggattggggggtacagtgcaggggaaagaatagtagacataatagcaacagacatacaaactaaag

SEQ ID NO: 12020 - DNA, 301 bp, Artificial Sequence
  Chd1.1_Cdkn2a.3
  crRNA array
  misc_feature (148)..(157): n is a, c, g, or t
cttggctttatatatcttgtggaaaggacgaaacaccgtaatttctactaagtgtagatcgccccactctgcaatccattaatttctactaagtgtagattgtaccgctgggaacgtcgctaatttctactaagtgtagatttttttnnnnnnnnnnaagcttggcgtggatccgatatcaactagatcttgagacaaatggcagtattcatccacaattttaaaagaaaaggggggattggggggtacagtgcaggggaaagaatagtagacataatagcaacagacatacaaactaaag

SEQ ID NO: 12021 - DNA, 301 bp, Artificial Sequence
  Chd1.1_Cdkn2a.4
  crRNA array
  misc_feature (148)..(157): n is a, c, g, or t
cttggctttatatatcttgtggaaaggacgaaacaccgtaatttctactaagtgtagatcgccccactctgcaatccattaatttctactaagtgtagataagccacatgctagacacgctaatttctactaagtgtagatttttttnnnnnnnnnnaagcttggcgtggatccgatatcaactagatcttgagacaaatggcagtattcatccacaattttaaaagaaaaggggggattggggggtacagtgcaggggaaagaatagtagacataatagcaacagacatacaaactaaag

SEQ ID NO: 12022 - DNA, 301 bp, Artificial Sequence
  Chd1.2_Cdkn2a.1
  crRNA array
  misc_feature (148)..(157): n is a, c, g, or t
cttggctttatatatcttgtggaaaggacgaaacaccgtaatttctactaagtgtagattgcagccggcgtctggcagctaatttctactaagtgtagatcaatcacgggagggagcagataatttctactaagtgtagatttttttnnnnnnnnnnaagcttggcgtggatccgatatcaactagatcttgagacaaatggcagtattcatccacaattttaaaagaaaaggggggattggggggtacagtgcaggggaaagaatagtagacataatagcaacagacatacaaactaaag

SEQ ID NO: 12023 - DNA, 301 bp, Artificial Sequence
  Chd1.2_Cdkn2a.2
  crRNA array
  misc_feature (148)..(157): n is a, c, g, or t
cttggctttatatatcttgtggaaaggacgaaacaccgtaatttctactaagtgtagattgcagccggcgtctggcagctaatttctactaagtgtagatgcccaacgccccgaactctttaatttctactaagtgtagatttttttnnnnnnnnnnaagcttggcgtggatccgatatcaactagatcttgagacaaatggcagtattcatccacaattttaaaagaaaaggggggattggggggtacagtgcaggggaaagaatagtagacataatagcaacagacatacaaactaaag

SEQ ID NO: 12024 - DNA, 301 bp, Artificial Sequence
  Chd1.2_Cdkn2a.3
  crRNA array
  misc_feature (148)..(157): n is a, c, g, or t
cttggctttatatatcttgtggaaaggacgaaacaccgtaatttctactaagtgtagattgcagccggcgtctggcagctaatttctactaagtgtagattgtaccgctgggaacgtcgctaatttctactaagtgtagatttttttnnnnnnnnnnaagcttggcgtggatccgatatcaactagatcttgagacaaatggcagtattcatccacaattttaaaagaaaaggggggattggggggtacagtgcaggggaaagaatagtagacataatagcaacagacatacaaactaaag

SEQ ID NO: 12025 - DNA, 301 bp, Artificial Sequence
  Chd1.2_Cdkn2a.4
  crRNA array
  misc_feature (148)..(157): n is a, c, g, or t
cttggctttatatatcttgtggaaaggacgaaacaccgtaatttctactaagtgtagattgcagccggcgtctggcagctaatttctactaagtgtagataagccacatgctagacacgctaatttctactaagtgtagatttttttnnnnnnnnnnaagcttggcgtggatccgatatcaactagatcttgagacaaatggcagtattcatccacaattttaaaagaaaaggggggattggggggtacagtgcaggggaaagaatagtagacataatagcaacagacatacaaactaaag

SEQ ID NO: 12026 - DNA, 301 bp, Artificial Sequence
  Chd1.3_Cdkn2a.1
  crRNA array
  misc_feature (148)..(157): n is a, c, g, or t
cttggctttatatatcttgtggaaaggacgaaacaccgtaatttctactaagtgtagatatcagcaagtatgcaactattaatttctactaagtgtagatcaatcacgggagggagcagataatttctactaagtgtagatttttttnnnnnnnnnnaagcttggcgtggatccgatatcaactagatcttgagacaaatggcagtattcatccacaattttaaaagaaaaggggggattggggggtacagtgcaggggaaagaatagtagacataatagcaacagacatacaaactaaag

SEQ ID NO: 12027 - DNA, 301 bp, Artificial Sequence
  Chd1.3_Cdkn2a.2
  crRNA array
  misc_feature (148)..(157): n is a, c, g, or t
cttggctttatatatcttgtggaaaggacgaaacaccgtaatttctactaagtgtagatatcagcaagtatgcaactattaatttctactaagtgtagatgcccaacgccccgaactctttaatttctactaagtgtagatttttttnnnnnnnnnnaagcttggcgtggatccgatatcaactagatcttgagacaaatggcagtattcatccacaattttaaaagaaaaggggggattggggggtacagtgcaggggaaagaatagtagacataatagcaacagacatacaaactaaag

SEQ ID NO: 12028 - DNA, 301 bp, Artificial Sequence
  Chd1.3_Cdkn2a.3
  crRNA array
  misc_feature (148)..(157): n is a, c, g, or t
cttggctttatatatcttgtggaaaggacgaaacaccgtaatttctactaagtgtagatatcagcaagtatgcaactattaatttctactaagtgtagattgtaccgctgggaacgtcgctaatttctactaagtgtagatttttttnnnnnnnnnnaagcttggcgtggatccgatatcaactagatcttgagacaaatggcagtattcatccacaattttaaaagaaaaggggggattggggggtacagtgcaggggaaagaatagtagacataatagcaacagacatacaaactaaag

SEQ ID NO: 12029 - DNA, 301 bp, Artificial Sequence
  Chd1.3_Cdkn2a.4
  crRNA array
  misc_feature (148)..(157): n is a, c, g, or t
cttggctttatatatcttgtggaaaggacgaaacaccgtaatttctactaagtgtagatatcagcaagtatgcaactattaatttctactaagtgtagataagccacatgctagacacgctaatttctactaagtgtagatttttttnnnnnnnnnnaagcttggcgtggatccgatatcaactagatcttgagacaaatggcagtattcatccacaattttaaaagaaaaggggggattggggggtacagtgcaggggaaagaatagtagacataatagcaacagacatacaaactaaag

SEQ ID NO: 12030 - DNA, 301 bp, Artificial Sequence
  Chd1.4_Cdkn2a.1
  crRNA array
  misc_feature (148)..(157): n is a, c, g, or t
cttggctttatatatcttgtggaaaggacgaaacaccgtaatttctactaagtgtagataaatggcggataactcctcttaatttctactaagtgtagatcaatcacgggagggagcagataatttctactaagtgtagatttttttnnnnnnnnnnaagcttggcgtggatccgatatcaactagatcttgagacaaatggcagtattcatccacaattttaaaagaaaaggggggattggggggtacagtgcaggggaaagaatagtagacataatagcaacagacatacaaactaaag

SEQ ID NO: 12031 - DNA, 301 bp, Artificial Sequence
  Chd1.4_Cdkn2a.2
  crRNA array
  misc_feature (148)..(157): n is a, c, g, or t
cttggctttatatatcttgtggaaaggacgaaacaccgtaatttctactaagtgtagataaatggcggataactcctcttaatttctactaagtgtagatgcccaacgccccgaactctttaatttctactaagtgtagatttttttnnnnnnnnnnaagcttggcgtggatccgatatcaactagatcttgagacaaatggcagtattcatccacaattttaaaagaaaaggggggattggggggtacagtgcaggggaaagaatagtagacataatagcaacagacatacaaactaaag

SEQ ID NO: 12032 - DNA, 301 bp, Artificial Sequence
  Chd1.4_Cdkn2a.3
  crRNA array
  misc_feature (148)..(157): n is a, c, g, or t
cttggctttatatatcttgtggaaaggacgaaacaccgtaatttctactaagtgtagataaatggcggataactcctcttaatttctactaagtgtagattgtaccgctgggaacgtcgctaatttctactaagtgtagatttttttnnnnnnnnnnaagcttggcgtggatccgatatcaactagatcttgagacaaatggcagtattcatccacaattttaaaagaaaaggggggattggggggtacagtgcaggggaaagaatagtagacataatagcaacagacatacaaactaaag

SEQ ID NO: 12033 - DNA, 301 bp, Artificial Sequence
  Chd1.4_Cdkn2a.4
  crRNA array
  misc_feature (148)..(157): n is a, c, g, or t
cttggctttatatatcttgtggaaaggacgaaacaccgtaatttctactaagtgtagataaatggcggataactcctcttaatttctactaagtgtagataagccacatgctagacacgctaatttctactaagtgtagatttttttnnnnnnnnnnaagcttggcgtggatccgatatcaactagatcttgagacaaatggcagtattcatccacaattttaaaagaaaaggggggattggggggtacagtgcaggggaaagaatagtagacataatagcaacagacatacaaactaaag

SEQ ID NO: 12034 - DNA, 301 bp, Artificial Sequence
  Chd1.1_Wrn.1
  crRNA array
  misc_feature (148)..(157): n is a, c, g, or t
cttggctttatatatcttgtggaaaggacgaaacaccgtaatttctactaagtgtagatcgccccactctgcaatccattaatttctactaagtgtagatgcaaaccactcgggtaattttaatttctactaagtgtagatttttttnnnnnnnnnnaagcttggcgtggatccgatatcaactagatcttgagacaaatggcagtattcatccacaattttaaaagaaaaggggggattggggggtacagtgcaggggaaagaatagtagacataatagcaacagacatacaaactaaag

SEQ ID NO: 12035 - DNA, 301 bp, Artificial Sequence
  Chd1.1_Wrn.2
  crRNA array
  misc_feature (148)..(157): n is a, c, g, or t
cttggctttatatatcttgtggaaaggacgaaacaccgtaatttctactaagtgtagatcgccccactctgcaatccattaatttctactaagtgtagatgccatgtccagcagaacctttaatttctactaagtgtagatttttttnnnnnnnnnnaagcttggcgtggatccgatatcaactagatcttgagacaaatggcagtattcatccacaattttaaaagaaaaggggggattggggggtacagtgcaggggaaagaatagtagacataatagcaacagacatacaaactaaag

SEQ ID NO: 12036 - DNA, 301 bp, Artificial Sequence
  Chd1.1_Wrn.3
  crRNA array
  misc_feature (148)..(157): n is a, c, g, or t
cttggctttatatatcttgtggaaaggacgaaacaccgtaatttctactaagtgtagatcgccccactctgcaatccattaatttctactaagtgtagatctgcagcaggccaccgcaattaatttctactaagtgtagatttttttnnnnnnnnnnaagcttggcgtggatccgatatcaactagatcttgagacaaatggcagtattcatccacaattttaaaagaaaaggggggattggggggtacagtgcaggggaaagaatagtagacataatagcaacagacatacaaactaaag

SEQ ID NO: 12037 - DNA, 301 bp, Artificial Sequence
  Chd1.1_Wrn.4
  crRNA array
  misc_feature (148)..(157): n is a, c, g, or t
cttggctttatatatcttgtggaaaggacgaaacaccgtaatttctactaagtgtagatcgccccactctgcaatccattaatttctactaagtgtagattcgaaggacaatagatgatgtaatttctactaagtgtagatttttttnnnnnnnnnnaagcttggcgtggatccgatatcaactagatcttgagacaaatggcagtattcatccacaattttaaaagaaaaggggggattggggggtacagtgcaggggaaagaatagtagacataatagcaacagacatacaaactaaag

SEQ ID NO: 12038 - DNA, 301 bp, Artificial Sequence
  Chd1.2_Wrn.1
  crRNA array
  misc_feature (148)..(157): n is a, c, g, or t
cttggctttatatatcttgtggaaaggacgaaacaccgtaatttctactaagtgtagattgcagccggcgtctggcagctaatttctactaagtgtagatgcaaaccactcgggtaattttaatttctactaagtgtagatttttttnnnnnnnnnnaagcttggcgtggatccgatatcaactagatcttgagacaaatggcagtattcatccacaattttaaaagaaaaggggggattggggggtacagtgcaggggaaagaatagtagacataatagcaacagacatacaaactaaag

SEQ ID NO: 12039 - DNA, 301 bp, Artificial Sequence
  Chd1.2_Wrn.2
  crRNA array
  misc_feature (148)..(157): n is a, c, g, or t
cttggctttatatatcttgtggaaaggacgaaacaccgtaatttctactaagtgtagattgcagccggcgtctggcagctaatttctactaagtgtagatgccatgtccagcagaacctttaatttctactaagtgtagatttttttnnnnnnnnnnaagcttggcgtggatccgatatcaactagatcttgagacaaatggcagtattcatccacaattttaaaagaaaaggggggattggggggtacagtgcaggggaaagaatagtagacataatagcaacagacatacaaactaaag

SEQ ID NO: 12040 - DNA, 301 bp, Artificial Sequence
  Chd1.2_Wrn.3
  crRNA array
  misc_feature (148)..(157): n is a, c, g, or t
cttggctttatatatcttgtggaaaggacgaaacaccgtaatttctactaagtgtagattgcagccggcgtctggcagctaatttctactaagtgtagatctgcagcaggccaccgcaattaatttctactaagtgtagatttttttnnnnnnnnnnaagcttggcgtggatccgatatcaactagatcttgagacaaatggcagtattcatccacaattttaaaagaaaaggggggattggggggtacagtgcaggggaaagaatagtagacataatagcaacagacatacaaactaaag

SEQ ID NO: 12041 - DNA, 301 bp, Artificial Sequence
  Chd1.2_Wrn.4
  crRNA array
  misc_feature (148)..(157): n is a, c, g, or t
cttggctttatatatcttgtggaaaggacgaaacaccgtaatttctactaagtgtagattgcagccggcgtctggcagctaatttctactaagtgtagattcgaaggacaatagatgatgtaatttctactaagtgtagatttttttnnnnnnnnnnaagcttggcgtggatccgatatcaactagatcttgagacaaatggcagtattcatccacaattttaaaagaaaaggggggattggggggtacagtgcaggggaaagaatagtagacataatagcaacagacatacaaactaaag

SEQ ID NO: 12042 - DNA, 301 bp, Artificial Sequence
  Chd1.3_Wrn.1
  crRNA array
  misc_feature (148)..(157): n is a, c, g, or t
cttggctttatatatcttgtggaaaggacgaaacaccgtaatttctactaagtgtagatatcagcaagtatgcaactattaatttctactaagtgtagatgcaaaccactcgggtaattttaatttctactaagtgtagatttttttnnnnnnnnnnaagcttggcgtggatccgatatcaactagatcttgagacaaatggcagtattcatccacaattttaaaagaaaaggggggattggggggtacagtgcaggggaaagaatagtagacataatagcaacagacatacaaactaaag

SEQ ID NO: 12043 - DNA, 301 bp, Artificial Sequence
  Chd1.3_Wrn.2
  crRNA array
  misc_feature (148)..(157): n is a, c, g, or t
cttggctttatatatcttgtggaaaggacgaaacaccgtaatttctactaagtgtagatatcagcaagtatgcaactattaatttctactaagtgtagatgccatgtccagcagaacctttaatttctactaagtgtagatttttttnnnnnnnnnnaagcttggcgtggatccgatatcaactagatcttgagacaaatggcagtattcatccacaattttaaaagaaaaggggggattggggggtacagtgcaggggaaagaatagtagacataatagcaacagacatacaaactaaag

SEQ ID NO: 12044 - DNA, 301 bp, Artificial Sequence
  Chd1.3_Wrn.3
  crRNA array
  misc_feature (148)..(157): n is a, c, g, or t
cttggctttatatatcttgtggaaaggacgaaacaccgtaatttctactaagtgtagatatcagcaagtatgcaactattaatttctactaagtgtagatctgcagcaggccaccgcaattaatttctactaagtgtagatttttttnnnnnnnnnnaagcttggcgtggatccgatatcaactagatcttgagacaaatggcagtattcatccacaattttaaaagaaaaggggggattggggggtacagtgcaggggaaagaatagtagacataatagcaacagacatacaaactaaag

SEQ ID NO: 12045 - DNA, 301 bp, Artificial Sequence
  Chd1.3_Wrn.4
  crRNA array
  misc_feature (148)..(157): n is a, c, g, or t
cttggctttatatatcttgtggaaaggacgaaacaccgtaatttctactaagtgtagatatcagcaagtatgcaactattaatttctactaagtgtagattcgaaggacaatagatgatgtaatttctactaagtgtagatttttttnnnnnnnnnnaagcttggcgtggatccgatatcaactagatcttgagacaaatggcagtattcatccacaattttaaaagaaaaggggggattggggggtacagtgcaggggaaagaatagtagacataatagcaacagacatacaaactaaag

SEQ ID NO: 12046 - DNA, 301 bp, Artificial Sequence
  Chd1.4_Wrn.1
  crRNA array
  misc_feature (148)..(157): n is a, c, g, or t
cttggctttatatatcttgtggaaaggacgaaacaccgtaatttctactaagtgtagataaatggcggataactcctcttaatttctactaagtgtagatgcaaaccactcgggtaattttaatttctactaagtgtagatttttttnnnnnnnnnnaagcttggcgtggatccgatatcaactagatcttgagacaaatggcagtattcatccacaattttaaaagaaaaggggggattggggggtacagtgcaggggaaagaatagtagacataatagcaacagacatacaaactaaag

SEQ ID NO: 12047 - DNA, 301 bp, Artificial Sequence
  Chd1.4_Wrn.2
  crRNA array
  misc_feature (148)..(157): n is a, c, g, or t
cttggctttatatatcttgtggaaaggacgaaacaccgtaatttctactaagtgtagataaatggcggataactcctcttaatttctactaagtgtagatgccatgtccagcagaacctttaatttctactaagtgtagatttttttnnnnnnnnnnaagcttggcgtggatccgatatcaactagatcttgagacaaatggcagtattcatccacaattttaaaagaaaaggggggattggggggtacagtgcaggggaaagaatagtagacataatagcaacagacatacaaactaaag

SEQ ID NO: 12048 - DNA, 301 bp, Artificial Sequence
  Chd1.4_Wrn.3
  crRNA array
  misc_feature (148)..(157): n is a, c, g, or t
cttggctttatatatcttgtggaaaggacgaaacaccgtaatttctactaagtgtagataaatggcggataactcctcttaatttctactaagtgtagatctgcagcaggccaccgcaattaatttctactaagtgtagatttttttnnnnnnnnnnaagcttggcgtggatccgatatcaactagatcttgagacaaatggcagtattcatccacaattttaaaagaaaaggggggattggggggtacagtgcaggggaaagaatagtagacataatagcaacagacatacaaactaaag

SEQ ID NO: 12049 - DNA, 301 bp, Artificial Sequence
  Chd1.4_Wrn.4
  crRNA array
  misc_feature (148)..(157): n is a, c, g, or t
cttggctttatatatcttgtggaaaggacgaaacaccgtaatttctactaagtgtagataaatggcggataactcctcttaatttctactaagtgtagattcgaaggacaatagatgatgtaatttctactaagtgtagatttttttnnnnnnnnnnaagcttggcgtggatccgatatcaactagatcttgagacaaatggcagtattcatccacaattttaaaagaaaaggggggattggggggtacagtgcaggggaaagaatagtagacataatagcaacagacatacaaactaaag

SEQ ID NO: 12050 - DNA, 301 bp, Artificial Sequence
  Chd1.1_Brca2.1
  crRNA array
  misc_feature (148)..(157): n is a, c, g, or t
cttggctttatatatcttgtggaaaggacgaaacaccgtaatttctactaagtgtagatcgccccactctgcaatccattaatttctactaagtgtagatctaagcgtagaaccagaaattaatttctactaagtgtagatttttttnnnnnnnnnnaagcttggcgtggatccgatatcaactagatcttgagacaaatggcagtattcatccacaattttaaaagaaaaggggggattggggggtacagtgcaggggaaagaatagtagacataatagcaacagacatacaaactaaag

SEQ ID NO: 12051 - DNA, 301 bp, Artificial Sequence
  Chd1.1_Brca2.2
  crRNA array
  misc_feature (148)..(157): n is a, c, g, or t
cttggctttatatatcttgtggaaaggacgaaacaccgtaatttctactaagtgtagatcgccccactctgcaatccattaatttctactaagtgtagatgatccaggtgtaacaagccataatttctactaagtgtagatttttttnnnnnnnnnnaagcttggcgtggatccgatatcaactagatcttgagacaaatggcagtattcatccacaattttaaaagaaaaggggggattggggggtacagtgcaggggaaagaatagtagacataatagcaacagacatacaaactaaag

SEQ ID NO: 12052 - DNA, 301 bp, Artificial Sequence
  Chd1.1_Brca2.3
  crRNA array
  misc_feature (148)..(157): n is a, c, g, or t
cttggctttatatatcttgtggaaaggacgaaacaccgtaatttctactaagtgtagatcgccccactctgcaatccattaatttctactaagtgtagattgaatataaactgggccacttaatttctactaagtgtagatttttttnnnnnnnnnnaagcttggcgtggatccgatatcaactagatcttgagacaaatggcagtattcatccacaattttaaaagaaaaggggggattggggggtacagtgcaggggaaagaatagtagacataatagcaacagacatacaaactaaag

SEQ ID NO: 12053 - DNA, 301 bp, Artificial Sequence
  Chd1.1_Brca2.4
  crRNA array
  misc_feature (148)..(157): n is a, c, g, or t
cttggctttatatatcttgtggaaaggacgaaacaccgtaatttctactaagtgtagatcgccccactctgcaatccattaatttctactaagtgtagatgaaacgccgtatatatagagtaatttctactaagtgtagatttttttnnnnnnnnnnaagcttggcgtggatccgatatcaactagatcttgagacaaatggcagtattcatccacaattttaaaagaaaaggggggattggggggtacagtgcaggggaaagaatagtagacataatagcaacagacatacaaactaaag

SEQ ID NO: 12054 - DNA, 301 bp, Artificial Sequence
  Chd1.2_Brca2.1
  crRNA array
  misc_feature (148)..(157): n is a, c, g, or t
cttggctttatatatcttgtggaaaggacgaaacaccgtaatttctactaagtgtagattgcagccggcgtctggcagctaatttctactaagtgtagatctaagcgtagaaccagaaattaatttctactaagtgtagatttttttnnnnnnnnnnaagcttggcgtggatccgatatcaactagatcttgagacaaatggcagtattcatccacaattttaaaagaaaaggggggattggggggtacagtgcaggggaaagaatagtagacataatagcaacagacatacaaactaaag

SEQ ID NO: 12055 - DNA, 301 bp, Artificial Sequence
  Chd1.2_Brca2.2
  crRNA array
  misc_feature (148)..(157): n is a, c, g, or t
cttggctttatatatcttgtggaaaggacgaaacaccgtaatttctactaagtgtagattgcagccggcgtctggcagctaatttctactaagtgtagatgatccaggtgtaacaagccataatttctactaagtgtagatttttttnnnnnnnnnnaagcttggcgtggatccgatatcaactagatcttgagacaaatggcagtattcatccacaattttaaaagaaaaggggggattggggggtacagtgcaggggaaagaatagtagacataatagcaacagacatacaaactaaag

SEQ ID NO: 12056 - DNA, 301 bp, Artificial Sequence
  Chd1.2_Brca2.3
  crRNA array
  misc_feature (148)..(157): n is a, c, g, or t
cttggctttatatatcttgtggaaaggacgaaacaccgtaatttctactaagtgtagattgcagccggcgtctggcagctaatttctactaagtgtagattgaatataaactgggccacttaatttctactaagtgtagatttttttnnnnnnnnnnaagcttggcgtggatccgatatcaactagatcttgagacaaatggcagtattcatccacaattttaaaagaaaaggggggattggggggtacagtgcaggggaaagaatagtagacataatagcaacagacatacaaactaaag

SEQ ID NO: 12057 - DNA, 301 bp, Artificial Sequence
  Chd1.2_Brca2.4
  crRNA array
  misc_feature (148)..(157): n is a, c, g, or t
cttggctttatatatcttgtggaaaggacgaaacaccgtaatttctactaagtgtagattgcagccggcgtctggcagctaatttctactaagtgtagatgaaacgccgtatatatagagtaatttctactaagtgtagatttttttnnnnnnnnnnaagcttggcgtggatccgatatcaactagatcttgagacaaatggcagtattcatccacaattttaaaagaaaaggggggattggggggtacagtgcaggggaaagaatagtagacataatagcaacagacatacaaactaaag

SEQ ID NO: 12058 - DNA, 301 bp, Artificial Sequence
  Chd1.3_Brca2.1
  crRNA array
  misc_feature (148)..(157): n is a, c, g, or t
cttggctttatatatcttgtggaaaggacgaaacaccgtaatttctactaagtgtagatatcagcaagtatgcaactattaatttctactaagtgtagatctaagcgtagaaccagaaattaatttctactaagtgtagatttttttnnnnnnnnnnaagcttggcgtggatccgatatcaactagatcttgagacaaatggcagtattcatccacaattttaaaagaaaaggggggattggggggtacagtgcaggggaaagaatagtagacataatagcaacagacatacaaactaaag

SEQ ID NO: 12059 - DNA, 301 bp, Artificial Sequence
  Chd1.3_Brca2.2
  crRNA array
  misc_feature (148)..(157): n is a, c, g, or t
cttggctttatatatcttgtggaaaggacgaaacaccgtaatttctactaagtgtagatatcagcaagtatgcaactattaatttctactaagtgtagatgatccaggtgtaacaagccataatttctactaagtgtagatttttttnnnnnnnnnnaagcttggcgtggatccgatatcaactagatcttgagacaaatggcagtattcatccacaattttaaaagaaaaggggggattggggggtacagtgcaggggaaagaatagtagacataatagcaacagacatacaaactaaag

SEQ ID NO: 12060 - DNA, 301 bp, Artificial Sequence
  Chd1.3_Brca2.3
  crRNA array
  misc_feature (148)..(157): n is a, c, g, or t
cttggctttatatatcttgtggaaaggacgaaacaccgtaatttctactaagtgtagatatcagcaagtatgcaactattaatttctactaagtgtagattgaatataaactgggccacttaatttctactaagtgtagatttttttnnnnnnnnnnaagcttggcgtggatccgatatcaactagatcttgagacaaatggcagtattcatccacaattttaaaagaaaaggggggattggggggtacagtgcaggggaaagaatagtagacataatagcaacagacatacaaactaaag

SEQ ID NO: 12061 - DNA, 301 bp, Artificial Sequence
  Chd1.3_Brca2.4
  crRNA array
  misc_feature (148)..(157): n is a, c, g, or t
cttggctttatatatcttgtggaaaggacgaaacaccgtaatttctactaagtgtagatatcagcaagtatgcaactattaatttctactaagtgtagatgaaacgccgtatatatagagtaatttctactaagtgtagatttttttnnnnnnnnnnaagcttggcgtggatccgatatcaactagatcttgagacaaatggcagtattcatccacaattttaaaagaaaaggggggattggggggtacagtgcaggggaaagaatagtagacataatagcaacagacatacaaactaaag

SEQ ID NO: 12062 - DNA, 301 bp, Artificial Sequence
  Chd1.4_Brca2.1
  crRNA array
  misc_feature (148)..(157): n is a, c, g, or t
cttggctttatatatcttgtggaaaggacgaaacaccgtaatttctactaagtgtagataaatggcggataactcctcttaatttctactaagtgtagatctaagcgtagaaccagaaattaatttctactaagtgtagatttttttnnnnnnnnnnaagcttggcgtggatccgatatcaactagatcttgagacaaatggcagtattcatccacaattttaaaagaaaaggggggattggggggtacagtgcaggggaaagaatagtagacataatagcaacagacatacaaactaaag

SEQ ID NO: 12063 - DNA, 301 bp, Artificial Sequence
  Chd1.4_Brca2.2
  crRNA array
  misc_feature (148)..(157): n is a, c, g, or t
cttggctttatatatcttgtggaaaggacgaaacaccgtaatttctactaagtgtagataaatggcggataactcctcttaatttctactaagtgtagatgatccaggtgtaacaagccataatttctactaagtgtagatttttttnnnnnnnnnnaagcttggcgtggatccgatatcaactagatcttgagacaaatggcagtattcatccacaattttaaaagaaaaggggggattggggggtacagtgcaggggaaagaatagtagacataatagcaacagacatacaaactaaag

SEQ ID NO: 12064 - DNA, 301 bp, Artificial Sequence
  Chd1.4_Brca2.3
  crRNA array
  misc_feature (148)..(157): n is a, c, g, or t
cttggctttatatatcttgtggaaaggacgaaacaccgtaatttctactaagtgtagataaatggcggataactcctcttaatttctactaagtgtagattgaatataaactgggccacttaatttctactaagtgtagatttttttnnnnnnnnnnaagcttggcgtggatccgatatcaactagatcttgagacaaatggcagtattcatccacaattttaaaagaaaaggggggattggggggtacagtgcaggggaaagaatagtagacataatagcaacagacatacaaactaaag

SEQ ID NO: 12065 - DNA, 301 bp, Artificial Sequence
  Chd1.4_Brca2.4
  crRNA array
  misc_feature (148)..(157): n is a, c, g, or t
cttggctttatatatcttgtggaaaggacgaaacaccgtaatttctactaagtgtagataaatggcggataactcctcttaatttctactaagtgtagatgaaacgccgtatatatagagtaatttctactaagtgtagatttttttnnnnnnnnnnaagcttggcgtggatccgatatcaactagatcttgagacaaatggcagtattcatccacaattttaaaagaaaaggggggattggggggtacagtgcaggggaaagaatagtagacataatagcaacagacatacaaactaaag

SEQ ID NO: 12066 - DNA, 301 bp, Artificial Sequence
  Chd1.1_Apc.1
  crRNA array
  misc_feature (148)..(157): n is a, c, g, or t
cttggctttatatatcttgtggaaaggacgaaacaccgtaatttctactaagtgtagatcgccccactctgcaatccattaatttctactaagtgtagatgtgatccacacgtgtagctgtaatttctactaagtgtagatttttttnnnnnnnnnnaagcttggcgtggatccgatatcaactagatcttgagacaaatggcagtattcatccacaattttaaaagaaaaggggggattggggggtacagtgcaggggaaagaatagtagacataatagcaacagacatacaaactaaag

SEQ ID NO: 12067 - DNA, 301 bp, Artificial Sequence
  Chd1.1_Apc.2
  crRNA array
  misc_feature (148)..(157): n is a, c, g, or t
cttggctttatatatcttgtggaaaggacgaaacaccgtaatttctactaagtgtagatcgccccactctgcaatccattaatttctactaagtgtagatcatctgctcgccaagacaaataatttctactaagtgtagatttttttnnnnnnnnnnaagcttggcgtggatccgatatcaactagatcttgagacaaatggcagtattcatccacaattttaaaagaaaaggggggattggggggtacagtgcaggggaaagaatagtagacataatagcaacagacatacaaactaaag

SEQ ID NO: 12068 - DNA, 301 bp, Artificial Sequence
  Chd1.1_Apc.3
  crRNA array
  misc_feature (148)..(157): n is a, c, g, or t
cttggctttatatatcttgtggaaaggacgaaacaccgtaatttctactaagtgtagatcgccccactctgcaatccattaatttctactaagtgtagatacgccaatcgacatgatgattaatttctactaagtgtagatttttttnnnnnnnnnnaagcttggcgtggatccgatatcaactagatcttgagacaaatggcagtattcatccacaattttaaaagaaaaggggggattggggggtacagtgcaggggaaagaatagtagacataatagcaacagacatacaaactaaag

SEQ ID NO: 12069 - DNA, 301 bp, Artificial Sequence
  Chd1.1_Apc.4
  crRNA array
  misc_feature (148)..(157): n is a, c, g, or t
cttggctttatatatcttgtggaaaggacgaaacaccgtaatttctactaagtgtagatcgccccactctgcaatccattaatttctactaagtgtagatcaccaggggatgatgtgccctaatttctactaagtgtagatttttttnnnnnnnnnnaagcttggcgtggatccgatatcaactagatcttgagacaaatggcagtattcatccacaattttaaaagaaaaggggggattggggggtacagtgcaggggaaagaatagtagacataatagcaacagacatacaaactaaag

SEQ ID NO: 12070 - DNA, 301 bp, Artificial Sequence
  Chd1.2_Apc.1
  crRNA array
  misc_feature (148)..(157): n is a, c, g, or t
cttggctttatatatcttgtggaaaggacgaaacaccgtaatttctactaagtgtagattgcagccggcgtctggcagctaatttctactaagtgtagatgtgatccacacgtgtagctgtaatttctactaagtgtagatttttttnnnnnnnnnnaagcttggcgtggatccgatatcaactagatcttgagacaaatggcagtattcatccacaattttaaaagaaaaggggggattggggggtacagtgcaggggaaagaatagtagacataatagcaacagacatacaaactaaag

SEQ ID NO: 12071 - DNA, 301 bp, Artificial Sequence
  Chd1.2_Apc.2
  crRNA array
  misc_feature (148)..(157): n is a, c, g, or t
cttggctttatatatcttgtggaaaggacgaaacaccgtaatttctactaagtgtagattgcagccggcgtctggcagctaatttctactaagtgtagatcatctgctcgccaagacaaataatttctactaagtgtagatttttttnnnnnnnnnnaagcttggcgtggatccgatatcaactagatcttgagacaaatggcagtattcatccacaattttaaaagaaaaggggggattggggggtacagtgcaggggaaagaatagtagacataatagcaacagacatacaaactaaag

SEQ ID NO: 12072 - DNA, 301 bp, Artificial Sequence
  Chd1.2_Apc.3
  crRNA array
  misc_feature (148)..(157): n is a, c, g, or t
cttggctttatatatcttgtggaaaggacgaaacaccgtaatttctactaagtgtagattgcagccggcgtctggcagctaatttctactaagtgtagatacgccaatcgacatgatgattaatttctactaagtgtagatttttttnnnnnnnnnnaagcttggcgtggatccgatatcaactagatcttgagacaaatggcagtattcatccacaattttaaaagaaaaggggggattggggggtacagtgcaggggaaagaatagtagacataatagcaacagacatacaaactaaag

SEQ ID NO: 12073 - DNA, 301 bp, Artificial Sequence
  Chd1.2_Apc.4
  crRNA array
  misc_feature (148)..(157): n is a, c, g, or t
cttggctttatatatcttgtggaaaggacgaaacaccgtaatttctactaagtgtagattgcagccggcgtctggcagctaatttctactaagtgtagatcaccaggggatgatgtgccctaatttctactaagtgtagatttttttnnnnnnnnnnaagcttggcgtggatccgatatcaactagatcttgagacaaatggcagtattcatccacaattttaaaagaaaaggggggattggggggtacagtgcaggggaaagaatagtagacataatagcaacagacatacaaactaaag

SEQ ID NO: 12074 - DNA, 301 bp, Artificial Sequence
  Chd1.3_Apc.1
  crRNA array
  misc_feature (148)..(157): n is a, c, g, or t
cttggctttatatatcttgtggaaaggacgaaacaccgtaatttctactaagtgtagatatcagcaagtatgcaactattaatttctactaagtgtagatgtgatccacacgtgtagctgtaatttctactaagtgtagatttttttnnnnnnnnnnaagcttggcgtggatccgatatcaactagatcttgagacaaatggcagtattcatccacaattttaaaagaaaaggggggattggggggtacagtgcaggggaaagaatagtagacataatagcaacagacatacaaactaaag

SEQ ID NO: 12075 - DNA, 301 bp, Artificial Sequence
  Chd1.3_Apc.2
  crRNA array
  misc_feature (148)..(157): n is a, c, g, or t
cttggctttatatatcttgtggaaaggacgaaacaccgtaatttctactaagtgtagatatcagcaagtatgcaactattaatttctactaagtgtagatcatctgctcgccaagacaaataatttctactaagtgtagatttttttnnnnnnnnnnaagcttggcgtggatccgatatcaactagatcttgagacaaatggcagtattcatccacaattttaaaagaaaaggggggattggggggtacagtgcaggggaaagaatagtagacataatagcaacagacatacaaactaaag

SEQ ID NO: 12076 - DNA, 301 bp, Artificial Sequence
  Chd1.3_Apc.3
  crRNA array
  misc_feature (148)..(157): n is a, c, g, or t
cttggctttatatatcttgtggaaaggacgaaacaccgtaatttctactaagtgtagatatcagcaagtatgcaactattaatttctactaagtgtagatacgccaatcgacatgatgattaatttctactaagtgtagatttttttnnnnnnnnnnaagcttggcgtggatccgatatcaactagatcttgagacaaatggcagtattcatccacaattttaaaagaaaaggggggattggggggtacagtgcaggggaaagaatagtagacataatagcaacagacatacaaactaaag

SEQ ID NO: 12077 - DNA, 301 bp, Artificial Sequence
  Chd1.3_Apc.4
  crRNA array
  misc_feature (148)..(157): n is a, c, g, or t
cttggctttatatatcttgtggaaaggacgaaacaccgtaatttctactaagtgtagatatcagcaagtatgcaactattaatttctactaagtgtagatcaccaggggatgatgtgccctaatttctactaagtgtagatttttttnnnnnnnnnnaagcttggcgtggatccgatatcaactagatcttgagacaaatggcagtattcatccacaattttaaaagaaaaggggggattggggggtacagtgcaggggaaagaatagtagacataatagcaacagacatacaaactaaag

SEQ ID NO: 12078 - DNA, 301 bp, Artificial Sequence
  Chd1.4_Apc.1
  crRNA array
  misc_feature (148)..(157): n is a, c, g, or t
cttggctttatatatcttgtggaaaggacgaaacaccgtaatttctactaagtgtagataaatggcggataactcctcttaatttctactaagtgtagatgtgatccacacgtgtagctgtaatttctactaagtgtagatttttttnnnnnnnnnnaagcttggcgtggatccgatatcaactagatcttgagacaaatggcagtattcatccacaattttaaaagaaaaggggggattggggggtacagtgcaggggaaagaatagtagacataatagcaacagacatacaaactaaag

SEQ ID NO: 12079 - DNA, 301 bp, Artificial Sequence
  Chd1.4_Apc.2
  crRNA array
  misc_feature (148)..(157): n is a, c, g, or t
cttggctttatatatcttgtggaaaggacgaaacaccgtaatttctactaagtgtagataaatggcggataactcctcttaatttctactaagtgtagatcatctgctcgccaagacaaataatttctactaagtgtagatttttttnnnnnnnnnnaagcttggcgtggatccgatatcaactagatcttgagacaaatggcagtattcatccacaattttaaaagaaaaggggggattggggggtacagtgcaggggaaagaatagtagacataatagcaacagacatacaaactaaag

SEQ ID NO: 12080 - DNA, 301 bp, Artificial Sequence
  Chd1.4_Apc.3
  crRNA array
  misc_feature (148)..(157): n is a, c, g, or t
cttggctttatatatcttgtggaaaggacgaaacaccgtaatttctactaagtgtagataaatggcggataactcctcttaatttctactaagtgtagatacgccaatcgacatgatgattaatttctactaagtgtagatttttttnnnnnnnnnnaagcttggcgtggatccgatatcaactagatcttgagacaaatggcagtattcatccacaattttaaaagaaaaggggggattggggggtacagtgcaggggaaagaatagtagacataatagcaacagacatacaaactaaag

SEQ ID NO: 12081 - DNA, 301 bp, Artificial Sequence
  Chd1.4_Apc.4
  crRNA array
  misc_feature (148)..(157): n is a, c, g, or t
cttggctttatatatcttgtggaaaggacgaaacaccgtaatttctactaagtgtagataaatggcggataactcctcttaatttctactaagtgtagatcaccaggggatgatgtgccctaatttctactaagtgtagatttttttnnnnnnnnnnaagcttggcgtggatccgatatcaactagatcttgagacaaatggcagtattcatccacaattttaaaagaaaaggggggattggggggtacagtgcaggggaaagaatagtagacataatagcaacagacatacaaactaaag

SEQ ID NO: 12082 - DNA, 301 bp, Artificial Sequence
  Chd1.1_Fanca.1
  crRNA array
  misc_feature (148)..(157): n is a, c, g, or t
cttggctttatatatcttgtggaaaggacgaaacaccgtaatttctactaagtgtagatcgccccactctgcaatccattaatttctactaagtgtagatggaggccccggggcccaccataatttctactaagtgtagatttttttnnnnnnnnnnaagcttggcgtggatccgatatcaactagatcttgagacaaatggcagtattcatccacaattttaaaagaaaaggggggattggggggtacagtgcaggggaaagaatagtagacataatagcaacagacatacaaactaaag

SEQ ID NO: 12083 - DNA, 301 bp, Artificial Sequence
  Chd1.1_Fanca.2
  crRNA array
  misc_feature (148)..(157): n is a, c, g, or t
cttggctttatatatcttgtggaaaggacgaaacaccgtaatttctactaagtgtagatcgccccactctgcaatccattaatttctactaagtgtagatagagctaccacctagacagctaatttctactaagtgtagatttttttnnnnnnnnnnaagcttggcgtggatccgatatcaactagatcttgagacaaatggcagtattcatccacaattttaaaagaaaaggggggattggggggtacagtgcaggggaaagaatagtagacataatagcaacagacatacaaactaaag

SEQ ID NO: 12084 - DNA, 301 bp, Artificial Sequence
  Chd1.1_Fanca.3
  crRNA array
  misc_feature (148)..(157): n is a, c, g, or t
cttggctttatatatcttgtggaaaggacgaaacaccgtaatttctactaagtgtagatcgccccactctgcaatccattaatttctactaagtgtagataccaactgctgtgcctcgggtaatttctactaagtgtagatttttttnnnnnnnnnnaagcttggcgtggatccgatatcaactagatcttgagacaaatggcagtattcatccacaattttaaaagaaaaggggggattggggggtacagtgcaggggaaagaatagtagacataatagcaacagacatacaaactaaag

SEQ ID NO: 12085 - DNA, 301 bp, Artificial Sequence
  Chd1.1_Fanca.4
  crRNA array
  misc_feature (148)..(157): n is a, c, g, or t
cttggctttatatatcttgtggaaaggacgaaacaccgtaatttctactaagtgtagatcgccccactctgcaatccattaatttctactaagtgtagatcacccacccctggtgccaagtaatttctactaagtgtagatttttttnnnnnnnnnnaagcttggcgtggatccgatatcaactagatcttgagacaaatggcagtattcatccacaattttaaaagaaaaggggggattggggggtacagtgcaggggaaagaatagtagacataatagcaacagacatacaaactaaag

SEQ ID NO: 12086 - DNA, 301 bp, Artificial Sequence
  Chd1.2_Fanca.1
  crRNA array
  misc_feature (148)..(157): n is a, c, g, or t
cttggctttatatatcttgtggaaaggacgaaacaccgtaatttctactaagtgtagattgcagccggcgtctggcagctaatttctactaagtgtagatggaggccccggggcccaccataatttctactaagtgtagatttttttnnnnnnnnnnaagcttggcgtggatccgatatcaactagatcttgagacaaatggcagtattcatccacaattttaaaagaaaaggggggattggggggtacagtgcaggggaaagaatagtagacataatagcaacagacatacaaactaaag

SEQ ID NO: 12087 - DNA, 301 bp, Artificial Sequence
  Chd1.2_Fanca.2
  crRNA array
  misc_feature (148)..(157): n is a, c, g, or t
cttggctttatatatcttgtggaaaggacgaaacaccgtaatttctactaagtgtagattgcagccggcgtctggcagctaatttctactaagtgtagatagagctaccacctagacagctaatttctactaagtgtagatttttttnnnnnnnnnnaagcttggcgtggatccgatatcaactagatcttgagacaaatggcagtattcatccacaattttaaaagaaaaggggggattggggggtacagtgcaggggaaagaatagtagacataatagcaacagacatacaaactaaag

SEQ ID NO: 12088 - DNA, 301 bp, Artificial Sequence
  Chd1.2_Fanca.3
  crRNA array
  misc_feature (148)..(157): n is a, c, g, or t
cttggctttatatatcttgtggaaaggacgaaacaccgtaatttctactaagtgtagattgcagccggcgtctggcagctaatttctactaagtgtagataccaactgctgtgcctcgggtaatttctactaagtgtagatttttttnnnnnnnnnnaagcttggcgtggatccgatatcaactagatcttgagacaaatggcagtattcatccacaattttaaaagaaaaggggggattggggggtacagtgcaggggaaagaatagtagacataatagcaacagacatacaaactaaag

SEQ ID NO: 12089 - DNA, 301 bp, Artificial Sequence
  Chd1.2_Fanca.4
  crRNA array
  misc_feature (148)..(157): n is a, c, g, or t
cttggctttatatatcttgtggaaaggacgaaacaccgtaatttctactaagtgtagattgcagccggcgtctggcagctaatttctactaagtgtagatcacccacccctggtgccaagtaatttctactaagtgtagatttttttnnnnnnnnnnaagcttggcgtggatccgatatcaactagatcttgagacaaatggcagtattcatccacaattttaaaagaaaaggggggattggggggtacagtgcaggggaaagaatagtagacataatagcaacagacatacaaactaaag

SEQ ID NO: 12090 - DNA, 301 bp, Artificial Sequence
  Chd1.3_Fanca.1
  crRNA array
  misc_feature (148)..(157): n is a, c, g, or t
cttggctttatatatcttgtggaaaggacgaaacaccgtaatttctactaagtgtagatatcagcaagtatgcaactattaatttctactaagtgtagatggaggccccggggcccaccataatttctactaagtgtagatttttttnnnnnnnnnnaagcttggcgtggatccgatatcaactagatcttgagacaaatggcagtattcatccacaattttaaaagaaaaggggggattggggggtacagtgcaggggaaagaatagtagacataatagcaacagacatacaaactaaag

SEQ ID NO: 12091 - DNA, 301 bp, Artificial Sequence
  Chd1.3_Fanca.2
  crRNA array
  misc_feature (148)..(157): n is a, c, g, or t
cttggctttatatatcttgtggaaaggacgaaacaccgtaatttctactaagtgtagatatcagcaagtatgcaactattaatttctactaagtgtagatagagctaccacctagacagctaatttctactaagtgtagatttttttnnnnnnnnnnaagcttggcgtggatccgatatcaactagatcttgagacaaatggcagtattcatccacaattttaaaagaaaaggggggattggggggtacagtgcaggggaaagaatagtagacataatagcaacagacatacaaactaaag

SEQ ID NO: 12092 - DNA, 301 bp, Artificial Sequence
  Chd1.3_Fanca.3
  crRNA array
  misc_feature (148)..(157): n is a, c, g, or t
cttggctttatatatcttgtggaaaggacgaaacaccgtaatttctactaagtgtagatatcagcaagtatgcaactattaatttctactaagtgtagataccaactgctgtgcctcgggtaatttctactaagtgtagatttttttnnnnnnnnnnaagcttggcgtggatccgatatcaactagatcttgagacaaatggcagtattcatccacaattttaaaagaaaaggggggattggggggtacagtgcaggggaaagaatagtagacataatagcaacagacatacaaactaaag

SEQ ID NO: 12093 - DNA, 301 bp, Artificial Sequence
  Chd1.3_Fanca.4
  crRNA array
  misc_feature (148)..(157): n is a, c, g, or t
cttggctttatatatcttgtggaaaggacgaaacaccgtaatttctactaagtgtagatatcagcaagtatgcaactattaatttctactaagtgtagatcacccacccctggtgccaagtaatttctactaagtgtagatttttttnnnnnnnnnnaagcttggcgtggatccgatatcaactagatcttgagacaaatggcagtattcatccacaattttaaaagaaaaggggggattggggggtacagtgcaggggaaagaatagtagacataatagcaacagacatacaaactaaag

SEQ ID NO: 12094 - DNA, 301 bp, Artificial Sequence
  Chd1.4_Fanca.1
  crRNA array
  misc_feature (148)..(157): n is a, c, g, or t
cttggctttatatatcttgtggaaaggacgaaacaccgtaatttctactaagtgtagataaatggcggataactcctcttaatttctactaagtgtagatggaggccccggggcccaccataatttctactaagtgtagatttttttnnnnnnnnnnaagcttggcgtggatccgatatcaactagatcttgagacaaatggcagtattcatccacaattttaaaagaaaaggggggattggggggtacagtgcaggggaaagaatagtagacataatagcaacagacatacaaactaaag

SEQ ID NO: 12095 - DNA, 301 bp, Artificial Sequence
  Chd1.4_Fanca.2
  crRNA array
  misc_feature (148)..(157): n is a, c, g, or t
cttggctttatatatcttgtggaaaggacgaaacaccgtaatttctactaagtgtagataaatggcggataactcctcttaatttctactaagtgtagatagagctaccacctagacagctaatttctactaagtgtagatttttttnnnnnnnnnnaagcttggcgtggatccgatatcaactagatcttgagacaaatggcagtattcatccacaattttaaaagaaaaggggggattggggggtacagtgcaggggaaagaatagtagacataatagcaacagacatacaaactaaag

SEQ ID NO: 12096 - DNA, 301 bp, Artificial Sequence
  Chd1.4_Fanca.3
  crRNA array
  misc_feature (148)..(157): n is a, c, g, or t
cttggctttatatatcttgtggaaaggacgaaacaccgtaatttctactaagtgtagataaatggcggataactcctcttaatttctactaagtgtagataccaactgctgtgcctcgggtaatttctactaagtgtagatttttttnnnnnnnnnnaagcttggcgtggatccgatatcaactagatcttgagacaaatggcagtattcatccacaattttaaaagaaaaggggggattggggggtacagtgcaggggaaagaatagtagacataatagcaacagacatacaaactaaag

SEQ ID NO: 12097 - DNA, 301 bp, Artificial Sequence
  Chd1.4_Fanca.4
  crRNA array
  misc_feature (148)..(157): n is a, c, g, or t
cttggctttatatatcttgtggaaaggacgaaacaccgtaatttctactaagtgtagataaatggcggataactcctcttaatttctactaagtgtagatcacccacccctggtgccaagtaatttctactaagtgtagatttttttnnnnnnnnnnaagcttggcgtggatccgatatcaactagatcttgagacaaatggcagtattcatccacaattttaaaagaaaaggggggattggggggtacagtgcaggggaaagaatagtagacataatagcaacagacatacaaactaaag

SEQ ID NO: 12098 - DNA, 301 bp, Artificial Sequence
  Chd1.1_Nf1.1
  crRNA array
  misc_feature (148)..(157): n is a, c, g, or t
cttggctttatatatcttgtggaaaggacgaaacaccgtaatttctactaagtgtagatcgccccactctgcaatccattaatttctactaagtgtagattggcgatccggaatcctctgtaatttctactaagtgtagatttttttnnnnnnnnnnaagcttggcgtggatccgatatcaactagatcttgagacaaatggcagtattcatccacaattttaaaagaaaaggggggattggggggtacagtgcaggggaaagaatagtagacataatagcaacagacatacaaactaaag

SEQ ID NO: 12099 - DNA, 301 bp, Artificial Sequence
  Chd1.1_Nf1.2
  crRNA array
  misc_feature (148)..(157): n is a, c, g, or t
cttggctttatatatcttgtggaaaggacgaaacaccgtaatttctactaagtgtagatcgccccactctgcaatccattaatttctactaagtgtagatggaaacacaacgctggcctctaatttctactaagtgtagatttttttnnnnnnnnnnaagcttggcgtggatccgatatcaactagatcttgagacaaatggcagtattcatccacaattttaaaagaaaaggggggattggggggtacagtgcaggggaaagaatagtagacataatagcaacagacatacaaactaaag

SEQ ID NO: 12100 - DNA, 301 bp, Artificial Sequence
  Chd1.1_Nf1.3
  crRNA array
  misc_feature (148)..(157): n is a, c, g, or t
cttggctttatatatcttgtggaaaggacgaaacaccgtaatttctactaagtgtagatcgccccactctgcaatccattaatttctactaagtgtagataatgatggaacgcagtcgcataatttctactaagtgtagatttttttnnnnnnnnnnaagcttggcgtggatccgatatcaactagatcttgagacaaatggcagtattcatccacaattttaaaagaaaaggggggattggggggtacagtgcaggggaaagaatagtagacataatagcaacagacatacaaactaaag

SEQ ID NO: 12101 - DNA, 301 bp, Artificial Sequence
  Chd1.1_Nf1.4
  crRNA array
  misc_feature (148)..(157): n is a, c, g, or t
cttggctttatatatcttgtggaaaggacgaaacaccgtaatttctactaagtgtagatcgccccactctgcaatccattaatttctactaagtgtagattgcaaaaccatccaccaagttaatttctactaagtgtagatttttttnnnnnnnnnnaagcttggcgtggatccgatatcaactagatcttgagacaaatggcagtattcatccacaattttaaaagaaaaggggggattggggggtacagtgcaggggaaagaatagtagacataatagcaacagacatacaaactaaag

SEQ ID NO: 12102 - DNA, 301 bp, Artificial Sequence
  Chd1.2_Nf1.1
  crRNA array
  misc_feature (148)..(157): n is a, c, g, or t
cttggctttatatatcttgtggaaaggacgaaacaccgtaatttctactaagtgtagattgcagccggcgtctggcagctaatttctactaagtgtagattggcgatccggaatcctctgtaatttctactaagtgtagatttttttnnnnnnnnnnaagcttggcgtggatccgatatcaactagatcttgagacaaatggcagtattcatccacaattttaaaagaaaaggggggattggggggtacagtgcaggggaaagaatagtagacataatagcaacagacatacaaactaaag

SEQ ID NO: 12103 - DNA, 301 bp, Artificial Sequence
  Chd1.2_Nf1.2
  crRNA array
  misc_feature (148)..(157): n is a, c, g, or t
cttggctttatatatcttgtggaaaggacgaaacaccgtaatttctactaagtgtagattgcagccggcgtctggcagctaatttctactaagtgtagatggaaacacaacgctggcctctaatttctactaagtgtagatttttttnnnnnnnnnnaagcttggcgtggatccgatatcaactagatcttgagacaaatggcagtattcatccacaattttaaaagaaaaggggggattggggggtacagtgcaggggaaagaatagtagacataatagcaacagacatacaaactaaag

SEQ ID NO: 12104 - DNA, 301 bp, Artificial Sequence
  Chd1.2_Nf1.3
  crRNA array
  misc_feature (148)..(157): n is a, c, g, or t
cttggctttatatatcttgtggaaaggacgaaacaccgtaatttctactaagtgtagattgcagccggcgtctggcagctaatttctactaagtgtagataatgatggaacgcagtcgcataatttctactaagtgtagatttttttnnnnnnnnnnaagcttggcgtggatccgatatcaactagatcttgagacaaatggcagtattcatccacaattttaaaagaaaaggggggattggggggtacagtgcaggggaaagaatagtagacataatagcaacagacatacaaactaaag

SEQ ID NO: 12105 - DNA, 301 bp, Artificial Sequence
  Chd1.2_Nf1.4
  crRNA array
  misc_feature (148)..(157): n is a, c, g, or t
cttggctttatatatcttgtggaaaggacgaaacaccgtaatttctactaagtgtagattgcagccggcgtctggcagctaatttctactaagtgtagattgcaaaaccatccaccaagttaatttctactaagtgtagatttttttnnnnnnnnnnaagcttggcgtggatccgatatcaactagatcttgagacaaatggcagtattcatccacaattttaaaagaaaaggggggattggggggtacagtgcaggggaaagaatagtagacataatagcaacagacatacaaactaaag

SEQ ID NO: 12106 - DNA, 301 bp, Artificial Sequence
  Chd1.3_Nf1.1
  crRNA array
  misc_feature (148)..(157): n is a, c, g, or t
cttggctttatatatcttgtggaaaggacgaaacaccgtaatttctactaagtgtagatatcagcaagtatgcaactattaatttctactaagtgtagattggcgatccggaatcctctgtaatttctactaagtgtagatttttttnnnnnnnnnnaagcttggcgtggatccgatatcaactagatcttgagacaaatggcagtattcatccacaattttaaaagaaaaggggggattggggggtacagtgcaggggaaagaatagtagacataatagcaacagacatacaaactaaag

SEQ ID NO: 12107 - DNA, 301 bp, Artificial Sequence
  Chd1.3_Nf1.2
  crRNA array
  misc_feature (148)..(157): n is a, c, g, or t
cttggctttatatatcttgtggaaaggacgaaacaccgtaatttctactaagtgtagatatcagcaagtatgcaactattaatttctactaagtgtagatggaaacacaacgctggcctctaatttctactaagtgtagatttttttnnnnnnnnnnaagcttggcgtggatccgatatcaactagatcttgagacaaatggcagtattcatccacaattttaaaagaaaaggggggattggggggtacagtgcaggggaaagaatagtagacataatagcaacagacatacaaactaaag

SEQ ID NO: 12108 - DNA, 301 bp, Artificial Sequence
  Chd1.3_Nf1.3
  crRNA array
  misc_feature (148)..(157): n is a, c, g, or t
cttggctttatatatcttgtggaaaggacgaaacaccgtaatttctactaagtgtagatatcagcaagtatgcaactattaatttctactaagtgtagataatgatggaacgcagtcgcataatttctactaagtgtagatttttttnnnnnnnnnnaagcttggcgtggatccgatatcaactagatcttgagacaaatggcagtattcatccacaattttaaaagaaaaggggggattggggggtacagtgcaggggaaagaatagtagacataatagcaacagacatacaaactaaag

SEQ ID NO: 12109 - DNA, 301 bp, Artificial Sequence
  Chd1.3_Nf1.4
  crRNA array
  misc_feature (148)..(157): n is a, c, g, or t
cttggctttatatatcttgtggaaaggacgaaacaccgtaatttctactaagtgtagatatcagcaagtatgcaactattaatttctactaagtgtagattgcaaaaccatccaccaagttaatttctactaagtgtagatttttttnnnnnnnnnnaagcttggcgtggatccgatatcaactagatcttgagacaaatggcagtattcatccacaattttaaaagaaaaggggggattggggggtacagtgcaggggaaagaatagtagacataatagcaacagacatacaaactaaag

SEQ ID NO: 12110 - DNA, 301 bp, Artificial Sequence
  Chd1.4_Nf1.1
  crRNA array
  misc_feature (148)..(157): n is a, c, g, or t
cttggctttatatatcttgtggaaaggacgaaacaccgtaatttctactaagtgtagataaatggcggataactcctcttaatttctactaagtgtagattggcgatccggaatcctctgtaatttctactaagtgtagatttttttnnnnnnnnnnaagcttggcgtggatccgatatcaactagatcttgagacaaatggcagtattcatccacaattttaaaagaaaaggggggattggggggtacagtgcaggggaaagaatagtagacataatagcaacagacatacaaactaaag

SEQ ID NO: 12111 - DNA, 301 bp, Artificial Sequence
  Chd1.4_Nf1.2
  crRNA array
  misc_feature (148)..(157): n is a, c, g, or t
cttggctttatatatcttgtggaaaggacgaaacaccgtaatttctactaagtgtagataaatggcggataactcctcttaatttctactaagtgtagatggaaacacaacgctggcctctaatttctactaagtgtagatttttttnnnnnnnnnnaagcttggcgtggatccgatatcaactagatcttgagacaaatggcagtattcatccacaattttaaaagaaaaggggggattggggggtacagtgcaggggaaagaatagtagacataatagcaacagacatacaaactaaag

SEQ ID NO: 12112 - DNA, 301 bp, Artificial Sequence
  Chd1.4_Nf1.3
  crRNA array
  misc_feature (148)..(157): n is a, c, g, or t
cttggctttatatatcttgtggaaaggacgaaacaccgtaatttctactaagtgtagataaatggcggataactcctcttaatttctactaagtgtagataatgatggaacgcagtcgcataatttctactaagtgtagatttttttnnnnnnnnnnaagcttggcgtggatccgatatcaactagatcttgagacaaatggcagtattcatccacaattttaaaagaaaaggggggattggggggtacagtgcaggggaaagaatagtagacataatagcaacagacatacaaactaaag

SEQ ID NO: 12113 - DNA, 301 bp, Artificial Sequence
  Chd1.4_Nf1.4
  crRNA array
  misc_feature (148)..(157): n is a, c, g, or t
cttggctttatatatcttgtggaaaggacgaaacaccgtaatttctactaagtgtagataaatggcggataactcctcttaatttctactaagtgtagattgcaaaaccatccaccaagttaatttctactaagtgtagatttttttnnnnnnnnnnaagcttggcgtggatccgatatcaactagatcttgagacaaatggcagtattcatccacaattttaaaagaaaaggggggattggggggtacagtgcaggggaaagaatagtagacataatagcaacagacatacaaactaaag

SEQ ID NO: 12114 - DNA, 301 bp, Artificial Sequence
  Chd1.1_Kdm6a.1
  crRNA array
  misc_feature (148)..(157): n is a, c, g, or t
cttggctttatatatcttgtggaaaggacgaaacaccgtaatttctactaagtgtagatcgccccactctgcaatccattaatttctactaagtgtagatgctgccgcctctcgcggcagtaatttctactaagtgtagatttttttnnnnnnnnnnaagcttggcgtggatccgatatcaactagatcttgagacaaatggcagtattcatccacaattttaaaagaaaaggggggattggggggtacagtgcaggggaaagaatagtagacataatagcaacagacatacaaactaaag

SEQ ID NO: 12115 - DNA, 301 bp, Artificial Sequence
  Chd1.1_Kdm6a.2
  crRNA array
  misc_feature (148)..(157): n is a, c, g, or t
cttggctttatatatcttgtggaaaggacgaaacaccgtaatttctactaagtgtagatcgccccactctgcaatccattaatttctactaagtgtagatgctgcaggtaaggcacgttttaatttctactaagtgtagatttttttnnnnnnnnnnaagcttggcgtggatccgatatcaactagatcttgagacaaatggcagtattcatccacaattttaaaagaaaaggggggattggggggtacagtgcaggggaaagaatagtagacataatagcaacagacatacaaactaaag

SEQ ID NO: 12116 - DNA, 301 bp, Artificial Sequence
  Chd1.1_Kdm6a.3
  crRNA array
  misc_feature (148)..(157): n is a, c, g, or t
cttggctttatatatcttgtggaaaggacgaaacaccgtaatttctactaagtgtagatcgccccactctgcaatccattaatttctactaagtgtagattgctggtgccggggaagttttaatttctactaagtgtagatttttttnnnnnnnnnnaagcttggcgtggatccgatatcaactagatcttgagacaaatggcagtattcatccacaattttaaaagaaaaggggggattggggggtacagtgcaggggaaagaatagtagacataatagcaacagacatacaaactaaag

SEQ ID NO: 12117 - DNA, 301 bp, Artificial Sequence
  Chd1.1_Kdm6a.4
  crRNA array
  misc_feature (148)..(157): n is a, c, g, or t
cttggctttatatatcttgtggaaaggacgaaacaccgtaatttctactaagtgtagatcgccccactctgcaatccattaatttctactaagtgtagattgtctcctacgaatcccccctaatttctactaagtgtagatttttttnnnnnnnnnnaagcttggcgtggatccgatatcaactagatcttgagacaaatggcagtattcatccacaattttaaaagaaaaggggggattggggggtacagtgcaggggaaagaatagtagacataatagcaacagacatacaaactaaag

SEQ ID NO: 12118 - DNA, 301 bp, Artificial Sequence
  Chd1.2_Kdm6a.1
  crRNA array
  misc_feature (148)..(157): n is a, c, g, or t
cttggctttatatatcttgtggaaaggacgaaacaccgtaatttctactaagtgtagattgcagccggcgtctggcagctaatttctactaagtgtagatgctgccgcctctcgcggcagtaatttctactaagtgtagatttttttnnnnnnnnnnaagcttggcgtggatccgatatcaactagatcttgagacaaatggcagtattcatccacaattttaaaagaaaaggggggattggggggtacagtgcaggggaaagaatagtagacataatagcaacagacatacaaactaaag

SEQ ID NO: 12119 - DNA, 301 bp, Artificial Sequence
  Chd1.2_Kdm6a.2
  crRNA array
  misc_feature (148)..(157): n is a, c, g, or t
cttggctttatatatcttgtggaaaggacgaaacaccgtaatttctactaagtgtagattgcagccggcgtctggcagctaatttctactaagtgtagatgctgcaggtaaggcacgttttaatttctactaagtgtagatttttttnnnnnnnnnnaagcttggcgtggatccgatatcaactagatcttgagacaaatggcagtattcatccacaattttaaaagaaaaggggggattggggggtacagtgcaggggaaagaatagtagacataatagcaacagacatacaaactaaag

SEQ ID NO: 12120 - DNA, 301 bp, Artificial Sequence
  Chd1.2_Kdm6a.3
  crRNA array
  misc_feature (148)..(157): n is a, c, g, or t
cttggctttatatatcttgtggaaaggacgaaacaccgtaatttctactaagtgtagattgcagccggcgtctggcagctaatttctactaagtgtagattgctggtgccggggaagttttaatttctactaagtgtagatttttttnnnnnnnnnnaagcttggcgtggatccgatatcaactagatcttgagacaaatggcagtattcatccacaattttaaaagaaaaggggggattggggggtacagtgcaggggaaagaatagtagacataatagcaacagacatacaaactaaag

SEQ ID NO: 12121 - DNA, 301 bp, Artificial Sequence
  Chd1.2_Kdm6a.4
  crRNA array
  misc_feature (148)..(157): n is a, c, g, or t
cttggctttatatatcttgtggaaaggacgaaacaccgtaatttctactaagtgtagattgcagccggcgtctggcagctaatttctactaagtgtagattgtctcctacgaatcccccctaatttctactaagtgtagatttttttnnnnnnnnnnaagcttggcgtggatccgatatcaactagatcttgagacaaatggcagtattcatccacaattttaaaagaaaaggggggattggggggtacagtgcaggggaaagaatagtagacataatagcaacagacatacaaactaaag

SEQ ID NO: 12122 - DNA, 301 bp, Artificial Sequence
  Chd1.3_Kdm6a.1
  crRNA array
  misc_feature (148)..(157): n is a, c, g, or t
cttggctttatatatcttgtggaaaggacgaaacaccgtaatttctactaagtgtagatatcagcaagtatgcaactattaatttctactaagtgtagatgctgccgcctctcgcggcagtaatttctactaagtgtagatttttttnnnnnnnnnnaagcttggcgtggatccgatatcaactagatcttgagacaaatggcagtattcatccacaattttaaaagaaaaggggggattggggggtacagtgcaggggaaagaatagtagacataatagcaacagacatacaaactaaag

SEQ ID NO: 12123 - DNA, 301 bp, Artificial Sequence
  Chd1.3_Kdm6a.2
  crRNA array
  misc_feature (148)..(157): n is a, c, g, or t
cttggctttatatatcttgtggaaaggacgaaacaccgtaatttctactaagtgtagatatcagcaagtatgcaactattaatttctactaagtgtagatgctgcaggtaaggcacgttttaatttctactaagtgtagatttttttnnnnnnnnnnaagcttggcgtggatccgatatcaactagatcttgagacaaatggcagtattcatccacaattttaaaagaaaaggggggattggggggtacagtgcaggggaaagaatagtagacataatagcaacagacatacaaactaaag

SEQ ID NO: 12124 - DNA, 301 bp, Artificial Sequence
  Chd1.3_Kdm6a.3
  crRNA array
  misc_feature (148)..(157): n is a, c, g, or t
cttggctttatatatcttgtggaaaggacgaaacaccgtaatttctactaagtgtagatatcagcaagtatgcaactattaatttctactaagtgtagattgctggtgccggggaagttttaatttctactaagtgtagatttttttnnnnnnnnnnaagcttggcgtggatccgatatcaactagatcttgagacaaatggcagtattcatccacaattttaaaagaaaaggggggattggggggtacagtgcaggggaaagaatagtagacataatagcaacagacatacaaactaaag

SEQ ID NO: 12125 - DNA, 301 bp, Artificial Sequence
  Chd1.3_Kdm6a.4
  crRNA array
  misc_feature (148)..(157): n is a, c, g, or t
cttggctttatatatcttgtggaaaggacgaaacaccgtaatttctactaagtgtagatatcagcaagtatgcaactattaatttctactaagtgtagattgtctcctacgaatcccccctaatttctactaagtgtagatttttttnnnnnnnnnnaagcttggcgtggatccgatatcaactagatcttgagacaaatggcagtattcatccacaattttaaaagaaaaggggggattggggggtacagtgcaggggaaagaatagtagacataatagcaacagacatacaaactaaag

SEQ ID NO: 12126 - DNA, 301 bp, Artificial Sequence
  Chd1.4_Kdm6a.1
  crRNA array
  misc_feature (148)..(157): n is a, c, g, or t
cttggctttatatatcttgtggaaaggacgaaacaccgtaatttctactaagtgtagataaatggcggataactcctcttaatttctactaagtgtagatgctgccgcctctcgcggcagtaatttctactaagtgtagatttttttnnnnnnnnnnaagcttggcgtggatccgatatcaactagatcttgagacaaatggcagtattcatccacaattttaaaagaaaaggggggattggggggtacagtgcaggggaaagaatagtagacataatagcaacagacatacaaactaaag

SEQ ID NO: 12127 - DNA, 301 bp, Artificial Sequence
  Chd1.4_Kdm6a.2
  crRNA array
  misc_feature (148)..(157): n is a, c, g, or t
cttggctttatatatcttgtggaaaggacgaaacaccgtaatttctactaagtgtagataaatggcggataactcctcttaatttctactaagtgtagatgctgcaggtaaggcacgttttaatttctactaagtgtagatttttttnnnnnnnnnnaagcttggcgtggatccgatatcaactagatcttgagacaaatggcagtattcatccacaattttaaaagaaaaggggggattggggggtacagtgcaggggaaagaatagtagacataatagcaacagacatacaaactaaag

SEQ ID NO: 12128 - DNA, 301 bp, Artificial Sequence
  Chd1.4_Kdm6a.3
  crRNA array
  misc_feature (148)..(157): n is a, c, g, or t
cttggctttatatatcttgtggaaaggacgaaacaccgtaatttctactaagtgtagataaatggcggataactcctcttaatttctactaagtgtagattgctggtgccggggaagttttaatttctactaagtgtagatttttttnnnnnnnnnnaagcttggcgtggatccgatatcaactagatcttgagacaaatggcagtattcatccacaattttaaaagaaaaggggggattggggggtacagtgcaggggaaagaatagtagacataatagcaacagacatacaaactaaag

SEQ ID NO: 12129 - DNA, 301 bp, Artificial Sequence
  Chd1.4_Kdm6a.4
  crRNA array
  misc_feature (148)..(157): n is a, c, g, or t
cttggctttatatatcttgtggaaaggacgaaacaccgtaatttctactaagtgtagataaatggcggataactcctcttaatttctactaagtgtagattgtctcctacgaatcccccctaatttctactaagtgtagatttttttnnnnnnnnnnaagcttggcgtggatccgatatcaactagatcttgagacaaatggcagtattcatccacaattttaaaagaaaaggggggattggggggtacagtgcaggggaaagaatagtagacataatagcaacagacatacaaactaaag

SEQ ID NO: 12130 - DNA, 301 bp, Artificial Sequence
  Chd1.1_Ercc5.1
  crRNA array
  misc_feature (148)..(157): n is a, c, g, or t
cttggctttatatatcttgtggaaaggacgaaacaccgtaatttctactaagtgtagatcgccccactctgcaatccattaatttctactaagtgtagatacggcacgagcaagagacactaatttctactaagtgtagatttttttnnnnnnnnnnaagcttggcgtggatccgatatcaactagatcttgagacaaatggcagtattcatccacaattttaaaagaaaaggggggattggggggtacagtgcaggggaaagaatagtagacataatagcaacagacatacaaactaaag

SEQ ID NO: 12131 - DNA, 301 bp, Artificial Sequence
  Chd1.1_Ercc5.2
  crRNA array
  misc_feature (148)..(157): n is a, c, g, or t
cttggctttatatatcttgtggaaaggacgaaacaccgtaatttctactaagtgtagatcgccccactctgcaatccattaatttctactaagtgtagatgagtatcacatcggtgactctaatttctactaagtgtagatttttttnnnnnnnnnnaagcttggcgtggatccgatatcaactagatcttgagacaaatggcagtattcatccacaattttaaaagaaaaggggggattggggggtacagtgcaggggaaagaatagtagacataatagcaacagacatacaaactaaag

SEQ ID NO: 12132 - DNA, 301 bp, Artificial Sequence
  Chd1.1_Ercc5.3
  crRNA array
  misc_feature (148)..(157): n is a, c, g, or t
cttggctttatatatcttgtggaaaggacgaaacaccgtaatttctactaagtgtagatcgccccactctgcaatccattaatttctactaagtgtagatggagtgggtccaggcctcgttaatttctactaagtgtagatttttttnnnnnnnnnnaagcttggcgtggatccgatatcaactagatcttgagacaaatggcagtattcatccacaattttaaaagaaaaggggggattggggggtacagtgcaggggaaagaatagtagacataatagcaacagacatacaaactaaag

SEQ ID NO: 12133 - DNA, 301 bp, Artificial Sequence
  Chd1.1_Ercc5.4
  crRNA array
  misc_feature (148)..(157): n is a, c, g, or t
cttggctttatatatcttgtggaaaggacgaaacaccgtaatttctactaagtgtagatcgccccactctgcaatccattaatttctactaagtgtagatcagagccggtggaataatgttaatttctactaagtgtagatttttttnnnnnnnnnnaagcttggcgtggatccgatatcaactagatcttgagacaaatggcagtattcatccacaattttaaaagaaaaggggggattggggggtacagtgcaggggaaagaatagtagacataatagcaacagacatacaaactaaag

SEQ ID NO: 12134 - DNA, 301 bp, Artificial Sequence
  Chd1.2_Ercc5.1
  crRNA array
  misc_feature (148)..(157): n is a, c, g, or t
cttggctttatatatcttgtggaaaggacgaaacaccgtaatttctactaagtgtagattgcagccggcgtctggcagctaatttctactaagtgtagatacggcacgagcaagagacactaatttctactaagtgtagatttttttnnnnnnnnnnaagcttggcgtggatccgatatcaactagatcttgagacaaatggcagtattcatccacaattttaaaagaaaaggggggattggggggtacagtgcaggggaaagaatagtagacataatagcaacagacatacaaactaaag

SEQ ID NO: 12135 - DNA, 301 bp, Artificial Sequence
  Chd1.2_Ercc5.2
  crRNA array
  misc_feature (148)..(157): n is a, c, g, or t
cttggctttatatatcttgtggaaaggacgaaacaccgtaatttctactaagtgtagattgcagccggcgtctggcagctaatttctactaagtgtagatgagtatcacatcggtgactctaatttctactaagtgtagatttttttnnnnnnnnnnaagcttggcgtggatccgatatcaactagatcttgagacaaatggcagtattcatccacaattttaaaagaaaaggggggattggggggtacagtgcaggggaaagaatagtagacataatagcaacagacatacaaactaaag

SEQ ID NO: 12136 - DNA, 301 bp, Artificial Sequence
  Chd1.2_Ercc5.3
  crRNA array
  misc_feature (148)..(157): n is a, c, g, or t
cttggctttatatatcttgtggaaaggacgaaacaccgtaatttctactaagtgtagattgcagccggcgtctggcagctaatttctactaagtgtagatggagtgggtccaggcctcgttaatttctactaagtgtagatttttttnnnnnnnnnnaagcttggcgtggatccgatatcaactagatcttgagacaaatggcagtattcatccacaattttaaaagaaaaggggggattggggggtacagtgcaggggaaagaatagtagacataatagcaacagacatacaaactaaag

SEQ ID NO: 12137 - DNA, 301 bp, Artificial Sequence
  Chd1.2_Ercc5.4
  crRNA array
  misc_feature (148)..(157): n is a, c, g, or t
cttggctttatatatcttgtggaaaggacgaaacaccgtaatttctactaagtgtagattgcagccggcgtctggcagctaatttctactaagtgtagatcagagccggtggaataatgttaatttctactaagtgtagatttttttnnnnnnnnnnaagcttggcgtggatccgatatcaactagatcttgagacaaatggcagtattcatccacaattttaaaagaaaaggggggattggggggtacagtgcaggggaaagaatagtagacataatagcaacagacatacaaactaaag

SEQ ID NO: 12138 - DNA, 301 bp, Artificial Sequence
  Chd1.3_Ercc5.1
  crRNA array
  misc_feature (148)..(157): n is a, c, g, or t
cttggctttatatatcttgtggaaaggacgaaacaccgtaatttctactaagtgtagatatcagcaagtatgcaactattaatttctactaagtgtagatacggcacgagcaagagacactaatttctactaagtgtagatttttttnnnnnnnnnnaagcttggcgtggatccgatatcaactagatcttgagacaaatggcagtattcatccacaattttaaaagaaaaggggggattggggggtacagtgcaggggaaagaatagtagacataatagcaacagacatacaaactaaag

SEQ ID NO: 12139 - DNA, 301 bp, Artificial Sequence
  Chd1.3_Ercc5.2
  crRNA array
  misc_feature (148)..(157): n is a, c, g, or t
cttggctttatatatcttgtggaaaggacgaaacaccgtaatttctactaagtgtagatatcagcaagtatgcaactattaatttctactaagtgtagatgagtatcacatcggtgactctaatttctactaagtgtagatttttttnnnnnnnnnnaagcttggcgtggatccgatatcaactagatcttgagacaaatggcagtattcatccacaattttaaaagaaaaggggggattggggggtacagtgcaggggaaagaatagtagacataatagcaacagacatacaaactaaag

SEQ ID NO: 12140 - DNA, 301 bp, Artificial Sequence
  Chd1.3_Ercc5.3
  crRNA array
  misc_feature (148)..(157): n is a, c, g, or t
cttggctttatatatcttgtggaaaggacgaaacaccgtaatttctactaagtgtagatatcagcaagtatgcaactattaatttctactaagtgtagatggagtgggtccaggcctcgttaatttctactaagtgtagatttttttnnnnnnnnnnaagcttggcgtggatccgatatcaactagatcttgagacaaatggcagtattcatccacaattttaaaagaaaaggggggattggggggtacagtgcaggggaaagaatagtagacataatagcaacagacatacaaactaaag

SEQ ID NO: 12141 - DNA, 301 bp, Artificial Sequence
  Chd1.3_Ercc5.4
  crRNA array
  misc_feature (148)..(157): n is a, c, g, or t
cttggctttatatatcttgtggaaaggacgaaacaccgtaatttctactaagtgtagatatcagcaagtatgcaactattaatttctactaagtgtagatcagagccggtggaataatgttaatttctactaagtgtagatttttttnnnnnnnnnnaagcttggcgtggatccgatatcaactagatcttgagacaaatggcagtattcatccacaattttaaaagaaaaggggggattggggggtacagtgcaggggaaagaatagtagacataatagcaacagacatacaaactaaag

SEQ ID NO: 12142 - DNA, 301 bp, Artificial Sequence
  Chd1.4_Ercc5.1
  crRNA array
  misc_feature (148)..(157): n is a, c, g, or t
cttggctttatatatcttgtggaaaggacgaaacaccgtaatttctactaagtgtagataaatggcggataactcctcttaatttctactaagtgtagatacggcacgagcaagagacactaatttctactaagtgtagatttttttnnnnnnnnnnaagcttggcgtggatccgatatcaactagatcttgagacaaatggcagtattcatccacaattttaaaagaaaaggggggattggggggtacagtgcaggggaaagaatagtagacataatagcaacagacatacaaactaaag

SEQ ID NO: 12143 - DNA, 301 bp, Artificial Sequence
  Chd1.4_Ercc5.2
  crRNA array
  misc_feature (148)..(157): n is a, c, g, or t
cttggctttatatatcttgtggaaaggacgaaacaccgtaatttctactaagtgtagataaatggcggataactcctcttaatttctactaagtgtagatgagtatcacatcggtgactctaatttctactaagtgtagatttttttnnnnnnnnnnaagcttggcgtggatccgatatcaactagatcttgagacaaatggcagtattcatccacaattttaaaagaaaaggggggattggggggtacagtgcaggggaaagaatagtagacataatagcaacagacatacaaactaaag

SEQ ID NO: 12144 - DNA, 301 bp, Artificial Sequence
  Chd1.4_Ercc5.3
  crRNA array
  misc_feature (148)..(157): n is a, c, g, or t
cttggctttatatatcttgtggaaaggacgaaacaccgtaatttctactaagtgtagataaatggcggataactcctcttaatttctactaagtgtagatggagtgggtccaggcctcgttaatttctactaagtgtagatttttttnnnnnnnnnnaagcttggcgtggatccgatatcaactagatcttgagacaaatggcagtattcatccacaattttaaaagaaaaggggggattggggggtacagtgcaggggaaagaatagtagacataatagcaacagacatacaaactaaag

SEQ ID NO: 12145 - DNA, 301 bp, Artificial Sequence
  Chd1.4_Ercc5.4
  crRNA array
  misc_feature (148)..(157): n is a, c, g, or t
cttggctttatatatcttgtggaaaggacgaaacaccgtaatttctactaagtgtagataaatggcggataactcctcttaatttctactaagtgtagatcagagccggtggaataatgttaatttctactaagtgtagatttttttnnnnnnnnnnaagcttggcgtggatccgatatcaactagatcttgagacaaatggcagtattcatccacaattttaaaagaaaaggggggattggggggtacagtgcaggggaaagaatagtagacataatagcaacagacatacaaactaaag

SEQ ID NO: 12146 - DNA, 301 bp, Artificial Sequence
  Chd1.1_Arid1b.1
  crRNA array
  misc_feature (148)..(157): n is a, c, g, or t
cttggctttatatatcttgtggaaaggacgaaacaccgtaatttctactaagtgtagatcgccccactctgcaatccattaatttctactaagtgtagatgctgctgctgtagtgcgtggtaatttctactaagtgtagatttttttnnnnnnnnnnaagcttggcgtggatccgatatcaactagatcttgagacaaatggcagtattcatccacaattttaaaagaaaaggggggattggggggtacagtgcaggggaaagaatagtagacataatagcaacagacatacaaactaaag

SEQ ID NO: 12147 - DNA, 301 bp, Artificial Sequence
  Chd1.1_Arid1b.2
  crRNA array
  misc_feature (148)..(157): n is a, c, g, or t
cttggctttatatatcttgtggaaaggacgaaacaccgtaatttctactaagtgtagatcgccccactctgcaatccattaatttctactaagtgtagatagtgcaaaactgagcgcgggtaatttctactaagtgtagatttttttnnnnnnnnnnaagcttggcgtggatccgatatcaactagatcttgagacaaatggcagtattcatccacaattttaaaagaaaaggggggattggggggtacagtgcaggggaaagaatagtagacataatagcaacagacatacaaactaaag

SEQ ID NO: 12148 - DNA, 301 bp, Artificial Sequence
  Chd1.1_Arid1b.3
  crRNA array
  misc_feature (148)..(157): n is a, c, g, or t
cttggctttatatatcttgtggaaaggacgaaacaccgtaatttctactaagtgtagatcgccccactctgcaatccattaatttctactaagtgtagatcactcaaaggcgaacaggtataatttctactaagtgtagatttttttnnnnnnnnnnaagcttggcgtggatccgatatcaactagatcttgagacaaatggcagtattcatccacaattttaaaagaaaaggggggattggggggtacagtgcaggggaaagaatagtagacataatagcaacagacatacaaactaaag

SEQ ID NO: 12149 - DNA, 301 bp, Artificial Sequence
  Chd1.1_Arid1b.4
  crRNA array
  misc_feature (148)..(157): n is a, c, g, or t
cttggctttatatatcttgtggaaaggacgaaacaccgtaatttctactaagtgtagatcgccccactctgcaatccattaatttctactaagtgtagatctcctggctccgtagaagcataatttctactaagtgtagatttttttnnnnnnnnnnaagcttggcgtggatccgatatcaactagatcttgagacaaatggcagtattcatccacaattttaaaagaaaaggggggattggggggtacagtgcaggggaaagaatagtagacataatagcaacagacatacaaactaaag

SEQ ID NO: 12150 - DNA, 301 bp, Artificial Sequence
  Chd1.2_Arid1b.1
  crRNA array
  misc_feature (148)..(157): n is a, c, g, or t
cttggctttatatatcttgtggaaaggacgaaacaccgtaatttctactaagtgtagattgcagccggcgtctggcagctaatttctactaagtgtagatgctgctgctgtagtgcgtggtaatttctactaagtgtagatttttttnnnnnnnnnnaagcttggcgtggatccgatatcaactagatcttgagacaaatggcagtattcatccacaattttaaaagaaaaggggggattggggggtacagtgcaggggaaagaatagtagacataatagcaacagacatacaaactaaag

SEQ ID NO: 12151 - DNA, 301 bp, Artificial Sequence
  Chd1.2_Arid1b.2
  crRNA array
  misc_feature (148)..(157): n is a, c, g, or t
cttggctttatatatcttgtggaaaggacgaaacaccgtaatttctactaagtgtagattgcagccggcgtctggcagctaatttctactaagtgtagatagtgcaaaactgagcgcgggtaatttctactaagtgtagatttttttnnnnnnnnnnaagcttggcgtggatccgatatcaactagatcttgagacaaatggcagtattcatccacaattttaaaagaaaaggggggattggggggtacagtgcaggggaaagaatagtagacataatagcaacagacatacaaactaaag

SEQ ID NO: 12152 - DNA, 301 bp, Artificial Sequence
  Chd1.2_Arid1b.3
  crRNA array
  misc_feature (148)..(157): n is a, c, g, or t
cttggctttatatatcttgtggaaaggacgaaacaccgtaatttctactaagtgtagattgcagccggcgtctggcagctaatttctactaagtgtagatcactcaaaggcgaacaggtataatttctactaagtgtagatttttttnnnnnnnnnnaagcttggcgtggatccgatatcaactagatcttgagacaaatggcagtattcatccacaattttaaaagaaaaggggggattggggggtacagtgcaggggaaagaatagtagacataatagcaacagacatacaaactaaag

SEQ ID NO: 12153 - DNA, 301 bp, Artificial Sequence
  Chd1.2_Arid1b.4
  crRNA array
  misc_feature (148)..(157): n is a, c, g, or t
cttggctttatatatcttgtggaaaggacgaaacaccgtaatttctactaagtgtagattgcagccggcgtctggcagctaatttctactaagtgtagatctcctggctccgtagaagcataatttctactaagtgtagatttttttnnnnnnnnnnaagcttggcgtggatccgatatcaactagatcttgagacaaatggcagtattcatccacaattttaaaagaaaaggggggattggggggtacagtgcaggggaaagaatagtagacataatagcaacagacatacaaactaaag

SEQ ID NO: 12154 - DNA, 301 bp, Artificial Sequence
  Chd1.3_Arid1b.1
  crRNA array
  misc_feature (148)..(157): n is a, c, g, or t
cttggctttatatatcttgtggaaaggacgaaacaccgtaatttctactaagtgtagatatcagcaagtatgcaactattaatttctactaagtgtagatgctgctgctgtagtgcgtggtaatttctactaagtgtagatttttttnnnnnnnnnnaagcttggcgtggatccgatatcaactagatcttgagacaaatggcagtattcatccacaattttaaaagaaaaggggggattggggggtacagtgcaggggaaagaatagtagacataatagcaacagacatacaaactaaag

SEQ ID NO: 12155 - DNA, 301 bp, Artificial Sequence
  Chd1.3_Arid1b.2
  crRNA array
  misc_feature (148)..(157): n is a, c, g, or t
cttggctttatatatcttgtggaaaggacgaaacaccgtaatttctactaagtgtagatatcagcaagtatgcaactattaatttctactaagtgtagatagtgcaaaactgagcgcgggtaatttctactaagtgtagatttttttnnnnnnnnnnaagcttggcgtggatccgatatcaactagatcttgagacaaatggcagtattcatccacaattttaaaagaaaaggggggattggggggtacagtgcaggggaaagaatagtagacataatagcaacagacatacaaactaaag

SEQ ID NO: 12156 - DNA, 301 bp, Artificial Sequence
  Chd1.3_Arid1b.3
  crRNA array
  misc_feature (148)..(157): n is a, c, g, or t
cttggctttatatatcttgtggaaaggacgaaacaccgtaatttctactaagtgtagatatcagcaagtatgcaactattaatttctactaagtgtagatcactcaaaggcgaacaggtataatttctactaagtgtagatttttttnnnnnnnnnnaagcttggcgtggatccgatatcaactagatcttgagacaaatggcagtattcatccacaattttaaaagaaaaggggggattggggggtacagtgcaggggaaagaatagtagacataatagcaacagacatacaaactaaag

SEQ ID NO: 12157 - DNA, 301 bp, Artificial Sequence
  Chd1.3_Arid1b.4
  crRNA array
  misc_feature (148)..(157): n is a, c, g, or t
cttggctttatatatcttgtggaaaggacgaaacaccgtaatttctactaagtgtagatatcagcaagtatgcaactattaatttctactaagtgtagatctcctggctccgtagaagcataatttctactaagtgtagatttttttnnnnnnnnnnaagcttggcgtggatccgatatcaactagatcttgagacaaatggcagtattcatccacaattttaaaagaaaaggggggattggggggtacagtgcaggggaaagaatagtagacataatagcaacagacatacaaactaaag

SEQ ID NO: 12158 - DNA, 301 bp, Artificial Sequence
  Chd1.4_Arid1b.1
  crRNA array
  misc_feature (148)..(157): n is a, c, g, or t
cttggctttatatatcttgtggaaaggacgaaacaccgtaatttctactaagtgtagataaatggcggataactcctcttaatttctactaagtgtagatgctgctgctgtagtgcgtggtaatttctactaagtgtagatttttttnnnnnnnnnnaagcttggcgtggatccgatatcaactagatcttgagacaaatggcagtattcatccacaattttaaaagaaaaggggggattggggggtacagtgcaggggaaagaatagtagacataatagcaacagacatacaaactaaag

SEQ ID NO: 12159 - DNA, 301 bp, Artificial Sequence
  Chd1.4_Arid1b.2
  crRNA array
  misc_feature (148)..(157): n is a, c, g, or t
cttggctttatatatcttgtggaaaggacgaaacaccgtaatttctactaagtgtagataaatggcggataactcctcttaatttctactaagtgtagatagtgcaaaactgagcgcgggtaatttctactaagtgtagatttttttnnnnnnnnnnaagcttggcgtggatccgatatcaactagatcttgagacaaatggcagtattcatccacaattttaaaagaaaaggggggattggggggtacagtgcaggggaaagaatagtagacataatagcaacagacatacaaactaaag

SEQ ID NO: 12160 - DNA, 301 bp, Artificial Sequence
  Chd1.4_Arid1b.3
  crRNA array
  misc_feature (148)..(157): n is a, c, g, or t
cttggctttatatatcttgtggaaaggacgaaacaccgtaatttctactaagtgtagataaatggcggataactcctcttaatttctactaagtgtagatcactcaaaggcgaacaggtataatttctactaagtgtagatttttttnnnnnnnnnnaagcttggcgtggatccgatatcaactagatcttgagacaaatggcagtattcatccacaattttaaaagaaaaggggggattggggggtacagtgcaggggaaagaatagtagacataatagcaacagacatacaaactaaag

SEQ ID NO: 12161 - DNA, 301 bp, Artificial Sequence
  Chd1.4_Arid1b.4
  crRNA array
  misc_feature (148)..(157): n is a, c, g, or t
cttggctttatatatcttgtggaaaggacgaaacaccgtaatttctactaagtgtagataaatggcggataactcctcttaatttctactaagtgtagatctcctggctccgtagaagcataatttctactaagtgtagatttttttnnnnnnnnnnaagcttggcgtggatccgatatcaactagatcttgagacaaatggcagtattcatccacaattttaaaagaaaaggggggattggggggtacagtgcaggggaaagaatagtagacataatagcaacagacatacaaactaaag

SEQ ID NO: 12162 - DNA, 301 bp, Artificial Sequence
  Chd1.1_Rb1.1
  crRNA array
  misc_feature (148)..(157): n is a, c, g, or t
cttggctttatatatcttgtggaaaggacgaaacaccgtaatttctactaagtgtagatcgccccactctgcaatccattaatttctactaagtgtagattctgacatgatcgggtaccttaatttctactaagtgtagatttttttnnnnnnnnnnaagcttggcgtggatccgatatcaactagatcttgagacaaatggcagtattcatccacaattttaaaagaaaaggggggattggggggtacagtgcaggggaaagaatagtagacataatagcaacagacatacaaactaaag

SEQ ID NO: 12163 - DNA, 301 bp, Artificial Sequence
  Chd1.1_Rb1.2
  crRNA array
  misc_feature (148)..(157): n is a, c, g, or t
cttggctttatatatcttgtggaaaggacgaaacaccgtaatttctactaagtgtagatcgccccactctgcaatccattaatttctactaagtgtagatgtctctgcatgaaaacggagtaatttctactaagtgtagatttttttnnnnnnnnnnaagcttggcgtggatccgatatcaactagatcttgagacaaatggcagtattcatccacaattttaaaagaaaaggggggattggggggtacagtgcaggggaaagaatagtagacataatagcaacagacatacaaactaaag

SEQ ID NO: 12164 - DNA, 301 bp, Artificial Sequence
  Chd1.1_Rb1.3
  crRNA array
  misc_feature (148)..(157): n is a, c, g, or t
cttggctttatatatcttgtggaaaggacgaaacaccgtaatttctactaagtgtagatcgccccactctgcaatccattaatttctactaagtgtagatagccaatctggtctaataactaatttctactaagtgtagatttttttnnnnnnnnnnaagcttggcgtggatccgatatcaactagatcttgagacaaatggcagtattcatccacaattttaaaagaaaaggggggattggggggtacagtgcaggggaaagaatagtagacataatagcaacagacatacaaactaaag

SEQ ID NO: 12165 - DNA, 301 bp, Artificial Sequence
  Chd1.1_Rb1.4
  crRNA array
  misc_feature (148)..(157): n is a, c, g, or t
cttggctttatatatcttgtggaaaggacgaaacaccgtaatttctactaagtgtagatcgccccactctgcaatccattaatttctactaagtgtagattgtagctcagtaaaagtgaataatttctactaagtgtagatttttttnnnnnnnnnnaagcttggcgtggatccgatatcaactagatcttgagacaaatggcagtattcatccacaattttaaaagaaaaggggggattggggggtacagtgcaggggaaagaatagtagacataatagcaacagacatacaaactaaag

SEQ ID NO: 12166 - DNA, 301 bp, Artificial Sequence
  Chd1.2_Rb1.1
  crRNA array
  misc_feature (148)..(157): n is a, c, g, or t
cttggctttatatatcttgtggaaaggacgaaacaccgtaatttctactaagtgtagattgcagccggcgtctggcagctaatttctactaagtgtagattctgacatgatcgggtaccttaatttctactaagtgtagatttttttnnnnnnnnnnaagcttggcgtggatccgatatcaactagatcttgagacaaatggcagtattcatccacaattttaaaagaaaaggggggattggggggtacagtgcaggggaaagaatagtagacataatagcaacagacatacaaactaaag

SEQ ID NO: 12167 - DNA, 301 bp, Artificial Sequence
  Chd1.2_Rb1.2
  crRNA array
  misc_feature (148)..(157): n is a, c, g, or t
cttggctttatatatcttgtggaaaggacgaaacaccgtaatttctactaagtgtagattgcagccggcgtctggcagctaatttctactaagtgtagatgtctctgcatgaaaacggagtaatttctactaagtgtagatttttttnnnnnnnnnnaagcttggcgtggatccgatatcaactagatcttgagacaaatggcagtattcatccacaattttaaaagaaaaggggggattggggggtacagtgcaggggaaagaatagtagacataatagcaacagacatacaaactaaag

SEQ ID NO: 12168 - DNA, 301 bp, Artificial Sequence
  Chd1.2_Rb1.3
  crRNA array
  misc_feature (148)..(157): n is a, c, g, or t
cttggctttatatatcttgtggaaaggacgaaacaccgtaatttctactaagtgtagattgcagccggcgtctggcagctaatttctactaagtgtagatagccaatctggtctaataactaatttctactaagtgtagatttttttnnnnnnnnnnaagcttggcgtggatccgatatcaactagatcttgagacaaatggcagtattcatccacaattttaaaagaaaaggggggattggggggtacagtgcaggggaaagaatagtagacataatagcaacagacatacaaactaaag

SEQ ID NO: 12169 - DNA, 301 bp, Artificial Sequence
  Chd1.2_Rb1.4
  crRNA array
  misc_feature (148)..(157): n is a, c, g, or t
cttggctttatatatcttgtggaaaggacgaaacaccgtaatttctactaagtgtagattgcagccggcgtctggcagctaatttctactaagtgtagattgtagctcagtaaaagtgaataatttctactaagtgtagatttttttnnnnnnnnnnaagcttggcgtggatccgatatcaactagatcttgagacaaatggcagtattcatccacaattttaaaagaaaaggggggattggggggtacagtgcaggggaaagaatagtagacataatagcaacagacatacaaactaaag

SEQ ID NO: 12170 - DNA, 301 bp, Artificial Sequence
  Chd1.3_Rb1.1
  crRNA array
  misc_feature (148)..(157): n is a, c, g, or t
cttggctttatatatcttgtggaaaggacgaaacaccgtaatttctactaagtgtagatatcagcaagtatgcaactattaatttctactaagtgtagattctgacatgatcgggtaccttaatttctactaagtgtagatttttttnnnnnnnnnnaagcttggcgtggatccgatatcaactagatcttgagacaaatggcagtattcatccacaattttaaaagaaaaggggggattggggggtacagtgcaggggaaagaatagtagacataatagcaacagacatacaaactaaag

SEQ ID NO: 12171 - DNA, 301 bp, Artificial Sequence
  Chd1.3_Rb1.2
  crRNA array
  misc_feature (148)..(157): n is a, c, g, or t
cttggctttatatatcttgtggaaaggacgaaacaccgtaatttctactaagtgtagatatcagcaagtatgcaactattaatttctactaagtgtagatgtctctgcatgaaaacggagtaatttctactaagtgtagatttttttnnnnnnnnnnaagcttggcgtggatccgatatcaactagatcttgagacaaatggcagtattcatccacaattttaaaagaaaaggggggattggggggtacagtgcaggggaaagaatagtagacataatagcaacagacatacaaactaaag

SEQ ID NO: 12172 - DNA, 301 bp, Artificial Sequence
  Chd1.3_Rb1.3
  crRNA array
  misc_feature (148)..(157): n is a, c, g, or t
cttggctttatatatcttgtggaaaggacgaaacaccgtaatttctactaagtgtagatatcagcaagtatgcaactattaatttctactaagtgtagatagccaatctggtctaataactaatttctactaagtgtagatttttttnnnnnnnnnnaagcttggcgtggatccgatatcaactagatcttgagacaaatggcagtattcatccacaattttaaaagaaaaggggggattggggggtacagtgcaggggaaagaatagtagacataatagcaacagacatacaaactaaag

SEQ ID NO: 12173 - DNA, 301 bp, Artificial Sequence
  Chd1.3_Rb1.4
  crRNA array
  misc_feature (148)..(157): n is a, c, g, or t
cttggctttatatatcttgtggaaaggacgaaacaccgtaatttctactaagtgtagatatcagcaagtatgcaactattaatttctactaagtgtagattgtagctcagtaaaagtgaataatttctactaagtgtagatttttttnnnnnnnnnnaagcttggcgtggatccgatatcaactagatcttgagacaaatggcagtattcatccacaattttaaaagaaaaggggggattggggggtacagtgcaggggaaagaatagtagacataatagcaacagacatacaaactaaag

SEQ ID NO: 12174 - DNA, 301 bp, Artificial Sequence
  Chd1.4_Rb1.1
  crRNA array
  misc_feature (148)..(157): n is a, c, g, or t
cttggctttatatatcttgtggaaaggacgaaacaccgtaatttctactaagtgtagataaatggcggataactcctcttaatttctactaagtgtagattctgacatgatcgggtaccttaatttctactaagtgtagatttttttnnnnnnnnnnaagcttggcgtggatccgatatcaactagatcttgagacaaatggcagtattcatccacaattttaaaagaaaaggggggattggggggtacagtgcaggggaaagaatagtagacataatagcaacagacatacaaactaaag

SEQ ID NO: 12175 - DNA, 301 bp, Artificial Sequence
  Chd1.4_Rb1.2
  crRNA array
  misc_feature (148)..(157): n is a, c, g, or t
cttggctttatatatcttgtggaaaggacgaaacaccgtaatttctactaagtgtagataaatggcggataactcctcttaatttctactaagtgtagatgtctctgcatgaaaacggagtaatttctactaagtgtagatttttttnnnnnnnnnnaagcttggcgtggatccgatatcaactagatcttgagacaaatggcagtattcatccacaattttaaaagaaaaggggggattggggggtacagtgcaggggaaagaatagtagacataatagcaacagacatacaaactaaag

SEQ ID NO: 12176 - DNA, 301 bp, Artificial Sequence
  Chd1.4_Rb1.3
  crRNA array
  misc_feature (148)..(157): n is a, c, g, or t
cttggctttatatatcttgtggaaaggacgaaacaccgtaatttctactaagtgtagataaatggcggataactcctcttaatttctactaagtgtagatagccaatctggtctaataactaatttctactaagtgtagatttttttnnnnnnnnnnaagcttggcgtggatccgatatcaactagatcttgagacaaatggcagtattcatccacaattttaaaagaaaaggggggattggggggtacagtgcaggggaaagaatagtagacataatagcaacagacatacaaactaaag

SEQ ID NO: 12177 - DNA, 301 bp, Artificial Sequence
  Chd1.4_Rb1.4
  crRNA array
  misc_feature (148)..(157): n is a, c, g, or t
cttggctttatatatcttgtggaaaggacgaaacaccgtaatttctactaagtgtagataaatggcggataactcctcttaatttctactaagtgtagattgtagctcagtaaaagtgaataatttctactaagtgtagatttttttnnnnnnnnnnaagcttggcgtggatccgatatcaactagatcttgagacaaatggcagtattcatccacaattttaaaagaaaaggggggattggggggtacagtgcaggggaaagaatagtagacataatagcaacagacatacaaactaaag

SEQ ID NO: 12178 - DNA, 301 bp, Artificial Sequence
  Chd1.1_Kmt2c.1
  crRNA array
  misc_feature (148)..(157): n is a, c, g, or t
cttggctttatatatcttgtggaaaggacgaaacaccgtaatttctactaagtgtagatcgccccactctgcaatccattaatttctactaagtgtagatactcgacctccacctccctataatttctactaagtgtagatttttttnnnnnnnnnnaagcttggcgtggatccgatatcaactagatcttgagacaaatggcagtattcatccacaattttaaaagaaaaggggggattggggggtacagtgcaggggaaagaatagtagacataatagcaacagacatacaaactaaag

SEQ ID NO: 12179 - DNA, 301 bp, Artificial Sequence
  Chd1.1_Kmt2c.2
  crRNA array
  misc_feature (148)..(157): n is a, c, g, or t
cttggctttatatatcttgtggaaaggacgaaacaccgtaatttctactaagtgtagatcgccccactctgcaatccattaatttctactaagtgtagatcccaaagatcagcgtggacctaatttctactaagtgtagatttttttnnnnnnnnnnaagcttggcgtggatccgatatcaactagatcttgagacaaatggcagtattcatccacaattttaaaagaaaaggggggattggggggtacagtgcaggggaaagaatagtagacataatagcaacagacatacaaactaaag

SEQ ID NO: 12180 - DNA, 301 bp, Artificial Sequence
  Chd1.1_Kmt2c.3
  crRNA array
  misc_feature (148)..(157): n is a, c, g, or t
cttggctttatatatcttgtggaaaggacgaaacaccgtaatttctactaagtgtagatcgccccactctgcaatccattaatttctactaagtgtagataaaagatccgaatcgatgcgtaatttctactaagtgtagatttttttnnnnnnnnnnaagcttggcgtggatccgatatcaactagatcttgagacaaatggcagtattcatccacaattttaaaagaaaaggggggattggggggtacagtgcaggggaaagaatagtagacataatagcaacagacatacaaactaaag

SEQ ID NO: 12181 - DNA, 301 bp, Artificial Sequence
  Chd1.1_Kmt2c.4
  crRNA array
  misc_feature (148)..(157): n is a, c, g, or t
cttggctttatatatcttgtggaaaggacgaaacaccgtaatttctactaagtgtagatcgccccactctgcaatccattaatttctactaagtgtagatctgaggcacatggaagcgattaatttctactaagtgtagatttttttnnnnnnnnnnaagcttggcgtggatccgatatcaactagatcttgagacaaatggcagtattcatccacaattttaaaagaaaaggggggattggggggtacagtgcaggggaaagaatagtagacataatagcaacagacatacaaactaaag

SEQ ID NO: 12182 - DNA, 301 bp, Artificial Sequence
  Chd1.2_Kmt2c.1
  crRNA array
  misc_feature (148)..(157): n is a, c, g, or t
cttggctttatatatcttgtggaaaggacgaaacaccgtaatttctactaagtgtagattgcagccggcgtctggcagctaatttctactaagtgtagatactcgacctccacctccctataatttctactaagtgtagatttttttnnnnnnnnnnaagcttggcgtggatccgatatcaactagatcttgagacaaatggcagtattcatccacaattttaaaagaaaaggggggattggggggtacagtgcaggggaaagaatagtagacataatagcaacagacatacaaactaaag

SEQ ID NO: 12183 - DNA, 301 bp, Artificial Sequence
  Chd1.2_Kmt2c.2
  crRNA array
  misc_feature (148)..(157): n is a, c, g, or t
cttggctttatatatcttgtggaaaggacgaaacaccgtaatttctactaagtgtagattgcagccggcgtctggcagctaatttctactaagtgtagatcccaaagatcagcgtggacctaatttctactaagtgtagatttttttnnnnnnnnnnaagcttggcgtggatccgatatcaactagatcttgagacaaatggcagtattcatccacaattttaaaagaaaaggggggattggggggtacagtgcaggggaaagaatagtagacataatagcaacagacatacaaactaaag

SEQ ID NO: 12184 - DNA, 301 bp, Artificial Sequence
  Chd1.2_Kmt2c.3
  crRNA array
  misc_feature (148)..(157): n is a, c, g, or t
cttggctttatatatcttgtggaaaggacgaaacaccgtaatttctactaagtgtagattgcagccggcgtctggcagctaatttctactaagtgtagataaaagatccgaatcgatgcgtaatttctactaagtgtagatttttttnnnnnnnnnnaagcttggcgtggatccgatatcaactagatcttgagacaaatggcagtattcatccacaattttaaaagaaaaggggggattggggggtacagtgcaggggaaagaatagtagacataatagcaacagacatacaaactaaag

SEQ ID NO: 12185 - DNA, 301 bp, Artificial Sequence
  Chd1.2_Kmt2c.4
  crRNA array
  misc_feature (148)..(157): n is a, c, g, or t
cttggctttatatatcttgtggaaaggacgaaacaccgtaatttctactaagtgtagattgcagccggcgtctggcagctaatttctactaagtgtagatctgaggcacatggaagcgattaatttctactaagtgtagatttttttnnnnnnnnnnaagcttggcgtggatccgatatcaactagatcttgagacaaatggcagtattcatccacaattttaaaagaaaaggggggattggggggtacagtgcaggggaaagaatagtagacataatagcaacagacatacaaactaaag

SEQ ID NO: 12186 - DNA, 301 bp, Artificial Sequence
  Chd1.3_Kmt2c.1
  crRNA array
  misc_feature (148)..(157): n is a, c, g, or t
cttggctttatatatcttgtggaaaggacgaaacaccgtaatttctactaagtgtagatatcagcaagtatgcaactattaatttctactaagtgtagatactcgacctccacctccctataatttctactaagtgtagatttttttnnnnnnnnnnaagcttggcgtggatccgatatcaactagatcttgagacaaatggcagtattcatccacaattttaaaagaaaaggggggattggggggtacagtgcaggggaaagaatagtagacataatagcaacagacatacaaactaaag

SEQ ID NO: 12187 - DNA, 301 bp, Artificial Sequence
  Chd1.3_Kmt2c.2
  crRNA array
  misc_feature (148)..(157): n is a, c, g, or t
cttggctttatatatcttgtggaaaggacgaaacaccgtaatttctactaagtgtagatatcagcaagtatgcaactattaatttctactaagtgtagatcccaaagatcagcgtggacctaatttctactaagtgtagatttttttnnnnnnnnnnaagcttggcgtggatccgatatcaactagatcttgagacaaatggcagtattcatccacaattttaaaagaaaaggggggattggggggtacagtgcaggggaaagaatagtagacataatagcaacagacatacaaactaaag

SEQ ID NO: 12188 - DNA, 301 bp, Artificial Sequence
  Chd1.3_Kmt2c.3
  crRNA array
  misc_feature (148)..(157): n is a, c, g, or t
cttggctttatatatcttgtggaaaggacgaaacaccgtaatttctactaagtgtagatatcagcaagtatgcaactattaatttctactaagtgtagataaaagatccgaatcgatgcgtaatttctactaagtgtagatttttttnnnnnnnnnnaagcttggcgtggatccgatatcaactagatcttgagacaaatggcagtattcatccacaattttaaaagaaaaggggggattggggggtacagtgcaggggaaagaatagtagacataatagcaacagacatacaaactaaag

SEQ ID NO: 12189 - DNA, 301 bp, Artificial Sequence
  Chd1.3_Kmt2c.4
  crRNA array
  misc_feature (148)..(157): n is a, c, g, or t
cttggctttatatatcttgtggaaaggacgaaacaccgtaatttctactaagtgtagatatcagcaagtatgcaactattaatttctactaagtgtagatctgaggcacatggaagcgattaatttctactaagtgtagatttttttnnnnnnnnnnaagcttggcgtggatccgatatcaactagatcttgagacaaatggcagtattcatccacaattttaaaagaaaaggggggattggggggtacagtgcaggggaaagaatagtagacataatagcaacagacatacaaactaaag

SEQ ID NO: 12190 - DNA, 301 bp, Artificial Sequence
  Chd1.4_Kmt2c.1
  crRNA array
  misc_feature (148)..(157): n is a, c, g, or t
cttggctttatatatcttgtggaaaggacgaaacaccgtaatttctactaagtgtagataaatggcggataactcctcttaatttctactaagtgtagatactcgacctccacctccctataatttctactaagtgtagatttttttnnnnnnnnnnaagcttggcgtggatccgatatcaactagatcttgagacaaatggcagtattcatccacaattttaaaagaaaaggggggattggggggtacagtgcaggggaaagaatagtagacataatagcaacagacatacaaactaaag

SEQ ID NO: 12191 - DNA, 301 bp, Artificial Sequence
  Chd1.4_Kmt2c.2
  crRNA array
  misc_feature (148)..(157): n is a, c, g, or t
cttggctttatatatcttgtggaaaggacgaaacaccgtaatttctactaagtgtagataaatggcggataactcctcttaatttctactaagtgtagatcccaaagatcagcgtggacctaatttctactaagtgtagatttttttnnnnnnnnnnaagcttggcgtggatccgatatcaactagatcttgagacaaatggcagtattcatccacaattttaaaagaaaaggggggattggggggtacagtgcaggggaaagaatagtagacataatagcaacagacatacaaactaaag

SEQ ID NO: 12192 - DNA, 301 bp, Artificial Sequence
  Chd1.4_Kmt2c.3
  crRNA array
  misc_feature (148)..(157): n is a, c, g, or t
cttggctttatatatcttgtggaaaggacgaaacaccgtaatttctactaagtgtagataaatggcggataactcctcttaatttctactaagtgtagataaaagatccgaatcgatgcgtaatttctactaagtgtagatttttttnnnnnnnnnnaagcttggcgtggatccgatatcaactagatcttgagacaaatggcagtattcatccacaattttaaaagaaaaggggggattggggggtacagtgcaggggaaagaatagtagacataatagcaacagacatacaaactaaag

SEQ ID NO: 12193 - DNA, 301 bp, Artificial Sequence
  Chd1.4_Kmt2c.4
  crRNA array
  misc_feature (148)..(157): n is a, c, g, or t
cttggctttatatatcttgtggaaaggacgaaacaccgtaatttctactaagtgtagataaatggcggataactcctcttaatttctactaagtgtagatctgaggcacatggaagcgattaatttctactaagtgtagatttttttnnnnnnnnnnaagcttggcgtggatccgatatcaactagatcttgagacaaatggcagtattcatccacaattttaaaagaaaaggggggattggggggtacagtgcaggggaaagaatagtagacataatagcaacagacatacaaactaaag

SEQ ID NO: 12194 - DNA, 301 bp, Artificial Sequence
  Chd1.1_Pten.1
  crRNA array
  misc_feature (148)..(157): n is a, c, g, or t
cttggctttatatatcttgtggaaaggacgaaacaccgtaatttctactaagtgtagatcgccccactctgcaatccattaatttctactaagtgtagataagcgtggtgcgtgacgcactaatttctactaagtgtagatttttttnnnnnnnnnnaagcttggcgtggatccgatatcaactagatcttgagacaaatggcagtattcatccacaattttaaaagaaaaggggggattggggggtacagtgcaggggaaagaatagtagacataatagcaacagacatacaaactaaag

SEQ ID NO: 12195 - DNA, 301 bp, Artificial Sequence
  Chd1.1_Pten.2
  crRNA array
  misc_feature (148)..(157): n is a, c, g, or t
cttggctttatatatcttgtggaaaggacgaaacaccgtaatttctactaagtgtagatcgccccactctgcaatccattaatttctactaagtgtagattgtcaccagctgaagtggcttaatttctactaagtgtagatttttttnnnnnnnnnnaagcttggcgtggatccgatatcaactagatcttgagacaaatggcagtattcatccacaattttaaaagaaaaggggggattggggggtacagtgcaggggaaagaatagtagacataatagcaacagacatacaaactaaag

SEQ ID NO: 12196 - DNA, 301 bp, Artificial Sequence
  Chd1.1_Pten.3
  crRNA array
  misc_feature (148)..(157): n is a, c, g, or t
cttggctttatatatcttgtggaaaggacgaaacaccgtaatttctactaagtgtagatcgccccactctgcaatccattaatttctactaagtgtagatggagtcaagaggctgatttttaatttctactaagtgtagatttttttnnnnnnnnnnaagcttggcgtggatccgatatcaactagatcttgagacaaatggcagtattcatccacaattttaaaagaaaaggggggattggggggtacagtgcaggggaaagaatagtagacataatagcaacagacatacaaactaaag

SEQ ID NO: 12197 - DNA, 301 bp, Artificial Sequence
  Chd1.1_Pten.4
  crRNA array
  misc_feature (148)..(157): n is a, c, g, or t
cttggctttatatatcttgtggaaaggacgaaacaccgtaatttctactaagtgtagatcgccccactctgcaatccattaatttctactaagtgtagatctgtaagctaaaccactacataatttctactaagtgtagatttttttnnnnnnnnnnaagcttggcgtggatccgatatcaactagatcttgagacaaatggcagtattcatccacaattttaaaagaaaaggggggattggggggtacagtgcaggggaaagaatagtagacataatagcaacagacatacaaactaaag

SEQ ID NO: 12198 - DNA, 301 bp, Artificial Sequence
  Chd1.2_Pten.1
  crRNA array
  misc_feature (148)..(157): n is a, c, g, or t
cttggctttatatatcttgtggaaaggacgaaacaccgtaatttctactaagtgtagattgcagccggcgtctggcagctaatttctactaagtgtagataagcgtggtgcgtgacgcactaatttctactaagtgtagatttttttnnnnnnnnnnaagcttggcgtggatccgatatcaactagatcttgagacaaatggcagtattcatccacaattttaaaagaaaaggggggattggggggtacagtgcaggggaaagaatagtagacataatagcaacagacatacaaactaaag

SEQ ID NO: 12199 - DNA, 301 bp, Artificial Sequence
  Chd1.2_Pten.2
  crRNA array
  misc_feature (148)..(157): n is a, c, g, or t
cttggctttatatatcttgtggaaaggacgaaacaccgtaatttctactaagtgtagattgcagccggcgtctggcagctaatttctactaagtgtagattgtcaccagctgaagtggcttaatttctactaagtgtagatttttttnnnnnnnnnnaagcttggcgtggatccgatatcaactagatcttgagacaaatggcagtattcatccacaattttaaaagaaaaggggggattggggggtacagtgcaggggaaagaatagtagacataatagcaacagacatacaaactaaag

SEQ ID NO: 12200 - DNA, 301 bp, Artificial Sequence
  Chd1.2_Pten.3
  crRNA array
  misc_feature (148)..(157): n is a, c, g, or t
cttggctttatatatcttgtggaaaggacgaaacaccgtaatttctactaagtgtagattgcagccggcgtctggcagctaatttctactaagtgtagatggagtcaagaggctgatttttaatttctactaagtgtagatttttttnnnnnnnnnnaagcttggcgtggatccgatatcaactagatcttgagacaaatggcagtattcatccacaattttaaaagaaaaggggggattggggggtacagtgcaggggaaagaatagtagacataatagcaacagacatacaaactaaag

SEQ ID NO: 12201 - DNA, 301 bp, Artificial Sequence
  Chd1.2_Pten.4
  crRNA array
  misc_feature (148)..(157): n is a, c, g, or t
cttggctttatatatcttgtggaaaggacgaaacaccgtaatttctactaagtgtagattgcagccggcgtctggcagctaatttctactaagtgtagatctgtaagctaaaccactacataatttctactaagtgtagatttttttnnnnnnnnnnaagcttggcgtggatccgatatcaactagatcttgagacaaatggcagtattcatccacaattttaaaagaaaaggggggattggggggtacagtgcaggggaaagaatagtagacataatagcaacagacatacaaactaaag

SEQ ID NO: 12202 - DNA, 301 bp, Artificial Sequence
  Chd1.3_Pten.1
  crRNA array
  misc_feature (148)..(157): n is a, c, g, or t
cttggctttatatatcttgtggaaaggacgaaacaccgtaatttctactaagtgtagatatcagcaagtatgcaactattaatttctactaagtgtagataagcgtggtgcgtgacgcactaatttctactaagtgtagatttttttnnnnnnnnnnaagcttggcgtggatccgatatcaactagatcttgagacaaatggcagtattcatccacaattttaaaagaaaaggggggattggggggtacagtgcaggggaaagaatagtagacataatagcaacagacatacaaactaaag

SEQ ID NO: 12203 - DNA, 301 bp, Artificial Sequence
  Chd1.3_Pten.2
  crRNA array
  misc_feature (148)..(157): n is a, c, g, or t
cttggctttatatatcttgtggaaaggacgaaacaccgtaatttctactaagtgtagatatcagcaagtatgcaactattaatttctactaagtgtagattgtcaccagctgaagtggcttaatttctactaagtgtagatttttttnnnnnnnnnnaagcttggcgtggatccgatatcaactagatcttgagacaaatggcagtattcatccacaattttaaaagaaaaggggggattggggggtacagtgcaggggaaagaatagtagacataatagcaacagacatacaaactaaag

SEQ ID NO: 12204 - DNA, 301 bp, Artificial Sequence
  Chd1.3_Pten.3
  crRNA array
  misc_feature (148)..(157): n is a, c, g, or t
cttggctttatatatcttgtggaaaggacgaaacaccgtaatttctactaagtgtagatatcagcaagtatgcaactattaatttctactaagtgtagatggagtcaagaggctgatttttaatttctactaagtgtagatttttttnnnnnnnnnnaagcttggcgtggatccgatatcaactagatcttgagacaaatggcagtattcatccacaattttaaaagaaaaggggggattggggggtacagtgcaggggaaagaatagtagacataatagcaacagacatacaaactaaag

SEQ ID NO: 12205 - DNA, 301 bp, Artificial Sequence
  Chd1.3_Pten.4
  crRNA array
  misc_feature (148)..(157): n is a, c, g, or t
cttggctttatatatcttgtggaaaggacgaaacaccgtaatttctactaagtgtagatatcagcaagtatgcaactattaatttctactaagtgtagatctgtaagctaaaccactacataatttctactaagtgtagatttttttnnnnnnnnnnaagcttggcgtggatccgatatcaactagatcttgagacaaatggcagtattcatccacaattttaaaagaaaaggggggattggggggtacagtgcaggggaaagaatagtagacataatagcaacagacatacaaactaaag

SEQ ID NO: 12206 - DNA, 301 bp, Artificial Sequence
  Chd1.4_Pten.1
  crRNA array
  misc_feature (148)..(157): n is a, c, g, or t
cttggctttatatatcttgtggaaaggacgaaacaccgtaatttctactaagtgtagataaatggcggataactcctcttaatttctactaagtgtagataagcgtggtgcgtgacgcactaatttctactaagtgtagatttttttnnnnnnnnnnaagcttggcgtggatccgatatcaactagatcttgagacaaatggcagtattcatccacaattttaaaagaaaaggggggattggggggtacagtgcaggggaaagaatagtagacataatagcaacagacatacaaactaaag

SEQ ID NO: 12207 - DNA, 301 bp, Artificial Sequence
  Chd1.4_Pten.2
  crRNA array
  misc_feature (148)..(157): n is a, c, g, or t
cttggctttatatatcttgtggaaaggacgaaacaccgtaatttctactaagtgtagataaatggcggataactcctcttaatttctactaagtgtagattgtcaccagctgaagtggcttaatttctactaagtgtagatttttttnnnnnnnnnnaagcttggcgtggatccgatatcaactagatcttgagacaaatggcagtattcatccacaattttaaaagaaaaggggggattggggggtacagtgcaggggaaagaatagtagacataatagcaacagacatacaaactaaag

SEQ ID NO: 12208 - DNA, 301 bp, Artificial Sequence
  Chd1.4_Pten.3
  crRNA array
  misc_feature (148)..(157): n is a, c, g, or t
cttggctttatatatcttgtggaaaggacgaaacaccgtaatttctactaagtgtagataaatggcggataactcctcttaatttctactaagtgtagatggagtcaagaggctgatttttaatttctactaagtgtagatttttttnnnnnnnnnnaagcttggcgtggatccgatatcaactagatcttgagacaaatggcagtattcatccacaattttaaaagaaaaggggggattggggggtacagtgcaggggaaagaatagtagacataatagcaacagacatacaaactaaag

SEQ ID NO: 12209 - DNA, 301 bp, Artificial Sequence
  Chd1.4_Pten.4
  crRNA array
  misc_feature (148)..(157): n is a, c, g, or t
cttggctttatatatcttgtggaaaggacgaaacaccgtaatttctactaagtgtagataaatggcggataactcctcttaatttctactaagtgtagatctgtaagctaaaccactacataatttctactaagtgtagatttttttnnnnnnnnnnaagcttggcgtggatccgatatcaactagatcttgagacaaatggcagtattcatccacaattttaaaagaaaaggggggattggggggtacagtgcaggggaaagaatagtagacataatagcaacagacatacaaactaaag

SEQ ID NO: 12210 - DNA, 301 bp, Artificial Sequence
  Chd1.1_Atm.1
  crRNA array
  misc_feature (148)..(157): n is a, c, g, or t
cttggctttatatatcttgtggaaaggacgaaacaccgtaatttctactaagtgtagatcgccccactctgcaatccattaatttctactaagtgtagatgagaaagtctccgaatcgtttaatttctactaagtgtagatttttttnnnnnnnnnnaagcttggcgtggatccgatatcaactagatcttgagacaaatggcagtattcatccacaattttaaaagaaaaggggggattggggggtacagtgcaggggaaagaatagtagacataatagcaacagacatacaaactaaag

SEQ ID NO: 12211 - DNA, 301 bp, Artificial Sequence
  Chd1.1_Atm.2
  crRNA array
  misc_feature (148)..(157): n is a, c, g, or t
cttggctttatatatcttgtggaaaggacgaaacaccgtaatttctactaagtgtagatcgccccactctgcaatccattaatttctactaagtgtagatcctacgagggcacgagagactaatttctactaagtgtagatttttttnnnnnnnnnnaagcttggcgtggatccgatatcaactagatcttgagacaaatggcagtattcatccacaattttaaaagaaaaggggggattggggggtacagtgcaggggaaagaatagtagacataatagcaacagacatacaaactaaag

SEQ ID NO: 12212 - DNA, 301 bp, Artificial Sequence
  Chd1.1_Atm.3
  crRNA array
  misc_feature (148)..(157): n is a, c, g, or t
cttggctttatatatcttgtggaaaggacgaaacaccgtaatttctactaagtgtagatcgccccactctgcaatccattaatttctactaagtgtagattgaaagtctccgatatgccataatttctactaagtgtagatttttttnnnnnnnnnnaagcttggcgtggatccgatatcaactagatcttgagacaaatggcagtattcatccacaattttaaaagaaaaggggggattggggggtacagtgcaggggaaagaatagtagacataatagcaacagacatacaaactaaag

SEQ ID NO: 12213 - DNA, 301 bp, Artificial Sequence
  Chd1.1_Atm.4
  crRNA array
  misc_feature (148)..(157): n is a, c, g, or t
cttggctttatatatcttgtggaaaggacgaaacaccgtaatttctactaagtgtagatcgccccactctgcaatccattaatttctactaagtgtagatggtggtgatcagtcaagtagtaatttctactaagtgtagatttttttnnnnnnnnnnaagcttggcgtggatccgatatcaactagatcttgagacaaatggcagtattcatccacaattttaaaagaaaaggggggattggggggtacagtgcaggggaaagaatagtagacataatagcaacagacatacaaactaaag

SEQ ID NO: 12214 - DNA, 301 bp, Artificial Sequence
  Chd1.2_Atm.1
  crRNA array
  misc_feature (148)..(157): n is a, c, g, or t
cttggctttatatatcttgtggaaaggacgaaacaccgtaatttctactaagtgtagattgcagccggcgtctggcagctaatttctactaagtgtagatgagaaagtctccgaatcgtttaatttctactaagtgtagatttttttnnnnnnnnnnaagcttggcgtggatccgatatcaactagatcttgagacaaatggcagtattcatccacaattttaaaagaaaaggggggattggggggtacagtgcaggggaaagaatagtagacataatagcaacagacatacaaactaaag

SEQ ID NO: 12215 - DNA, 301 bp, Artificial Sequence
  Chd1.2_Atm.2
  crRNA array
  misc_feature (148)..(157): n is a, c, g, or t
cttggctttatatatcttgtggaaaggacgaaacaccgtaatttctactaagtgtagattgcagccggcgtctggcagctaatttctactaagtgtagatcctacgagggcacgagagactaatttctactaagtgtagatttttttnnnnnnnnnnaagcttggcgtggatccgatatcaactagatcttgagacaaatggcagtattcatccacaattttaaaagaaaaggggggattggggggtacagtgcaggggaaagaatagtagacataatagcaacagacatacaaactaaag

SEQ ID NO: 12216 - DNA, 301 bp, Artificial Sequence
  Chd1.2_Atm.3
  crRNA array
  misc_feature (148)..(157): n is a, c, g, or t
cttggctttatatatcttgtggaaaggacgaaacaccgtaatttctactaagtgtagattgcagccggcgtctggcagctaatttctactaagtgtagattgaaagtctccgatatgccataatttctactaagtgtagatttttttnnnnnnnnnnaagcttggcgtggatccgatatcaactagatcttgagacaaatggcagtattcatccacaattttaaaagaaaaggggggattggggggtacagtgcaggggaaagaatagtagacataatagcaacagacatacaaactaaag

SEQ ID NO: 12217 - DNA, 301 bp, Artificial Sequence
  Chd1.2_Atm.4
  crRNA array
  misc_feature (148)..(157): n is a, c, g, or t
cttggctttatatatcttgtggaaaggacgaaacaccgtaatttctactaagtgtagattgcagccggcgtctggcagctaatttctactaagtgtagatggtggtgatcagtcaagtagtaatttctactaagtgtagatttttttnnnnnnnnnnaagcttggcgtggatccgatatcaactagatcttgagacaaatggcagtattcatccacaattttaaaagaaaaggggggattggggggtacagtgcaggggaaagaatagtagacataatagcaacagacatacaaactaaag

SEQ ID NO: 12218 - DNA, 301 bp, Artificial Sequence
  Chd1.3_Atm.1
  crRNA array
  misc_feature (148)..(157): n is a, c, g, or t
cttggctttatatatcttgtggaaaggacgaaacaccgtaatttctactaagtgtagatatcagcaagtatgcaactattaatttctactaagtgtagatgagaaagtctccgaatcgtttaatttctactaagtgtagatttttttnnnnnnnnnnaagcttggcgtggatccgatatcaactagatcttgagacaaatggcagtattcatccacaattttaaaagaaaaggggggattggggggtacagtgcaggggaaagaatagtagacataatagcaacagacatacaaactaaag

SEQ ID NO: 12219 - DNA, 301 bp, Artificial Sequence
  Chd1.3_Atm.2
  crRNA array
  misc_feature (148)..(157): n is a, c, g, or t
cttggctttatatatcttgtggaaaggacgaaacaccgtaatttctactaagtgtagatatcagcaagtatgcaactattaatttctactaagtgtagatcctacgagggcacgagagactaatttctactaagtgtagatttttttnnnnnnnnnnaagcttggcgtggatccgatatcaactagatcttgagacaaatggcagtattcatccacaattttaaaagaaaaggggggattggggggtacagtgcaggggaaagaatagtagacataatagcaacagacatacaaactaaag

SEQ ID NO: 12220 - DNA, 301 bp, Artificial Sequence
  Chd1.3_Atm.3
  crRNA array
  misc_feature (148)..(157): n is a, c, g, or t
cttggctttatatatcttgtggaaaggacgaaacaccgtaatttctactaagtgtagatatcagcaagtatgcaactattaatttctactaagtgtagattgaaagtctccgatatgccataatttctactaagtgtagatttttttnnnnnnnnnnaagcttggcgtggatccgatatcaactagatcttgagacaaatggcagtattcatccacaattttaaaagaaaaggggggattggggggtacagtgcaggggaaagaatagtagacataatagcaacagacatacaaactaaag

SEQ ID NO: 12221 - DNA, 301 bp, Artificial Sequence
  Chd1.3_Atm.4
  crRNA array
  misc_feature (148)..(157): n is a, c, g, or t
cttggctttatatatcttgtggaaaggacgaaacaccgtaatttctactaagtgtagatatcagcaagtatgcaactattaatttctactaagtgtagatggtggtgatcagtcaagtagtaatttctactaagtgtagatttttttnnnnnnnnnnaagcttggcgtggatccgatatcaactagatcttgagacaaatggcagtattcatccacaattttaaaagaaaaggggggattggggggtacagtgcaggggaaagaatagtagacataatagcaacagacatacaaactaaag

SEQ ID NO: 12222 - DNA, 301 bp, Artificial Sequence
  Chd1.4_Atm.1
  crRNA array
  misc_feature (148)..(157): n is a, c, g, or t
cttggctttatatatcttgtggaaaggacgaaacaccgtaatttctactaagtgtagataaatggcggataactcctcttaatttctactaagtgtagatgagaaagtctccgaatcgtttaatttctactaagtgtagatttttttnnnnnnnnnnaagcttggcgtggatccgatatcaactagatcttgagacaaatggcagtattcatccacaattttaaaagaaaaggggggattggggggtacagtgcaggggaaagaatagtagacataatagcaacagacatacaaactaaag

SEQ ID NO: 12223 - DNA, 301 bp, Artificial Sequence
  Chd1.4_Atm.2
  crRNA array
  misc_feature (148)..(157): n is a, c, g, or t
cttggctttatatatcttgtggaaaggacgaaacaccgtaatttctactaagtgtagataaatggcggataactcctcttaatttctactaagtgtagatcctacgagggcacgagagactaatttctactaagtgtagatttttttnnnnnnnnnnaagcttggcgtggatccgatatcaactagatcttgagacaaatggcagtattcatccacaattttaaaagaaaaggggggattggggggtacagtgcaggggaaagaatagtagacataatagcaacagacatacaaactaaag

SEQ ID NO: 12224 - DNA, 301 bp, Artificial Sequence
  Chd1.4_Atm.3
  crRNA array
  misc_feature (148)..(157): n is a, c, g, or t
cttggctttatatatcttgtggaaaggacgaaacaccgtaatttctactaagtgtagataaatggcggataactcctcttaatttctactaagtgtagattgaaagtctccgatatgccataatttctactaagtgtagatttttttnnnnnnnnnnaagcttggcgtggatccgatatcaactagatcttgagacaaatggcagtattcatccacaattttaaaagaaaaggggggattggggggtacagtgcaggggaaagaatagtagacataatagcaacagacatacaaactaaag

SEQ ID NO: 12225 - DNA, 301 bp, Artificial Sequence
  Chd1.4_Atm.4
  crRNA array
  misc_feature (148)..(157): n is a, c, g, or t
cttggctttatatatcttgtggaaaggacgaaacaccgtaatttctactaagtgtagataaatggcggataactcctcttaatttctactaagtgtagatggtggtgatcagtcaagtagtaatttctactaagtgtagatttttttnnnnnnnnnnaagcttggcgtggatccgatatcaactagatcttgagacaaatggcagtattcatccacaattttaaaagaaaaggggggattggggggtacagtgcaggggaaagaatagtagacataatagcaacagacatacaaactaaag

SEQ ID NO: 12226 - DNA, 301 bp, Artificial Sequence
  Pole.1_Notch1.1
  crRNA array
  misc_feature (148)..(157): n is a, c, g, or t
cttggctttatatatcttgtggaaaggacgaaacaccgtaatttctactaagtgtagatgcgcgctctccacgtgctcttaatttctactaagtgtagattgggccaacgatgccaggactaatttctactaagtgtagatttttttnnnnnnnnnnaagcttggcgtggatccgatatcaactagatcttgagacaaatggcagtattcatccacaattttaaaagaaaaggggggattggggggtacagtgcaggggaaagaatagtagacataatagcaacagacatacaaactaaag

SEQ ID NO: 12227 - DNA, 301 bp, Artificial Sequence
  Pole.1_Notch1.2
  crRNA array
  misc_feature (148)..(157): n is a, c, g, or t
cttggctttatatatcttgtggaaaggacgaaacaccgtaatttctactaagtgtagatgcgcgctctccacgtgctcttaatttctactaagtgtagatgtcgccccagcatcctgaagtaatttctactaagtgtagatttttttnnnnnnnnnnaagcttggcgtggatccgatatcaactagatcttgagacaaatggcagtattcatccacaattttaaaagaaaaggggggattggggggtacagtgcaggggaaagaatagtagacataatagcaacagacatacaaactaaag

SEQ ID NO: 12228 - DNA, 301 bp, Artificial Sequence
  Pole.1_Notch1.3
  crRNA array
  misc_feature (148)..(157): n is a, c, g, or t
cttggctttatatatcttgtggaaaggacgaaacaccgtaatttctactaagtgtagatgcgcgctctccacgtgctcttaatttctactaagtgtagatagccacccccgccacgcctctaatttctactaagtgtagatttttttnnnnnnnnnnaagcttggcgtggatccgatatcaactagatcttgagacaaatggcagtattcatccacaattttaaaagaaaaggggggattggggggtacagtgcaggggaaagaatagtagacataatagcaacagacatacaaactaaag

SEQ ID NO: 12229 - DNA, 301 bp, Artificial Sequence
  Pole.1_Notch1.4
  crRNA array
  misc_feature (148)..(157): n is a, c, g, or t
cttggctttatatatcttgtggaaaggacgaaacaccgtaatttctactaagtgtagatgcgcgctctccacgtgctcttaatttctactaagtgtagataaagtgtcagaggccagcaataatttctactaagtgtagatttttttnnnnnnnnnnaagcttggcgtggatccgatatcaactagatcttgagacaaatggcagtattcatccacaattttaaaagaaaaggggggattggggggtacagtgcaggggaaagaatagtagacataatagcaacagacatacaaactaaag

SEQ ID NO: 12230 - DNA, 301 bp, Artificial Sequence
  Pole.2_Notch1.1
  crRNA array
  misc_feature (148)..(157): n is a, c, g, or t
cttggctttatatatcttgtggaaaggacgaaacaccgtaatttctactaagtgtagatacatcgagacgaccaaactgtaatttctactaagtgtagattgggccaacgatgccaggactaatttctactaagtgtagatttttttnnnnnnnnnnaagcttggcgtggatccgatatcaactagatcttgagacaaatggcagtattcatccacaattttaaaagaaaaggggggattggggggtacagtgcaggggaaagaatagtagacataatagcaacagacatacaaactaaag

SEQ ID NO: 12231 - DNA, 301 bp, Artificial Sequence
  Pole.2_Notch1.2
  crRNA array
  misc_feature (148)..(157): n is a, c, g, or t
cttggctttatatatcttgtggaaaggacgaaacaccgtaatttctactaagtgtagatacatcgagacgaccaaactgtaatttctactaagtgtagatgtcgccccagcatcctgaagtaatttctactaagtgtagatttttttnnnnnnnnnnaagcttggcgtggatccgatatcaactagatcttgagacaaatggcagtattcatccacaattttaaaagaaaaggggggattggggggtacagtgcaggggaaagaatagtagacataatagcaacagacatacaaactaaag

SEQ ID NO: 12232 - DNA, 301 bp, Artificial Sequence
  Pole.2_Notch1.3
  crRNA array
  misc_feature (148)..(157): n is a, c, g, or t
cttggctttatatatcttgtggaaaggacgaaacaccgtaatttctactaagtgtagatacatcgagacgaccaaactgtaatttctactaagtgtagatagccacccccgccacgcctctaatttctactaagtgtagatttttttnnnnnnnnnnaagcttggcgtggatccgatatcaactagatcttgagacaaatggcagtattcatccacaattttaaaagaaaaggggggattggggggtacagtgcaggggaaagaatagtagacataatagcaacagacatacaaactaaag

SEQ ID NO: 12233 - DNA, 301 bp, Artificial Sequence
  Pole.2_Notch1.4
  crRNA array
  misc_feature (148)..(157): n is a, c, g, or t
cttggctttatatatcttgtggaaaggacgaaacaccgtaatttctactaagtgtagatacatcgagacgaccaaactgtaatttctactaagtgtagataaagtgtcagaggccagcaataatttctactaagtgtagatttttttnnnnnnnnnnaagcttggcgtggatccgatatcaactagatcttgagacaaatggcagtattcatccacaattttaaaagaaaaggggggattggggggtacagtgcaggggaaagaatagtagacataatagcaacagacatacaaactaaag

SEQ ID NO: 12234 - DNA, 301 bp, Artificial Sequence
  Pole.3_Notch1.1
  crRNA array
  misc_feature (148)..(157): n is a, c, g, or t
cttggctttatatatcttgtggaaaggacgaaacaccgtaatttctactaagtgtagatctgctgcaacgagtcgagaataatttctactaagtgtagattgggccaacgatgccaggactaatttctactaagtgtagatttttttnnnnnnnnnnaagcttggcgtggatccgatatcaactagatcttgagacaaatggcagtattcatccacaattttaaaagaaaaggggggattggggggtacagtgcaggggaaagaatagtagacataatagcaacagacatacaaactaaag

SEQ ID NO: 12235 - DNA, 301 bp, Artificial Sequence
  Pole.3_Notch1.2
  crRNA array
  misc_feature (148)..(157): n is a, c, g, or t
cttggctttatatatcttgtggaaaggacgaaacaccgtaatttctactaagtgtagatctgctgcaacgagtcgagaataatttctactaagtgtagatgtcgccccagcatcctgaagtaatttctactaagtgtagatttttttnnnnnnnnnnaagcttggcgtggatccgatatcaactagatcttgagacaaatggcagtattcatccacaattttaaaagaaaaggggggattggggggtacagtgcaggggaaagaatagtagacataatagcaacagacatacaaactaaag

SEQ ID NO: 12236 - DNA, 301 bp, Artificial Sequence
  Pole.3_Notch1.3
  crRNA array
  misc_feature (148)..(157): n is a, c, g, or t
cttggctttatatatcttgtggaaaggacgaaacaccgtaatttctactaagtgtagatctgctgcaacgagtcgagaataatttctactaagtgtagatagccacccccgccacgcctctaatttctactaagtgtagatttttttnnnnnnnnnnaagcttggcgtggatccgatatcaactagatcttgagacaaatggcagtattcatccacaattttaaaagaaaaggggggattggggggtacagtgcaggggaaagaatagtagacataatagcaacagacatacaaactaaag

SEQ ID NO: 12237 - DNA, 301 bp, Artificial Sequence
  Pole.3_Notch1.4
  crRNA array
  misc_feature (148)..(157): n is a, c, g, or t
cttggctttatatatcttgtggaaaggacgaaacaccgtaatttctactaagtgtagatctgctgcaacgagtcgagaataatttctactaagtgtagataaagtgtcagaggccagcaataatttctactaagtgtagatttttttnnnnnnnnnnaagcttggcgtggatccgatatcaactagatcttgagacaaatggcagtattcatccacaattttaaaagaaaaggggggattggggggtacagtgcaggggaaagaatagtagacataatagcaacagacatacaaactaaag

SEQ ID NO: 12238 - DNA, 301 bp, Artificial Sequence
  Pole.4_Notch1.1
  crRNA array
  misc_feature (148)..(157): n is a, c, g, or t
cttggctttatatatcttgtggaaaggacgaaacaccgtaatttctactaagtgtagatgggagatgatatagcggcagtaatttctactaagtgtagattgggccaacgatgccaggactaatttctactaagtgtagatttttttnnnnnnnnnnaagcttggcgtggatccgatatcaactagatcttgagacaaatggcagtattcatccacaattttaaaagaaaaggggggattggggggtacagtgcaggggaaagaatagtagacataatagcaacagacatacaaactaaag

SEQ ID NO: 12239 - DNA, 301 bp, Artificial Sequence
  Pole.4_Notch1.2
  crRNA array
  misc_feature (148)..(157): n is a, c, g, or t
cttggctttatatatcttgtggaaaggacgaaacaccgtaatttctactaagtgtagatgggagatgatatagcggcagtaatttctactaagtgtagatgtcgccccagcatcctgaagtaatttctactaagtgtagatttttttnnnnnnnnnnaagcttggcgtggatccgatatcaactagatcttgagacaaatggcagtattcatccacaattttaaaagaaaaggggggattggggggtacagtgcaggggaaagaatagtagacataatagcaacagacatacaaactaaag

SEQ ID NO: 12240 - DNA, 301 bp, Artificial Sequence
  Pole.4_Notch1.3
  crRNA array
  misc_feature (148)..(157): n is a, c, g, or t
cttggctttatatatcttgtggaaaggacgaaacaccgtaatttctactaagtgtagatgggagatgatatagcggcagtaatttctactaagtgtagatagccacccccgccacgcctctaatttctactaagtgtagatttttttnnnnnnnnnnaagcttggcgtggatccgatatcaactagatcttgagacaaatggcagtattcatccacaattttaaaagaaaaggggggattggggggtacagtgcaggggaaagaatagtagacataatagcaacagacatacaaactaaag

SEQ ID NO: 12241 - DNA, 301 bp, Artificial Sequence
  Pole.4_Notch1.4
  crRNA array
  misc_feature (148)..(157): n is a, c, g, or t
cttggctttatatatcttgtggaaaggacgaaacaccgtaatttctactaagtgtagatgggagatgatatagcggcagtaatttctactaagtgtagataaagtgtcagaggccagcaataatttctactaagtgtagatttttttnnnnnnnnnnaagcttggcgtggatccgatatcaactagatcttgagacaaatggcagtattcatccacaattttaaaagaaaaggggggattggggggtacagtgcaggggaaagaatagtagacataatagcaacagacatacaaactaaag

SEQ ID NO: 12242 - DNA, 301 bp, Artificial Sequence
  Pole.1_Arid1a.1
  crRNA array
  misc_feature (148)..(157): n is a, c, g, or t
cttggctttatatatcttgtggaaaggacgaaacaccgtaatttctactaagtgtagatgcgcgctctccacgtgctcttaatttctactaagtgtagatcccgcgctcggccgctgccgtaatttctactaagtgtagatttttttnnnnnnnnnnaagcttggcgtggatccgatatcaactagatcttgagacaaatggcagtattcatccacaattttaaaagaaaaggggggattggggggtacagtgcaggggaaagaatagtagacataatagcaacagacatacaaactaaag

SEQ ID NO: 12243 - DNA, 301 bp, Artificial Sequence
  Pole.1_Arid1a.2
  crRNA array
  misc_feature (148)..(157): n is a, c, g, or t
cttggctttatatatcttgtggaaaggacgaaacaccgtaatttctactaagtgtagatgcgcgctctccacgtgctcttaatttctactaagtgtagatagtgcaagatcgagcgtggataatttctactaagtgtagatttttttnnnnnnnnnnaagcttggcgtggatccgatatcaactagatcttgagacaaatggcagtattcatccacaattttaaaagaaaaggggggattggggggtacagtgcaggggaaagaatagtagacataatagcaacagacatacaaactaaag

SEQ ID NO: 12244 - DNA, 301 bp, Artificial Sequence
  Pole.1_Arid1a.3
  crRNA array
  misc_feature (148)..(157): n is a, c, g, or t
cttggctttatatatcttgtggaaaggacgaaacaccgtaatttctactaagtgtagatgcgcgctctccacgtgctcttaatttctactaagtgtagatagtgagctggcagcactgcttaatttctactaagtgtagatttttttnnnnnnnnnnaagcttggcgtggatccgatatcaactagatcttgagacaaatggcagtattcatccacaattttaaaagaaaaggggggattggggggtacagtgcaggggaaagaatagtagacataatagcaacagacatacaaactaaag

SEQ ID NO: 12245 - DNA, 301 bp, Artificial Sequence
  Pole.1_Arid1a.4
  crRNA array
  misc_feature (148)..(157): n is a, c, g, or t
cttggctttatatatcttgtggaaaggacgaaacaccgtaatttctactaagtgtagatgcgcgctctccacgtgctcttaatttctactaagtgtagatgccgagaccgagtctctgcataatttctactaagtgtagatttttttnnnnnnnnnnaagcttggcgtggatccgatatcaactagatcttgagacaaatggcagtattcatccacaattttaaaagaaaaggggggattggggggtacagtgcaggggaaagaatagtagacataatagcaacagacatacaaactaaag

SEQ ID NO: 12246 - DNA, 301 bp, Artificial Sequence
  Pole.2_Arid1a.1
  crRNA array
  misc_feature (148)..(157): n is a, c, g, or t
cttggctttatatatcttgtggaaaggacgaaacaccgtaatttctactaagtgtagatacatcgagacgaccaaactgtaatttctactaagtgtagatcccgcgctcggccgctgccgtaatttctactaagtgtagatttttttnnnnnnnnnnaagcttggcgtggatccgatatcaactagatcttgagacaaatggcagtattcatccacaattttaaaagaaaaggggggattggggggtacagtgcaggggaaagaatagtagacataatagcaacagacatacaaactaaag

SEQ ID NO: 12247 - DNA, 301 bp, Artificial Sequence
  Pole.2_Arid1a.2
  crRNA array
  misc_feature (148)..(157): n is a, c, g, or t
cttggctttatatatcttgtggaaaggacgaaacaccgtaatttctactaagtgtagatacatcgagacgaccaaactgtaatttctactaagtgtagatagtgcaagatcgagcgtggataatttctactaagtgtagatttttttnnnnnnnnnnaagcttggcgtggatccgatatcaactagatcttgagacaaatggcagtattcatccacaattttaaaagaaaaggggggattggggggtacagtgcaggggaaagaatagtagacataatagcaacagacatacaaactaaag

SEQ ID NO: 12248 - DNA, 301 bp, Artificial Sequence
  Pole.2_Arid1a.3
  crRNA array
  misc_feature (148)..(157): n is a, c, g, or t
cttggctttatatatcttgtggaaaggacgaaacaccgtaatttctactaagtgtagatacatcgagacgaccaaactgtaatttctactaagtgtagatagtgagctggcagcactgcttaatttctactaagtgtagatttttttnnnnnnnnnnaagcttggcgtggatccgatatcaactagatcttgagacaaatggcagtattcatccacaattttaaaagaaaaggggggattggggggtacagtgcaggggaaagaatagtagacataatagcaacagacatacaaactaaag

SEQ ID NO: 12249 - DNA, 301 bp, Artificial Sequence
  Pole.2_Arid1a.4
  crRNA array
  misc_feature (148)..(157): n is a, c, g, or t
cttggctttatatatcttgtggaaaggacgaaacaccgtaatttctactaagtgtagatacatcgagacgaccaaactgtaatttctactaagtgtagatgccgagaccgagtctctgcataatttctactaagtgtagatttttttnnnnnnnnnnaagcttggcgtggatccgatatcaactagatcttgagacaaatggcagtattcatccacaattttaaaagaaaaggggggattggggggtacagtgcaggggaaagaatagtagacataatagcaacagacatacaaactaaag

SEQ ID NO: 12250 - DNA, 301 bp, Artificial Sequence
  Pole.3_Arid1a.1
  crRNA array
  misc_feature (148)..(157): n is a, c, g, or t
cttggctttatatatcttgtggaaaggacgaaacaccgtaatttctactaagtgtagatctgctgcaacgagtcgagaataatttctactaagtgtagatcccgcgctcggccgctgccgtaatttctactaagtgtagatttttttnnnnnnnnnnaagcttggcgtggatccgatatcaactagatcttgagacaaatggcagtattcatccacaattttaaaagaaaaggggggattggggggtacagtgcaggggaaagaatagtagacataatagcaacagacatacaaactaaag

SEQ ID NO: 12251 - DNA, 301 bp, Artificial Sequence
  Pole.3_Arid1a.2
  crRNA array
  misc_feature (148)..(157): n is a, c, g, or t
cttggctttatatatcttgtggaaaggacgaaacaccgtaatttctactaagtgtagatctgctgcaacgagtcgagaataatttctactaagtgtagatagtgcaagatcgagcgtggataatttctactaagtgtagatttttttnnnnnnnnnnaagcttggcgtggatccgatatcaactagatcttgagacaaatggcagtattcatccacaattttaaaagaaaaggggggattggggggtacagtgcaggggaaagaatagtagacataatagcaacagacatacaaactaaag

SEQ ID NO: 12252 - DNA, 301 bp, Artificial Sequence
  Pole.3_Arid1a.3
  crRNA array
  misc_feature (148)..(157): n is a, c, g, or t
cttggctttatatatcttgtggaaaggacgaaacaccgtaatttctactaagtgtagatctgctgcaacgagtcgagaataatttctactaagtgtagatagtgagctggcagcactgcttaatttctactaagtgtagatttttttnnnnnnnnnnaagcttggcgtggatccgatatcaactagatcttgagacaaatggcagtattcatccacaattttaaaagaaaaggggggattggggggtacagtgcaggggaaagaatagtagacataatagcaacagacatacaaactaaag

SEQ ID NO: 12253 - DNA, 301 bp, Artificial Sequence
  Pole.3_Arid1a.4
  crRNA array
  misc_feature (148)..(157): n is a, c, g, or t
cttggctttatatatcttgtggaaaggacgaaacaccgtaatttctactaagtgtagatctgctgcaacgagtcgagaataatttctactaagtgtagatgccgagaccgagtctctgcataatttctactaagtgtagatttttttnnnnnnnnnnaagcttggcgtggatccgatatcaactagatcttgagacaaatggcagtattcatccacaattttaaaagaaaaggggggattggggggtacagtgcaggggaaagaatagtagacataatagcaacagacatacaaactaaag

SEQ ID NO: 12254 - DNA, 301 bp, Artificial Sequence
  Pole.4_Arid1a.1
  crRNA array
  misc_feature (148)..(157): n is a, c, g, or t
cttggctttatatatcttgtggaaaggacgaaacaccgtaatttctactaagtgtagatgggagatgatatagcggcagtaatttctactaagtgtagatcccgcgctcggccgctgccgtaatttctactaagtgtagatttttttnnnnnnnnnnaagcttggcgtggatccgatatcaactagatcttgagacaaatggcagtattcatccacaattttaaaagaaaaggggggattggggggtacagtgcaggggaaagaatagtagacataatagcaacagacatacaaactaaag

SEQ ID NO: 12255 - DNA, 301 bp, Artificial Sequence
  Pole.4_Arid1a.2
  crRNA array
  misc_feature (148)..(157): n is a, c, g, or t
cttggctttatatatcttgtggaaaggacgaaacaccgtaatttctactaagtgtagatgggagatgatatagcggcagtaatttctactaagtgtagatagtgcaagatcgagcgtggataatttctactaagtgtagatttttttnnnnnnnnnnaagcttggcgtggatccgatatcaactagatcttgagacaaatggcagtattcatccacaattttaaaagaaaaggggggattggggggtacagtgcaggggaaagaatagtagacataatagcaacagacatacaaactaaag

SEQ ID NO: 12256 - DNA, 301 bp, Artificial Sequence
  Pole.4_Arid1a.3
  crRNA array
  misc_feature (148)..(157): n is a, c, g, or t
cttggctttatatatcttgtggaaaggacgaaacaccgtaatttctactaagtgtagatgggagatgatatagcggcagtaatttctactaagtgtagatagtgagctggcagcactgcttaatttctactaagtgtagatttttttnnnnnnnnnnaagcttggcgtggatccgatatcaactagatcttgagacaaatggcagtattcatccacaattttaaaagaaaaggggggattggggggtacagtgcaggggaaagaatagtagacataatagcaacagacatacaaactaaag

SEQ ID NO: 12257 - DNA, 301 bp, Artificial Sequence
  Pole.4_Arid1a.4
  crRNA array
  misc_feature (148)..(157): n is a, c, g, or t
cttggctttatatatcttgtggaaaggacgaaacaccgtaatttctactaagtgtagatgggagatgatatagcggcagtaatttctactaagtgtagatgccgagaccgagtctctgcataatttctactaagtgtagatttttttnnnnnnnnnnaagcttggcgtggatccgatatcaactagatcttgagacaaatggcagtattcatccacaattttaaaagaaaaggggggattggggggtacagtgcaggggaaagaatagtagacataatagcaacagacatacaaactaaag

SEQ ID NO: 12258 - DNA, 301 bp, Artificial Sequence
  Pole.1_Trim72.1
  crRNA array
  misc_feature (148)..(157): n is a, c, g, or t
cttggctttatatatcttgtggaaaggacgaaacaccgtaatttctactaagtgtagatgcgcgctctccacgtgctcttaatttctactaagtgtagataccccagctctgcgcacccgtaatttctactaagtgtagatttttttnnnnnnnnnnaagcttggcgtggatccgatatcaactagatcttgagacaaatggcagtattcatccacaattttaaaagaaaaggggggattggggggtacagtgcaggggaaagaatagtagacataatagcaacagacatacaaactaaag

SEQ ID NO: 12259 - DNA, 301 bp, Artificial Sequence
  Pole.1_Trim72.2
  crRNA array
  misc_feature (148)..(157): n is a, c, g, or t
cttggctttatatatcttgtggaaaggacgaaacaccgtaatttctactaagtgtagatgcgcgctctccacgtgctcttaatttctactaagtgtagatcacgagcgtctgcccgggcctaatttctactaagtgtagatttttttnnnnnnnnnnaagcttggcgtggatccgatatcaactagatcttgagacaaatggcagtattcatccacaattttaaaagaaaaggggggattggggggtacagtgcaggggaaagaatagtagacataatagcaacagacatacaaactaaag

SEQ ID NO: 12260 - DNA, 301 bp, Artificial Sequence
  Pole.1_Trim72.3
  crRNA array
  misc_feature (148)..(157): n is a, c, g, or t
cttggctttatatatcttgtggaaaggacgaaacaccgtaatttctactaagtgtagatgcgcgctctccacgtgctcttaatttctactaagtgtagatacgtgtgctggcacgacaagtaatttctactaagtgtagatttttttnnnnnnnnnnaagcttggcgtggatccgatatcaactagatcttgagacaaatggcagtattcatccacaattttaaaagaaaaggggggattggggggtacagtgcaggggaaagaatagtagacataatagcaacagacatacaaactaaag

SEQ ID NO: 12261 - DNA, 301 bp, Artificial Sequence
  Pole.1_Trim72.4
  crRNA array
  misc_feature (148)..(157): n is a, c, g, or t
cttggctttatatatcttgtggaaaggacgaaacaccgtaatttctactaagtgtagatgcgcgctctccacgtgctcttaatttctactaagtgtagattgccgtgcctgcctgatccgtaatttctactaagtgtagatttttttnnnnnnnnnnaagcttggcgtggatccgatatcaactagatcttgagacaaatggcagtattcatccacaattttaaaagaaaaggggggattggggggtacagtgcaggggaaagaatagtagacataatagcaacagacatacaaactaaag

SEQ ID NO: 12262 - DNA, 301 bp, Artificial Sequence
  Pole.2_Trim72.1
  crRNA array
  misc_feature (148)..(157): n is a, c, g, or t
cttggctttatatatcttgtggaaaggacgaaacaccgtaatttctactaagtgtagatacatcgagacgaccaaactgtaatttctactaagtgtagataccccagctctgcgcacccgtaatttctactaagtgtagatttttttnnnnnnnnnnaagcttggcgtggatccgatatcaactagatcttgagacaaatggcagtattcatccacaattttaaaagaaaaggggggattggggggtacagtgcaggggaaagaatagtagacataatagcaacagacatacaaactaaag

SEQ ID NO: 12263 - DNA, 301 bp, Artificial Sequence
  Pole.2_Trim72.2
  crRNA array
  misc_feature (148)..(157): n is a, c, g, or t
cttggctttatatatcttgtggaaaggacgaaacaccgtaatttctactaagtgtagatacatcgagacgaccaaactgtaatttctactaagtgtagatcacgagcgtctgcccgggcctaatttctactaagtgtagatttttttnnnnnnnnnnaagcttggcgtggatccgatatcaactagatcttgagacaaatggcagtattcatccacaattttaaaagaaaaggggggattggggggtacagtgcaggggaaagaatagtagacataatagcaacagacatacaaactaaag

SEQ ID NO: 12264 - DNA, 301 bp, Artificial Sequence
  Pole.2_Trim72.3
  crRNA array
  misc_feature (148)..(157): n is a, c, g, or t
cttggctttatatatcttgtggaaaggacgaaacaccgtaatttctactaagtgtagatacatcgagacgaccaaactgtaatttctactaagtgtagatacgtgtgctggcacgacaagtaatttctactaagtgtagatttttttnnnnnnnnnnaagcttggcgtggatccgatatcaactagatcttgagacaaatggcagtattcatccacaattttaaaagaaaaggggggattggggggtacagtgcaggggaaagaatagtagacataatagcaacagacatacaaactaaag

SEQ ID NO: 12265 - DNA, 301 bp, Artificial Sequence
  Pole.2_Trim72.4
  crRNA array
  misc_feature (148)..(157): n is a, c, g, or t
cttggctttatatatcttgtggaaaggacgaaacaccgtaatttctactaagtgtagatacatcgagacgaccaaactgtaatttctactaagtgtagattgccgtgcctgcctgatccgtaatttctactaagtgtagatttttttnnnnnnnnnnaagcttggcgtggatccgatatcaactagatcttgagacaaatggcagtattcatccacaattttaaaagaaaaggggggattggggggtacagtgcaggggaaagaatagtagacataatagcaacagacatacaaactaaag

SEQ ID NO: 12266 - DNA, 301 bp, Artificial Sequence
  Pole.3_Trim72.1
  crRNA array
  misc_feature (148)..(157): n is a, c, g, or t
cttggctttatatatcttgtggaaaggacgaaacaccgtaatttctactaagtgtagatctgctgcaacgagtcgagaataatttctactaagtgtagataccccagctctgcgcacccgtaatttctactaagtgtagatttttttnnnnnnnnnnaagcttggcgtggatccgatatcaactagatcttgagacaaatggcagtattcatccacaattttaaaagaaaaggggggattggggggtacagtgcaggggaaagaatagtagacataatagcaacagacatacaaactaaag

SEQ ID NO: 12267 - DNA, 301 bp, Artificial Sequence
  Pole.3_Trim72.2
  crRNA array
  misc_feature (148)..(157): n is a, c, g, or t
cttggctttatatatcttgtggaaaggacgaaacaccgtaatttctactaagtgtagatctgctgcaacgagtcgagaataatttctactaagtgtagatcacgagcgtctgcccgggcctaatttctactaagtgtagatttttttnnnnnnnnnnaagcttggcgtggatccgatatcaactagatcttgagacaaatggcagtattcatccacaattttaaaagaaaaggggggattggggggtacagtgcaggggaaagaatagtagacataatagcaacagacatacaaactaaag

SEQ ID NO: 12268 - DNA, 301 bp, Artificial Sequence
  Pole.3_Trim72.3
  crRNA array
  misc_feature (148)..(157): n is a, c, g, or t
cttggctttatatatcttgtggaaaggacgaaacaccgtaatttctactaagtgtagatctgctgcaacgagtcgagaataatttctactaagtgtagatacgtgtgctggcacgacaagtaatttctactaagtgtagatttttttnnnnnnnnnnaagcttggcgtggatccgatatcaactagatcttgagacaaatggcagtattcatccacaattttaaaagaaaaggggggattggggggtacagtgcaggggaaagaatagtagacataatagcaacagacatacaaactaaag

SEQ ID NO: 12269 - DNA, 301 bp, Artificial Sequence
  Pole.3_Trim72.4
  crRNA array
  misc_feature (148)..(157): n is a, c, g, or t
cttggctttatatatcttgtggaaaggacgaaacaccgtaatttctactaagtgtagatctgctgcaacgagtcgagaataatttctactaagtgtagattgccgtgcctgcctgatccgtaatttctactaagtgtagatttttttnnnnnnnnnnaagcttggcgtggatccgatatcaactagatcttgagacaaatggcagtattcatccacaattttaaaagaaaaggggggattggggggtacagtgcaggggaaagaatagtagacataatagcaacagacatacaaactaaag

SEQ ID NO: 12270 - DNA, 301 bp, Artificial Sequence
  Pole.4_Trim72.1
  crRNA array
  misc_feature (148)..(157): n is a, c, g, or t
cttggctttatatatcttgtggaaaggacgaaacaccgtaatttctactaagtgtagatgggagatgatatagcggcagtaatttctactaagtgtagataccccagctctgcgcacccgtaatttctactaagtgtagatttttttnnnnnnnnnnaagcttggcgtggatccgatatcaactagatcttgagacaaatggcagtattcatccacaattttaaaagaaaaggggggattggggggtacagtgcaggggaaagaatagtagacataatagcaacagacatacaaactaaag

SEQ ID NO: 12271 - DNA, 301 bp, Artificial Sequence
  Pole.4_Trim72.2
  crRNA array
  misc_feature (148)..(157): n is a, c, g, or t
cttggctttatatatcttgtggaaaggacgaaacaccgtaatttctactaagtgtagatgggagatgatatagcggcagtaatttctactaagtgtagatcacgagcgtctgcccgggcctaatttctactaagtgtagatttttttnnnnnnnnnnaagcttggcgtggatccgatatcaactagatcttgagacaaatggcagtattcatccacaattttaaaagaaaaggggggattggggggtacagtgcaggggaaagaatagtagacataatagcaacagacatacaaactaaag

SEQ ID NO: 12272 - DNA, 301 bp, Artificial Sequence
  Pole.4_Trim72.3
  crRNA array
  misc_feature (148)..(157): n is a, c, g, or t
cttggctttatatatcttgtggaaaggacgaaacaccgtaatttctactaagtgtagatgggagatgatatagcggcagtaatttctactaagtgtagatacgtgtgctggcacgacaagtaatttctactaagtgtagatttttttnnnnnnnnnnaagcttggcgtggatccgatatcaactagatcttgagacaaatggcagtattcatccacaattttaaaagaaaaggggggattggggggtacagtgcaggggaaagaatagtagacataatagcaacagacatacaaactaaag

SEQ ID NO: 12273 - DNA, 301 bp, Artificial Sequence
  Pole.4_Trim72.4
  crRNA array
  misc_feature (148)..(157): n is a, c, g, or t
cttggctttatatatcttgtggaaaggacgaaacaccgtaatttctactaagtgtagatgggagatgatatagcggcagtaatttctactaagtgtagattgccgtgcctgcctgatccgtaatttctactaagtgtagatttttttnnnnnnnnnnaagcttggcgtggatccgatatcaactagatcttgagacaaatggcagtattcatccacaattttaaaagaaaaggggggattggggggtacagtgcaggggaaagaatagtagacataatagcaacagacatacaaactaaag

SEQ ID NO: 12274 - DNA, 301 bp, Artificial Sequence
  Pole.1_Zfhx3.1
  crRNA array
  misc_feature (148)..(157): n is a, c, g, or t
cttggctttatatatcttgtggaaaggacgaaacaccgtaatttctactaagtgtagatgcgcgctctccacgtgctcttaatttctactaagtgtagatcgctgcgaggtgtgtaactataatttctactaagtgtagatttttttnnnnnnnnnnaagcttggcgtggatccgatatcaactagatcttgagacaaatggcagtattcatccacaattttaaaagaaaaggggggattggggggtacagtgcaggggaaagaatagtagacataatagcaacagacatacaaactaaag

SEQ ID NO: 12275 - DNA, 301 bp, Artificial Sequence
  Pole.1_Zfhx3.2
  crRNA array
  misc_feature (148)..(157): n is a, c, g, or t
cttggctttatatatcttgtggaaaggacgaaacaccgtaatttctactaagtgtagatgcgcgctctccacgtgctcttaatttctactaagtgtagatacgtgcgacacaaaagcaactaatttctactaagtgtagatttttttnnnnnnnnnnaagcttggcgtggatccgatatcaactagatcttgagacaaatggcagtattcatccacaattttaaaagaaaaggggggattggggggtacagtgcaggggaaagaatagtagacataatagcaacagacatacaaactaaag

SEQ ID NO: 12276 - DNA, 301 bp, Artificial Sequence
  Pole.1_Zfhx3.3
  crRNA array
  misc_feature (148)..(157): n is a, c, g, or t
cttggctttatatatcttgtggaaaggacgaaacaccgtaatttctactaagtgtagatgcgcgctctccacgtgctcttaatttctactaagtgtagattgctctacggcaagaggaaataatttctactaagtgtagatttttttnnnnnnnnnnaagcttggcgtggatccgatatcaactagatcttgagacaaatggcagtattcatccacaattttaaaagaaaaggggggattggggggtacagtgcaggggaaagaatagtagacataatagcaacagacatacaaactaaag

SEQ ID NO: 12277 - DNA, 301 bp, Artificial Sequence
  Pole.1_Zfhx3.4
  crRNA array
  misc_feature (148)..(157): n is a, c, g, or t
cttggctttatatatcttgtggaaaggacgaaacaccgtaatttctactaagtgtagatgcgcgctctccacgtgctcttaatttctactaagtgtagatagtgagcggcagactgcgagtaatttctactaagtgtagatttttttnnnnnnnnnnaagcttggcgtggatccgatatcaactagatcttgagacaaatggcagtattcatccacaattttaaaagaaaaggggggattggggggtacagtgcaggggaaagaatagtagacataatagcaacagacatacaaactaaag

SEQ ID NO: 12278 - DNA, 301 bp, Artificial Sequence
  Pole.2_Zfhx3.1
  crRNA array
  misc_feature (148)..(157): n is a, c, g, or t
cttggctttatatatcttgtggaaaggacgaaacaccgtaatttctactaagtgtagatacatcgagacgaccaaactgtaatttctactaagtgtagatcgctgcgaggtgtgtaactataatttctactaagtgtagatttttttnnnnnnnnnnaagcttggcgtggatccgatatcaactagatcttgagacaaatggcagtattcatccacaattttaaaagaaaaggggggattggggggtacagtgcaggggaaagaatagtagacataatagcaacagacatacaaactaaag

SEQ ID NO: 12279 - DNA, 301 bp, Artificial Sequence
  Pole.2_Zfhx3.2
  crRNA array
  misc_feature (148)..(157): n is a, c, g, or t
cttggctttatatatcttgtggaaaggacgaaacaccgtaatttctactaagtgtagatacatcgagacgaccaaactgtaatttctactaagtgtagatacgtgcgacacaaaagcaactaatttctactaagtgtagatttttttnnnnnnnnnnaagcttggcgtggatccgatatcaactagatcttgagacaaatggcagtattcatccacaattttaaaagaaaaggggggattggggggtacagtgcaggggaaagaatagtagacataatagcaacagacatacaaactaaag

SEQ ID NO: 12280 - DNA, 301 bp, Artificial Sequence
  Pole.2_Zfhx3.3
  crRNA array
  misc_feature (148)..(157): n is a, c, g, or t
cttggctttatatatcttgtggaaaggacgaaacaccgtaatttctactaagtgtagatacatcgagacgaccaaactgtaatttctactaagtgtagattgctctacggcaagaggaaataatttctactaagtgtagatttttttnnnnnnnnnnaagcttggcgtggatccgatatcaactagatcttgagacaaatggcagtattcatccacaattttaaaagaaaaggggggattggggggtacagtgcaggggaaagaatagtagacataatagcaacagacatacaaactaaag

SEQ ID NO: 12281 - DNA, 301 bp, Artificial Sequence
  Pole.2_Zfhx3.4
  crRNA array
  misc_feature (148)..(157): n is a, c, g, or t
cttggctttatatatcttgtggaaaggacgaaacaccgtaatttctactaagtgtagatacatcgagacgaccaaactgtaatttctactaagtgtagatagtgagcggcagactgcgagtaatttctactaagtgtagatttttttnnnnnnnnnnaagcttggcgtggatccgatatcaactagatcttgagacaaatggcagtattcatccacaattttaaaagaaaaggggggattggggggtacagtgcaggggaaagaatagtagacataatagcaacagacatacaaactaaag

SEQ ID NO: 12282 - DNA, 301 bp, Artificial Sequence
  Pole.3_Zfhx3.1
  crRNA array
  misc_feature (148)..(157): n is a, c, g, or t
cttggctttatatatcttgtggaaaggacgaaacaccgtaatttctactaagtgtagatctgctgcaacgagtcgagaataatttctactaagtgtagatcgctgcgaggtgtgtaactataatttctactaagtgtagatttttttnnnnnnnnnnaagcttggcgtggatccgatatcaactagatcttgagacaaatggcagtattcatccacaattttaaaagaaaaggggggattggggggtacagtgcaggggaaagaatagtagacataatagcaacagacatacaaactaaag

SEQ ID NO: 12283 - DNA, 301 bp, Artificial Sequence
  Pole.3_Zfhx3.2
  crRNA array
  misc_feature (148)..(157): n is a, c, g, or t
cttggctttatatatcttgtggaaaggacgaaacaccgtaatttctactaagtgtagatctgctgcaacgagtcgagaataatttctactaagtgtagatacgtgcgacacaaaagcaactaatttctactaagtgtagatttttttnnnnnnnnnnaagcttggcgtggatccgatatcaactagatcttgagacaaatggcagtattcatccacaattttaaaagaaaaggggggattggggggtacagtgcaggggaaagaatagtagacataatagcaacagacatacaaactaaag

SEQ ID NO: 12284 - DNA, 301 bp, Artificial Sequence
  Pole.3_Zfhx3.3
  crRNA array
  misc_feature (148)..(157): n is a, c, g, or t
cttggctttatatatcttgtggaaaggacgaaacaccgtaatttctactaagtgtagatctgctgcaacgagtcgagaataatttctactaagtgtagattgctctacggcaagaggaaataatttctactaagtgtagatttttttnnnnnnnnnnaagcttggcgtggatccgatatcaactagatcttgagacaaatggcagtattcatccacaattttaaaagaaaaggggggattggggggtacagtgcaggggaaagaatagtagacataatagcaacagacatacaaactaaag

SEQ ID NO: 12285 - DNA, 301 bp, Artificial Sequence
  Pole.3_Zfhx3.4
  crRNA array
  misc_feature (148)..(157): n is a, c, g, or t
cttggctttatatatcttgtggaaaggacgaaacaccgtaatttctactaagtgtagatctgctgcaacgagtcgagaataatttctactaagtgtagatagtgagcggcagactgcgagtaatttctactaagtgtagatttttttnnnnnnnnnnaagcttggcgtggatccgatatcaactagatcttgagacaaatggcagtattcatccacaattttaaaagaaaaggggggattggggggtacagtgcaggggaaagaatagtagacataatagcaacagacatacaaactaaag

SEQ ID NO: 12286 - DNA, 301 bp, Artificial Sequence
  Pole.4_Zfhx3.1
  crRNA array
  misc_feature (148)..(157): n is a, c, g, or t
cttggctttatatatcttgtggaaaggacgaaacaccgtaatttctactaagtgtagatgggagatgatatagcggcagtaatttctactaagtgtagatcgctgcgaggtgtgtaactataatttctactaagtgtagatttttttnnnnnnnnnnaagcttggcgtggatccgatatcaactagatcttgagacaaatggcagtattcatccacaattttaaaagaaaaggggggattggggggtacagtgcaggggaaagaatagtagacataatagcaacagacatacaaactaaag

SEQ ID NO: 12287 - DNA, 301 bp, Artificial Sequence
  Pole.4_Zfhx3.2
  crRNA array
  misc_feature (148)..(157): n is a, c, g, or t
cttggctttatatatcttgtggaaaggacgaaacaccgtaatttctactaagtgtagatgggagatgatatagcggcagtaatttctactaagtgtagatacgtgcgacacaaaagcaactaatttctactaagtgtagatttttttnnnnnnnnnnaagcttggcgtggatccgatatcaactagatcttgagacaaatggcagtattcatccacaattttaaaagaaaaggggggattggggggtacagtgcaggggaaagaatagtagacataatagcaacagacatacaaactaaag

SEQ ID NO: 12288 - DNA, 301 bp, Artificial Sequence
  Pole.4_Zfhx3.3
  crRNA array
  misc_feature (148)..(157): n is a, c, g, or t
cttggctttatatatcttgtggaaaggacgaaacaccgtaatttctactaagtgtagatgggagatgatatagcggcagtaatttctactaagtgtagattgctctacggcaagaggaaataatttctactaagtgtagatttttttnnnnnnnnnnaagcttggcgtggatccgatatcaactagatcttgagacaaatggcagtattcatccacaattttaaaagaaaaggggggattggggggtacagtgcaggggaaagaatagtagacataatagcaacagacatacaaactaaag

SEQ ID NO: 12289 - DNA, 301 bp, Artificial Sequence
  Pole.4_Zfhx3.4
  crRNA array
  misc_feature (148)..(157): n is a, c, g, or t
cttggctttatatatcttgtggaaaggacgaaacaccgtaatttctactaagtgtagatgggagatgatatagcggcagtaatttctactaagtgtagatagtgagcggcagactgcgagtaatttctactaagtgtagatttttttnnnnnnnnnnaagcttggcgtggatccgatatcaactagatcttgagacaaatggcagtattcatccacaattttaaaagaaaaggggggattggggggtacagtgcaggggaaagaatagtagacataatagcaacagacatacaaactaaag

SEQ ID NO: 12290 - DNA, 301 bp, Artificial Sequence
  Pole.1_Crebbp.1
  crRNA array
  misc_feature (148)..(157): n is a, c, g, or t
cttggctttatatatcttgtggaaaggacgaaacaccgtaatttctactaagtgtagatgcgcgctctccacgtgctcttaatttctactaagtgtagatctcacggcggcggcgggccgtaatttctactaagtgtagatttttttnnnnnnnnnnaagcttggcgtggatccgatatcaactagatcttgagacaaatggcagtattcatccacaattttaaaagaaaaggggggattggggggtacagtgcaggggaaagaatagtagacataatagcaacagacatacaaactaaag

SEQ ID NO: 12291 - DNA, 301 bp, Artificial Sequence
  Pole.1_Crebbp.2
  crRNA array
  misc_feature (148)..(157): n is a, c, g, or t
cttggctttatatatcttgtggaaaggacgaaacaccgtaatttctactaagtgtagatgcgcgctctccacgtgctcttaatttctactaagtgtagatcgcgagcaggtgaagatggctaatttctactaagtgtagatttttttnnnnnnnnnnaagcttggcgtggatccgatatcaactagatcttgagacaaatggcagtattcatccacaattttaaaagaaaaggggggattggggggtacagtgcaggggaaagaatagtagacataatagcaacagacatacaaactaaag

SEQ ID NO: 12292 - DNA, 301 bp, Artificial Sequence
  Pole.1_Crebbp.3
  crRNA array
  misc_feature (148)..(157): n is a, c, g, or t
cttggctttatatatcttgtggaaaggacgaaacaccgtaatttctactaagtgtagatgcgcgctctccacgtgctcttaatttctactaagtgtagatggctccgccgcccgcccgcgtaatttctactaagtgtagatttttttnnnnnnnnnnaagcttggcgtggatccgatatcaactagatcttgagacaaatggcagtattcatccacaattttaaaagaaaaggggggattggggggtacagtgcaggggaaagaatagtagacataatagcaacagacatacaaactaaag

SEQ ID NO: 12293 - DNA, 301 bp, Artificial Sequence
  Pole.1_Crebbp.4
  crRNA array
  misc_feature (148)..(157): n is a, c, g, or t
cttggctttatatatcttgtggaaaggacgaaacaccgtaatttctactaagtgtagatgcgcgctctccacgtgctcttaatttctactaagtgtagattggactagatgactccgtagtaatttctactaagtgtagatttttttnnnnnnnnnnaagcttggcgtggatccgatatcaactagatcttgagacaaatggcagtattcatccacaattttaaaagaaaaggggggattggggggtacagtgcaggggaaagaatagtagacataatagcaacagacatacaaactaaag

SEQ ID NO: 12294 - DNA, 301 bp, Artificial Sequence
  Pole.2_Crebbp.1
  crRNA array
  misc_feature (148)..(157): n is a, c, g, or t
cttggctttatatatcttgtggaaaggacgaaacaccgtaatttctactaagtgtagatacatcgagacgaccaaactgtaatttctactaagtgtagatctcacggcggcggcgggccgtaatttctactaagtgtagatttttttnnnnnnnnnnaagcttggcgtggatccgatatcaactagatcttgagacaaatggcagtattcatccacaattttaaaagaaaaggggggattggggggtacagtgcaggggaaagaatagtagacataatagcaacagacatacaaactaaag

SEQ ID NO: 12295 - DNA, 301 bp, Artificial Sequence
  Pole.2_Crebbp.2
  crRNA array
  misc_feature (148)..(157): n is a, c, g, or t
cttggctttatatatcttgtggaaaggacgaaacaccgtaatttctactaagtgtagatacatcgagacgaccaaactgtaatttctactaagtgtagatcgcgagcaggtgaagatggctaatttctactaagtgtagatttttttnnnnnnnnnnaagcttggcgtggatccgatatcaactagatcttgagacaaatggcagtattcatccacaattttaaaagaaaaggggggattggggggtacagtgcaggggaaagaatagtagacataatagcaacagacatacaaactaaag

SEQ ID NO: 12296 - DNA, 301 bp, Artificial Sequence
  Pole.2_Crebbp.3
  crRNA array
  misc_feature (148)..(157): n is a, c, g, or t
cttggctttatatatcttgtggaaaggacgaaacaccgtaatttctactaagtgtagatacatcgagacgaccaaactgtaatttctactaagtgtagatggctccgccgcccgcccgcgtaatttctactaagtgtagatttttttnnnnnnnnnnaagcttggcgtggatccgatatcaactagatcttgagacaaatggcagtattcatccacaattttaaaagaaaaggggggattggggggtacagtgcaggggaaagaatagtagacataatagcaacagacatacaaactaaag

SEQ ID NO: 12297 - DNA, 301 bp, Artificial Sequence
  Pole.2_Crebbp.4
  crRNA array
  misc_feature (148)..(157): n is a, c, g, or t
cttggctttatatatcttgtggaaaggacgaaacaccgtaatttctactaagtgtagatacatcgagacgaccaaactgtaatttctactaagtgtagattggactagatgactccgtagtaatttctactaagtgtagatttttttnnnnnnnnnnaagcttggcgtggatccgatatcaactagatcttgagacaaatggcagtattcatccacaattttaaaagaaaaggggggattggggggtacagtgcaggggaaagaatagtagacataatagcaacagacatacaaactaaag

SEQ ID NO: 12298 - DNA, 301 bp, Artificial Sequence
  Pole.3_Crebbp.1
  crRNA array
  misc_feature (148)..(157): n is a, c, g, or t
cttggctttatatatcttgtggaaaggacgaaacaccgtaatttctactaagtgtagatctgctgcaacgagtcgagaataatttctactaagtgtagatctcacggcggcggcgggccgtaatttctactaagtgtagatttttttnnnnnnnnnnaagcttggcgtggatccgatatcaactagatcttgagacaaatggcagtattcatccacaattttaaaagaaaaggggggattggggggtacagtgcaggggaaagaatagtagacataatagcaacagacatacaaactaaag

SEQ ID NO: 12299 - DNA, 301 bp, Artificial Sequence
  Pole.3_Crebbp.2
  crRNA array
  misc_feature (148)..(157): n is a, c, g, or t
cttggctttatatatcttgtggaaaggacgaaacaccgtaatttctactaagtgtagatctgctgcaacgagtcgagaataatttctactaagtgtagatcgcgagcaggtgaagatggctaatttctactaagtgtagatttttttnnnnnnnnnnaagcttggcgtggatccgatatcaactagatcttgagacaaatggcagtattcatccacaattttaaaagaaaaggggggattggggggtacagtgcaggggaaagaatagtagacataatagcaacagacatacaaactaaag

SEQ ID NO: 12300 - DNA, 301 bp, Artificial Sequence
  Pole.3_Crebbp.3
  crRNA array
  misc_feature (148)..(157): n is a, c, g, or t
cttggctttatatatcttgtggaaaggacgaaacaccgtaatttctactaagtgtagatctgctgcaacgagtcgagaataatttctactaagtgtagatggctccgccgcccgcccgcgtaatttctactaagtgtagatttttttnnnnnnnnnnaagcttggcgtggatccgatatcaactagatcttgagacaaatggcagtattcatccacaattttaaaagaaaaggggggattggggggtacagtgcaggggaaagaatagtagacataatagcaacagacatacaaactaaag

SEQ ID NO: 12301 - DNA, 301 bp, Artificial Sequence
  Pole.3_Crebbp.4
  crRNA array
  misc_feature (148)..(157): n is a, c, g, or t
cttggctttatatatcttgtggaaaggacgaaacaccgtaatttctactaagtgtagatctgctgcaacgagtcgagaataatttctactaagtgtagattggactagatgactccgtagtaatttctactaagtgtagatttttttnnnnnnnnnnaagcttggcgtggatccgatatcaactagatcttgagacaaatggcagtattcatccacaattttaaaagaaaaggggggattggggggtacagtgcaggggaaagaatagtagacataatagcaacagacatacaaactaaag

SEQ ID NO: 12302 - DNA, 301 bp, Artificial Sequence
  Pole.4_Crebbp.1
  crRNA array
  misc_feature (148)..(157): n is a, c, g, or t
cttggctttatatatcttgtggaaaggacgaaacaccgtaatttctactaagtgtagatgggagatgatatagcggcagtaatttctactaagtgtagatctcacggcggcggcgggccgtaatttctactaagtgtagatttttttnnnnnnnnnnaagcttggcgtggatccgatatcaactagatcttgagacaaatggcagtattcatccacaattttaaaagaaaaggggggattggggggtacagtgcaggggaaagaatagtagacataatagcaacagacatacaaactaaag

SEQ ID NO: 12303 - DNA, 301 bp, Artificial Sequence
  Pole.4_Crebbp.2
  crRNA array
  misc_feature (148)..(157): n is a, c, g, or t
cttggctttatatatcttgtggaaaggacgaaacaccgtaatttctactaagtgtagatgggagatgatatagcggcagtaatttctactaagtgtagatcgcgagcaggtgaagatggctaatttctactaagtgtagatttttttnnnnnnnnnnaagcttggcgtggatccgatatcaactagatcttgagacaaatggcagtattcatccacaattttaaaagaaaaggggggattggggggtacagtgcaggggaaagaatagtagacataatagcaacagacatacaaactaaag

SEQ ID NO: 12304 - DNA, 301 bp, Artificial Sequence
  Pole.4_Crebbp.3
  crRNA array
  misc_feature (148)..(157): n is a, c, g, or t
cttggctttatatatcttgtggaaaggacgaaacaccgtaatttctactaagtgtagatgggagatgatatagcggcagtaatttctactaagtgtagatggctccgccgcccgcccgcgtaatttctactaagtgtagatttttttnnnnnnnnnnaagcttggcgtggatccgatatcaactagatcttgagacaaatggcagtattcatccacaattttaaaagaaaaggggggattggggggtacagtgcaggggaaagaatagtagacataatagcaacagacatacaaactaaag

SEQ ID NO: 12305 - DNA, 301 bp, Artificial Sequence
  Pole.4_Crebbp.4
  crRNA array
  misc_feature (148)..(157): n is a, c, g, or t
cttggctttatatatcttgtggaaaggacgaaacaccgtaatttctactaagtgtagatgggagatgatatagcggcagtaatttctactaagtgtagattggactagatgactccgtagtaatttctactaagtgtagatttttttnnnnnnnnnnaagcttggcgtggatccgatatcaactagatcttgagacaaatggcagtattcatccacaattttaaaagaaaaggggggattggggggtacagtgcaggggaaagaatagtagacataatagcaacagacatacaaactaaag

SEQ ID NO: 12306 - DNA, 301 bp, Artificial Sequence
  Pole.1_Cdkn2a.1
  crRNA array
  misc_feature (148)..(157): n is a, c, g, or t
cttggctttatatatcttgtggaaaggacgaaacaccgtaatttctactaagtgtagatgcgcgctctccacgtgctcttaatttctactaagtgtagatcaatcacgggagggagcagataatttctactaagtgtagatttttttnnnnnnnnnnaagcttggcgtggatccgatatcaactagatcttgagacaaatggcagtattcatccacaattttaaaagaaaaggggggattggggggtacagtgcaggggaaagaatagtagacataatagcaacagacatacaaactaaag

SEQ ID NO: 12307 - DNA, 301 bp, Artificial Sequence
  Pole.1_Cdkn2a.2
  crRNA array
  misc_feature (148)..(157): n is a, c, g, or t
cttggctttatatatcttgtggaaaggacgaaacaccgtaatttctactaagtgtagatgcgcgctctccacgtgctcttaatttctactaagtgtagatgcccaacgccccgaactctttaatttctactaagtgtagatttttttnnnnnnnnnnaagcttggcgtggatccgatatcaactagatcttgagacaaatggcagtattcatccacaattttaaaagaaaaggggggattggggggtacagtgcaggggaaagaatagtagacataatagcaacagacatacaaactaaag

SEQ ID NO: 12308 - DNA, 301 bp, Artificial Sequence
  Pole.1_Cdkn2a.3
  crRNA array
  misc_feature (148)..(157): n is a, c, g, or t
cttggctttatatatcttgtggaaaggacgaaacaccgtaatttctactaagtgtagatgcgcgctctccacgtgctcttaatttctactaagtgtagattgtaccgctgggaacgtcgctaatttctactaagtgtagatttttttnnnnnnnnnnaagcttggcgtggatccgatatcaactagatcttgagacaaatggcagtattcatccacaattttaaaagaaaaggggggattggggggtacagtgcaggggaaagaatagtagacataatagcaacagacatacaaactaaag

SEQ ID NO: 12309 - DNA, 301 bp, Artificial Sequence
  Pole.1_Cdkn2a.4
  crRNA array
  misc_feature (148)..(157): n is a, c, g, or t
cttggctttatatatcttgtggaaaggacgaaacaccgtaatttctactaagtgtagatgcgcgctctccacgtgctcttaatttctactaagtgtagataagccacatgctagacacgctaatttctactaagtgtagatttttttnnnnnnnnnnaagcttggcgtggatccgatatcaactagatcttgagacaaatggcagtattcatccacaattttaaaagaaaaggggggattggggggtacagtgcaggggaaagaatagtagacataatagcaacagacatacaaactaaag

SEQ ID NO: 12310 - DNA, 301 bp, Artificial Sequence
  Pole.2_Cdkn2a.1
  crRNA array
  misc_feature (148)..(157): n is a, c, g, or t
cttggctttatatatcttgtggaaaggacgaaacaccgtaatttctactaagtgtagatacatcgagacgaccaaactgtaatttctactaagtgtagatcaatcacgggagggagcagataatttctactaagtgtagatttttttnnnnnnnnnnaagcttggcgtggatccgatatcaactagatcttgagacaaatggcagtattcatccacaattttaaaagaaaaggggggattggggggtacagtgcaggggaaagaatagtagacataatagcaacagacatacaaactaaag

SEQ ID NO: 12311 - DNA, 301 bp, Artificial Sequence
  Pole.2_Cdkn2a.2
  crRNA array
  misc_feature (148)..(157): n is a, c, g, or t
cttggctttatatatcttgtggaaaggacgaaacaccgtaatttctactaagtgtagatacatcgagacgaccaaactgtaatttctactaagtgtagatgcccaacgccccgaactctttaatttctactaagtgtagatttttttnnnnnnnnnnaagcttggcgtggatccgatatcaactagatcttgagacaaatggcagtattcatccacaattttaaaagaaaaggggggattggggggtacagtgcaggggaaagaatagtagacataatagcaacagacatacaaactaaag

SEQ ID NO: 12312 - DNA, 301 bp, Artificial Sequence
  Pole.2_Cdkn2a.3
  crRNA array
  misc_feature (148)..(157): n is a, c, g, or t
cttggctttatatatcttgtggaaaggacgaaacaccgtaatttctactaagtgtagatacatcgagacgaccaaactgtaatttctactaagtgtagattgtaccgctgggaacgtcgctaatttctactaagtgtagatttttttnnnnnnnnnnaagcttggcgtggatccgatatcaactagatcttgagacaaatggcagtattcatccacaattttaaaagaaaaggggggattggggggtacagtgcaggggaaagaatagtagacataatagcaacagacatacaaactaaag

SEQ ID NO: 12313 - DNA, 301 bp, Artificial Sequence
  Pole.2_Cdkn2a.4
  crRNA array
  misc_feature (148)..(157): n is a, c, g, or t
cttggctttatatatcttgtggaaaggacgaaacaccgtaatttctactaagtgtagatacatcgagacgaccaaactgtaatttctactaagtgtagataagccacatgctagacacgctaatttctactaagtgtagatttttttnnnnnnnnnnaagcttggcgtggatccgatatcaactagatcttgagacaaatggcagtattcatccacaattttaaaagaaaaggggggattggggggtacagtgcaggggaaagaatagtagacataatagcaacagacatacaaactaaag

SEQ ID NO: 12314 - DNA, 301 bp, Artificial Sequence
  Pole.3_Cdkn2a.1
  crRNA array
  misc_feature (148)..(157): n is a, c, g, or t
cttggctttatatatcttgtggaaaggacgaaacaccgtaatttctactaagtgtagatctgctgcaacgagtcgagaataatttctactaagtgtagatcaatcacgggagggagcagataatttctactaagtgtagatttttttnnnnnnnnnnaagcttggcgtggatccgatatcaactagatcttgagacaaatggcagtattcatccacaattttaaaagaaaaggggggattggggggtacagtgcaggggaaagaatagtagacataatagcaacagacatacaaactaaag

SEQ ID NO: 12315 - DNA, 301 bp, Artificial Sequence
  Pole.3_Cdkn2a.2
  crRNA array
  misc_feature (148)..(157): n is a, c, g, or t
cttggctttatatatcttgtggaaaggacgaaacaccgtaatttctactaagtgtagatctgctgcaacgagtcgagaataatttctactaagtgtagatgcccaacgccccgaactctttaatttctactaagtgtagatttttttnnnnnnnnnnaagcttggcgtggatccgatatcaactagatcttgagacaaatggcagtattcatccacaattttaaaagaaaaggggggattggggggtacagtgcaggggaaagaatagtagacataatagcaacagacatacaaactaaag

SEQ ID NO: 12316 - DNA, 301 bp, Artificial Sequence
  Pole.3_Cdkn2a.3
  crRNA array
  misc_feature (148)..(157): n is a, c, g, or t
cttggctttatatatcttgtggaaaggacgaaacaccgtaatttctactaagtgtagatctgctgcaacgagtcgagaataatttctactaagtgtagattgtaccgctgggaacgtcgctaatttctactaagtgtagatttttttnnnnnnnnnnaagcttggcgtggatccgatatcaactagatcttgagacaaatggcagtattcatccacaattttaaaagaaaaggggggattggggggtacagtgcaggggaaagaatagtagacataatagcaacagacatacaaactaaag

SEQ ID NO: 12317 - DNA, 301 bp, Artificial Sequence
  Pole.3_Cdkn2a.4
  crRNA array
  misc_feature (148)..(157): n is a, c, g, or t
cttggctttatatatcttgtggaaaggacgaaacaccgtaatttctactaagtgtagatctgctgcaacgagtcgagaataatttctactaagtgtagataagccacatgctagacacgctaatttctactaagtgtagatttttttnnnnnnnnnnaagcttggcgtggatccgatatcaactagatcttgagacaaatggcagtattcatccacaattttaaaagaaaaggggggattggggggtacagtgcaggggaaagaatagtagacataatagcaacagacatacaaactaaag

SEQ ID NO: 12318 - DNA, 301 bp, Artificial Sequence
  Pole.4_Cdkn2a.1
  crRNA array
  misc_feature (148)..(157): n is a, c, g, or t
cttggctttatatatcttgtggaaaggacgaaacaccgtaatttctactaagtgtagatgggagatgatatagcggcagtaatttctactaagtgtagatcaatcacgggagggagcagataatttctactaagtgtagatttttttnnnnnnnnnnaagcttggcgtggatccgatatcaactagatcttgagacaaatggcagtattcatccacaattttaaaagaaaaggggggattggggggtacagtgcaggggaaagaatagtagacataatagcaacagacatacaaactaaag

SEQ ID NO: 12319 - DNA, 301 bp, Artificial Sequence
  Pole.4_Cdkn2a.2
  crRNA array
  misc_feature (148)..(157): n is a, c, g, or t
cttggctttatatatcttgtggaaaggacgaaacaccgtaatttctactaagtgtagatgggagatgatatagcggcagtaatttctactaagtgtagatgcccaacgccccgaactctttaatttctactaagtgtagatttttttnnnnnnnnnnaagcttggcgtggatccgatatcaactagatcttgagacaaatggcagtattcatccacaattttaaaagaaaaggggggattggggggtacagtgcaggggaaagaatagtagacataatagcaacagacatacaaactaaag

SEQ ID NO: 12320 - DNA, 301 bp, Artificial Sequence
  Pole.4_Cdkn2a.3
  crRNA array
  misc_feature (148)..(157): n is a, c, g, or t
cttggctttatatatcttgtggaaaggacgaaacaccgtaatttctactaagtgtagatgggagatgatatagcggcagtaatttctactaagtgtagattgtaccgctgggaacgtcgctaatttctactaagtgtagatttttttnnnnnnnnnnaagcttggcgtggatccgatatcaactagatcttgagacaaatggcagtattcatccacaattttaaaagaaaaggggggattggggggtacagtgcaggggaaagaatagtagacataatagcaacagacatacaaactaaag

SEQ ID NO: 12321 - DNA, 301 bp, Artificial Sequence
  Pole.4_Cdkn2a.4
  crRNA array
  misc_feature (148)..(157): n is a, c, g, or t
cttggctttatatatcttgtggaaaggacgaaacaccgtaatttctactaagtgtagatgggagatgatatagcggcagtaatttctactaagtgtagataagccacatgctagacacgctaatttctactaagtgtagatttttttnnnnnnnnnnaagcttggcgtggatccgatatcaactagatcttgagacaaatggcagtattcatccacaattttaaaagaaaaggggggattggggggtacagtgcaggggaaagaatagtagacataatagcaacagacatacaaactaaag

SEQ ID NO: 12322 - DNA, 301 bp, Artificial Sequence
  Pole.1_Wrn.1
  crRNA array
  misc_feature (148)..(157): n is a, c, g, or t
cttggctttatatatcttgtggaaaggacgaaacaccgtaatttctactaagtgtagatgcgcgctctccacgtgctcttaatttctactaagtgtagatgcaaaccactcgggtaattttaatttctactaagtgtagatttttttnnnnnnnnnnaagcttggcgtggatccgatatcaactagatcttgagacaaatggcagtattcatccacaattttaaaagaaaaggggggattggggggtacagtgcaggggaaagaatagtagacataatagcaacagacatacaaactaaag

SEQ ID NO: 12323 - DNA, 301 bp, Artificial Sequence
  Pole.1_Wrn.2
  crRNA array
  misc_feature (148)..(157): n is a, c, g, or t
cttggctttatatatcttgtggaaaggacgaaacaccgtaatttctactaagtgtagatgcgcgctctccacgtgctcttaatttctactaagtgtagatgccatgtccagcagaacctttaatttctactaagtgtagatttttttnnnnnnnnnnaagcttggcgtggatccgatatcaactagatcttgagacaaatggcagtattcatccacaattttaaaagaaaaggggggattggggggtacagtgcaggggaaagaatagtagacataatagcaacagacatacaaactaaag

SEQ ID NO: 12324 - DNA, 301 bp, Artificial Sequence
  Pole.1_Wrn.3
  crRNA array
  misc_feature (148)..(157): n is a, c, g, or t
cttggctttatatatcttgtggaaaggacgaaacaccgtaatttctactaagtgtagatgcgcgctctccacgtgctcttaatttctactaagtgtagatctgcagcaggccaccgcaattaatttctactaagtgtagatttttttnnnnnnnnnnaagcttggcgtggatccgatatcaactagatcttgagacaaatggcagtattcatccacaattttaaaagaaaaggggggattggggggtacagtgcaggggaaagaatagtagacataatagcaacagacatacaaactaaag

SEQ ID NO: 12325 - DNA, 301 bp, Artificial Sequence
  Pole.1_Wrn.4
  crRNA array
  misc_feature (148)..(157): n is a, c, g, or t
cttggctttatatatcttgtggaaaggacgaaacaccgtaatttctactaagtgtagatgcgcgctctccacgtgctcttaatttctactaagtgtagattcgaaggacaatagatgatgtaatttctactaagtgtagatttttttnnnnnnnnnnaagcttggcgtggatccgatatcaactagatcttgagacaaatggcagtattcatccacaattttaaaagaaaaggggggattggggggtacagtgcaggggaaagaatagtagacataatagcaacagacatacaaactaaag

SEQ ID NO: 12326 - DNA, 301 bp, Artificial Sequence
  Pole.2_Wrn.1
  crRNA array
  misc_feature (148)..(157): n is a, c, g, or t
cttggctttatatatcttgtggaaaggacgaaacaccgtaatttctactaagtgtagatacatcgagacgaccaaactgtaatttctactaagtgtagatgcaaaccactcgggtaattttaatttctactaagtgtagatttttttnnnnnnnnnnaagcttggcgtggatccgatatcaactagatcttgagacaaatggcagtattcatccacaattttaaaagaaaaggggggattggggggtacagtgcaggggaaagaatagtagacataatagcaacagacatacaaactaaag

SEQ ID NO: 12327 - DNA, 301 bp, Artificial Sequence
  Pole.2_Wrn.2
  crRNA array
  misc_feature (148)..(157): n is a, c, g, or t
cttggctttatatatcttgtggaaaggacgaaacaccgtaatttctactaagtgtagatacatcgagacgaccaaactgtaatttctactaagtgtagatgccatgtccagcagaacctttaatttctactaagtgtagatttttttnnnnnnnnnnaagcttggcgtggatccgatatcaactagatcttgagacaaatggcagtattcatccacaattttaaaagaaaaggggggattggggggtacagtgcaggggaaagaatagtagacataatagcaacagacatacaaactaaag

SEQ ID NO: 12328 - DNA, 301 bp, Artificial Sequence
  Pole.2_Wrn.3
  crRNA array
  misc_feature (148)..(157): n is a, c, g, or t
cttggctttatatatcttgtggaaaggacgaaacaccgtaatttctactaagtgtagatacatcgagacgaccaaactgtaatttctactaagtgtagatctgcagcaggccaccgcaattaatttctactaagtgtagatttttttnnnnnnnnnnaagcttggcgtggatccgatatcaactagatcttgagacaaatggcagtattcatccacaattttaaaagaaaaggggggattggggggtacagtgcaggggaaagaatagtagacataatagcaacagacatacaaactaaag

SEQ ID NO: 12329 - DNA, 301 bp, Artificial Sequence
  Pole.2_Wrn.4
  crRNA array
  misc_feature (148)..(157): n is a, c, g, or t
cttggctttatatatcttgtggaaaggacgaaacaccgtaatttctactaagtgtagatacatcgagacgaccaaactgtaatttctactaagtgtagattcgaaggacaatagatgatgtaatttctactaagtgtagatttttttnnnnnnnnnnaagcttggcgtggatccgatatcaactagatcttgagacaaatggcagtattcatccacaattttaaaagaaaaggggggattggggggtacagtgcaggggaaagaatagtagacataatagcaacagacatacaaactaaag

SEQ ID NO: 12330 - DNA, 301 bp, Artificial Sequence
  Pole.3_Wrn.1
  crRNA array
  misc_feature (148)..(157): n is a, c, g, or t
cttggctttatatatcttgtggaaaggacgaaacaccgtaatttctactaagtgtagatctgctgcaacgagtcgagaataatttctactaagtgtagatgcaaaccactcgggtaattttaatttctactaagtgtagatttttttnnnnnnnnnnaagcttggcgtggatccgatatcaactagatcttgagacaaatggcagtattcatccacaattttaaaagaaaaggggggattggggggtacagtgcaggggaaagaatagtagacataatagcaacagacatacaaactaaag

SEQ ID NO: 12331 - DNA, 301 bp, Artificial Sequence
  Pole.3_Wrn.2
  crRNA array
  misc_feature (148)..(157): n is a, c, g, or t
cttggctttatatatcttgtggaaaggacgaaacaccgtaatttctactaagtgtagatctgctgcaacgagtcgagaataatttctactaagtgtagatgccatgtccagcagaacctttaatttctactaagtgtagatttttttnnnnnnnnnnaagcttggcgtggatccgatatcaactagatcttgagacaaatggcagtattcatccacaattttaaaagaaaaggggggattggggggtacagtgcaggggaaagaatagtagacataatagcaacagacatacaaactaaag

SEQ ID NO: 12332 - DNA, 301 bp, Artificial Sequence
  Pole.3_Wrn.3
  crRNA array
  misc_feature (148)..(157): n is a, c, g, or t
cttggctttatatatcttgtggaaaggacgaaacaccgtaatttctactaagtgtagatctgctgcaacgagtcgagaataatttctactaagtgtagatctgcagcaggccaccgcaattaatttctactaagtgtagatttttttnnnnnnnnnnaagcttggcgtggatccgatatcaactagatcttgagacaaatggcagtattcatccacaattttaaaagaaaaggggggattggggggtacagtgcaggggaaagaatagtagacataatagcaacagacatacaaactaaag

SEQ ID NO: 12333 - DNA, 301 bp, Artificial Sequence
  Pole.3_Wrn.4
  crRNA array
  misc_feature (148)..(157): n is a, c, g, or t
cttggctttatatatcttgtggaaaggacgaaacaccgtaatttctactaagtgtagatctgctgcaacgagtcgagaataatttctactaagtgtagattcgaaggacaatagatgatgtaatttctactaagtgtagatttttttnnnnnnnnnnaagcttggcgtggatccgatatcaactagatcttgagacaaatggcagtattcatccacaattttaaaagaaaaggggggattggggggtacagtgcaggggaaagaatagtagacataatagcaacagacatacaaactaaag

SEQ ID NO: 12334 - DNA, 301 bp, Artificial Sequence
  Pole.4_Wrn.1
  crRNA array
  misc_feature (148)..(157): n is a, c, g, or t
cttggctttatatatcttgtggaaaggacgaaacaccgtaatttctactaagtgtagatgggagatgatatagcggcagtaatttctactaagtgtagatgcaaaccactcgggtaattttaatttctactaagtgtagatttttttnnnnnnnnnnaagcttggcgtggatccgatatcaactagatcttgagacaaatggcagtattcatccacaattttaaaagaaaaggggggattggggggtacagtgcaggggaaagaatagtagacataatagcaacagacatacaaactaaag

SEQ ID NO: 12335 - DNA, 301 bp, Artificial Sequence
  Pole.4_Wrn.2
  crRNA array
  misc_feature (148)..(157): n is a, c, g, or t
cttggctttatatatcttgtggaaaggacgaaacaccgtaatttctactaagtgtagatgggagatgatatagcggcagtaatttctactaagtgtagatgccatgtccagcagaacctttaatttctactaagtgtagatttttttnnnnnnnnnnaagcttggcgtggatccgatatcaactagatcttgagacaaatggcagtattcatccacaattttaaaagaaaaggggggattggggggtacagtgcaggggaaagaatagtagacataatagcaacagacatacaaactaaag

SEQ ID NO: 12336 - DNA, 301 bp, Artificial Sequence
  Pole.4_Wrn.3
  crRNA array
  misc_feature (148)..(157): n is a, c, g, or t
cttggctttatatatcttgtggaaaggacgaaacaccgtaatttctactaagtgtagatgggagatgatatagcggcagtaatttctactaagtgtagatctgcagcaggccaccgcaattaatttctactaagtgtagatttttttnnnnnnnnnnaagcttggcgtggatccgatatcaactagatcttgagacaaatggcagtattcatccacaattttaaaagaaaaggggggattggggggtacagtgcaggggaaagaatagtagacataatagcaacagacatacaaactaaag

SEQ ID NO: 12337 - DNA, 301 bp, Artificial Sequence
  Pole.4_Wrn.4
  crRNA array
  misc_feature (148)..(157): n is a, c, g, or t
cttggctttatatatcttgtggaaaggacgaaacaccgtaatttctactaagtgtagatgggagatgatatagcggcagtaatttctactaagtgtagattcgaaggacaatagatgatgtaatttctactaagtgtagatttttttnnnnnnnnnnaagcttggcgtggatccgatatcaactagatcttgagacaaatggcagtattcatccacaattttaaaagaaaaggggggattggggggtacagtgcaggggaaagaatagtagacataatagcaacagacatacaaactaaag

SEQ ID NO: 12338 - DNA, 301 bp, Artificial Sequence
  Pole.1_Brca2.1
  crRNA array
  misc_feature (148)..(157): n is a, c, g, or t
cttggctttatatatcttgtggaaaggacgaaacaccgtaatttctactaagtgtagatgcgcgctctccacgtgctcttaatttctactaagtgtagatctaagcgtagaaccagaaattaatttctactaagtgtagatttttttnnnnnnnnnnaagcttggcgtggatccgatatcaactagatcttgagacaaatggcagtattcatccacaattttaaaagaaaaggggggattggggggtacagtgcaggggaaagaatagtagacataatagcaacagacatacaaactaaag

SEQ ID NO: 12339 - DNA, 301 bp, Artificial Sequence
  Pole.1_Brca2.2
  crRNA array
  misc_feature (148)..(157): n is a, c, g, or t
cttggctttatatatcttgtggaaaggacgaaacaccgtaatttctactaagtgtagatgcgcgctctccacgtgctcttaatttctactaagtgtagatgatccaggtgtaacaagccataatttctactaagtgtagatttttttnnnnnnnnnnaagcttggcgtggatccgatatcaactagatcttgagacaaatggcagtattcatccacaattttaaaagaaaaggggggattggggggtacagtgcaggggaaagaatagtagacataatagcaacagacatacaaactaaag

SEQ ID NO: 12340 - DNA, 301 bp, Artificial Sequence
  Pole.1_Brca2.3
  crRNA array
  misc_feature (148)..(157): n is a, c, g, or t
cttggctttatatatcttgtggaaaggacgaaacaccgtaatttctactaagtgtagatgcgcgctctccacgtgctcttaatttctactaagtgtagattgaatataaactgggccacttaatttctactaagtgtagatttttttnnnnnnnnnnaagcttggcgtggatccgatatcaactagatcttgagacaaatggcagtattcatccacaattttaaaagaaaaggggggattggggggtacagtgcaggggaaagaatagtagacataatagcaacagacatacaaactaaag

SEQ ID NO: 12341 - DNA, 301 bp, Artificial Sequence
  Pole.1_Brca2.4
  crRNA array
  misc_feature (148)..(157): n is a, c, g, or t
cttggctttatatatcttgtggaaaggacgaaacaccgtaatttctactaagtgtagatgcgcgctctccacgtgctcttaatttctactaagtgtagatgaaacgccgtatatatagagtaatttctactaagtgtagatttttttnnnnnnnnnnaagcttggcgtggatccgatatcaactagatcttgagacaaatggcagtattcatccacaattttaaaagaaaaggggggattggggggtacagtgcaggggaaagaatagtagacataatagcaacagacatacaaactaaag

SEQ ID NO: 12342 - DNA, 301 bp, Artificial Sequence
  Pole.2_Brca2.1
  crRNA array
  misc_feature (148)..(157): n is a, c, g, or t
cttggctttatatatcttgtggaaaggacgaaacaccgtaatttctactaagtgtagatacatcgagacgaccaaactgtaatttctactaagtgtagatctaagcgtagaaccagaaattaatttctactaagtgtagatttttttnnnnnnnnnnaagcttggcgtggatccgatatcaactagatcttgagacaaatggcagtattcatccacaattttaaaagaaaaggggggattggggggtacagtgcaggggaaagaatagtagacataatagcaacagacatacaaactaaag

SEQ ID NO: 12343 - DNA, 301 bp, Artificial Sequence
  Pole.2_Brca2.2
  crRNA array
  misc_feature (148)..(157): n is a, c, g, or t
cttggctttatatatcttgtggaaaggacgaaacaccgtaatttctactaagtgtagatacatcgagacgaccaaactgtaatttctactaagtgtagatgatccaggtgtaacaagccataatttctactaagtgtagatttttttnnnnnnnnnnaagcttggcgtggatccgatatcaactagatcttgagacaaatggcagtattcatccacaattttaaaagaaaaggggggattggggggtacagtgcaggggaaagaatagtagacataatagcaacagacatacaaactaaag

SEQ ID NO: 12344 - DNA, 301 bp, Artificial Sequence
  Pole.2_Brca2.3
  crRNA array
  misc_feature (148)..(157): n is a, c, g, or t
cttggctttatatatcttgtggaaaggacgaaacaccgtaatttctactaagtgtagatacatcgagacgaccaaactgtaatttctactaagtgtagattgaatataaactgggccacttaatttctactaagtgtagatttttttnnnnnnnnnnaagcttggcgtggatccgatatcaactagatcttgagacaaatggcagtattcatccacaattttaaaagaaaaggggggattggggggtacagtgcaggggaaagaatagtagacataatagcaacagacatacaaactaaag

SEQ ID NO: 12345 - DNA, 301 bp, Artificial Sequence
  Pole.2_Brca2.4
  crRNA array
  misc_feature (148)..(157): n is a, c, g, or t
cttggctttatatatcttgtggaaaggacgaaacaccgtaatttctactaagtgtagatacatcgagacgaccaaactgtaatttctactaagtgtagatgaaacgccgtatatatagagtaatttctactaagtgtagatttttttnnnnnnnnnnaagcttggcgtggatccgatatcaactagatcttgagacaaatggcagtattcatccacaattttaaaagaaaaggggggattggggggtacagtgcaggggaaagaatagtagacataatagcaacagacatacaaactaaag

SEQ ID NO: 12346 - DNA, 301 bp, Artificial Sequence
  Pole.3_Brca2.1
  crRNA array
  misc_feature (148)..(157): n is a, c, g, or t
cttggctttatatatcttgtggaaaggacgaaacaccgtaatttctactaagtgtagatctgctgcaacgagtcgagaataatttctactaagtgtagatctaagcgtagaaccagaaattaatttctactaagtgtagatttttttnnnnnnnnnnaagcttggcgtggatccgatatcaactagatcttgagacaaatggcagtattcatccacaattttaaaagaaaaggggggattggggggtacagtgcaggggaaagaatagtagacataatagcaacagacatacaaactaaag

SEQ ID NO: 12347 - DNA, 301 bp, Artificial Sequence
  Pole.3_Brca2.2
  crRNA array
  misc_feature (148)..(157): n is a, c, g, or t
cttggctttatatatcttgtggaaaggacgaaacaccgtaatttctactaagtgtagatctgctgcaacgagtcgagaataatttctactaagtgtagatgatccaggtgtaacaagccataatttctactaagtgtagatttttttnnnnnnnnnnaagcttggcgtggatccgatatcaactagatcttgagacaaatggcagtattcatccacaattttaaaagaaaaggggggattggggggtacagtgcaggggaaagaatagtagacataatagcaacagacatacaaactaaag

SEQ ID NO: 12348 - DNA, 301 bp, Artificial Sequence
  Pole.3_Brca2.3
  crRNA array
  misc_feature (148)..(157): n is a, c, g, or t
cttggctttatatatcttgtggaaaggacgaaacaccgtaatttctactaagtgtagatctgctgcaacgagtcgagaataatttctactaagtgtagattgaatataaactgggccacttaatttctactaagtgtagatttttttnnnnnnnnnnaagcttggcgtggatccgatatcaactagatcttgagacaaatggcagtattcatccacaattttaaaagaaaaggggggattggggggtacagtgcaggggaaagaatagtagacataatagcaacagacatacaaactaaag

SEQ ID NO: 12349 - DNA, 301 bp, Artificial Sequence
  Pole.3_Brca2.4
  crRNA array
  misc_feature (148)..(157): n is a, c, g, or t
cttggctttatatatcttgtggaaaggacgaaacaccgtaatttctactaagtgtagatctgctgcaacgagtcgagaataatttctactaagtgtagatgaaacgccgtatatatagagtaatttctactaagtgtagatttttttnnnnnnnnnnaagcttggcgtggatccgatatcaactagatcttgagacaaatggcagtattcatccacaattttaaaagaaaaggggggattggggggtacagtgcaggggaaagaatagtagacataatagcaacagacatacaaactaaag

SEQ ID NO: 12350 - DNA, 301 bp, Artificial Sequence
  Pole.4_Brca2.1
  crRNA array
  misc_feature (148)..(157): n is a, c, g, or t
cttggctttatatatcttgtggaaaggacgaaacaccgtaatttctactaagtgtagatgggagatgatatagcggcagtaatttctactaagtgtagatctaagcgtagaaccagaaattaatttctactaagtgtagatttttttnnnnnnnnnnaagcttggcgtggatccgatatcaactagatcttgagacaaatggcagtattcatccacaattttaaaagaaaaggggggattggggggtacagtgcaggggaaagaatagtagacataatagcaacagacatacaaactaaag

SEQ ID NO: 12351 - DNA, 301 bp, Artificial Sequence
  Pole.4_Brca2.2
  crRNA array
  misc_feature (148)..(157): n is a, c, g, or t
cttggctttatatatcttgtggaaaggacgaaacaccgtaatttctactaagtgtagatgggagatgatatagcggcagtaatttctactaagtgtagatgatccaggtgtaacaagccataatttctactaagtgtagatttttttnnnnnnnnnnaagcttggcgtggatccgatatcaactagatcttgagacaaatggcagtattcatccacaattttaaaagaaaaggggggattggggggtacagtgcaggggaaagaatagtagacataatagcaacagacatacaaactaaag

SEQ ID NO: 12352 - DNA, 301 bp, Artificial Sequence
  Pole.4_Brca2.3
  crRNA array
  misc_feature (148)..(157): n is a, c, g, or t
cttggctttatatatcttgtggaaaggacgaaacaccgtaatttctactaagtgtagatgggagatgatatagcggcagtaatttctactaagtgtagattgaatataaactgggccacttaatttctactaagtgtagatttttttnnnnnnnnnnaagcttggcgtggatccgatatcaactagatcttgagacaaatggcagtattcatccacaattttaaaagaaaaggggggattggggggtacagtgcaggggaaagaatagtagacataatagcaacagacatacaaactaaag

SEQ ID NO: 12353 - DNA, 301 bp, Artificial Sequence
  Pole.4_Brca2.4
  crRNA array
  misc_feature (148)..(157): n is a, c, g, or t
cttggctttatatatcttgtggaaaggacgaaacaccgtaatttctactaagtgtagatgggagatgatatagcggcagtaatttctactaagtgtagatgaaacgccgtatatatagagtaatttctactaagtgtagatttttttnnnnnnnnnnaagcttggcgtggatccgatatcaactagatcttgagacaaatggcagtattcatccacaattttaaaagaaaaggggggattggggggtacagtgcaggggaaagaatagtagacataatagcaacagacatacaaactaaag

SEQ ID NO: 12354 - DNA, 301 bp, Artificial Sequence
  Pole.1_Apc.1
  crRNA array
  misc_feature (148)..(157): n is a, c, g, or t
cttggctttatatatcttgtggaaaggacgaaacaccgtaatttctactaagtgtagatgcgcgctctccacgtgctcttaatttctactaagtgtagatgtgatccacacgtgtagctgtaatttctactaagtgtagatttttttnnnnnnnnnnaagcttggcgtggatccgatatcaactagatcttgagacaaatggcagtattcatccacaattttaaaagaaaaggggggattggggggtacagtgcaggggaaagaatagtagacataatagcaacagacatacaaactaaag

SEQ ID NO: 12355 - DNA, 301 bp, Artificial Sequence
  Pole.1_Apc.2
  crRNA array
  misc_feature (148)..(157): n is a, c, g, or t
cttggctttatatatcttgtggaaaggacgaaacaccgtaatttctactaagtgtagatgcgcgctctccacgtgctcttaatttctactaagtgtagatcatctgctcgccaagacaaataatttctactaagtgtagatttttttnnnnnnnnnnaagcttggcgtggatccgatatcaactagatcttgagacaaatggcagtattcatccacaattttaaaagaaaaggggggattggggggtacagtgcaggggaaagaatagtagacataatagcaacagacatacaaactaaag

SEQ ID NO: 12356 - DNA, 301 bp, Artificial Sequence
  Pole.1_Apc.3
  crRNA array
  misc_feature (148)..(157): n is a, c, g, or t
cttggctttatatatcttgtggaaaggacgaaacaccgtaatttctactaagtgtagatgcgcgctctccacgtgctcttaatttctactaagtgtagatacgccaatcgacatgatgattaatttctactaagtgtagatttttttnnnnnnnnnnaagcttggcgtggatccgatatcaactagatcttgagacaaatggcagtattcatccacaattttaaaagaaaaggggggattggggggtacagtgcaggggaaagaatagtagacataatagcaacagacatacaaactaaag

SEQ ID NO: 12357 - DNA, 301 bp, Artificial Sequence
  Pole.1_Apc.4
  crRNA array
  misc_feature (148)..(157): n is a, c, g, or t
cttggctttatatatcttgtggaaaggacgaaacaccgtaatttctactaagtgtagatgcgcgctctccacgtgctcttaatttctactaagtgtagatcaccaggggatgatgtgccctaatttctactaagtgtagatttttttnnnnnnnnnnaagcttggcgtggatccgatatcaactagatcttgagacaaatggcagtattcatccacaattttaaaagaaaaggggggattggggggtacagtgcaggggaaagaatagtagacataatagcaacagacatacaaactaaag

SEQ ID NO: 12358 - DNA, 301 bp, Artificial Sequence
  Pole.2_Apc.1
  crRNA array
  misc_feature (148)..(157): n is a, c, g, or t
cttggctttatatatcttgtggaaaggacgaaacaccgtaatttctactaagtgtagatacatcgagacgaccaaactgtaatttctactaagtgtagatgtgatccacacgtgtagctgtaatttctactaagtgtagatttttttnnnnnnnnnnaagcttggcgtggatccgatatcaactagatcttgagacaaatggcagtattcatccacaattttaaaagaaaaggggggattggggggtacagtgcaggggaaagaatagtagacataatagcaacagacatacaaactaaag

SEQ ID NO: 12359 - DNA, 301 bp, Artificial Sequence
  Pole.2_Apc.2
  crRNA array
  misc_feature (148)..(157): n is a, c, g, or t
cttggctttatatatcttgtggaaaggacgaaacaccgtaatttctactaagtgtagatacatcgagacgaccaaactgtaatttctactaagtgtagatcatctgctcgccaagacaaataatttctactaagtgtagatttttttnnnnnnnnnnaagcttggcgtggatccgatatcaactagatcttgagacaaatggcagtattcatccacaattttaaaagaaaaggggggattggggggtacagtgcaggggaaagaatagtagacataatagcaacagacatacaaactaaag

SEQ ID NO: 12360 - DNA, 301 bp, Artificial Sequence
  Pole.2_Apc.3
  crRNA array
  misc_feature (148)..(157): n is a, c, g, or t
cttggctttatatatcttgtggaaaggacgaaacaccgtaatttctactaagtgtagatacatcgagacgaccaaactgtaatttctactaagtgtagatacgccaatcgacatgatgattaatttctactaagtgtagatttttttnnnnnnnnnnaagcttggcgtggatccgatatcaactagatcttgagacaaatggcagtattcatccacaattttaaaagaaaaggggggattggggggtacagtgcaggggaaagaatagtagacataatagcaacagacatacaaactaaag

SEQ ID NO: 12361 - DNA, 301 bp, Artificial Sequence
  Pole.2_Apc.4
  crRNA array
  misc_feature (148)..(157): n is a, c, g, or t
cttggctttatatatcttgtggaaaggacgaaacaccgtaatttctactaagtgtagatacatcgagacgaccaaactgtaatttctactaagtgtagatcaccaggggatgatgtgccctaatttctactaagtgtagatttttttnnnnnnnnnnaagcttggcgtggatccgatatcaactagatcttgagacaaatggcagtattcatccacaattttaaaagaaaaggggggattggggggtacagtgcaggggaaagaatagtagacataatagcaacagacatacaaactaaag

SEQ ID NO: 12362 - DNA, 301 bp, Artificial Sequence
  Pole.3_Apc.1
  crRNA array
  misc_feature (148)..(157): n is a, c, g, or t
cttggctttatatatcttgtggaaaggacgaaacaccgtaatttctactaagtgtagatctgctgcaacgagtcgagaataatttctactaagtgtagatgtgatccacacgtgtagctgtaatttctactaagtgtagatttttttnnnnnnnnnnaagcttggcgtggatccgatatcaactagatcttgagacaaatggcagtattcatccacaattttaaaagaaaaggggggattggggggtacagtgcaggggaaagaatagtagacataatagcaacagacatacaaactaaag

SEQ ID NO: 12363 - DNA, 301 bp, Artificial Sequence
  Pole.3_Apc.2
  crRNA array
  misc_feature (148)..(157): n is a, c, g, or t
cttggctttatatatcttgtggaaaggacgaaacaccgtaatttctactaagtgtagatctgctgcaacgagtcgagaataatttctactaagtgtagatcatctgctcgccaagacaaataatttctactaagtgtagatttttttnnnnnnnnnnaagcttggcgtggatccgatatcaactagatcttgagacaaatggcagtattcatccacaattttaaaagaaaaggggggattggggggtacagtgcaggggaaagaatagtagacataatagcaacagacatacaaactaaag

SEQ ID NO: 12364 - DNA, 301 bp, Artificial Sequence
  Pole.3_Apc.3
  crRNA array
  misc_feature (148)..(157): n is a, c, g, or t
cttggctttatatatcttgtggaaaggacgaaacaccgtaatttctactaagtgtagatctgctgcaacgagtcgagaataatttctactaagtgtagatacgccaatcgacatgatgattaatttctactaagtgtagatttttttnnnnnnnnnnaagcttggcgtggatccgatatcaactagatcttgagacaaatggcagtattcatccacaattttaaaagaaaaggggggattggggggtacagtgcaggggaaagaatagtagacataatagcaacagacatacaaactaaag

SEQ ID NO: 12365 - DNA, 301 bp, Artificial Sequence
  Pole.3_Apc.4
  crRNA array
  misc_feature (148)..(157): n is a, c, g, or t
cttggctttatatatcttgtggaaaggacgaaacaccgtaatttctactaagtgtagatctgctgcaacgagtcgagaataatttctactaagtgtagatcaccaggggatgatgtgccctaatttctactaagtgtagatttttttnnnnnnnnnnaagcttggcgtggatccgatatcaactagatcttgagacaaatggcagtattcatccacaattttaaaagaaaaggggggattggggggtacagtgcaggggaaagaatagtagacataatagcaacagacatacaaactaaag

SEQ ID NO: 12366 - DNA, 301 bp, Artificial Sequence
  Pole.4_Apc.1
  crRNA array
  misc_feature (148)..(157): n is a, c, g, or t
cttggctttatatatcttgtggaaaggacgaaacaccgtaatttctactaagtgtagatgggagatgatatagcggcagtaatttctactaagtgtagatgtgatccacacgtgtagctgtaatttctactaagtgtagatttttttnnnnnnnnnnaagcttggcgtggatccgatatcaactagatcttgagacaaatggcagtattcatccacaattttaaaagaaaaggggggattggggggtacagtgcaggggaaagaatagtagacataatagcaacagacatacaaactaaag

SEQ ID NO: 12367 - DNA, 301 bp, Artificial Sequence
  Pole.4_Apc.2
  crRNA array
  misc_feature (148)..(157): n is a, c, g, or t
cttggctttatatatcttgtggaaaggacgaaacaccgtaatttctactaagtgtagatgggagatgatatagcggcagtaatttctactaagtgtagatcatctgctcgccaagacaaataatttctactaagtgtagatttttttnnnnnnnnnnaagcttggcgtggatccgatatcaactagatcttgagacaaatggcagtattcatccacaattttaaaagaaaaggggggattggggggtacagtgcaggggaaagaatagtagacataatagcaacagacatacaaactaaag

SEQ ID NO: 12368 - DNA, 301 bp, Artificial Sequence
  Pole.4_Apc.3
  crRNA array
  misc_feature (148)..(157): n is a, c, g, or t
cttggctttatatatcttgtggaaaggacgaaacaccgtaatttctactaagtgtagatgggagatgatatagcggcagtaatttctactaagtgtagatacgccaatcgacatgatgattaatttctactaagtgtagatttttttnnnnnnnnnnaagcttggcgtggatccgatatcaactagatcttgagacaaatggcagtattcatccacaattttaaaagaaaaggggggattggggggtacagtgcaggggaaagaatagtagacataatagcaacagacatacaaactaaag

SEQ ID NO: 12369 - DNA, 301 bp, Artificial Sequence
  Pole.4_Apc.4
  crRNA array
  misc_feature (148)..(157): n is a, c, g, or t
cttggctttatatatcttgtggaaaggacgaaacaccgtaatttctactaagtgtagatgggagatgatatagcggcagtaatttctactaagtgtagatcaccaggggatgatgtgccctaatttctactaagtgtagatttttttnnnnnnnnnnaagcttggcgtggatccgatatcaactagatcttgagacaaatggcagtattcatccacaattttaaaagaaaaggggggattggggggtacagtgcaggggaaagaatagtagacataatagcaacagacatacaaactaaag

SEQ ID NO: 12370 - DNA, 301 bp, Artificial Sequence
  Pole.1_Fanca.1
  crRNA array
  misc_feature (148)..(157): n is a, c, g, or t
cttggctttatatatcttgtggaaaggacgaaacaccgtaatttctactaagtgtagatgcgcgctctccacgtgctcttaatttctactaagtgtagatggaggccccggggcccaccataatttctactaagtgtagatttttttnnnnnnnnnnaagcttggcgtggatccgatatcaactagatcttgagacaaatggcagtattcatccacaattttaaaagaaaaggggggattggggggtacagtgcaggggaaagaatagtagacataatagcaacagacatacaaactaaag

SEQ ID NO: 12371 - DNA, 301 bp, Artificial Sequence
  Pole.1_Fanca.2
  crRNA array
  misc_feature (148)..(157): n is a, c, g, or t
cttggctttatatatcttgtggaaaggacgaaacaccgtaatttctactaagtgtagatgcgcgctctccacgtgctcttaatttctactaagtgtagatagagctaccacctagacagctaatttctactaagtgtagatttttttnnnnnnnnnnaagcttggcgtggatccgatatcaactagatcttgagacaaatggcagtattcatccacaattttaaaagaaaaggggggattggggggtacagtgcaggggaaagaatagtagacataatagcaacagacatacaaactaaag

SEQ ID NO: 12372 - DNA, 301 bp, Artificial Sequence
  Pole.1_Fanca.3
  crRNA array
  misc_feature (148)..(157): n is a, c, g, or t
cttggctttatatatcttgtggaaaggacgaaacaccgtaatttctactaagtgtagatgcgcgctctccacgtgctcttaatttctactaagtgtagataccaactgctgtgcctcgggtaatttctactaagtgtagatttttttnnnnnnnnnnaagcttggcgtggatccgatatcaactagatcttgagacaaatggcagtattcatccacaattttaaaagaaaaggggggattggggggtacagtgcaggggaaagaatagtagacataatagcaacagacatacaaactaaag

SEQ ID NO: 12373 - DNA, 301 bp, Artificial Sequence
  Pole.1_Fanca.4
  crRNA array
  misc_feature (148)..(157): n is a, c, g, or t
cttggctttatatatcttgtggaaaggacgaaacaccgtaatttctactaagtgtagatgcgcgctctccacgtgctcttaatttctactaagtgtagatcacccacccctggtgccaagtaatttctactaagtgtagatttttttnnnnnnnnnnaagcttggcgtggatccgatatcaactagatcttgagacaaatggcagtattcatccacaattttaaaagaaaaggggggattggggggtacagtgcaggggaaagaatagtagacataatagcaacagacatacaaactaaag

SEQ ID NO: 12374 - DNA, 301 bp, Artificial Sequence
  Pole.2_Fanca.1
  crRNA array
  misc_feature (148)..(157): n is a, c, g, or t
cttggctttatatatcttgtggaaaggacgaaacaccgtaatttctactaagtgtagatacatcgagacgaccaaactgtaatttctactaagtgtagatggaggccccggggcccaccataatttctactaagtgtagatttttttnnnnnnnnnnaagcttggcgtggatccgatatcaactagatcttgagacaaatggcagtattcatccacaattttaaaagaaaaggggggattggggggtacagtgcaggggaaagaatagtagacataatagcaacagacatacaaactaaag

SEQ ID NO: 12375 - DNA, 301 bp, Artificial Sequence
  Pole.2_Fanca.2
  crRNA array
  misc_feature (148)..(157): n is a, c, g, or t
cttggctttatatatcttgtggaaaggacgaaacaccgtaatttctactaagtgtagatacatcgagacgaccaaactgtaatttctactaagtgtagatagagctaccacctagacagctaatttctactaagtgtagatttttttnnnnnnnnnnaagcttggcgtggatccgatatcaactagatcttgagacaaatggcagtattcatccacaattttaaaagaaaaggggggattggggggtacagtgcaggggaaagaatagtagacataatagcaacagacatacaaactaaag

SEQ ID NO: 12376 - DNA, 301 bp, Artificial Sequence
  Pole.2_Fanca.3
  crRNA array
  misc_feature (148)..(157): n is a, c, g, or t
cttggctttatatatcttgtggaaaggacgaaacaccgtaatttctactaagtgtagatacatcgagacgaccaaactgtaatttctactaagtgtagataccaactgctgtgcctcgggtaatttctactaagtgtagatttttttnnnnnnnnnnaagcttggcgtggatccgatatcaactagatcttgagacaaatggcagtattcatccacaattttaaaagaaaaggggggattggggggtacagtgcaggggaaagaatagtagacataatagcaacagacatacaaactaaag

SEQ ID NO: 12377 - DNA, 301 bp, Artificial Sequence
  Pole.2_Fanca.4
  crRNA array
  misc_feature (148)..(157): n is a, c, g, or t
cttggctttatatatcttgtggaaaggacgaaacaccgtaatttctactaagtgtagatacatcgagacgaccaaactgtaatttctactaagtgtagatcacccacccctggtgccaagtaatttctactaagtgtagatttttttnnnnnnnnnnaagcttggcgtggatccgatatcaactagatcttgagacaaatggcagtattcatccacaattttaaaagaaaaggggggattggggggtacagtgcaggggaaagaatagtagacataatagcaacagacatacaaactaaag

SEQ ID NO: 12378 - DNA, 301 bp, Artificial Sequence
  Pole.3_Fanca.1
  crRNA array
  misc_feature (148)..(157): n is a, c, g, or t
cttggctttatatatcttgtggaaaggacgaaacaccgtaatttctactaagtgtagatctgctgcaacgagtcgagaataatttctactaagtgtagatggaggccccggggcccaccataatttctactaagtgtagatttttttnnnnnnnnnnaagcttggcgtggatccgatatcaactagatcttgagacaaatggcagtattcatccacaattttaaaagaaaaggggggattggggggtacagtgcaggggaaagaatagtagacataatagcaacagacatacaaactaaag

SEQ ID NO: 12379 - DNA, 301 bp, Artificial Sequence
  Pole.3_Fanca.2
  crRNA array
  misc_feature (148)..(157): n is a, c, g, or t
cttggctttatatatcttgtggaaaggacgaaacaccgtaatttctactaagtgtagatctgctgcaacgagtcgagaataatttctactaagtgtagatagagctaccacctagacagctaatttctactaagtgtagatttttttnnnnnnnnnnaagcttggcgtggatccgatatcaactagatcttgagacaaatggcagtattcatccacaattttaaaagaaaaggggggattggggggtacagtgcaggggaaagaatagtagacataatagcaacagacatacaaactaaag

SEQ ID NO: 12380 - DNA, 301 bp, Artificial Sequence
  Pole.3_Fanca.3
  crRNA array
  misc_feature (148)..(157): n is a, c, g, or t
cttggctttatatatcttgtggaaaggacgaaacaccgtaatttctactaagtgtagatctgctgcaacgagtcgagaataatttctactaagtgtagataccaactgctgtgcctcgggtaatttctactaagtgtagatttttttnnnnnnnnnnaagcttggcgtggatccgatatcaactagatcttgagacaaatggcagtattcatccacaattttaaaagaaaaggggggattggggggtacagtgcaggggaaagaatagtagacataatagcaacagacatacaaactaaag

SEQ ID NO: 12381 - DNA, 301 bp, Artificial Sequence
  Pole.3_Fanca.4
  crRNA array
  misc_feature (148)..(157): n is a, c, g, or t
cttggctttatatatcttgtggaaaggacgaaacaccgtaatttctactaagtgtagatctgctgcaacgagtcgagaataatttctactaagtgtagatcacccacccctggtgccaagtaatttctactaagtgtagatttttttnnnnnnnnnnaagcttggcgtggatccgatatcaactagatcttgagacaaatggcagtattcatccacaattttaaaagaaaaggggggattggggggtacagtgcaggggaaagaatagtagacataatagcaacagacatacaaactaaag

SEQ ID NO: 12382 - DNA, 301 bp, Artificial Sequence
  Pole.4_Fanca.1
  crRNA array
  misc_feature (148)..(157): n is a, c, g, or t
cttggctttatatatcttgtggaaaggacgaaacaccgtaatttctactaagtgtagatgggagatgatatagcggcagtaatttctactaagtgtagatggaggccccggggcccaccataatttctactaagtgtagatttttttnnnnnnnnnnaagcttggcgtggatccgatatcaactagatcttgagacaaatggcagtattcatccacaattttaaaagaaaaggggggattggggggtacagtgcaggggaaagaatagtagacataatagcaacagacatacaaactaaag

SEQ ID NO: 12383 - DNA, 301 bp, Artificial Sequence
  Pole.4_Fanca.2
  crRNA array
  misc_feature (148)..(157): n is a, c, g, or t
cttggctttatatatcttgtggaaaggacgaaacaccgtaatttctactaagtgtagatgggagatgatatagcggcagtaatttctactaagtgtagatagagctaccacctagacagctaatttctactaagtgtagatttttttnnnnnnnnnnaagcttggcgtggatccgatatcaactagatcttgagacaaatggcagtattcatccacaattttaaaagaaaaggggggattggggggtacagtgcaggggaaagaatagtagacataatagcaacagacatacaaactaaag

SEQ ID NO: 12384 - DNA, 301 bp, Artificial Sequence
  Pole.4_Fanca.3
  crRNA array
  misc_feature (148)..(157): n is a, c, g, or t
cttggctttatatatcttgtggaaaggacgaaacaccgtaatttctactaagtgtagatgggagatgatatagcggcagtaatttctactaagtgtagataccaactgctgtgcctcgggtaatttctactaagtgtagatttttttnnnnnnnnnnaagcttggcgtggatccgatatcaactagatcttgagacaaatggcagtattcatccacaattttaaaagaaaaggggggattggggggtacagtgcaggggaaagaatagtagacataatagcaacagacatacaaactaaag

SEQ ID NO: 12385 - DNA, 301 bp, Artificial Sequence
  Pole.4_Fanca.4
  crRNA array
  misc_feature (148)..(157): n is a, c, g, or t
cttggctttatatatcttgtggaaaggacgaaacaccgtaatttctactaagtgtagatgggagatgatatagcggcagtaatttctactaagtgtagatcacccacccctggtgccaagtaatttctactaagtgtagatttttttnnnnnnnnnnaagcttggcgtggatccgatatcaactagatcttgagacaaatggcagtattcatccacaattttaaaagaaaaggggggattggggggtacagtgcaggggaaagaatagtagacataatagcaacagacatacaaactaaag

SEQ ID NO: 12386 - DNA, 301 bp, Artificial Sequence
  Pole.1_Nf1.1
  crRNA array
  misc_feature (148)..(157): n is a, c, g, or t
cttggctttatatatcttgtggaaaggacgaaacaccgtaatttctactaagtgtagatgcgcgctctccacgtgctcttaatttctactaagtgtagattggcgatccggaatcctctgtaatttctactaagtgtagatttttttnnnnnnnnnnaagcttggcgtggatccgatatcaactagatcttgagacaaatggcagtattcatccacaattttaaaagaaaaggggggattggggggtacagtgcaggggaaagaatagtagacataatagcaacagacatacaaactaaag

SEQ ID NO: 12387 - DNA, 301 bp, Artificial Sequence
  Pole.1_Nf1.2
  crRNA array
  misc_feature (148)..(157): n is a, c, g, or t
cttggctttatatatcttgtggaaaggacgaaacaccgtaatttctactaagtgtagatgcgcgctctccacgtgctcttaatttctactaagtgtagatggaaacacaacgctggcctctaatttctactaagtgtagatttttttnnnnnnnnnnaagcttggcgtggatccgatatcaactagatcttgagacaaatggcagtattcatccacaattttaaaagaaaaggggggattggggggtacagtgcaggggaaagaatagtagacataatagcaacagacatacaaactaaag

SEQ ID NO: 12388 - DNA, 301 bp, Artificial Sequence
  Pole.1_Nf1.3
  crRNA array
  misc_feature (148)..(157): n is a, c, g, or t
cttggctttatatatcttgtggaaaggacgaaacaccgtaatttctactaagtgtagatgcgcgctctccacgtgctcttaatttctactaagtgtagataatgatggaacgcagtcgcataatttctactaagtgtagatttttttnnnnnnnnnnaagcttggcgtggatccgatatcaactagatcttgagacaaatggcagtattcatccacaattttaaaagaaaaggggggattggggggtacagtgcaggggaaagaatagtagacataatagcaacagacatacaaactaaag

SEQ ID NO: 12389 - DNA, 301 bp, Artificial Sequence
  Pole.1_Nf1.4
  crRNA array
  misc_feature (148)..(157): n is a, c, g, or t
cttggctttatatatcttgtggaaaggacgaaacaccgtaatttctactaagtgtagatgcgcgctctccacgtgctcttaatttctactaagtgtagattgcaaaaccatccaccaagttaatttctactaagtgtagatttttttnnnnnnnnnnaagcttggcgtggatccgatatcaactagatcttgagacaaatggcagtattcatccacaattttaaaagaaaaggggggattggggggtacagtgcaggggaaagaatagtagacataatagcaacagacatacaaactaaag

SEQ ID NO: 12390 - DNA, 301 bp, Artificial Sequence
  Pole.2_Nf1.1
  crRNA array
  misc_feature (148)..(157): n is a, c, g, or t
cttggctttatatatcttgtggaaaggacgaaacaccgtaatttctactaagtgtagatacatcgagacgaccaaactgtaatttctactaagtgtagattggcgatccggaatcctctgtaatttctactaagtgtagatttttttnnnnnnnnnnaagcttggcgtggatccgatatcaactagatcttgagacaaatggcagtattcatccacaattttaaaagaaaaggggggattggggggtacagtgcaggggaaagaatagtagacataatagcaacagacatacaaactaaag

SEQ ID NO: 12391 - DNA, 301 bp, Artificial Sequence
  Pole.2_Nf1.2
  crRNA array
  misc_feature (148)..(157): n is a, c, g, or t
cttggctttatatatcttgtggaaaggacgaaacaccgtaatttctactaagtgtagatacatcgagacgaccaaactgtaatttctactaagtgtagatggaaacacaacgctggcctctaatttctactaagtgtagatttttttnnnnnnnnnnaagcttggcgtggatccgatatcaactagatcttgagacaaatggcagtattcatccacaattttaaaagaaaaggggggattggggggtacagtgcaggggaaagaatagtagacataatagcaacagacatacaaactaaag

SEQ ID NO: 12392 - DNA, 301 bp, Artificial Sequence
  Pole.2_Nf1.3
  crRNA array
  misc_feature (148)..(157): n is a, c, g, or t
cttggctttatatatcttgtggaaaggacgaaacaccgtaatttctactaagtgtagatacatcgagacgaccaaactgtaatttctactaagtgtagataatgatggaacgcagtcgcataatttctactaagtgtagatttttttnnnnnnnnnnaagcttggcgtggatccgatatcaactagatcttgagacaaatggcagtattcatccacaattttaaaagaaaaggggggattggggggtacagtgcaggggaaagaatagtagacataatagcaacagacatacaaactaaag

SEQ ID NO: 12393 - DNA, 301 bp, Artificial Sequence
  Pole.2_Nf1.4
  crRNA array
  misc_feature (148)..(157): n is a, c, g, or t
cttggctttatatatcttgtggaaaggacgaaacaccgtaatttctactaagtgtagatacatcgagacgaccaaactgtaatttctactaagtgtagattgcaaaaccatccaccaagttaatttctactaagtgtagatttttttnnnnnnnnnnaagcttggcgtggatccgatatcaactagatcttgagacaaatggcagtattcatccacaattttaaaagaaaaggggggattggggggtacagtgcaggggaaagaatagtagacataatagcaacagacatacaaactaaag

SEQ ID NO: 12394 - DNA, 301 bp, Artificial Sequence
  Pole.3_Nf1.1
  crRNA array
  misc_feature (148)..(157): n is a, c, g, or t
cttggctttatatatcttgtggaaaggacgaaacaccgtaatttctactaagtgtagatctgctgcaacgagtcgagaataatttctactaagtgtagattggcgatccggaatcctctgtaatttctactaagtgtagatttttttnnnnnnnnnnaagcttggcgtggatccgatatcaactagatcttgagacaaatggcagtattcatccacaattttaaaagaaaaggggggattggggggtacagtgcaggggaaagaatagtagacataatagcaacagacatacaaactaaag

SEQ ID NO: 12395 - DNA, 301 bp, Artificial Sequence
  Pole.3_Nf1.2
  crRNA array
  misc_feature (148)..(157): n is a, c, g, or t
cttggctttatatatcttgtggaaaggacgaaacaccgtaatttctactaagtgtagatctgctgcaacgagtcgagaataatttctactaagtgtagatggaaacacaacgctggcctctaatttctactaagtgtagatttttttnnnnnnnnnnaagcttggcgtggatccgatatcaactagatcttgagacaaatggcagtattcatccacaattttaaaagaaaaggggggattggggggtacagtgcaggggaaagaatagtagacataatagcaacagacatacaaactaaag

SEQ ID NO: 12396 - DNA, 301 bp, Artificial Sequence
  Pole.3_Nf1.3
  crRNA array
  misc_feature (148)..(157): n is a, c, g, or t
cttggctttatatatcttgtggaaaggacgaaacaccgtaatttctactaagtgtagatctgctgcaacgagtcgagaataatttctactaagtgtagataatgatggaacgcagtcgcataatttctactaagtgtagatttttttnnnnnnnnnnaagcttggcgtggatccgatatcaactagatcttgagacaaatggcagtattcatccacaattttaaaagaaaaggggggattggggggtacagtgcaggggaaagaatagtagacataatagcaacagacatacaaactaaag

SEQ ID NO: 12397 - DNA, 301 bp, Artificial Sequence
  Pole.3_Nf1.4
  crRNA array
  misc_feature (148)..(157): n is a, c, g, or t
cttggctttatatatcttgtggaaaggacgaaacaccgtaatttctactaagtgtagatctgctgcaacgagtcgagaataatttctactaagtgtagattgcaaaaccatccaccaagttaatttctactaagtgtagatttttttnnnnnnnnnnaagcttggcgtggatccgatatcaactagatcttgagacaaatggcagtattcatccacaattttaaaagaaaaggggggattggggggtacagtgcaggggaaagaatagtagacataatagcaacagacatacaaactaaag

SEQ ID NO: 12398 - DNA, 301 bp, Artificial Sequence
  Pole.4_Nf1.1
  crRNA array
  misc_feature (148)..(157): n is a, c, g, or t
cttggctttatatatcttgtggaaaggacgaaacaccgtaatttctactaagtgtagatgggagatgatatagcggcagtaatttctactaagtgtagattggcgatccggaatcctctgtaatttctactaagtgtagatttttttnnnnnnnnnnaagcttggcgtggatccgatatcaactagatcttgagacaaatggcagtattcatccacaattttaaaagaaaaggggggattggggggtacagtgcaggggaaagaatagtagacataatagcaacagacatacaaactaaag

SEQ ID NO: 12399 - DNA, 301 bp, Artificial Sequence
  Pole.4_Nf1.2
  crRNA array
  misc_feature (148)..(157): n is a, c, g, or t
cttggctttatatatcttgtggaaaggacgaaacaccgtaatttctactaagtgtagatgggagatgatatagcggcagtaatttctactaagtgtagatggaaacacaacgctggcctctaatttctactaagtgtagatttttttnnnnnnnnnnaagcttggcgtggatccgatatcaactagatcttgagacaaatggcagtattcatccacaattttaaaagaaaaggggggattggggggtacagtgcaggggaaagaatagtagacataatagcaacagacatacaaactaaag

SEQ ID NO: 12400 - DNA, 301 bp, Artificial Sequence
  Pole.4_Nf1.3
  crRNA array
  misc_feature (148)..(157): n is a, c, g, or t
cttggctttatatatcttgtggaaaggacgaaacaccgtaatttctactaagtgtagatgggagatgatatagcggcagtaatttctactaagtgtagataatgatggaacgcagtcgcataatttctactaagtgtagatttttttnnnnnnnnnnaagcttggcgtggatccgatatcaactagatcttgagacaaatggcagtattcatccacaattttaaaagaaaaggggggattggggggtacagtgcaggggaaagaatagtagacataatagcaacagacatacaaactaaag

SEQ ID NO: 12401 - DNA, 301 bp, Artificial Sequence
  Pole.4_Nf1.4
  crRNA array
  misc_feature (148)..(157): n is a, c, g, or t
cttggctttatatatcttgtggaaaggacgaaacaccgtaatttctactaagtgtagatgggagatgatatagcggcagtaatttctactaagtgtagattgcaaaaccatccaccaagttaatttctactaagtgtagatttttttnnnnnnnnnnaagcttggcgtggatccgatatcaactagatcttgagacaaatggcagtattcatccacaattttaaaagaaaaggggggattggggggtacagtgcaggggaaagaatagtagacataatagcaacagacatacaaactaaag

SEQ ID NO: 12402 - DNA, 301 bp, Artificial Sequence
  Pole.1_Kdm6a.1
  crRNA array
  misc_feature (148)..(157): n is a, c, g, or t
cttggctttatatatcttgtggaaaggacgaaacaccgtaatttctactaagtgtagatgcgcgctctccacgtgctcttaatttctactaagtgtagatgctgccgcctctcgcggcagtaatttctactaagtgtagatttttttnnnnnnnnnnaagcttggcgtggatccgatatcaactagatcttgagacaaatggcagtattcatccacaattttaaaagaaaaggggggattggggggtacagtgcaggggaaagaatagtagacataatagcaacagacatacaaactaaag

SEQ ID NO: 12403 - DNA, 301 bp, Artificial Sequence
  Pole.1_Kdm6a.2
  crRNA array
  misc_feature (148)..(157): n is a, c, g, or t
cttggctttatatatcttgtggaaaggacgaaacaccgtaatttctactaagtgtagatgcgcgctctccacgtgctcttaatttctactaagtgtagatgctgcaggtaaggcacgttttaatttctactaagtgtagatttttttnnnnnnnnnnaagcttggcgtggatccgatatcaactagatcttgagacaaatggcagtattcatccacaattttaaaagaaaaggggggattggggggtacagtgcaggggaaagaatagtagacataatagcaacagacatacaaactaaag

SEQ ID NO: 12404 - DNA, 301 bp, Artificial Sequence
  Pole.1_Kdm6a.3
  crRNA array
  misc_feature (148)..(157): n is a, c, g, or t
cttggctttatatatcttgtggaaaggacgaaacaccgtaatttctactaagtgtagatgcgcgctctccacgtgctcttaatttctactaagtgtagattgctggtgccggggaagttttaatttctactaagtgtagatttttttnnnnnnnnnnaagcttggcgtggatccgatatcaactagatcttgagacaaatggcagtattcatccacaattttaaaagaaaaggggggattggggggtacagtgcaggggaaagaatagtagacataatagcaacagacatacaaactaaag

SEQ ID NO: 12405 - DNA, 301 bp, Artificial Sequence
  Pole.1_Kdm6a.4
  crRNA array
  misc_feature (148)..(157): n is a, c, g, or t
cttggctttatatatcttgtggaaaggacgaaacaccgtaatttctactaagtgtagatgcgcgctctccacgtgctcttaatttctactaagtgtagattgtctcctacgaatcccccctaatttctactaagtgtagatttttttnnnnnnnnnnaagcttggcgtggatccgatatcaactagatcttgagacaaatggcagtattcatccacaattttaaaagaaaaggggggattggggggtacagtgcaggggaaagaatagtagacataatagcaacagacatacaaactaaag

SEQ ID NO: 12406 - DNA, 301 bp, Artificial Sequence
  Pole.2_Kdm6a.1
  crRNA array
  misc_feature (148)..(157): n is a, c, g, or t
cttggctttatatatcttgtggaaaggacgaaacaccgtaatttctactaagtgtagatacatcgagacgaccaaactgtaatttctactaagtgtagatgctgccgcctctcgcggcagtaatttctactaagtgtagatttttttnnnnnnnnnnaagcttggcgtggatccgatatcaactagatcttgagacaaatggcagtattcatccacaattttaaaagaaaaggggggattggggggtacagtgcaggggaaagaatagtagacataatagcaacagacatacaaactaaag

SEQ ID NO: 12407 - DNA, 301 bp, Artificial Sequence
  Pole.2_Kdm6a.2
  crRNA array
  misc_feature (148)..(157): n is a, c, g, or t
cttggctttatatatcttgtggaaaggacgaaacaccgtaatttctactaagtgtagatacatcgagacgaccaaactgtaatttctactaagtgtagatgctgcaggtaaggcacgttttaatttctactaagtgtagatttttttnnnnnnnnnnaagcttggcgtggatccgatatcaactagatcttgagacaaatggcagtattcatccacaattttaaaagaaaaggggggattggggggtacagtgcaggggaaagaatagtagacataatagcaacagacatacaaactaaag

SEQ ID NO: 12408 - DNA, 301 bp, Artificial Sequence
  Pole.2_Kdm6a.3
  crRNA array
  misc_feature (148)..(157): n is a, c, g, or t
cttggctttatatatcttgtggaaaggacgaaacaccgtaatttctactaagtgtagatacatcgagacgaccaaactgtaatttctactaagtgtagattgctggtgccggggaagttttaatttctactaagtgtagatttttttnnnnnnnnnnaagcttggcgtggatccgatatcaactagatcttgagacaaatggcagtattcatccacaattttaaaagaaaaggggggattggggggtacagtgcaggggaaagaatagtagacataatagcaacagacatacaaactaaag

SEQ ID NO: 12409 - DNA, 301 bp, Artificial Sequence
  Pole.2_Kdm6a.4
  crRNA array
  misc_feature (148)..(157): n is a, c, g, or t
cttggctttatatatcttgtggaaaggacgaaacaccgtaatttctactaagtgtagatacatcgagacgaccaaactgtaatttctactaagtgtagattgtctcctacgaatcccccctaatttctactaagtgtagatttttttnnnnnnnnnnaagcttggcgtggatccgatatcaactagatcttgagacaaatggcagtattcatccacaattttaaaagaaaaggggggattggggggtacagtgcaggggaaagaatagtagacataatagcaacagacatacaaactaaag

SEQ ID NO: 12410 - DNA, 301 bp, Artificial Sequence
  Pole.3_Kdm6a.1
  crRNA array
  misc_feature (148)..(157): n is a, c, g, or t
cttggctttatatatcttgtggaaaggacgaaacaccgtaatttctactaagtgtagatctgctgcaacgagtcgagaataatttctactaagtgtagatgctgccgcctctcgcggcagtaatttctactaagtgtagatttttttnnnnnnnnnnaagcttggcgtggatccgatatcaactagatcttgagacaaatggcagtattcatccacaattttaaaagaaaaggggggattggggggtacagtgcaggggaaagaatagtagacataatagcaacagacatacaaactaaag

SEQ ID NO: 12411 - DNA, 301 bp, Artificial Sequence
  Pole.3_Kdm6a.2
  crRNA array
  misc_feature (148)..(157): n is a, c, g, or t
cttggctttatatatcttgtggaaaggacgaaacaccgtaatttctactaagtgtagatctgctgcaacgagtcgagaataatttctactaagtgtagatgctgcaggtaaggcacgttttaatttctactaagtgtagatttttttnnnnnnnnnnaagcttggcgtggatccgatatcaactagatcttgagacaaatggcagtattcatccacaattttaaaagaaaaggggggattggggggtacagtgcaggggaaagaatagtagacataatagcaacagacatacaaactaaag

SEQ ID NO: 12412 - DNA, 301 bp, Artificial Sequence
  Pole.3_Kdm6a.3
  crRNA array
  misc_feature (148)..(157): n is a, c, g, or t
cttggctttatatatcttgtggaaaggacgaaacaccgtaatttctactaagtgtagatctgctgcaacgagtcgagaataatttctactaagtgtagattgctggtgccggggaagttttaatttctactaagtgtagatttttttnnnnnnnnnnaagcttggcgtggatccgatatcaactagatcttgagacaaatggcagtattcatccacaattttaaaagaaaaggggggattggggggtacagtgcaggggaaagaatagtagacataatagcaacagacatacaaactaaag

SEQ ID NO: 12413 - DNA, 301 bp, Artificial Sequence
  Pole.3_Kdm6a.4
  crRNA array
  misc_feature (148)..(157): n is a, c, g, or t
cttggctttatatatcttgtggaaaggacgaaacaccgtaatttctactaagtgtagatctgctgcaacgagtcgagaataatttctactaagtgtagattgtctcctacgaatcccccctaatttctactaagtgtagatttttttnnnnnnnnnnaagcttggcgtggatccgatatcaactagatcttgagacaaatggcagtattcatccacaattttaaaagaaaaggggggattggggggtacagtgcaggggaaagaatagtagacataatagcaacagacatacaaactaaag

SEQ ID NO: 12414 - DNA, 301 bp, Artificial Sequence
  Pole.4_Kdm6a.1
  crRNA array
  misc_feature (148)..(157): n is a, c, g, or t
cttggctttatatatcttgtggaaaggacgaaacaccgtaatttctactaagtgtagatgggagatgatatagcggcagtaatttctactaagtgtagatgctgccgcctctcgcggcagtaatttctactaagtgtagatttttttnnnnnnnnnnaagcttggcgtggatccgatatcaactagatcttgagacaaatggcagtattcatccacaattttaaaagaaaaggggggattggggggtacagtgcaggggaaagaatagtagacataatagcaacagacatacaaactaaag

SEQ ID NO: 12415 - DNA, 301 bp, Artificial Sequence
  Pole.4_Kdm6a.2
  crRNA array
  misc_feature (148)..(157): n is a, c, g, or t
cttggctttatatatcttgtggaaaggacgaaacaccgtaatttctactaagtgtagatgggagatgatatagcggcagtaatttctactaagtgtagatgctgcaggtaaggcacgttttaatttctactaagtgtagatttttttnnnnnnnnnnaagcttggcgtggatccgatatcaactagatcttgagacaaatggcagtattcatccacaattttaaaagaaaaggggggattggggggtacagtgcaggggaaagaatagtagacataatagcaacagacatacaaactaaag

SEQ ID NO: 12416 - DNA, 301 bp, Artificial Sequence
  Pole.4_Kdm6a.3
  crRNA array
  misc_feature (148)..(157): n is a, c, g, or t
cttggctttatatatcttgtggaaaggacgaaacaccgtaatttctactaagtgtagatgggagatgatatagcggcagtaatttctactaagtgtagattgctggtgccggggaagttttaatttctactaagtgtagatttttttnnnnnnnnnnaagcttggcgtggatccgatatcaactagatcttgagacaaatggcagtattcatccacaattttaaaagaaaaggggggattggggggtacagtgcaggggaaagaatagtagacataatagcaacagacatacaaactaaag

SEQ ID NO: 12417 - DNA, 301 bp, Artificial Sequence
  Pole.4_Kdm6a.4
  crRNA array
  misc_feature (148)..(157): n is a, c, g, or t
cttggctttatatatcttgtggaaaggacgaaacaccgtaatttctactaagtgtagatgggagatgatatagcggcagtaatttctactaagtgtagattgtctcctacgaatcccccctaatttctactaagtgtagatttttttnnnnnnnnnnaagcttggcgtggatccgatatcaactagatcttgagacaaatggcagtattcatccacaattttaaaagaaaaggggggattggggggtacagtgcaggggaaagaatagtagacataatagcaacagacatacaaactaaag

SEQ ID NO: 12418 - DNA, 301 bp, Artificial Sequence
  Pole.1_Ercc5.1
  crRNA array
  misc_feature (148)..(157): n is a, c, g, or t
cttggctttatatatcttgtggaaaggacgaaacaccgtaatttctactaagtgtagatgcgcgctctccacgtgctcttaatttctactaagtgtagatacggcacgagcaagagacactaatttctactaagtgtagatttttttnnnnnnnnnnaagcttggcgtggatccgatatcaactagatcttgagacaaatggcagtattcatccacaattttaaaagaaaaggggggattggggggtacagtgcaggggaaagaatagtagacataatagcaacagacatacaaactaaag

SEQ ID NO: 12419 - DNA, 301 bp, Artificial Sequence
  Pole.1_Ercc5.2
  crRNA array
  misc_feature (148)..(157): n is a, c, g, or t
cttggctttatatatcttgtggaaaggacgaaacaccgtaatttctactaagtgtagatgcgcgctctccacgtgctcttaatttctactaagtgtagatgagtatcacatcggtgactctaatttctactaagtgtagatttttttnnnnnnnnnnaagcttggcgtggatccgatatcaactagatcttgagacaaatggcagtattcatccacaattttaaaagaaaaggggggattggggggtacagtgcaggggaaagaatagtagacataatagcaacagacatacaaactaaag

SEQ ID NO: 12420 - DNA, 301 bp, Artificial Sequence
  Pole.1_Ercc5.3
  crRNA array
  misc_feature (148)..(157): n is a, c, g, or t
cttggctttatatatcttgtggaaaggacgaaacaccgtaatttctactaagtgtagatgcgcgctctccacgtgctcttaatttctactaagtgtagatggagtgggtccaggcctcgttaatttctactaagtgtagatttttttnnnnnnnnnnaagcttggcgtggatccgatatcaactagatcttgagacaaatggcagtattcatccacaattttaaaagaaaaggggggattggggggtacagtgcaggggaaagaatagtagacataatagcaacagacatacaaactaaag

SEQ ID NO: 12421 - DNA, 301 bp, Artificial Sequence
  Pole.1_Ercc5.4
  crRNA array
  misc_feature (148)..(157): n is a, c, g, or t
cttggctttatatatcttgtggaaaggacgaaacaccgtaatttctactaagtgtagatgcgcgctctccacgtgctcttaatttctactaagtgtagatcagagccggtggaataatgttaatttctactaagtgtagatttttttnnnnnnnnnnaagcttggcgtggatccgatatcaactagatcttgagacaaatggcagtattcatccacaattttaaaagaaaaggggggattggggggtacagtgcaggggaaagaatagtagacataatagcaacagacatacaaactaaag

SEQ ID NO: 12422 - DNA, 301 bp, Artificial Sequence
  Pole.2_Ercc5.1
  crRNA array
  misc_feature (148)..(157): n is a, c, g, or t
cttggctttatatatcttgtggaaaggacgaaacaccgtaatttctactaagtgtagatacatcgagacgaccaaactgtaatttctactaagtgtagatacggcacgagcaagagacactaatttctactaagtgtagatttttttnnnnnnnnnnaagcttggcgtggatccgatatcaactagatcttgagacaaatggcagtattcatccacaattttaaaagaaaaggggggattggggggtacagtgcaggggaaagaatagtagacataatagcaacagacatacaaactaaag

SEQ ID NO: 12423 - DNA, 301 bp, Artificial Sequence
  Pole.2_Ercc5.2
  crRNA array
  misc_feature (148)..(157): n is a, c, g, or t
cttggctttatatatcttgtggaaaggacgaaacaccgtaatttctactaagtgtagatacatcgagacgaccaaactgtaatttctactaagtgtagatgagtatcacatcggtgactctaatttctactaagtgtagatttttttnnnnnnnnnnaagcttggcgtggatccgatatcaactagatcttgagacaaatggcagtattcatccacaattttaaaagaaaaggggggattggggggtacagtgcaggggaaagaatagtagacataatagcaacagacatacaaactaaag

SEQ ID NO: 12424 - DNA, 301 bp, Artificial Sequence
  Pole.2_Ercc5.3
  crRNA array
  misc_feature (148)..(157): n is a, c, g, or t
cttggctttatatatcttgtggaaaggacgaaacaccgtaatttctactaagtgtagatacatcgagacgaccaaactgtaatttctactaagtgtagatggagtgggtccaggcctcgttaatttctactaagtgtagatttttttnnnnnnnnnnaagcttggcgtggatccgatatcaactagatcttgagacaaatggcagtattcatccacaattttaaaagaaaaggggggattggggggtacagtgcaggggaaagaatagtagacataatagcaacagacatacaaactaaag

SEQ ID NO: 12425 - DNA, 301 bp, Artificial Sequence
  Pole.2_Ercc5.4
  crRNA array
  misc_feature (148)..(157): n is a, c, g, or t
cttggctttatatatcttgtggaaaggacgaaacaccgtaatttctactaagtgtagatacatcgagacgaccaaactgtaatttctactaagtgtagatcagagccggtggaataatgttaatttctactaagtgtagatttttttnnnnnnnnnnaagcttggcgtggatccgatatcaactagatcttgagacaaatggcagtattcatccacaattttaaaagaaaaggggggattggggggtacagtgcaggggaaagaatagtagacataatagcaacagacatacaaactaaag

SEQ ID NO: 12426 - DNA, 301 bp, Artificial Sequence
  Pole.3_Ercc5.1
  crRNA array
  misc_feature (148)..(157): n is a, c, g, or t
cttggctttatatatcttgtggaaaggacgaaacaccgtaatttctactaagtgtagatctgctgcaacgagtcgagaataatttctactaagtgtagatacggcacgagcaagagacactaatttctactaagtgtagatttttttnnnnnnnnnnaagcttggcgtggatccgatatcaactagatcttgagacaaatggcagtattcatccacaattttaaaagaaaaggggggattggggggtacagtgcaggggaaagaatagtagacataatagcaacagacatacaaactaaag

SEQ ID NO: 12427 - DNA, 301 bp, Artificial Sequence
  Pole.3_Ercc5.2
  crRNA array
  misc_feature (148)..(157): n is a, c, g, or t
cttggctttatatatcttgtggaaaggacgaaacaccgtaatttctactaagtgtagatctgctgcaacgagtcgagaataatttctactaagtgtagatgagtatcacatcggtgactctaatttctactaagtgtagatttttttnnnnnnnnnnaagcttggcgtggatccgatatcaactagatcttgagacaaatggcagtattcatccacaattttaaaagaaaaggggggattggggggtacagtgcaggggaaagaatagtagacataatagcaacagacatacaaactaaag

SEQ ID NO: 12428 - DNA, 301 bp, Artificial Sequence
  Pole.3_Ercc5.3
  crRNA array
  misc_feature (148)..(157): n is a, c, g, or t
cttggctttatatatcttgtggaaaggacgaaacaccgtaatttctactaagtgtagatctgctgcaacgagtcgagaataatttctactaagtgtagatggagtgggtccaggcctcgttaatttctactaagtgtagatttttttnnnnnnnnnnaagcttggcgtggatccgatatcaactagatcttgagacaaatggcagtattcatccacaattttaaaagaaaaggggggattggggggtacagtgcaggggaaagaatagtagacataatagcaacagacatacaaactaaag

SEQ ID NO: 12429 - DNA, 301 bp, Artificial Sequence
  Pole.3_Ercc5.4
  crRNA array
  misc_feature (148)..(157): n is a, c, g, or t
cttggctttatatatcttgtggaaaggacgaaacaccgtaatttctactaagtgtagatctgctgcaacgagtcgagaataatttctactaagtgtagatcagagccggtggaataatgttaatttctactaagtgtagatttttttnnnnnnnnnnaagcttggcgtggatccgatatcaactagatcttgagacaaatggcagtattcatccacaattttaaaagaaaaggggggattggggggtacagtgcaggggaaagaatagtagacataatagcaacagacatacaaactaaag

SEQ ID NO: 12430 - DNA, 301 bp, Artificial Sequence
  Pole.4_Ercc5.1
  crRNA array
  misc_feature (148)..(157): n is a, c, g, or t
cttggctttatatatcttgtggaaaggacgaaacaccgtaatttctactaagtgtagatgggagatgatatagcggcagtaatttctactaagtgtagatacggcacgagcaagagacactaatttctactaagtgtagatttttttnnnnnnnnnnaagcttggcgtggatccgatatcaactagatcttgagacaaatggcagtattcatccacaattttaaaagaaaaggggggattggggggtacagtgcaggggaaagaatagtagacataatagcaacagacatacaaactaaag

SEQ ID NO: 12431 - DNA, 301 bp, Artificial Sequence
  Pole.4_Ercc5.2
  crRNA array
  misc_feature (148)..(157): n is a, c, g, or t
cttggctttatatatcttgtggaaaggacgaaacaccgtaatttctactaagtgtagatgggagatgatatagcggcagtaatttctactaagtgtagatgagtatcacatcggtgactctaatttctactaagtgtagatttttttnnnnnnnnnnaagcttggcgtggatccgatatcaactagatcttgagacaaatggcagtattcatccacaattttaaaagaaaaggggggattggggggtacagtgcaggggaaagaatagtagacataatagcaacagacatacaaactaaag

SEQ ID NO: 12432 - DNA, 301 bp, Artificial Sequence
  Pole.4_Ercc5.3
  crRNA array
  misc_feature (148)..(157): n is a, c, g, or t
cttggctttatatatcttgtggaaaggacgaaacaccgtaatttctactaagtgtagatgggagatgatatagcggcagtaatttctactaagtgtagatggagtgggtccaggcctcgttaatttctactaagtgtagatttttttnnnnnnnnnnaagcttggcgtggatccgatatcaactagatcttgagacaaatggcagtattcatccacaattttaaaagaaaaggggggattggggggtacagtgcaggggaaagaatagtagacataatagcaacagacatacaaactaaag

SEQ ID NO: 12433 - DNA, 301 bp, Artificial Sequence
  Pole.4_Ercc5.4
  crRNA array
  misc_feature (148)..(157): n is a, c, g, or t
cttggctttatatatcttgtggaaaggacgaaacaccgtaatttctactaagtgtagatgggagatgatatagcggcagtaatttctactaagtgtagatcagagccggtggaataatgttaatttctactaagtgtagatttttttnnnnnnnnnnaagcttggcgtggatccgatatcaactagatcttgagacaaatggcagtattcatccacaattttaaaagaaaaggggggattggggggtacagtgcaggggaaagaatagtagacataatagcaacagacatacaaactaaag

SEQ ID NO: 12434 - DNA, 301 bp, Artificial Sequence
  Pole.1_Arid1b.1
  crRNA array
  misc_feature (148)..(157): n is a, c, g, or t
cttggctttatatatcttgtggaaaggacgaaacaccgtaatttctactaagtgtagatgcgcgctctccacgtgctcttaatttctactaagtgtagatgctgctgctgtagtgcgtggtaatttctactaagtgtagatttttttnnnnnnnnnnaagcttggcgtggatccgatatcaactagatcttgagacaaatggcagtattcatccacaattttaaaagaaaaggggggattggggggtacagtgcaggggaaagaatagtagacataatagcaacagacatacaaactaaag

SEQ ID NO: 12435 - DNA, 301 bp, Artificial Sequence
  Pole.1_Arid1b.2
  crRNA array
  misc_feature (148)..(157): n is a, c, g, or t
cttggctttatatatcttgtggaaaggacgaaacaccgtaatttctactaagtgtagatgcgcgctctccacgtgctcttaatttctactaagtgtagatagtgcaaaactgagcgcgggtaatttctactaagtgtagatttttttnnnnnnnnnnaagcttggcgtggatccgatatcaactagatcttgagacaaatggcagtattcatccacaattttaaaagaaaaggggggattggggggtacagtgcaggggaaagaatagtagacataatagcaacagacatacaaactaaag

SEQ ID NO: 12436 - DNA, 301 bp, Artificial Sequence
  Pole.1_Arid1b.3
  crRNA array
  misc_feature (148)..(157): n is a, c, g, or t
cttggctttatatatcttgtggaaaggacgaaacaccgtaatttctactaagtgtagatgcgcgctctccacgtgctcttaatttctactaagtgtagatcactcaaaggcgaacaggtataatttctactaagtgtagatttttttnnnnnnnnnnaagcttggcgtggatccgatatcaactagatcttgagacaaatggcagtattcatccacaattttaaaagaaaaggggggattggggggtacagtgcaggggaaagaatagtagacataatagcaacagacatacaaactaaag

SEQ ID NO: 12437 - DNA, 301 bp, Artificial Sequence
  Pole.1_Arid1b.4
  crRNA array
  misc_feature (148)..(157): n is a, c, g, or t
cttggctttatatatcttgtggaaaggacgaaacaccgtaatttctactaagtgtagatgcgcgctctccacgtgctcttaatttctactaagtgtagatctcctggctccgtagaagcataatttctactaagtgtagatttttttnnnnnnnnnnaagcttggcgtggatccgatatcaactagatcttgagacaaatggcagtattcatccacaattttaaaagaaaaggggggattggggggtacagtgcaggggaaagaatagtagacataatagcaacagacatacaaactaaag

SEQ ID NO: 12438 - DNA, 301 bp, Artificial Sequence
  Pole.2_Arid1b.1
  crRNA array
  misc_feature (148)..(157): n is a, c, g, or t
cttggctttatatatcttgtggaaaggacgaaacaccgtaatttctactaagtgtagatacatcgagacgaccaaactgtaatttctactaagtgtagatgctgctgctgtagtgcgtggtaatttctactaagtgtagatttttttnnnnnnnnnnaagcttggcgtggatccgatatcaactagatcttgagacaaatggcagtattcatccacaattttaaaagaaaaggggggattggggggtacagtgcaggggaaagaatagtagacataatagcaacagacatacaaactaaag

SEQ ID NO: 12439 - DNA, 301 bp, Artificial Sequence
  Pole.2_Arid1b.2
  crRNA array
  misc_feature (148)..(157): n is a, c, g, or t
cttggctttatatatcttgtggaaaggacgaaacaccgtaatttctactaagtgtagatacatcgagacgaccaaactgtaatttctactaagtgtagatagtgcaaaactgagcgcgggtaatttctactaagtgtagatttttttnnnnnnnnnnaagcttggcgtggatccgatatcaactagatcttgagacaaatggcagtattcatccacaattttaaaagaaaaggggggattggggggtacagtgcaggggaaagaatagtagacataatagcaacagacatacaaactaaag

SEQ ID NO: 12440 - DNA, 301 bp, Artificial Sequence
  Pole.2_Arid1b.3
  crRNA array
  misc_feature (148)..(157): n is a, c, g, or t
cttggctttatatatcttgtggaaaggacgaaacaccgtaatttctactaagtgtagatacatcgagacgaccaaactgtaatttctactaagtgtagatcactcaaaggcgaacaggtataatttctactaagtgtagatttttttnnnnnnnnnnaagcttggcgtggatccgatatcaactagatcttgagacaaatggcagtattcatccacaattttaaaagaaaaggggggattggggggtacagtgcaggggaaagaatagtagacataatagcaacagacatacaaactaaag

SEQ ID NO: 12441 - DNA, 301 bp, Artificial Sequence
  Pole.2_Arid1b.4
  crRNA array
  misc_feature (148)..(157): n is a, c, g, or t
cttggctttatatatcttgtggaaaggacgaaacaccgtaatttctactaagtgtagatacatcgagacgaccaaactgtaatttctactaagtgtagatctcctggctccgtagaagcataatttctactaagtgtagatttttttnnnnnnnnnnaagcttggcgtggatccgatatcaactagatcttgagacaaatggcagtattcatccacaattttaaaagaaaaggggggattggggggtacagtgcaggggaaagaatagtagacataatagcaacagacatacaaactaaag

SEQ ID NO: 12442 - DNA, 301 bp, Artificial Sequence
  Pole.3_Arid1b.1
  crRNA array
  misc_feature (148)..(157): n is a, c, g, or t
cttggctttatatatcttgtggaaaggacgaaacaccgtaatttctactaagtgtagatctgctgcaacgagtcgagaataatttctactaagtgtagatgctgctgctgtagtgcgtggtaatttctactaagtgtagatttttttnnnnnnnnnnaagcttggcgtggatccgatatcaactagatcttgagacaaatggcagtattcatccacaattttaaaagaaaaggggggattggggggtacagtgcaggggaaagaatagtagacataatagcaacagacatacaaactaaag

SEQ ID NO: 12443 - DNA, 301 bp, Artificial Sequence
  Pole.3_Arid1b.2
  crRNA array
  misc_feature (148)..(157): n is a, c, g, or t
cttggctttatatatcttgtggaaaggacgaaacaccgtaatttctactaagtgtagatctgctgcaacgagtcgagaataatttctactaagtgtagatagtgcaaaactgagcgcgggtaatttctactaagtgtagatttttttnnnnnnnnnnaagcttggcgtggatccgatatcaactagatcttgagacaaatggcagtattcatccacaattttaaaagaaaaggggggattggggggtacagtgcaggggaaagaatagtagacataatagcaacagacatacaaactaaag

SEQ ID NO: 12444 - DNA, 301 bp, Artificial Sequence
  Pole.3_Arid1b.3
  crRNA array
  misc_feature (148)..(157): n is a, c, g, or t
cttggctttatatatcttgtggaaaggacgaaacaccgtaatttctactaagtgtagatctgctgcaacgagtcgagaataatttctactaagtgtagatcactcaaaggcgaacaggtataatttctactaagtgtagatttttttnnnnnnnnnnaagcttggcgtggatccgatatcaactagatcttgagacaaatggcagtattcatccacaattttaaaagaaaaggggggattggggggtacagtgcaggggaaagaatagtagacataatagcaacagacatacaaactaaag

SEQ ID NO: 12445 - DNA, 301 bp, Artificial Sequence
  Pole.3_Arid1b.4
  crRNA array
  misc_feature (148)..(157): n is a, c, g, or t
cttggctttatatatcttgtggaaaggacgaaacaccgtaatttctactaagtgtagatctgctgcaacgagtcgagaataatttctactaagtgtagatctcctggctccgtagaagcataatttctactaagtgtagatttttttnnnnnnnnnnaagcttggcgtggatccgatatcaactagatcttgagacaaatggcagtattcatccacaattttaaaagaaaaggggggattggggggtacagtgcaggggaaagaatagtagacataatagcaacagacatacaaactaaag

SEQ ID NO: 12446 - DNA, 301 bp, Artificial Sequence
  Pole.4_Arid1b.1
  crRNA array
  misc_feature (148)..(157): n is a, c, g, or t
cttggctttatatatcttgtggaaaggacgaaacaccgtaatttctactaagtgtagatgggagatgatatagcggcagtaatttctactaagtgtagatgctgctgctgtagtgcgtggtaatttctactaagtgtagatttttttnnnnnnnnnnaagcttggcgtggatccgatatcaactagatcttgagacaaatggcagtattcatccacaattttaaaagaaaaggggggattggggggtacagtgcaggggaaagaatagtagacataatagcaacagacatacaaactaaag

SEQ ID NO: 12447 - DNA, 301 bp, Artificial Sequence
  Pole.4_Arid1b.2
  crRNA array
  misc_feature (148)..(157): n is a, c, g, or t
cttggctttatatatcttgtggaaaggacgaaacaccgtaatttctactaagtgtagatgggagatgatatagcggcagtaatttctactaagtgtagatagtgcaaaactgagcgcgggtaatttctactaagtgtagatttttttnnnnnnnnnnaagcttggcgtggatccgatatcaactagatcttgagacaaatggcagtattcatccacaattttaaaagaaaaggggggattggggggtacagtgcaggggaaagaatagtagacataatagcaacagacatacaaactaaag

SEQ ID NO: 12448 - DNA, 301 bp, Artificial Sequence
  Pole.4_Arid1b.3
  crRNA array
  misc_feature (148)..(157): n is a, c, g, or t
cttggctttatatatcttgtggaaaggacgaaacaccgtaatttctactaagtgtagatgggagatgatatagcggcagtaatttctactaagtgtagatcactcaaaggcgaacaggtataatttctactaagtgtagatttttttnnnnnnnnnnaagcttggcgtggatccgatatcaactagatcttgagacaaatggcagtattcatccacaattttaaaagaaaaggggggattggggggtacagtgcaggggaaagaatagtagacataatagcaacagacatacaaactaaag

SEQ ID NO: 12449 - DNA, 301 bp, Artificial Sequence
  Pole.4_Arid1b.4
  crRNA array
  misc_feature (148)..(157): n is a, c, g, or t
cttggctttatatatcttgtggaaaggacgaaacaccgtaatttctactaagtgtagatgggagatgatatagcggcagtaatttctactaagtgtagatctcctggctccgtagaagcataatttctactaagtgtagatttttttnnnnnnnnnnaagcttggcgtggatccgatatcaactagatcttgagacaaatggcagtattcatccacaattttaaaagaaaaggggggattggggggtacagtgcaggggaaagaatagtagacataatagcaacagacatacaaactaaag

SEQ ID NO: 12450 - DNA, 301 bp, Artificial Sequence
  Pole.1_Rb1.1
  crRNA array
  misc_feature (148)..(157): n is a, c, g, or t
cttggctttatatatcttgtggaaaggacgaaacaccgtaatttctactaagtgtagatgcgcgctctccacgtgctcttaatttctactaagtgtagattctgacatgatcgggtaccttaatttctactaagtgtagatttttttnnnnnnnnnnaagcttggcgtggatccgatatcaactagatcttgagacaaatggcagtattcatccacaattttaaaagaaaaggggggattggggggtacagtgcaggggaaagaatagtagacataatagcaacagacatacaaactaaag

SEQ ID NO: 12451 - DNA, 301 bp, Artificial Sequence
  Pole.1_Rb1.2
  crRNA array
  misc_feature (148)..(157): n is a, c, g, or t
cttggctttatatatcttgtggaaaggacgaaacaccgtaatttctactaagtgtagatgcgcgctctccacgtgctcttaatttctactaagtgtagatgtctctgcatgaaaacggagtaatttctactaagtgtagatttttttnnnnnnnnnnaagcttggcgtggatccgatatcaactagatcttgagacaaatggcagtattcatccacaattttaaaagaaaaggggggattggggggtacagtgcaggggaaagaatagtagacataatagcaacagacatacaaactaaag

SEQ ID NO: 12452 - DNA, 301 bp, Artificial Sequence
  Pole.1_Rb1.3
  crRNA array
  misc_feature (148)..(157): n is a, c, g, or t
cttggctttatatatcttgtggaaaggacgaaacaccgtaatttctactaagtgtagatgcgcgctctccacgtgctcttaatttctactaagtgtagatagccaatctggtctaataactaatttctactaagtgtagatttttttnnnnnnnnnnaagcttggcgtggatccgatatcaactagatcttgagacaaatggcagtattcatccacaattttaaaagaaaaggggggattggggggtacagtgcaggggaaagaatagtagacataatagcaacagacatacaaactaaag

SEQ ID NO: 12453 - DNA, 301 bp, Artificial Sequence
  Pole.1_Rb1.4
  crRNA array
  misc_feature (148)..(157): n is a, c, g, or t
cttggctttatatatcttgtggaaaggacgaaacaccgtaatttctactaagtgtagatgcgcgctctccacgtgctcttaatttctactaagtgtagattgtagctcagtaaaagtgaataatttctactaagtgtagatttttttnnnnnnnnnnaagcttggcgtggatccgatatcaactagatcttgagacaaatggcagtattcatccacaattttaaaagaaaaggggggattggggggtacagtgcaggggaaagaatagtagacataatagcaacagacatacaaactaaag

SEQ ID NO: 12454 - DNA, 301 bp, Artificial Sequence
  Pole.2_Rb1.1
  crRNA array
  misc_feature (148)..(157): n is a, c, g, or t
cttggctttatatatcttgtggaaaggacgaaacaccgtaatttctactaagtgtagatacatcgagacgaccaaactgtaatttctactaagtgtagattctgacatgatcgggtaccttaatttctactaagtgtagatttttttnnnnnnnnnnaagcttggcgtggatccgatatcaactagatcttgagacaaatggcagtattcatccacaattttaaaagaaaaggggggattggggggtacagtgcaggggaaagaatagtagacataatagcaacagacatacaaactaaag

SEQ ID NO: 12455 - DNA, 301 bp, Artificial Sequence
  Pole.2_Rb1.2
  crRNA array
  misc_feature (148)..(157): n is a, c, g, or t
cttggctttatatatcttgtggaaaggacgaaacaccgtaatttctactaagtgtagatacatcgagacgaccaaactgtaatttctactaagtgtagatgtctctgcatgaaaacggagtaatttctactaagtgtagatttttttnnnnnnnnnnaagcttggcgtggatccgatatcaactagatcttgagacaaatggcagtattcatccacaattttaaaagaaaaggggggattggggggtacagtgcaggggaaagaatagtagacataatagcaacagacatacaaactaaag

SEQ ID NO: 12456 - DNA, 301 bp, Artificial Sequence
  Pole.2_Rb1.3
  crRNA array
  misc_feature (148)..(157): n is a, c, g, or t
cttggctttatatatcttgtggaaaggacgaaacaccgtaatttctactaagtgtagatacatcgagacgaccaaactgtaatttctactaagtgtagatagccaatctggtctaataactaatttctactaagtgtagatttttttnnnnnnnnnnaagcttggcgtggatccgatatcaactagatcttgagacaaatggcagtattcatccacaattttaaaagaaaaggggggattggggggtacagtgcaggggaaagaatagtagacataatagcaacagacatacaaactaaag

SEQ ID NO: 12457 - DNA, 301 bp, Artificial Sequence
  Pole.2_Rb1.4
  crRNA array
  misc_feature (148)..(157): n is a, c, g, or t
cttggctttatatatcttgtggaaaggacgaaacaccgtaatttctactaagtgtagatacatcgagacgaccaaactgtaatttctactaagtgtagattgtagctcagtaaaagtgaataatttctactaagtgtagatttttttnnnnnnnnnnaagcttggcgtggatccgatatcaactagatcttgagacaaatggcagtattcatccacaattttaaaagaaaaggggggattggggggtacagtgcaggggaaagaatagtagacataatagcaacagacatacaaactaaag

SEQ ID NO: 12458 - DNA, 301 bp, Artificial Sequence
  Pole.3_Rb1.1
  crRNA array
  misc_feature (148)..(157): n is a, c, g, or t
cttggctttatatatcttgtggaaaggacgaaacaccgtaatttctactaagtgtagatctgctgcaacgagtcgagaataatttctactaagtgtagattctgacatgatcgggtaccttaatttctactaagtgtagatttttttnnnnnnnnnnaagcttggcgtggatccgatatcaactagatcttgagacaaatggcagtattcatccacaattttaaaagaaaaggggggattggggggtacagtgcaggggaaagaatagtagacataatagcaacagacatacaaactaaag

SEQ ID NO: 12459 - DNA, 301 bp, Artificial Sequence
  Pole.3_Rb1.2
  crRNA array
  misc_feature (148)..(157): n is a, c, g, or t
cttggctttatatatcttgtggaaaggacgaaacaccgtaatttctactaagtgtagatctgctgcaacgagtcgagaataatttctactaagtgtagatgtctctgcatgaaaacggagtaatttctactaagtgtagatttttttnnnnnnnnnnaagcttggcgtggatccgatatcaactagatcttgagacaaatggcagtattcatccacaattttaaaagaaaaggggggattggggggtacagtgcaggggaaagaatagtagacataatagcaacagacatacaaactaaag

SEQ ID NO: 12460 - DNA, 301 bp, Artificial Sequence
  Pole.3_Rb1.3
  crRNA array
  misc_feature (148)..(157): n is a, c, g, or t
cttggctttatatatcttgtggaaaggacgaaacaccgtaatttctactaagtgtagatctgctgcaacgagtcgagaataatttctactaagtgtagatagccaatctggtctaataactaatttctactaagtgtagatttttttnnnnnnnnnnaagcttggcgtggatccgatatcaactagatcttgagacaaatggcagtattcatccacaattttaaaagaaaaggggggattggggggtacagtgcaggggaaagaatagtagacataatagcaacagacatacaaactaaag

SEQ ID NO: 12461 - DNA, 301 bp, Artificial Sequence
  Pole.3_Rb1.4
  crRNA array
  misc_feature (148)..(157): n is a, c, g, or t
cttggctttatatatcttgtggaaaggacgaaacaccgtaatttctactaagtgtagatctgctgcaacgagtcgagaataatttctactaagtgtagattgtagctcagtaaaagtgaataatttctactaagtgtagatttttttnnnnnnnnnnaagcttggcgtggatccgatatcaactagatcttgagacaaatggcagtattcatccacaattttaaaagaaaaggggggattggggggtacagtgcaggggaaagaatagtagacataatagcaacagacatacaaactaaag

SEQ ID NO: 12462 - DNA, 301 bp, Artificial Sequence
  Pole.4_Rb1.1
  crRNA array
  misc_feature (148)..(157): n is a, c, g, or t
cttggctttatatatcttgtggaaaggacgaaacaccgtaatttctactaagtgtagatgggagatgatatagcggcagtaatttctactaagtgtagattctgacatgatcgggtaccttaatttctactaagtgtagatttttttnnnnnnnnnnaagcttggcgtggatccgatatcaactagatcttgagacaaatggcagtattcatccacaattttaaaagaaaaggggggattggggggtacagtgcaggggaaagaatagtagacataatagcaacagacatacaaactaaag

SEQ ID NO: 12463 - DNA, 301 bp, Artificial Sequence
  Pole.4_Rb1.2
  crRNA array
  misc_feature (148)..(157): n is a, c, g, or t
cttggctttatatatcttgtggaaaggacgaaacaccgtaatttctactaagtgtagatgggagatgatatagcggcagtaatttctactaagtgtagatgtctctgcatgaaaacggagtaatttctactaagtgtagatttttttnnnnnnnnnnaagcttggcgtggatccgatatcaactagatcttgagacaaatggcagtattcatccacaattttaaaagaaaaggggggattggggggtacagtgcaggggaaagaatagtagacataatagcaacagacatacaaactaaag

SEQ ID NO: 12464 - DNA, 301 bp, Artificial Sequence
  Pole.4_Rb1.3
  crRNA array
  misc_feature (148)..(157): n is a, c, g, or t
cttggctttatatatcttgtggaaaggacgaaacaccgtaatttctactaagtgtagatgggagatgatatagcggcagtaatttctactaagtgtagatagccaatctggtctaataactaatttctactaagtgtagatttttttnnnnnnnnnnaagcttggcgtggatccgatatcaactagatcttgagacaaatggcagtattcatccacaattttaaaagaaaaggggggattggggggtacagtgcaggggaaagaatagtagacataatagcaacagacatacaaactaaag

SEQ ID NO: 12465 - DNA, 301 bp, Artificial Sequence
  Pole.4_Rb1.4
  crRNA array
  misc_feature (148)..(157): n is a, c, g, or t
cttggctttatatatcttgtggaaaggacgaaacaccgtaatttctactaagtgtagatgggagatgatatagcggcagtaatttctactaagtgtagattgtagctcagtaaaagtgaataatttctactaagtgtagatttttttnnnnnnnnnnaagcttggcgtggatccgatatcaactagatcttgagacaaatggcagtattcatccacaattttaaaagaaaaggggggattggggggtacagtgcaggggaaagaatagtagacataatagcaacagacatacaaactaaag

SEQ ID NO: 12466 - DNA, 301 bp, Artificial Sequence
  Pole.1_Kmt2c.1
  crRNA array
  misc_feature (148)..(157): n is a, c, g, or t
cttggctttatatatcttgtggaaaggacgaaacaccgtaatttctactaagtgtagatgcgcgctctccacgtgctcttaatttctactaagtgtagatactcgacctccacctccctataatttctactaagtgtagatttttttnnnnnnnnnnaagcttggcgtggatccgatatcaactagatcttgagacaaatggcagtattcatccacaattttaaaagaaaaggggggattggggggtacagtgcaggggaaagaatagtagacataatagcaacagacatacaaactaaag

SEQ ID NO: 12467 - DNA, 301 bp, Artificial Sequence
  Pole.1_Kmt2c.2
  crRNA array
  misc_feature (148)..(157): n is a, c, g, or t
cttggctttatatatcttgtggaaaggacgaaacaccgtaatttctactaagtgtagatgcgcgctctccacgtgctcttaatttctactaagtgtagatcccaaagatcagcgtggacctaatttctactaagtgtagatttttttnnnnnnnnnnaagcttggcgtggatccgatatcaactagatcttgagacaaatggcagtattcatccacaattttaaaagaaaaggggggattggggggtacagtgcaggggaaagaatagtagacataatagcaacagacatacaaactaaag

SEQ ID NO: 12468 - DNA, 301 bp, Artificial Sequence
  Pole.1_Kmt2c.3
  crRNA array
  misc_feature (148)..(157): n is a, c, g, or t
cttggctttatatatcttgtggaaaggacgaaacaccgtaatttctactaagtgtagatgcgcgctctccacgtgctcttaatttctactaagtgtagataaaagatccgaatcgatgcgtaatttctactaagtgtagatttttttnnnnnnnnnnaagcttggcgtggatccgatatcaactagatcttgagacaaatggcagtattcatccacaattttaaaagaaaaggggggattggggggtacagtgcaggggaaagaatagtagacataatagcaacagacatacaaactaaag

SEQ ID NO: 12469 - DNA, 301 bp, Artificial Sequence
  Pole.1_Kmt2c.4
  crRNA array
  misc_feature (148)..(157): n is a, c, g, or t
cttggctttatatatcttgtggaaaggacgaaacaccgtaatttctactaagtgtagatgcgcgctctccacgtgctcttaatttctactaagtgtagatctgaggcacatggaagcgattaatttctactaagtgtagatttttttnnnnnnnnnnaagcttggcgtggatccgatatcaactagatcttgagacaaatggcagtattcatccacaattttaaaagaaaaggggggattggggggtacagtgcaggggaaagaatagtagacataatagcaacagacatacaaactaaag

SEQ ID NO: 12470 - DNA, 301 bp, Artificial Sequence
  Pole.2_Kmt2c.1
  crRNA array
  misc_feature (148)..(157): n is a, c, g, or t
cttggctttatatatcttgtggaaaggacgaaacaccgtaatttctactaagtgtagatacatcgagacgaccaaactgtaatttctactaagtgtagatactcgacctccacctccctataatttctactaagtgtagatttttttnnnnnnnnnnaagcttggcgtggatccgatatcaactagatcttgagacaaatggcagtattcatccacaattttaaaagaaaaggggggattggggggtacagtgcaggggaaagaatagtagacataatagcaacagacatacaaactaaag

SEQ ID NO: 12471 - DNA, 301 bp, Artificial Sequence
  Pole.2_Kmt2c.2
  crRNA array
  misc_feature (148)..(157): n is a, c, g, or t
cttggctttatatatcttgtggaaaggacgaaacaccgtaatttctactaagtgtagatacatcgagacgaccaaactgtaatttctactaagtgtagatcccaaagatcagcgtggacctaatttctactaagtgtagatttttttnnnnnnnnnnaagcttggcgtggatccgatatcaactagatcttgagacaaatggcagtattcatccacaattttaaaagaaaaggggggattggggggtacagtgcaggggaaagaatagtagacataatagcaacagacatacaaactaaag

SEQ ID NO: 12472 - DNA, 301 bp, Artificial Sequence
  Pole.2_Kmt2c.3
  crRNA array
  misc_feature (148)..(157): n is a, c, g, or t
cttggctttatatatcttgtggaaaggacgaaacaccgtaatttctactaagtgtagatacatcgagacgaccaaactgtaatttctactaagtgtagataaaagatccgaatcgatgcgtaatttctactaagtgtagatttttttnnnnnnnnnnaagcttggcgtggatccgatatcaactagatcttgagacaaatggcagtattcatccacaattttaaaagaaaaggggggattggggggtacagtgcaggggaaagaatagtagacataatagcaacagacatacaaactaaag

SEQ ID NO: 12473 - DNA, 301 bp, Artificial Sequence
  Pole.2_Kmt2c.4
  crRNA array
  misc_feature (148)..(157): n is a, c, g, or t
cttggctttatatatcttgtggaaaggacgaaacaccgtaatttctactaagtgtagatacatcgagacgaccaaactgtaatttctactaagtgtagatctgaggcacatggaagcgattaatttctactaagtgtagatttttttnnnnnnnnnnaagcttggcgtggatccgatatcaactagatcttgagacaaatggcagtattcatccacaattttaaaagaaaaggggggattggggggtacagtgcaggggaaagaatagtagacataatagcaacagacatacaaactaaag

SEQ ID NO: 12474 - DNA, 301 bp, Artificial Sequence
  Pole.3_Kmt2c.1
  crRNA array
  misc_feature (148)..(157): n is a, c, g, or t
cttggctttatatatcttgtggaaaggacgaaacaccgtaatttctactaagtgtagatctgctgcaacgagtcgagaataatttctactaagtgtagatactcgacctccacctccctataatttctactaagtgtagatttttttnnnnnnnnnnaagcttggcgtggatccgatatcaactagatcttgagacaaatggcagtattcatccacaattttaaaagaaaaggggggattggggggtacagtgcaggggaaagaatagtagacataatagcaacagacatacaaactaaag

SEQ ID NO: 12475 - DNA, 301 bp, Artificial Sequence
  Pole.3_Kmt2c.2
  crRNA array
  misc_feature (148)..(157): n is a, c, g, or t
cttggctttatatatcttgtggaaaggacgaaacaccgtaatttctactaagtgtagatctgctgcaacgagtcgagaataatttctactaagtgtagatcccaaagatcagcgtggacctaatttctactaagtgtagatttttttnnnnnnnnnnaagcttggcgtggatccgatatcaactagatcttgagacaaatggcagtattcatccacaattttaaaagaaaaggggggattggggggtacagtgcaggggaaagaatagtagacataatagcaacagacatacaaactaaag

SEQ ID NO: 12476 - DNA, 301 bp, Artificial Sequence
  Pole.3_Kmt2c.3
  crRNA array
  misc_feature (148)..(157): n is a, c, g, or t
cttggctttatatatcttgtggaaaggacgaaacaccgtaatttctactaagtgtagatctgctgcaacgagtcgagaataatttctactaagtgtagataaaagatccgaatcgatgcgtaatttctactaagtgtagatttttttnnnnnnnnnnaagcttggcgtggatccgatatcaactagatcttgagacaaatggcagtattcatccacaattttaaaagaaaaggggggattggggggtacagtgcaggggaaagaatagtagacataatagcaacagacatacaaactaaag

SEQ ID NO: 12477 - DNA, 301 bp, Artificial Sequence
  Pole.3_Kmt2c.4
  crRNA array
  misc_feature (148)..(157): n is a, c, g, or t
cttggctttatatatcttgtggaaaggacgaaacaccgtaatttctactaagtgtagatctgctgcaacgagtcgagaataatttctactaagtgtagatctgaggcacatggaagcgattaatttctactaagtgtagatttttttnnnnnnnnnnaagcttggcgtggatccgatatcaactagatcttgagacaaatggcagtattcatccacaattttaaaagaaaaggggggattggggggtacagtgcaggggaaagaatagtagacataatagcaacagacatacaaactaaag

SEQ ID NO: 12478 - DNA, 301 bp, Artificial Sequence
  Pole.4_Kmt2c.1
  crRNA array
  misc_feature (148)..(157): n is a, c, g, or t
cttggctttatatatcttgtggaaaggacgaaacaccgtaatttctactaagtgtagatgggagatgatatagcggcagtaatttctactaagtgtagatactcgacctccacctccctataatttctactaagtgtagatttttttnnnnnnnnnnaagcttggcgtggatccgatatcaactagatcttgagacaaatggcagtattcatccacaattttaaaagaaaaggggggattggggggtacagtgcaggggaaagaatagtagacataatagcaacagacatacaaactaaag

SEQ ID NO: 12479 - DNA, 301 bp, Artificial Sequence
  Pole.4_Kmt2c.2
  crRNA array
  misc_feature (148)..(157): n is a, c, g, or t
cttggctttatatatcttgtggaaaggacgaaacaccgtaatttctactaagtgtagatgggagatgatatagcggcagtaatttctactaagtgtagatcccaaagatcagcgtggacctaatttctactaagtgtagatttttttnnnnnnnnnnaagcttggcgtggatccgatatcaactagatcttgagacaaatggcagtattcatccacaattttaaaagaaaaggggggattggggggtacagtgcaggggaaagaatagtagacataatagcaacagacatacaaactaaag

SEQ ID NO: 12480 - DNA, 301 bp, Artificial Sequence
  Pole.4_Kmt2c.3
  crRNA array
  misc_feature (148)..(157): n is a, c, g, or t
cttggctttatatatcttgtggaaaggacgaaacaccgtaatttctactaagtgtagatgggagatgatatagcggcagtaatttctactaagtgtagataaaagatccgaatcgatgcgtaatttctactaagtgtagatttttttnnnnnnnnnnaagcttggcgtggatccgatatcaactagatcttgagacaaatggcagtattcatccacaattttaaaagaaaaggggggattggggggtacagtgcaggggaaagaatagtagacataatagcaacagacatacaaactaaag

SEQ ID NO: 12481 - DNA, 301 bp, Artificial Sequence
  Pole.4_Kmt2c.4
  crRNA array
  misc_feature (148)..(157): n is a, c, g, or t
cttggctttatatatcttgtggaaaggacgaaacaccgtaatttctactaagtgtagatgggagatgatatagcggcagtaatttctactaagtgtagatctgaggcacatggaagcgattaatttctactaagtgtagatttttttnnnnnnnnnnaagcttggcgtggatccgatatcaactagatcttgagacaaatggcagtattcatccacaattttaaaagaaaaggggggattggggggtacagtgcaggggaaagaatagtagacataatagcaacagacatacaaactaaag

SEQ ID NO: 12482 - DNA, 301 bp, Artificial Sequence
  Pole.1_Pten.1
  crRNA array
  misc_feature (148)..(157): n is a, c, g, or t
cttggctttatatatcttgtggaaaggacgaaacaccgtaatttctactaagtgtagatgcgcgctctccacgtgctcttaatttctactaagtgtagataagcgtggtgcgtgacgcactaatttctactaagtgtagatttttttnnnnnnnnnnaagcttggcgtggatccgatatcaactagatcttgagacaaatggcagtattcatccacaattttaaaagaaaaggggggattggggggtacagtgcaggggaaagaatagtagacataatagcaacagacatacaaactaaag

SEQ ID NO: 12483 - DNA, 301 bp, Artificial Sequence
  Pole.1_Pten.2
  crRNA array
  misc_feature (148)..(157): n is a, c, g, or t
cttggctttatatatcttgtggaaaggacgaaacaccgtaatttctactaagtgtagatgcgcgctctccacgtgctcttaatttctactaagtgtagattgtcaccagctgaagtggcttaatttctactaagtgtagatttttttnnnnnnnnnnaagcttggcgtggatccgatatcaactagatcttgagacaaatggcagtattcatccacaattttaaaagaaaaggggggattggggggtacagtgcaggggaaagaatagtagacataatagcaacagacatacaaactaaag

SEQ ID NO: 12484 - DNA, 301 bp, Artificial Sequence
  Pole.1_Pten.3
  crRNA array
  misc_feature (148)..(157): n is a, c, g, or t
cttggctttatatatcttgtggaaaggacgaaacaccgtaatttctactaagtgtagatgcgcgctctccacgtgctcttaatttctactaagtgtagatggagtcaagaggctgatttttaatttctactaagtgtagatttttttnnnnnnnnnnaagcttggcgtggatccgatatcaactagatcttgagacaaatggcagtattcatccacaattttaaaagaaaaggggggattggggggtacagtgcaggggaaagaatagtagacataatagcaacagacatacaaactaaag

SEQ ID NO: 12485 - DNA, 301 bp, Artificial Sequence
  Pole.1_Pten.4
  crRNA array
  misc_feature (148)..(157): n is a, c, g, or t
cttggctttatatatcttgtggaaaggacgaaacaccgtaatttctactaagtgtagatgcgcgctctccacgtgctcttaatttctactaagtgtagatctgtaagctaaaccactacataatttctactaagtgtagatttttttnnnnnnnnnnaagcttggcgtggatccgatatcaactagatcttgagacaaatggcagtattcatccacaattttaaaagaaaaggggggattggggggtacagtgcaggggaaagaatagtagacataatagcaacagacatacaaactaaag

SEQ ID NO: 12486 - DNA, 301 bp, Artificial Sequence
  Pole.2_Pten.1
  crRNA array
  misc_feature (148)..(157): n is a, c, g, or t
cttggctttatatatcttgtggaaaggacgaaacaccgtaatttctactaagtgtagatacatcgagacgaccaaactgtaatttctactaagtgtagataagcgtggtgcgtgacgcactaatttctactaagtgtagatttttttnnnnnnnnnnaagcttggcgtggatccgatatcaactagatcttgagacaaatggcagtattcatccacaattttaaaagaaaaggggggattggggggtacagtgcaggggaaagaatagtagacataatagcaacagacatacaaactaaag

SEQ ID NO: 12487 - DNA, 301 bp, Artificial Sequence
  Pole.2_Pten.2
  crRNA array
  misc_feature (148)..(157): n is a, c, g, or t
cttggctttatatatcttgtggaaaggacgaaacaccgtaatttctactaagtgtagatacatcgagacgaccaaactgtaatttctactaagtgtagattgtcaccagctgaagtggcttaatttctactaagtgtagatttttttnnnnnnnnnnaagcttggcgtggatccgatatcaactagatcttgagacaaatggcagtattcatccacaattttaaaagaaaaggggggattggggggtacagtgcaggggaaagaatagtagacataatagcaacagacatacaaactaaag

SEQ ID NO: 12488 - DNA, 301 bp, Artificial Sequence
  Pole.2_Pten.3
  crRNA array
  misc_feature (148)..(157): n is a, c, g, or t
cttggctttatatatcttgtggaaaggacgaaacaccgtaatttctactaagtgtagatacatcgagacgaccaaactgtaatttctactaagtgtagatggagtcaagaggctgatttttaatttctactaagtgtagatttttttnnnnnnnnnnaagcttggcgtggatccgatatcaactagatcttgagacaaatggcagtattcatccacaattttaaaagaaaaggggggattggggggtacagtgcaggggaaagaatagtagacataatagcaacagacatacaaactaaag

SEQ ID NO: 12489 - DNA, 301 bp, Artificial Sequence
  Pole.2_Pten.4
  crRNA array
  misc_feature (148)..(157): n is a, c, g, or t
cttggctttatatatcttgtggaaaggacgaaacaccgtaatttctactaagtgtagatacatcgagacgaccaaactgtaatttctactaagtgtagatctgtaagctaaaccactacataatttctactaagtgtagatttttttnnnnnnnnnnaagcttggcgtggatccgatatcaactagatcttgagacaaatggcagtattcatccacaattttaaaagaaaaggggggattggggggtacagtgcaggggaaagaatagtagacataatagcaacagacatacaaactaaag

SEQ ID NO: 12490 - DNA, 301 bp, Artificial Sequence
  Pole.3_Pten.1
  crRNA array
  misc_feature (148)..(157): n is a, c, g, or t
cttggctttatatatcttgtggaaaggacgaaacaccgtaatttctactaagtgtagatctgctgcaacgagtcgagaataatttctactaagtgtagataagcgtggtgcgtgacgcactaatttctactaagtgtagatttttttnnnnnnnnnnaagcttggcgtggatccgatatcaactagatcttgagacaaatggcagtattcatccacaattttaaaagaaaaggggggattggggggtacagtgcaggggaaagaatagtagacataatagcaacagacatacaaactaaag

SEQ ID NO: 12491 - DNA, 301 bp, Artificial Sequence
  Pole.3_Pten.2
  crRNA array
  misc_feature (148)..(157): n is a, c, g, or t
cttggctttatatatcttgtggaaaggacgaaacaccgtaatttctactaagtgtagatctgctgcaacgagtcgagaataatttctactaagtgtagattgtcaccagctgaagtggcttaatttctactaagtgtagatttttttnnnnnnnnnnaagcttggcgtggatccgatatcaactagatcttgagacaaatggcagtattcatccacaattttaaaagaaaaggggggattggggggtacagtgcaggggaaagaatagtagacataatagcaacagacatacaaactaaag

SEQ ID NO: 12492 - DNA, 301 bp, Artificial Sequence
  Pole.3_Pten.3
  crRNA array
  misc_feature (148)..(157): n is a, c, g, or t
cttggctttatatatcttgtggaaaggacgaaacaccgtaatttctactaagtgtagatctgctgcaacgagtcgagaataatttctactaagtgtagatggagtcaagaggctgatttttaatttctactaagtgtagatttttttnnnnnnnnnnaagcttggcgtggatccgatatcaactagatcttgagacaaatggcagtattcatccacaattttaaaagaaaaggggggattggggggtacagtgcaggggaaagaatagtagacataatagcaacagacatacaaactaaag

SEQ ID NO: 12493 - DNA, 301 bp, Artificial Sequence
  Pole.3_Pten.4
  crRNA array
  misc_feature (148)..(157): n is a, c, g, or t
cttggctttatatatcttgtggaaaggacgaaacaccgtaatttctactaagtgtagatctgctgcaacgagtcgagaataatttctactaagtgtagatctgtaagctaaaccactacataatttctactaagtgtagatttttttnnnnnnnnnnaagcttggcgtggatccgatatcaactagatcttgagacaaatggcagtattcatccacaattttaaaagaaaaggggggattggggggtacagtgcaggggaaagaatagtagacataatagcaacagacatacaaactaaag

SEQ ID NO: 12494 - DNA, 301 bp, Artificial Sequence
  Pole.4_Pten.1
  crRNA array
  misc_feature (148)..(157): n is a, c, g, or t
cttggctttatatatcttgtggaaaggacgaaacaccgtaatttctactaagtgtagatgggagatgatatagcggcagtaatttctactaagtgtagataagcgtggtgcgtgacgcactaatttctactaagtgtagatttttttnnnnnnnnnnaagcttggcgtggatccgatatcaactagatcttgagacaaatggcagtattcatccacaattttaaaagaaaaggggggattggggggtacagtgcaggggaaagaatagtagacataatagcaacagacatacaaactaaag

SEQ ID NO: 12495 - DNA, 301 bp, Artificial Sequence
  Pole.4_Pten.2
  crRNA array
  misc_feature (148)..(157): n is a, c, g, or t
cttggctttatatatcttgtggaaaggacgaaacaccgtaatttctactaagtgtagatgggagatgatatagcggcagtaatttctactaagtgtagattgtcaccagctgaagtggcttaatttctactaagtgtagatttttttnnnnnnnnnnaagcttggcgtggatccgatatcaactagatcttgagacaaatggcagtattcatccacaattttaaaagaaaaggggggattggggggtacagtgcaggggaaagaatagtagacataatagcaacagacatacaaactaaag

SEQ ID NO: 12496 - DNA, 301 bp, Artificial Sequence
  Pole.4_Pten.3
  crRNA array
  misc_feature (148)..(157): n is a, c, g, or t
cttggctttatatatcttgtggaaaggacgaaacaccgtaatttctactaagtgtagatgggagatgatatagcggcagtaatttctactaagtgtagatggagtcaagaggctgatttttaatttctactaagtgtagatttttttnnnnnnnnnnaagcttggcgtggatccgatatcaactagatcttgagacaaatggcagtattcatccacaattttaaaagaaaaggggggattggggggtacagtgcaggggaaagaatagtagacataatagcaacagacatacaaactaaag

SEQ ID NO: 12497 - DNA, 301 bp, Artificial Sequence
  Pole.4_Pten.4
  crRNA array
  misc_feature (148)..(157): n is a, c, g, or t
cttggctttatatatcttgtggaaaggacgaaacaccgtaatttctactaagtgtagatgggagatgatatagcggcagtaatttctactaagtgtagatctgtaagctaaaccactacataatttctactaagtgtagatttttttnnnnnnnnnnaagcttggcgtggatccgatatcaactagatcttgagacaaatggcagtattcatccacaattttaaaagaaaaggggggattggggggtacagtgcaggggaaagaatagtagacataatagcaacagacatacaaactaaag

SEQ ID NO: 12498 - DNA, 301 bp, Artificial Sequence
  Pole.1_Atm.1
  crRNA array
  misc_feature (148)..(157): n is a, c, g, or t
cttggctttatatatcttgtggaaaggacgaaacaccgtaatttctactaagtgtagatgcgcgctctccacgtgctcttaatttctactaagtgtagatgagaaagtctccgaatcgtttaatttctactaagtgtagatttttttnnnnnnnnnnaagcttggcgtggatccgatatcaactagatcttgagacaaatggcagtattcatccacaattttaaaagaaaaggggggattggggggtacagtgcaggggaaagaatagtagacataatagcaacagacatacaaactaaag

SEQ ID NO: 12499 - DNA, 301 bp, Artificial Sequence
  Pole.1_Atm.2
  crRNA array
  misc_feature (148)..(157): n is a, c, g, or t
cttggctttatatatcttgtggaaaggacgaaacaccgtaatttctactaagtgtagatgcgcgctctccacgtgctcttaatttctactaagtgtagatcctacgagggcacgagagactaatttctactaagtgtagatttttttnnnnnnnnnnaagcttggcgtggatccgatatcaactagatcttgagacaaatggcagtattcatccacaattttaaaagaaaaggggggattggggggtacagtgcaggggaaagaatagtagacataatagcaacagacatacaaactaaag

SEQ ID NO: 12500 - DNA, 301 bp, Artificial Sequence
  Pole.1_Atm.3
  crRNA array
  misc_feature (148)..(157): n is a, c, g, or t
cttggctttatatatcttgtggaaaggacgaaacaccgtaatttctactaagtgtagatgcgcgctctccacgtgctcttaatttctactaagtgtagattgaaagtctccgatatgccataatttctactaagtgtagatttttttnnnnnnnnnnaagcttggcgtggatccgatatcaactagatcttgagacaaatggcagtattcatccacaattttaaaagaaaaggggggattggggggtacagtgcaggggaaagaatagtagacataatagcaacagacatacaaactaaag

SEQ ID NO: 12501 - DNA, 301 bp, Artificial Sequence
  Pole.1_Atm.4
  crRNA array
  misc_feature (148)..(157): n is a, c, g, or t
cttggctttatatatcttgtggaaaggacgaaacaccgtaatttctactaagtgtagatgcgcgctctccacgtgctcttaatttctactaagtgtagatggtggtgatcagtcaagtagtaatttctactaagtgtagatttttttnnnnnnnnnnaagcttggcgtggatccgatatcaactagatcttgagacaaatggcagtattcatccacaattttaaaagaaaaggggggattggggggtacagtgcaggggaaagaatagtagacataatagcaacagacatacaaactaaag

SEQ ID NO: 12502 - DNA, 301 bp, Artificial Sequence
  Pole.2_Atm.1
  crRNA array
  misc_feature (148)..(157): n is a, c, g, or t
cttggctttatatatcttgtggaaaggacgaaacaccgtaatttctactaagtgtagatacatcgagacgaccaaactgtaatttctactaagtgtagatgagaaagtctccgaatcgtttaatttctactaagtgtagatttttttnnnnnnnnnnaagcttggcgtggatccgatatcaactagatcttgagacaaatggcagtattcatccacaattttaaaagaaaaggggggattggggggtacagtgcaggggaaagaatagtagacataatagcaacagacatacaaactaaag

SEQ ID NO: 12503 - DNA, 301 bp, Artificial Sequence
  Pole.2_Atm.2
  crRNA array
  misc_feature (148)..(157): n is a, c, g, or t
cttggctttatatatcttgtggaaaggacgaaacaccgtaatttctactaagtgtagatacatcgagacgaccaaactgtaatttctactaagtgtagatcctacgagggcacgagagactaatttctactaagtgtagatttttttnnnnnnnnnnaagcttggcgtggatccgatatcaactagatcttgagacaaatggcagtattcatccacaattttaaaagaaaaggggggattggggggtacagtgcaggggaaagaatagtagacataatagcaacagacatacaaactaaag

SEQ ID NO: 12504 - DNA, 301 bp, Artificial Sequence
  Pole.2_Atm.3
  crRNA array
  misc_feature (148)..(157): n is a, c, g, or t
cttggctttatatatcttgtggaaaggacgaaacaccgtaatttctactaagtgtagatacatcgagacgaccaaactgtaatttctactaagtgtagattgaaagtctccgatatgccataatttctactaagtgtagatttttttnnnnnnnnnnaagcttggcgtggatccgatatcaactagatcttgagacaaatggcagtattcatccacaattttaaaagaaaaggggggattggggggtacagtgcaggggaaagaatagtagacataatagcaacagacatacaaactaaag

SEQ ID NO: 12505 - DNA, 301 bp, Artificial Sequence
  Pole.2_Atm.4
  crRNA array
  misc_feature (148)..(157): n is a, c, g, or t
cttggctttatatatcttgtggaaaggacgaaacaccgtaatttctactaagtgtagatacatcgagacgaccaaactgtaatttctactaagtgtagatggtggtgatcagtcaagtagtaatttctactaagtgtagatttttttnnnnnnnnnnaagcttggcgtggatccgatatcaactagatcttgagacaaatggcagtattcatccacaattttaaaagaaaaggggggattggggggtacagtgcaggggaaagaatagtagacataatagcaacagacatacaaactaaag

SEQ ID NO: 12506 - DNA, 301 bp, Artificial Sequence
  Pole.3_Atm.1
  crRNA array
  misc_feature (148)..(157): n is a, c, g, or t
cttggctttatatatcttgtggaaaggacgaaacaccgtaatttctactaagtgtagatctgctgcaacgagtcgagaataatttctactaagtgtagatgagaaagtctccgaatcgtttaatttctactaagtgtagatttttttnnnnnnnnnnaagcttggcgtggatccgatatcaactagatcttgagacaaatggcagtattcatccacaattttaaaagaaaaggggggattggggggtacagtgcaggggaaagaatagtagacataatagcaacagacatacaaactaaag

SEQ ID NO: 12507 - DNA, 301 bp, Artificial Sequence
  Pole.3_Atm.2
  crRNA array
  misc_feature (148)..(157): n is a, c, g, or t
cttggctttatatatcttgtggaaaggacgaaacaccgtaatttctactaagtgtagatctgctgcaacgagtcgagaataatttctactaagtgtagatcctacgagggcacgagagactaatttctactaagtgtagatttttttnnnnnnnnnnaagcttggcgtggatccgatatcaactagatcttgagacaaatggcagtattcatccacaattttaaaagaaaaggggggattggggggtacagtgcaggggaaagaatagtagacataatagcaacagacatacaaactaaag

SEQ ID NO: 12508 - DNA, 301 bp, Artificial Sequence
  Pole.3_Atm.3
  crRNA array
  misc_feature (148)..(157): n is a, c, g, or t
cttggctttatatatcttgtggaaaggacgaaacaccgtaatttctactaagtgtagatctgctgcaacgagtcgagaataatttctactaagtgtagattgaaagtctccgatatgccataatttctactaagtgtagatttttttnnnnnnnnnnaagcttggcgtggatccgatatcaactagatcttgagacaaatggcagtattcatccacaattttaaaagaaaaggggggattggggggtacagtgcaggggaaagaatagtagacataatagcaacagacatacaaactaaag

SEQ ID NO: 12509 - DNA, 301 bp, Artificial Sequence
  Pole.3_Atm.4
  crRNA array
  misc_feature (148)..(157): n is a, c, g, or t
cttggctttatatatcttgtggaaaggacgaaacaccgtaatttctactaagtgtagatctgctgcaacgagtcgagaataatttctactaagtgtagatggtggtgatcagtcaagtagtaatttctactaagtgtagatttttttnnnnnnnnnnaagcttggcgtggatccgatatcaactagatcttgagacaaatggcagtattcatccacaattttaaaagaaaaggggggattggggggtacagtgcaggggaaagaatagtagacataatagcaacagacatacaaactaaag

SEQ ID NO: 12510 - DNA, 301 bp, Artificial Sequence
  Pole.4_Atm.1
  crRNA array
  misc_feature (148)..(157): n is a, c, g, or t
cttggctttatatatcttgtggaaaggacgaaacaccgtaatttctactaagtgtagatgggagatgatatagcggcagtaatttctactaagtgtagatgagaaagtctccgaatcgtttaatttctactaagtgtagatttttttnnnnnnnnnnaagcttggcgtggatccgatatcaactagatcttgagacaaatggcagtattcatccacaattttaaaagaaaaggggggattggggggtacagtgcaggggaaagaatagtagacataatagcaacagacatacaaactaaag

SEQ ID NO: 12511 - DNA, 301 bp, Artificial Sequence
  Pole.4_Atm.2
  crRNA array
  misc_feature (148)..(157): n is a, c, g, or t
cttggctttatatatcttgtggaaaggacgaaacaccgtaatttctactaagtgtagatgggagatgatatagcggcagtaatttctactaagtgtagatcctacgagggcacgagagactaatttctactaagtgtagatttttttnnnnnnnnnnaagcttggcgtggatccgatatcaactagatcttgagacaaatggcagtattcatccacaattttaaaagaaaaggggggattggggggtacagtgcaggggaaagaatagtagacataatagcaacagacatacaaactaaag

SEQ ID NO: 12512 - DNA, 301 bp, Artificial Sequence
  Pole.4_Atm.3
  crRNA array
  misc_feature (148)..(157): n is a, c, g, or t
cttggctttatatatcttgtggaaaggacgaaacaccgtaatttctactaagtgtagatgggagatgatatagcggcagtaatttctactaagtgtagattgaaagtctccgatatgccataatttctactaagtgtagatttttttnnnnnnnnnnaagcttggcgtggatccgatatcaactagatcttgagacaaatggcagtattcatccacaattttaaaagaaaaggggggattggggggtacagtgcaggggaaagaatagtagacataatagcaacagacatacaaactaaag

SEQ ID NO: 12513 - DNA, 301 bp, Artificial Sequence
  Pole.4_Atm.4
  crRNA array
  misc_feature (148)..(157): n is a, c, g, or t
cttggctttatatatcttgtggaaaggacgaaacaccgtaatttctactaagtgtagatgggagatgatatagcggcagtaatttctactaagtgtagatggtggtgatcagtcaagtagtaatttctactaagtgtagatttttttnnnnnnnnnnaagcttggcgtggatccgatatcaactagatcttgagacaaatggcagtattcatccacaattttaaaagaaaaggggggattggggggtacagtgcaggggaaagaatagtagacataatagcaacagacatacaaactaaag

SEQ ID NO: 12514 - DNA, 301 bp, Artificial Sequence
  Notch1.1_Arid1a.1
  crRNA array
  misc_feature (148)..(157): n is a, c, g, or t
cttggctttatatatcttgtggaaaggacgaaacaccgtaatttctactaagtgtagattgggccaacgatgccaggactaatttctactaagtgtagatcccgcgctcggccgctgccgtaatttctactaagtgtagatttttttnnnnnnnnnnaagcttggcgtggatccgatatcaactagatcttgagacaaatggcagtattcatccacaattttaaaagaaaaggggggattggggggtacagtgcaggggaaagaatagtagacataatagcaacagacatacaaactaaag

SEQ ID NO: 12515 - DNA, 301 bp, Artificial Sequence
  Notch1.1_Arid1a.2
  crRNA array
  misc_feature (148)..(157): n is a, c, g, or t
cttggctttatatatcttgtggaaaggacgaaacaccgtaatttctactaagtgtagattgggccaacgatgccaggactaatttctactaagtgtagatagtgcaagatcgagcgtggataatttctactaagtgtagatttttttnnnnnnnnnnaagcttggcgtggatccgatatcaactagatcttgagacaaatggcagtattcatccacaattttaaaagaaaaggggggattggggggtacagtgcaggggaaagaatagtagacataatagcaacagacatacaaactaaag

SEQ ID NO: 12516 - DNA, 301 bp, Artificial Sequence
  Notch1.1_Arid1a.3
  crRNA array
  misc_feature (148)..(157): n is a, c, g, or t
cttggctttatatatcttgtggaaaggacgaaacaccgtaatttctactaagtgtagattgggccaacgatgccaggactaatttctactaagtgtagatagtgagctggcagcactgcttaatttctactaagtgtagatttttttnnnnnnnnnnaagcttggcgtggatccgatatcaactagatcttgagacaaatggcagtattcatccacaattttaaaagaaaaggggggattggggggtacagtgcaggggaaagaatagtagacataatagcaacagacatacaaactaaag

SEQ ID NO: 12517 - DNA, 301 bp, Artificial Sequence
  Notch1.1_Arid1a.4
  crRNA array
  misc_feature (148)..(157): n is a, c, g, or t
cttggctttatatatcttgtggaaaggacgaaacaccgtaatttctactaagtgtagattgggccaacgatgccaggactaatttctactaagtgtagatgccgagaccgagtctctgcataatttctactaagtgtagatttttttnnnnnnnnnnaagcttggcgtggatccgatatcaactagatcttgagacaaatggcagtattcatccacaattttaaaagaaaaggggggattggggggtacagtgcaggggaaagaatagtagacataatagcaacagacatacaaactaaag

SEQ ID NO: 12518 - DNA, 301 bp, Artificial Sequence
  Notch1.2_Arid1a.1
  crRNA array
  misc_feature (148)..(157): n is a, c, g, or t
cttggctttatatatcttgtggaaaggacgaaacaccgtaatttctactaagtgtagatgtcgccccagcatcctgaagtaatttctactaagtgtagatcccgcgctcggccgctgccgtaatttctactaagtgtagatttttttnnnnnnnnnnaagcttggcgtggatccgatatcaactagatcttgagacaaatggcagtattcatccacaattttaaaagaaaaggggggattggggggtacagtgcaggggaaagaatagtagacataatagcaacagacatacaaactaaag

SEQ ID NO: 12519 - DNA, 301 bp, Artificial Sequence
  Notch1.2_Arid1a.2
  crRNA array
  misc_feature (148)..(157): n is a, c, g, or t
cttggctttatatatcttgtggaaaggacgaaacaccgtaatttctactaagtgtagatgtcgccccagcatcctgaagtaatttctactaagtgtagatagtgcaagatcgagcgtggataatttctactaagtgtagatttttttnnnnnnnnnnaagcttggcgtggatccgatatcaactagatcttgagacaaatggcagtattcatccacaattttaaaagaaaaggggggattggggggtacagtgcaggggaaagaatagtagacataatagcaacagacatacaaactaaag

SEQ ID NO: 12520 - DNA, 301 bp, Artificial Sequence
  Notch1.2_Arid1a.3
  crRNA array
  misc_feature (148)..(157): n is a, c, g, or t
cttggctttatatatcttgtggaaaggacgaaacaccgtaatttctactaagtgtagatgtcgccccagcatcctgaagtaatttctactaagtgtagatagtgagctggcagcactgcttaatttctactaagtgtagatttttttnnnnnnnnnnaagcttggcgtggatccgatatcaactagatcttgagacaaatggcagtattcatccacaattttaaaagaaaaggggggattggggggtacagtgcaggggaaagaatagtagacataatagcaacagacatacaaactaaag

SEQ ID NO: 12521 - DNA, 301 bp, Artificial Sequence
  Notch1.2_Arid1a.4
  crRNA array
  misc_feature (148)..(157): n is a, c, g, or t
cttggctttatatatcttgtggaaaggacgaaacaccgtaatttctactaagtgtagatgtcgccccagcatcctgaagtaatttctactaagtgtagatgccgagaccgagtctctgcataatttctactaagtgtagatttttttnnnnnnnnnnaagcttggcgtggatccgatatcaactagatcttgagacaaatggcagtattcatccacaattttaaaagaaaaggggggattggggggtacagtgcaggggaaagaatagtagacataatagcaacagacatacaaactaaag

SEQ ID NO: 12522 - DNA, 301 bp, Artificial Sequence
  Notch1.3_Arid1a.1
  crRNA array
  misc_feature (148)..(157): n is a, c, g, or t
cttggctttatatatcttgtggaaaggacgaaacaccgtaatttctactaagtgtagatagccacccccgccacgcctctaatttctactaagtgtagatcccgcgctcggccgctgccgtaatttctactaagtgtagatttttttnnnnnnnnnnaagcttggcgtggatccgatatcaactagatcttgagacaaatggcagtattcatccacaattttaaaagaaaaggggggattggggggtacagtgcaggggaaagaatagtagacataatagcaacagacatacaaactaaag

SEQ ID NO: 12523 - DNA, 301 bp, Artificial Sequence
  Notch1.3_Arid1a.2
  crRNA array
  misc_feature (148)..(157): n is a, c, g, or t
cttggctttatatatcttgtggaaaggacgaaacaccgtaatttctactaagtgtagatagccacccccgccacgcctctaatttctactaagtgtagatagtgcaagatcgagcgtggataatttctactaagtgtagatttttttnnnnnnnnnnaagcttggcgtggatccgatatcaactagatcttgagacaaatggcagtattcatccacaattttaaaagaaaaggggggattggggggtacagtgcaggggaaagaatagtagacataatagcaacagacatacaaactaaag

SEQ ID NO: 12524 - DNA, 301 bp, Artificial Sequence
  Notch1.3_Arid1a.3
  crRNA array
  misc_feature (148)..(157): n is a, c, g, or t
cttggctttatatatcttgtggaaaggacgaaacaccgtaatttctactaagtgtagatagccacccccgccacgcctctaatttctactaagtgtagatagtgagctggcagcactgcttaatttctactaagtgtagatttttttnnnnnnnnnnaagcttggcgtggatccgatatcaactagatcttgagacaaatggcagtattcatccacaattttaaaagaaaaggggggattggggggtacagtgcaggggaaagaatagtagacataatagcaacagacatacaaactaaag

SEQ ID NO: 12525 - DNA, 301 bp, Artificial Sequence
  Notch1.3_Arid1a.4
  crRNA array
  misc_feature (148)..(157): n is a, c, g, or t
cttggctttatatatcttgtggaaaggacgaaacaccgtaatttctactaagtgtagatagccacccccgccacgcctctaatttctactaagtgtagatgccgagaccgagtctctgcataatttctactaagtgtagatttttttnnnnnnnnnnaagcttggcgtggatccgatatcaactagatcttgagacaaatggcagtattcatccacaattttaaaagaaaaggggggattggggggtacagtgcaggggaaagaatagtagacataatagcaacagacatacaaactaaag

SEQ ID NO: 12526 - DNA, 301 bp, Artificial Sequence
  Notch1.4_Arid1a.1
  crRNA array
  misc_feature (148)..(157): n is a, c, g, or t
cttggctttatatatcttgtggaaaggacgaaacaccgtaatttctactaagtgtagataaagtgtcagaggccagcaataatttctactaagtgtagatcccgcgctcggccgctgccgtaatttctactaagtgtagatttttttnnnnnnnnnnaagcttggcgtggatccgatatcaactagatcttgagacaaatggcagtattcatccacaattttaaaagaaaaggggggattggggggtacagtgcaggggaaagaatagtagacataatagcaacagacatacaaactaaag

SEQ ID NO: 12527 - DNA, 301 bp, Artificial Sequence
  Notch1.4_Arid1a.2
  crRNA array
  misc_feature (148)..(157): n is a, c, g, or t
cttggctttatatatcttgtggaaaggacgaaacaccgtaatttctactaagtgtagataaagtgtcagaggccagcaataatttctactaagtgtagatagtgcaagatcgagcgtggataatttctactaagtgtagatttttttnnnnnnnnnnaagcttggcgtggatccgatatcaactagatcttgagacaaatggcagtattcatccacaattttaaaagaaaaggggggattggggggtacagtgcaggggaaagaatagtagacataatagcaacagacatacaaactaaag

SEQ ID NO: 12528 - DNA, 301 bp, Artificial Sequence
  Notch1.4_Arid1a.3
  crRNA array
  misc_feature (148)..(157): n is a, c, g, or t
cttggctttatatatcttgtggaaaggacgaaacaccgtaatttctactaagtgtagataaagtgtcagaggccagcaataatttctactaagtgtagatagtgagctggcagcactgcttaatttctactaagtgtagatttttttnnnnnnnnnnaagcttggcgtggatccgatatcaactagatcttgagacaaatggcagtattcatccacaattttaaaagaaaaggggggattggggggtacagtgcaggggaaagaatagtagacataatagcaacagacatacaaactaaag

SEQ ID NO: 12529 - DNA, 301 bp, Artificial Sequence
  Notch1.4_Arid1a.4
  crRNA array
  misc_feature (148)..(157): n is a, c, g, or t
cttggctttatatatcttgtggaaaggacgaaacaccgtaatttctactaagtgtagataaagtgtcagaggccagcaataatttctactaagtgtagatgccgagaccgagtctctgcataatttctactaagtgtagatttttttnnnnnnnnnnaagcttggcgtggatccgatatcaactagatcttgagacaaatggcagtattcatccacaattttaaaagaaaaggggggattggggggtacagtgcaggggaaagaatagtagacataatagcaacagacatacaaactaaag

SEQ ID NO: 12530 - DNA, 301 bp, Artificial Sequence
  Notch1.1_Trim72.1
  crRNA array
  misc_feature (148)..(157): n is a, c, g, or t
cttggctttatatatcttgtggaaaggacgaaacaccgtaatttctactaagtgtagattgggccaacgatgccaggactaatttctactaagtgtagataccccagctctgcgcacccgtaatttctactaagtgtagatttttttnnnnnnnnnnaagcttggcgtggatccgatatcaactagatcttgagacaaatggcagtattcatccacaattttaaaagaaaaggggggattggggggtacagtgcaggggaaagaatagtagacataatagcaacagacatacaaactaaag

SEQ ID NO: 12531 - DNA, 301 bp, Artificial Sequence
  Notch1.1_Trim72.2
  crRNA array
  misc_feature (148)..(157): n is a, c, g, or t
cttggctttatatatcttgtggaaaggacgaaacaccgtaatttctactaagtgtagattgggccaacgatgccaggactaatttctactaagtgtagatcacgagcgtctgcccgggcctaatttctactaagtgtagatttttttnnnnnnnnnnaagcttggcgtggatccgatatcaactagatcttgagacaaatggcagtattcatccacaattttaaaagaaaaggggggattggggggtacagtgcaggggaaagaatagtagacataatagcaacagacatacaaactaaag

SEQ ID NO: 12532 - DNA, 301 bp, Artificial Sequence
  Notch1.1_Trim72.3
  crRNA array
  misc_feature (148)..(157): n is a, c, g, or t
cttggctttatatatcttgtggaaaggacgaaacaccgtaatttctactaagtgtagattgggccaacgatgccaggactaatttctactaagtgtagatacgtgtgctggcacgacaagtaatttctactaagtgtagatttttttnnnnnnnnnnaagcttggcgtggatccgatatcaactagatcttgagacaaatggcagtattcatccacaattttaaaagaaaaggggggattggggggtacagtgcaggggaaagaatagtagacataatagcaacagacatacaaactaaag

SEQ ID NO: 12533 - DNA, 301 bp, Artificial Sequence
  Notch1.1_Trim72.4
  crRNA array
  misc_feature (148)..(157): n is a, c, g, or t
cttggctttatatatcttgtggaaaggacgaaacaccgtaatttctactaagtgtagattgggccaacgatgccaggactaatttctactaagtgtagattgccgtgcctgcctgatccgtaatttctactaagtgtagatttttttnnnnnnnnnnaagcttggcgtggatccgatatcaactagatcttgagacaaatggcagtattcatccacaattttaaaagaaaaggggggattggggggtacagtgcaggggaaagaatagtagacataatagcaacagacatacaaactaaag

SEQ ID NO: 12534 - DNA, 301 bp, Artificial Sequence
  Notch1.2_Trim72.1
  crRNA array
  misc_feature (148)..(157): n is a, c, g, or t
cttggctttatatatcttgtggaaaggacgaaacaccgtaatttctactaagtgtagatgtcgccccagcatcctgaagtaatttctactaagtgtagataccccagctctgcgcacccgtaatttctactaagtgtagatttttttnnnnnnnnnnaagcttggcgtggatccgatatcaactagatcttgagacaaatggcagtattcatccacaattttaaaagaaaaggggggattggggggtacagtgcaggggaaagaatagtagacataatagcaacagacatacaaactaaag

SEQ ID NO: 12535 - DNA, 301 bp, Artificial Sequence
  Notch1.2_Trim72.2
  crRNA array
  misc_feature (148)..(157): n is a, c, g, or t
cttggctttatatatcttgtggaaaggacgaaacaccgtaatttctactaagtgtagatgtcgccccagcatcctgaagtaatttctactaagtgtagatcacgagcgtctgcccgggcctaatttctactaagtgtagatttttttnnnnnnnnnnaagcttggcgtggatccgatatcaactagatcttgagacaaatggcagtattcatccacaattttaaaagaaaaggggggattggggggtacagtgcaggggaaagaatagtagacataatagcaacagacatacaaactaaag

SEQ ID NO: 12536 - DNA, 301 bp, Artificial Sequence
  Notch1.2_Trim72.3
  crRNA array
  misc_feature (148)..(157): n is a, c, g, or t
cttggctttatatatcttgtggaaaggacgaaacaccgtaatttctactaagtgtagatgtcgccccagcatcctgaagtaatttctactaagtgtagatacgtgtgctggcacgacaagtaatttctactaagtgtagatttttttnnnnnnnnnnaagcttggcgtggatccgatatcaactagatcttgagacaaatggcagtattcatccacaattttaaaagaaaaggggggattggggggtacagtgcaggggaaagaatagtagacataatagcaacagacatacaaactaaag

SEQ ID NO: 12537 - DNA, 301 bp, Artificial Sequence
  Notch1.2_Trim72.4
  crRNA array
  misc_feature (148)..(157): n is a, c, g, or t
cttggctttatatatcttgtggaaaggacgaaacaccgtaatttctactaagtgtagatgtcgccccagcatcctgaagtaatttctactaagtgtagattgccgtgcctgcctgatccgtaatttctactaagtgtagatttttttnnnnnnnnnnaagcttggcgtggatccgatatcaactagatcttgagacaaatggcagtattcatccacaattttaaaagaaaaggggggattggggggtacagtgcaggggaaagaatagtagacataatagcaacagacatacaaactaaag

SEQ ID NO: 12538 - DNA, 301 bp, Artificial Sequence
  Notch1.3_Trim72.1
  crRNA array
  misc_feature (148)..(157): n is a, c, g, or t
cttggctttatatatcttgtggaaaggacgaaacaccgtaatttctactaagtgtagatagccacccccgccacgcctctaatttctactaagtgtagataccccagctctgcgcacccgtaatttctactaagtgtagatttttttnnnnnnnnnnaagcttggcgtggatccgatatcaactagatcttgagacaaatggcagtattcatccacaattttaaaagaaaaggggggattggggggtacagtgcaggggaaagaatagtagacataatagcaacagacatacaaactaaag

SEQ ID NO: 12539 - DNA, 301 bp, Artificial Sequence
  Notch1.3_Trim72.2
  crRNA array
  misc_feature (148)..(157): n is a, c, g, or t
cttggctttatatatcttgtggaaaggacgaaacaccgtaatttctactaagtgtagatagccacccccgccacgcctctaatttctactaagtgtagatcacgagcgtctgcccgggcctaatttctactaagtgtagatttttttnnnnnnnnnnaagcttggcgtggatccgatatcaactagatcttgagacaaatggcagtattcatccacaattttaaaagaaaaggggggattggggggtacagtgcaggggaaagaatagtagacataatagcaacagacatacaaactaaag

SEQ ID NO: 12540 - DNA, 301 bp, Artificial Sequence
  Notch1.3_Trim72.3
  crRNA array
  misc_feature (148)..(157): n is a, c, g, or t
cttggctttatatatcttgtggaaaggacgaaacaccgtaatttctactaagtgtagatagccacccccgccacgcctctaatttctactaagtgtagatacgtgtgctggcacgacaagtaatttctactaagtgtagatttttttnnnnnnnnnnaagcttggcgtggatccgatatcaactagatcttgagacaaatggcagtattcatccacaattttaaaagaaaaggggggattggggggtacagtgcaggggaaagaatagtagacataatagcaacagacatacaaactaaag

SEQ ID NO: 12541 - DNA, 301 bp, Artificial Sequence
  Notch1.3_Trim72.4
  crRNA array
  misc_feature (148)..(157): n is a, c, g, or t
cttggctttatatatcttgtggaaaggacgaaacaccgtaatttctactaagtgtagatagccacccccgccacgcctctaatttctactaagtgtagattgccgtgcctgcctgatccgtaatttctactaagtgtagatttttttnnnnnnnnnnaagcttggcgtggatccgatatcaactagatcttgagacaaatggcagtattcatccacaattttaaaagaaaaggggggattggggggtacagtgcaggggaaagaatagtagacataatagcaacagacatacaaactaaag

SEQ ID NO: 12542 - DNA, 301 bp, Artificial Sequence
  Notch1.4_Trim72.1
  crRNA array
  misc_feature (148)..(157): n is a, c, g, or t
cttggctttatatatcttgtggaaaggacgaaacaccgtaatttctactaagtgtagataaagtgtcagaggccagcaataatttctactaagtgtagataccccagctctgcgcacccgtaatttctactaagtgtagatttttttnnnnnnnnnnaagcttggcgtggatccgatatcaactagatcttgagacaaatggcagtattcatccacaattttaaaagaaaaggggggattggggggtacagtgcaggggaaagaatagtagacataatagcaacagacatacaaactaaag

SEQ ID NO: 12543 - DNA, 301 bp, Artificial Sequence
  Notch1.4_Trim72.2
  crRNA array
  misc_feature (148)..(157): n is a, c, g, or t
cttggctttatatatcttgtggaaaggacgaaacaccgtaatttctactaagtgtagataaagtgtcagaggccagcaataatttctactaagtgtagatcacgagcgtctgcccgggcctaatttctactaagtgtagatttttttnnnnnnnnnnaagcttggcgtggatccgatatcaactagatcttgagacaaatggcagtattcatccacaattttaaaagaaaaggggggattggggggtacagtgcaggggaaagaatagtagacataatagcaacagacatacaaactaaag

SEQ ID NO: 12544 - DNA, 301 bp, Artificial Sequence
  Notch1.4_Trim72.3
  crRNA array
  misc_feature (148)..(157): n is a, c, g, or t
cttggctttatatatcttgtggaaaggacgaaacaccgtaatttctactaagtgtagataaagtgtcagaggccagcaataatttctactaagtgtagatacgtgtgctggcacgacaagtaatttctactaagtgtagatttttttnnnnnnnnnnaagcttggcgtggatccgatatcaactagatcttgagacaaatggcagtattcatccacaattttaaaagaaaaggggggattggggggtacagtgcaggggaaagaatagtagacataatagcaacagacatacaaactaaag

SEQ ID NO: 12545 - DNA, 301 bp, Artificial Sequence
  Notch1.4_Trim72.4
  crRNA array
  misc_feature (148)..(157): n is a, c, g, or t
cttggctttatatatcttgtggaaaggacgaaacaccgtaatttctactaagtgtagataaagtgtcagaggccagcaataatttctactaagtgtagattgccgtgcctgcctgatccgtaatttctactaagtgtagatttttttnnnnnnnnnnaagcttggcgtggatccgatatcaactagatcttgagacaaatggcagtattcatccacaattttaaaagaaaaggggggattggggggtacagtgcaggggaaagaatagtagacataatagcaacagacatacaaactaaag

SEQ ID NO: 12546 - DNA, 301 bp, Artificial Sequence
  Notch1.1_Zfhx3.1
  crRNA array
  misc_feature (148)..(157): n is a, c, g, or t
cttggctttatatatcttgtggaaaggacgaaacaccgtaatttctactaagtgtagattgggccaacgatgccaggactaatttctactaagtgtagatcgctgcgaggtgtgtaactataatttctactaagtgtagatttttttnnnnnnnnnnaagcttggcgtggatccgatatcaactagatcttgagacaaatggcagtattcatccacaattttaaaagaaaaggggggattggggggtacagtgcaggggaaagaatagtagacataatagcaacagacatacaaactaaag

SEQ ID NO: 12547 - DNA, 301 bp, Artificial Sequence
  Notch1.1_Zfhx3.2
  crRNA array
  misc_feature (148)..(157): n is a, c, g, or t
cttggctttatatatcttgtggaaaggacgaaacaccgtaatttctactaagtgtagattgggccaacgatgccaggactaatttctactaagtgtagatacgtgcgacacaaaagcaactaatttctactaagtgtagatttttttnnnnnnnnnnaagcttggcgtggatccgatatcaactagatcttgagacaaatggcagtattcatccacaattttaaaagaaaaggggggattggggggtacagtgcaggggaaagaatagtagacataatagcaacagacatacaaactaaag

SEQ ID NO: 12548 - DNA, 301 bp, Artificial Sequence
  Notch1.1_Zfhx3.3
  crRNA array
  misc_feature (148)..(157): n is a, c, g, or t
cttggctttatatatcttgtggaaaggacgaaacaccgtaatttctactaagtgtagattgggccaacgatgccaggactaatttctactaagtgtagattgctctacggcaagaggaaataatttctactaagtgtagatttttttnnnnnnnnnnaagcttggcgtggatccgatatcaactagatcttgagacaaatggcagtattcatccacaattttaaaagaaaaggggggattggggggtacagtgcaggggaaagaatagtagacataatagcaacagacatacaaactaaag

SEQ ID NO: 12549 - DNA, 301 bp, Artificial Sequence
  Notch1.1_Zfhx3.4
  crRNA array
  misc_feature (148)..(157): n is a, c, g, or t
cttggctttatatatcttgtggaaaggacgaaacaccgtaatttctactaagtgtagattgggccaacgatgccaggactaatttctactaagtgtagatagtgagcggcagactgcgagtaatttctactaagtgtagatttttttnnnnnnnnnnaagcttggcgtggatccgatatcaactagatcttgagacaaatggcagtattcatccacaattttaaaagaaaaggggggattggggggtacagtgcaggggaaagaatagtagacataatagcaacagacatacaaactaaag

SEQ ID NO: 12550 - DNA, 301 bp, Artificial Sequence
  Notch1.2_Zfhx3.1
  crRNA array
  misc_feature (148)..(157): n is a, c, g, or t
cttggctttatatatcttgtggaaaggacgaaacaccgtaatttctactaagtgtagatgtcgccccagcatcctgaagtaatttctactaagtgtagatcgctgcgaggtgtgtaactataatttctactaagtgtagatttttttnnnnnnnnnnaagcttggcgtggatccgatatcaactagatcttgagacaaatggcagtattcatccacaattttaaaagaaaaggggggattggggggtacagtgcaggggaaagaatagtagacataatagcaacagacatacaaactaaag

SEQ ID NO: 12551 - DNA, 301 bp, Artificial Sequence
  Notch1.2_Zfhx3.2
  crRNA array
  misc_feature (148)..(157): n is a, c, g, or t
cttggctttatatatcttgtggaaaggacgaaacaccgtaatttctactaagtgtagatgtcgccccagcatcctgaagtaatttctactaagtgtagatacgtgcgacacaaaagcaactaatttctactaagtgtagatttttttnnnnnnnnnnaagcttggcgtggatccgatatcaactagatcttgagacaaatggcagtattcatccacaattttaaaagaaaaggggggattggggggtacagtgcaggggaaagaatagtagacataatagcaacagacatacaaactaaag

SEQ ID NO: 12552 - DNA, 301 bp, Artificial Sequence
  Notch1.2_Zfhx3.3
  crRNA array
  misc_feature (148)..(157): n is a, c, g, or t
cttggctttatatatcttgtggaaaggacgaaacaccgtaatttctactaagtgtagatgtcgccccagcatcctgaagtaatttctactaagtgtagattgctctacggcaagaggaaataatttctactaagtgtagatttttttnnnnnnnnnnaagcttggcgtggatccgatatcaactagatcttgagacaaatggcagtattcatccacaattttaaaagaaaaggggggattggggggtacagtgcaggggaaagaatagtagacataatagcaacagacatacaaactaaag

SEQ ID NO: 12553 - DNA, 301 bp, Artificial Sequence
  Notch1.2_Zfhx3.4
  crRNA array
  misc_feature (148)..(157): n is a, c, g, or t
cttggctttatatatcttgtggaaaggacgaaacaccgtaatttctactaagtgtagatgtcgccccagcatcctgaagtaatttctactaagtgtagatagtgagcggcagactgcgagtaatttctactaagtgtagatttttttnnnnnnnnnnaagcttggcgtggatccgatatcaactagatcttgagacaaatggcagtattcatccacaattttaaaagaaaaggggggattggggggtacagtgcaggggaaagaatagtagacataatagcaacagacatacaaactaaag

SEQ ID NO: 12554 - DNA, 301 bp, Artificial Sequence
  Notch1.3_Zfhx3.1
  crRNA array
  misc_feature (148)..(157): n is a, c, g, or t
cttggctttatatatcttgtggaaaggacgaaacaccgtaatttctactaagtgtagatagccacccccgccacgcctctaatttctactaagtgtagatcgctgcgaggtgtgtaactataatttctactaagtgtagatttttttnnnnnnnnnnaagcttggcgtggatccgatatcaactagatcttgagacaaatggcagtattcatccacaattttaaaagaaaaggggggattggggggtacagtgcaggggaaagaatagtagacataatagcaacagacatacaaactaaag

SEQ ID NO: 12555 - DNA, 301 bp, Artificial Sequence
  Notch1.3_Zfhx3.2
  crRNA array
  misc_feature (148)..(157): n is a, c, g, or t
cttggctttatatatcttgtggaaaggacgaaacaccgtaatttctactaagtgtagatagccacccccgccacgcctctaatttctactaagtgtagatacgtgcgacacaaaagcaactaatttctactaagtgtagatttttttnnnnnnnnnnaagcttggcgtggatccgatatcaactagatcttgagacaaatggcagtattcatccacaattttaaaagaaaaggggggattggggggtacagtgcaggggaaagaatagtagacataatagcaacagacatacaaactaaag

SEQ ID NO: 12556 - DNA, 301 bp, Artificial Sequence
  Notch1.3_Zfhx3.3
  crRNA array
  misc_feature (148)..(157): n is a, c, g, or t
cttggctttatatatcttgtggaaaggacgaaacaccgtaatttctactaagtgtagatagccacccccgccacgcctctaatttctactaagtgtagattgctctacggcaagaggaaataatttctactaagtgtagatttttttnnnnnnnnnnaagcttggcgtggatccgatatcaactagatcttgagacaaatggcagtattcatccacaattttaaaagaaaaggggggattggggggtacagtgcaggggaaagaatagtagacataatagcaacagacatacaaactaaag

SEQ ID NO: 12557 - DNA, 301 bp, Artificial Sequence
  Notch1.3_Zfhx3.4
  crRNA array
  misc_feature (148)..(157): n is a, c, g, or t
cttggctttatatatcttgtggaaaggacgaaacaccgtaatttctactaagtgtagatagccacccccgccacgcctctaatttctactaagtgtagatagtgagcggcagactgcgagtaatttctactaagtgtagatttttttnnnnnnnnnnaagcttggcgtggatccgatatcaactagatcttgagacaaatggcagtattcatccacaattttaaaagaaaaggggggattggggggtacagtgcaggggaaagaatagtagacataatagcaacagacatacaaactaaag

SEQ ID NO: 12558 - DNA, 301 bp, Artificial Sequence
  Notch1.4_Zfhx3.1
  crRNA array
  misc_feature (148)..(157): n is a, c, g, or t
cttggctttatatatcttgtggaaaggacgaaacaccgtaatttctactaagtgtagataaagtgtcagaggccagcaataatttctactaagtgtagatcgctgcgaggtgtgtaactataatttctactaagtgtagatttttttnnnnnnnnnnaagcttggcgtggatccgatatcaactagatcttgagacaaatggcagtattcatccacaattttaaaagaaaaggggggattggggggtacagtgcaggggaaagaatagtagacataatagcaacagacatacaaactaaag

SEQ ID NO: 12559 - DNA, 301 bp, Artificial Sequence
  Notch1.4_Zfhx3.2
  crRNA array
  misc_feature (148)..(157): n is a, c, g, or t
cttggctttatatatcttgtggaaaggacgaaacaccgtaatttctactaagtgtagataaagtgtcagaggccagcaataatttctactaagtgtagatacgtgcgacacaaaagcaactaatttctactaagtgtagatttttttnnnnnnnnnnaagcttggcgtggatccgatatcaactagatcttgagacaaatggcagtattcatccacaattttaaaagaaaaggggggattggggggtacagtgcaggggaaagaatagtagacataatagcaacagacatacaaactaaag

SEQ ID NO: 12560 - DNA, 301 bp, Artificial Sequence
  Notch1.4_Zfhx3.3
  crRNA array
  misc_feature (148)..(157): n is a, c, g, or t
cttggctttatatatcttgtggaaaggacgaaacaccgtaatttctactaagtgtagataaagtgtcagaggccagcaataatttctactaagtgtagattgctctacggcaagaggaaataatttctactaagtgtagatttttttnnnnnnnnnnaagcttggcgtggatccgatatcaactagatcttgagacaaatggcagtattcatccacaattttaaaagaaaaggggggattggggggtacagtgcaggggaaagaatagtagacataatagcaacagacatacaaactaaag

SEQ ID NO: 12561 - DNA, 301 bp, Artificial Sequence
  Notch1.4_Zfhx3.4
  crRNA array
  misc_feature (148)..(157): n is a, c, g, or t
cttggctttatatatcttgtggaaaggacgaaacaccgtaatttctactaagtgtagataaagtgtcagaggccagcaataatttctactaagtgtagatagtgagcggcagactgcgagtaatttctactaagtgtagatttttttnnnnnnnnnnaagcttggcgtggatccgatatcaactagatcttgagacaaatggcagtattcatccacaattttaaaagaaaaggggggattggggggtacagtgcaggggaaagaatagtagacataatagcaacagacatacaaactaaag

SEQ ID NO: 12562 - DNA, 301 bp, Artificial Sequence
  Notch1.1_Crebbp.1
  crRNA array
  misc_feature (148)..(157): n is a, c, g, or t
cttggctttatatatcttgtggaaaggacgaaacaccgtaatttctactaagtgtagattgggccaacgatgccaggactaatttctactaagtgtagatctcacggcggcggcgggccgtaatttctactaagtgtagatttttttnnnnnnnnnnaagcttggcgtggatccgatatcaactagatcttgagacaaatggcagtattcatccacaattttaaaagaaaaggggggattggggggtacagtgcaggggaaagaatagtagacataatagcaacagacatacaaactaaag

SEQ ID NO: 12563 - DNA, 301 bp, Artificial Sequence
  Notch1.1_Crebbp.2
  crRNA array
  misc_feature (148)..(157): n is a, c, g, or t
cttggctttatatatcttgtggaaaggacgaaacaccgtaatttctactaagtgtagattgggccaacgatgccaggactaatttctactaagtgtagatcgcgagcaggtgaagatggctaatttctactaagtgtagatttttttnnnnnnnnnnaagcttggcgtggatccgatatcaactagatcttgagacaaatggcagtattcatccacaattttaaaagaaaaggggggattggggggtacagtgcaggggaaagaatagtagacataatagcaacagacatacaaactaaag

SEQ ID NO: 12564 - DNA, 301 bp, Artificial Sequence
  Notch1.1_Crebbp.3
  crRNA array
  misc_feature (148)..(157): n is a, c, g, or t
cttggctttatatatcttgtggaaaggacgaaacaccgtaatttctactaagtgtagattgggccaacgatgccaggactaatttctactaagtgtagatggctccgccgcccgcccgcgtaatttctactaagtgtagatttttttnnnnnnnnnnaagcttggcgtggatccgatatcaactagatcttgagacaaatggcagtattcatccacaattttaaaagaaaaggggggattggggggtacagtgcaggggaaagaatagtagacataatagcaacagacatacaaactaaag

SEQ ID NO: 12565 - DNA, 301 bp, Artificial Sequence
  Notch1.1_Crebbp.4
  crRNA array
  misc_feature (148)..(157): n is a, c, g, or t
cttggctttatatatcttgtggaaaggacgaaacaccgtaatttctactaagtgtagattgggccaacgatgccaggactaatttctactaagtgtagattggactagatgactccgtagtaatttctactaagtgtagatttttttnnnnnnnnnnaagcttggcgtggatccgatatcaactagatcttgagacaaatggcagtattcatccacaattttaaaagaaaaggggggattggggggtacagtgcaggggaaagaatagtagacataatagcaacagacatacaaactaaag

SEQ ID NO: 12566 - DNA, 301 bp, Artificial Sequence
  Notch1.2_Crebbp.1
  crRNA array
  misc_feature (148)..(157): n is a, c, g, or t
cttggctttatatatcttgtggaaaggacgaaacaccgtaatttctactaagtgtagatgtcgccccagcatcctgaagtaatttctactaagtgtagatctcacggcggcggcgggccgtaatttctactaagtgtagatttttttnnnnnnnnnnaagcttggcgtggatccgatatcaactagatcttgagacaaatggcagtattcatccacaattttaaaagaaaaggggggattggggggtacagtgcaggggaaagaatagtagacataatagcaacagacatacaaactaaag

SEQ ID NO: 12567 - DNA, 301 bp, Artificial Sequence
  Notch1.2_Crebbp.2
  crRNA array
  misc_feature (148)..(157): n is a, c, g, or t
cttggctttatatatcttgtggaaaggacgaaacaccgtaatttctactaagtgtagatgtcgccccagcatcctgaagtaatttctactaagtgtagatcgcgagcaggtgaagatggctaatttctactaagtgtagatttttttnnnnnnnnnnaagcttggcgtggatccgatatcaactagatcttgagacaaatggcagtattcatccacaattttaaaagaaaaggggggattggggggtacagtgcaggggaaagaatagtagacataatagcaacagacatacaaactaaag

SEQ ID NO: 12568 - DNA, 301 bp, Artificial Sequence
  Notch1.2_Crebbp.3
  crRNA array
  misc_feature (148)..(157): n is a, c, g, or t
cttggctttatatatcttgtggaaaggacgaaacaccgtaatttctactaagtgtagatgtcgccccagcatcctgaagtaatttctactaagtgtagatggctccgccgcccgcccgcgtaatttctactaagtgtagatttttttnnnnnnnnnnaagcttggcgtggatccgatatcaactagatcttgagacaaatggcagtattcatccacaattttaaaagaaaaggggggattggggggtacagtgcaggggaaagaatagtagacataatagcaacagacatacaaactaaag

SEQ ID NO: 12569 - DNA, 301 bp, Artificial Sequence
  Notch1.2_Crebbp.4
  crRNA array
  misc_feature (148)..(157): n is a, c, g, or t
cttggctttatatatcttgtggaaaggacgaaacaccgtaatttctactaagtgtagatgtcgccccagcatcctgaagtaatttctactaagtgtagattggactagatgactccgtagtaatttctactaagtgtagatttttttnnnnnnnnnnaagcttggcgtggatccgatatcaactagatcttgagacaaatggcagtattcatccacaattttaaaagaaaaggggggattggggggtacagtgcaggggaaagaatagtagacataatagcaacagacatacaaactaaag

SEQ ID NO: 12570 - DNA, 301 bp, Artificial Sequence
  Notch1.3_Crebbp.1
  crRNA array
  misc_feature (148)..(157): n is a, c, g, or t
cttggctttatatatcttgtggaaaggacgaaacaccgtaatttctactaagtgtagatagccacccccgccacgcctctaatttctactaagtgtagatctcacggcggcggcgggccgtaatttctactaagtgtagatttttttnnnnnnnnnnaagcttggcgtggatccgatatcaactagatcttgagacaaatggcagtattcatccacaattttaaaagaaaaggggggattggggggtacagtgcaggggaaagaatagtagacataatagcaacagacatacaaactaaag

SEQ ID NO: 12571 - DNA, 301 bp, Artificial Sequence
  Notch1.3_Crebbp.2
  crRNA array
  misc_feature (148)..(157): n is a, c, g, or t
cttggctttatatatcttgtggaaaggacgaaacaccgtaatttctactaagtgtagatagccacccccgccacgcctctaatttctactaagtgtagatcgcgagcaggtgaagatggctaatttctactaagtgtagatttttttnnnnnnnnnnaagcttggcgtggatccgatatcaactagatcttgagacaaatggcagtattcatccacaattttaaaagaaaaggggggattggggggtacagtgcaggggaaagaatagtagacataatagcaacagacatacaaactaaag

SEQ ID NO: 12572 - DNA, 301 bp, Artificial Sequence
  Notch1.3_Crebbp.3
  crRNA array
  misc_feature (148)..(157): n is a, c, g, or t
cttggctttatatatcttgtggaaaggacgaaacaccgtaatttctactaagtgtagatagccacccccgccacgcctctaatttctactaagtgtagatggctccgccgcccgcccgcgtaatttctactaagtgtagatttttttnnnnnnnnnnaagcttggcgtggatccgatatcaactagatcttgagacaaatggcagtattcatccacaattttaaaagaaaaggggggattggggggtacagtgcaggggaaagaatagtagacataatagcaacagacatacaaactaaag

SEQ ID NO: 12573 - DNA, 301 bp, Artificial Sequence
  Notch1.3_Crebbp.4
  crRNA array
  misc_feature (148)..(157): n is a, c, g, or t
cttggctttatatatcttgtggaaaggacgaaacaccgtaatttctactaagtgtagatagccacccccgccacgcctctaatttctactaagtgtagattggactagatgactccgtagtaatttctactaagtgtagatttttttnnnnnnnnnnaagcttggcgtggatccgatatcaactagatcttgagacaaatggcagtattcatccacaattttaaaagaaaaggggggattggggggtacagtgcaggggaaagaatagtagacataatagcaacagacatacaaactaaag

SEQ ID NO: 12574 - DNA, 301 bp, Artificial Sequence
  Notch1.4_Crebbp.1
  crRNA array
  misc_feature (148)..(157): n is a, c, g, or t
cttggctttatatatcttgtggaaaggacgaaacaccgtaatttctactaagtgtagataaagtgtcagaggccagcaataatttctactaagtgtagatctcacggcggcggcgggccgtaatttctactaagtgtagatttttttnnnnnnnnnnaagcttggcgtggatccgatatcaactagatcttgagacaaatggcagtattcatccacaattttaaaagaaaaggggggattggggggtacagtgcaggggaaagaatagtagacataatagcaacagacatacaaactaaag

SEQ ID NO: 12575 - DNA, 301 bp, Artificial Sequence
  Notch1.4_Crebbp.2
  crRNA array
  misc_feature (148)..(157): n is a, c, g, or t
cttggctttatatatcttgtggaaaggacgaaacaccgtaatttctactaagtgtagataaagtgtcagaggccagcaataatttctactaagtgtagatcgcgagcaggtgaagatggctaatttctactaagtgtagatttttttnnnnnnnnnnaagcttggcgtggatccgatatcaactagatcttgagacaaatggcagtattcatccacaattttaaaagaaaaggggggattggggggtacagtgcaggggaaagaatagtagacataatagcaacagacatacaaactaaag

SEQ ID NO: 12576 - DNA, 301 bp, Artificial Sequence
  Notch1.4_Crebbp.3
  crRNA array
  misc_feature (148)..(157): n is a, c, g, or t
cttggctttatatatcttgtggaaaggacgaaacaccgtaatttctactaagtgtagataaagtgtcagaggccagcaataatttctactaagtgtagatggctccgccgcccgcccgcgtaatttctactaagtgtagatttttttnnnnnnnnnnaagcttggcgtggatccgatatcaactagatcttgagacaaatggcagtattcatccacaattttaaaagaaaaggggggattggggggtacagtgcaggggaaagaatagtagacataatagcaacagacatacaaactaaag

SEQ ID NO: 12577 - DNA, 301 bp, Artificial Sequence
  Notch1.4_Crebbp.4
  crRNA array
  misc_feature (148)..(157): n is a, c, g, or t
cttggctttatatatcttgtggaaaggacgaaacaccgtaatttctactaagtgtagataaagtgtcagaggccagcaataatttctactaagtgtagattggactagatgactccgtagtaatttctactaagtgtagatttttttnnnnnnnnnnaagcttggcgtggatccgatatcaactagatcttgagacaaatggcagtattcatccacaattttaaaagaaaaggggggattggggggtacagtgcaggggaaagaatagtagacataatagcaacagacatacaaactaaag

SEQ ID NO: 12578 - DNA, 301 bp, Artificial Sequence
  Notch1.1_Cdkn2a.1
  crRNA array
  misc_feature (148)..(157): n is a, c, g, or t
cttggctttatatatcttgtggaaaggacgaaacaccgtaatttctactaagtgtagattgggccaacgatgccaggactaatttctactaagtgtagatcaatcacgggagggagcagataatttctactaagtgtagatttttttnnnnnnnnnnaagcttggcgtggatccgatatcaactagatcttgagacaaatggcagtattcatccacaattttaaaagaaaaggggggattggggggtacagtgcaggggaaagaatagtagacataatagcaacagacatacaaactaaag

SEQ ID NO: 12579 - DNA, 301 bp, Artificial Sequence
  Notch1.1_Cdkn2a.2
  crRNA array
  misc_feature (148)..(157): n is a, c, g, or t
cttggctttatatatcttgtggaaaggacgaaacaccgtaatttctactaagtgtagattgggccaacgatgccaggactaatttctactaagtgtagatgcccaacgccccgaactctttaatttctactaagtgtagatttttttnnnnnnnnnnaagcttggcgtggatccgatatcaactagatcttgagacaaatggcagtattcatccacaattttaaaagaaaaggggggattggggggtacagtgcaggggaaagaatagtagacataatagcaacagacatacaaactaaag

SEQ ID NO: 12580 - DNA, 301 bp, Artificial Sequence
  Notch1.1_Cdkn2a.3
  crRNA array
  misc_feature (148)..(157): n is a, c, g, or t
cttggctttatatatcttgtggaaaggacgaaacaccgtaatttctactaagtgtagattgggccaacgatgccaggactaatttctactaagtgtagattgtaccgctgggaacgtcgctaatttctactaagtgtagatttttttnnnnnnnnnnaagcttggcgtggatccgatatcaactagatcttgagacaaatggcagtattcatccacaattttaaaagaaaaggggggattggggggtacagtgcaggggaaagaatagtagacataatagcaacagacatacaaactaaag

SEQ ID NO: 12581 - DNA, 301 bp, Artificial Sequence
  Notch1.1_Cdkn2a.4
  crRNA array
  misc_feature (148)..(157): n is a, c, g, or t
cttggctttatatatcttgtggaaaggacgaaacaccgtaatttctactaagtgtagattgggccaacgatgccaggactaatttctactaagtgtagataagccacatgctagacacgctaatttctactaagtgtagatttttttnnnnnnnnnnaagcttggcgtggatccgatatcaactagatcttgagacaaatggcagtattcatccacaattttaaaagaaaaggggggattggggggtacagtgcaggggaaagaatagtagacataatagcaacagacatacaaactaaag

SEQ ID NO: 12582 - DNA, 301 bp, Artificial Sequence
  Notch1.2_Cdkn2a.1
  crRNA array
  misc_feature (148)..(157): n is a, c, g, or t
cttggctttatatatcttgtggaaaggacgaaacaccgtaatttctactaagtgtagatgtcgccccagcatcctgaagtaatttctactaagtgtagatcaatcacgggagggagcagataatttctactaagtgtagatttttttnnnnnnnnnnaagcttggcgtggatccgatatcaactagatcttgagacaaatggcagtattcatccacaattttaaaagaaaaggggggattggggggtacagtgcaggggaaagaatagtagacataatagcaacagacatacaaactaaag

SEQ ID NO: 12583 - DNA, 301 bp, Artificial Sequence
  Notch1.2_Cdkn2a.2
  crRNA array
  misc_feature (148)..(157): n is a, c, g, or t
cttggctttatatatcttgtggaaaggacgaaacaccgtaatttctactaagtgtagatgtcgccccagcatcctgaagtaatttctactaagtgtagatgcccaacgccccgaactctttaatttctactaagtgtagatttttttnnnnnnnnnnaagcttggcgtggatccgatatcaactagatcttgagacaaatggcagtattcatccacaattttaaaagaaaaggggggattggggggtacagtgcaggggaaagaatagtagacataatagcaacagacatacaaactaaag

SEQ ID NO: 12584 - DNA, 301 bp, Artificial Sequence
  Notch1.2_Cdkn2a.3
  crRNA array
  misc_feature (148)..(157): n is a, c, g, or t
cttggctttatatatcttgtggaaaggacgaaacaccgtaatttctactaagtgtagatgtcgccccagcatcctgaagtaatttctactaagtgtagattgtaccgctgggaacgtcgctaatttctactaagtgtagatttttttnnnnnnnnnnaagcttggcgtggatccgatatcaactagatcttgagacaaatggcagtattcatccacaattttaaaagaaaaggggggattggggggtacagtgcaggggaaagaatagtagacataatagcaacagacatacaaactaaag

SEQ ID NO: 12585 - DNA, 301 bp, Artificial Sequence
  Notch1.2_Cdkn2a.4
  crRNA array
  misc_feature (148)..(157): n is a, c, g, or t
cttggctttatatatcttgtggaaaggacgaaacaccgtaatttctactaagtgtagatgtcgccccagcatcctgaagtaatttctactaagtgtagataagccacatgctagacacgctaatttctactaagtgtagatttttttnnnnnnnnnnaagcttggcgtggatccgatatcaactagatcttgagacaaatggcagtattcatccacaattttaaaagaaaaggggggattggggggtacagtgcaggggaaagaatagtagacataatagcaacagacatacaaactaaag

SEQ ID NO: 12586 - DNA, 301 bp, Artificial Sequence
  Notch1.3_Cdkn2a.1
  crRNA array
  misc_feature (148)..(157): n is a, c, g, or t
cttggctttatatatcttgtggaaaggacgaaacaccgtaatttctactaagtgtagatagccacccccgccacgcctctaatttctactaagtgtagatcaatcacgggagggagcagataatttctactaagtgtagatttttttnnnnnnnnnnaagcttggcgtggatccgatatcaactagatcttgagacaaatggcagtattcatccacaattttaaaagaaaaggggggattggggggtacagtgcaggggaaagaatagtagacataatagcaacagacatacaaactaaag

SEQ ID NO: 12587 - DNA, 301 bp, Artificial Sequence
  Notch1.3_Cdkn2a.2
  crRNA array
  misc_feature (148)..(157): n is a, c, g, or t
cttggctttatatatcttgtggaaaggacgaaacaccgtaatttctactaagtgtagatagccacccccgccacgcctctaatttctactaagtgtagatgcccaacgccccgaactctttaatttctactaagtgtagatttttttnnnnnnnnnnaagcttggcgtggatccgatatcaactagatcttgagacaaatggcagtattcatccacaattttaaaagaaaaggggggattggggggtacagtgcaggggaaagaatagtagacataatagcaacagacatacaaactaaag

SEQ ID NO: 12588 - DNA, 301 bp, Artificial Sequence
  Notch1.3_Cdkn2a.3
  crRNA array
  misc_feature (148)..(157): n is a, c, g, or t
cttggctttatatatcttgtggaaaggacgaaacaccgtaatttctactaagtgtagatagccacccccgccacgcctctaatttctactaagtgtagattgtaccgctgggaacgtcgctaatttctactaagtgtagatttttttnnnnnnnnnnaagcttggcgtggatccgatatcaactagatcttgagacaaatggcagtattcatccacaattttaaaagaaaaggggggattggggggtacagtgcaggggaaagaatagtagacataatagcaacagacatacaaactaaag

SEQ ID NO: 12589 - DNA, 301 bp, Artificial Sequence
  Notch1.3_Cdkn2a.4
  crRNA array
  misc_feature (148)..(157): n is a, c, g, or t
cttggctttatatatcttgtggaaaggacgaaacaccgtaatttctactaagtgtagatagccacccccgccacgcctctaatttctactaagtgtagataagccacatgctagacacgctaatttctactaagtgtagatttttttnnnnnnnnnnaagcttggcgtggatccgatatcaactagatcttgagacaaatggcagtattcatccacaattttaaaagaaaaggggggattggggggtacagtgcaggggaaagaatagtagacataatagcaacagacatacaaactaaag

SEQ ID NO: 12590 - DNA, 301 bp, Artificial Sequence
  Notch1.4_Cdkn2a.1
  crRNA array
  misc_feature (148)..(157): n is a, c, g, or t
cttggctttatatatcttgtggaaaggacgaaacaccgtaatttctactaagtgtagataaagtgtcagaggccagcaataatttctactaagtgtagatcaatcacgggagggagcagataatttctactaagtgtagatttttttnnnnnnnnnnaagcttggcgtggatccgatatcaactagatcttgagacaaatggcagtattcatccacaattttaaaagaaaaggggggattggggggtacagtgcaggggaaagaatagtagacataatagcaacagacatacaaactaaag

SEQ ID NO: 12591 - DNA, 301 bp, Artificial Sequence
  Notch1.4_Cdkn2a.2
  crRNA array
  misc_feature (148)..(157): n is a, c, g, or t
cttggctttatatatcttgtggaaaggacgaaacaccgtaatttctactaagtgtagataaagtgtcagaggccagcaataatttctactaagtgtagatgcccaacgccccgaactctttaatttctactaagtgtagatttttttnnnnnnnnnnaagcttggcgtggatccgatatcaactagatcttgagacaaatggcagtattcatccacaattttaaaagaaaaggggggattggggggtacagtgcaggggaaagaatagtagacataatagcaacagacatacaaactaaag

SEQ ID NO: 12592 - DNA, 301 bp, Artificial Sequence
  Notch1.4_Cdkn2a.3
  crRNA array
  misc_feature (148)..(157): n is a, c, g, or t
cttggctttatatatcttgtggaaaggacgaaacaccgtaatttctactaagtgtagataaagtgtcagaggccagcaataatttctactaagtgtagattgtaccgctgggaacgtcgctaatttctactaagtgtagatttttttnnnnnnnnnnaagcttggcgtggatccgatatcaactagatcttgagacaaatggcagtattcatccacaattttaaaagaaaaggggggattggggggtacagtgcaggggaaagaatagtagacataatagcaacagacatacaaactaaag

SEQ ID NO: 12593 - DNA, 301 bp, Artificial Sequence
  Notch1.4_Cdkn2a.4
  crRNA array
  misc_feature (148)..(157): n is a, c, g, or t
cttggctttatatatcttgtggaaaggacgaaacaccgtaatttctactaagtgtagataaagtgtcagaggccagcaataatttctactaagtgtagataagccacatgctagacacgctaatttctactaagtgtagatttttttnnnnnnnnnnaagcttggcgtggatccgatatcaactagatcttgagacaaatggcagtattcatccacaattttaaaagaaaaggggggattggggggtacagtgcaggggaaagaatagtagacataatagcaacagacatacaaactaaag

SEQ ID NO: 12594 - DNA, 301 bp, Artificial Sequence
  Notch1.1_Wrn.1
  crRNA array
  misc_feature (148)..(157): n is a, c, g, or t
cttggctttatatatcttgtggaaaggacgaaacaccgtaatttctactaagtgtagattgggccaacgatgccaggactaatttctactaagtgtagatgcaaaccactcgggtaattttaatttctactaagtgtagatttttttnnnnnnnnnnaagcttggcgtggatccgatatcaactagatcttgagacaaatggcagtattcatccacaattttaaaagaaaaggggggattggggggtacagtgcaggggaaagaatagtagacataatagcaacagacatacaaactaaag

SEQ ID NO: 12595 - DNA, 301 bp, Artificial Sequence
  Notch1.1_Wrn.2
  crRNA array
  misc_feature (148)..(157): n is a, c, g, or t
cttggctttatatatcttgtggaaaggacgaaacaccgtaatttctactaagtgtagattgggccaacgatgccaggactaatttctactaagtgtagatgccatgtccagcagaacctttaatttctactaagtgtagatttttttnnnnnnnnnnaagcttggcgtggatccgatatcaactagatcttgagacaaatggcagtattcatccacaattttaaaagaaaaggggggattggggggtacagtgcaggggaaagaatagtagacataatagcaacagacatacaaactaaag

SEQ ID NO: 12596 - DNA, 301 bp, Artificial Sequence
  Notch1.1_Wrn.3
  crRNA array
  misc_feature (148)..(157): n is a, c, g, or t
cttggctttatatatcttgtggaaaggacgaaacaccgtaatttctactaagtgtagattgggccaacgatgccaggactaatttctactaagtgtagatctgcagcaggccaccgcaattaatttctactaagtgtagatttttttnnnnnnnnnnaagcttggcgtggatccgatatcaactagatcttgagacaaatggcagtattcatccacaattttaaaagaaaaggggggattggggggtacagtgcaggggaaagaatagtagacataatagcaacagacatacaaactaaag

SEQ ID NO: 12597 - DNA, 301 bp, Artificial Sequence
  Notch1.1_Wrn.4
  crRNA array
  misc_feature (148)..(157): n is a, c, g, or t
cttggctttatatatcttgtggaaaggacgaaacaccgtaatttctactaagtgtagattgggccaacgatgccaggactaatttctactaagtgtagattcgaaggacaatagatgatgtaatttctactaagtgtagatttttttnnnnnnnnnnaagcttggcgtggatccgatatcaactagatcttgagacaaatggcagtattcatccacaattttaaaagaaaaggggggattggggggtacagtgcaggggaaagaatagtagacataatagcaacagacatacaaactaaag

SEQ ID NO: 12598 - DNA, 301 bp, Artificial Sequence
  Notch1.2_Wrn.1
  crRNA array
  misc_feature (148)..(157): n is a, c, g, or t
cttggctttatatatcttgtggaaaggacgaaacaccgtaatttctactaagtgtagatgtcgccccagcatcctgaagtaatttctactaagtgtagatgcaaaccactcgggtaattttaatttctactaagtgtagatttttttnnnnnnnnnnaagcttggcgtggatccgatatcaactagatcttgagacaaatggcagtattcatccacaattttaaaagaaaaggggggattggggggtacagtgcaggggaaagaatagtagacataatagcaacagacatacaaactaaag

SEQ ID NO: 12599 - DNA, 301 bp, Artificial Sequence
  Notch1.2_Wrn.2
  crRNA array
  misc_feature (148)..(157): n is a, c, g, or t
cttggctttatatatcttgtggaaaggacgaaacaccgtaatttctactaagtgtagatgtcgccccagcatcctgaagtaatttctactaagtgtagatgccatgtccagcagaacctttaatttctactaagtgtagatttttttnnnnnnnnnnaagcttggcgtggatccgatatcaactagatcttgagacaaatggcagtattcatccacaattttaaaagaaaaggggggattggggggtacagtgcaggggaaagaatagtagacataatagcaacagacatacaaactaaag

SEQ ID NO: 12600 - DNA, 301 bp, Artificial Sequence
  Notch1.2_Wrn.3
  crRNA array
  misc_feature (148)..(157): n is a, c, g, or t
cttggctttatatatcttgtggaaaggacgaaacaccgtaatttctactaagtgtagatgtcgccccagcatcctgaagtaatttctactaagtgtagatctgcagcaggccaccgcaattaatttctactaagtgtagatttttttnnnnnnnnnnaagcttggcgtggatccgatatcaactagatcttgagacaaatggcagtattcatccacaattttaaaagaaaaggggggattggggggtacagtgcaggggaaagaatagtagacataatagcaacagacatacaaactaaag

SEQ ID NO: 12601 - DNA, 301 bp, Artificial Sequence
  Notch1.2_Wrn.4
  crRNA array
  misc_feature (148)..(157): n is a, c, g, or t
cttggctttatatatcttgtggaaaggacgaaacaccgtaatttctactaagtgtagatgtcgccccagcatcctgaagtaatttctactaagtgtagattcgaaggacaatagatgatgtaatttctactaagtgtagatttttttnnnnnnnnnnaagcttggcgtggatccgatatcaactagatcttgagacaaatggcagtattcatccacaattttaaaagaaaaggggggattggggggtacagtgcaggggaaagaatagtagacataatagcaacagacatacaaactaaag

SEQ ID NO: 12602 - DNA, 301 bp, Artificial Sequence
  Notch1.3_Wrn.1
  crRNA array
  misc_feature (148)..(157): n is a, c, g, or t
cttggctttatatatcttgtggaaaggacgaaacaccgtaatttctactaagtgtagatagccacccccgccacgcctctaatttctactaagtgtagatgcaaaccactcgggtaattttaatttctactaagtgtagatttttttnnnnnnnnnnaagcttggcgtggatccgatatcaactagatcttgagacaaatggcagtattcatccacaattttaaaagaaaaggggggattggggggtacagtgcaggggaaagaatagtagacataatagcaacagacatacaaactaaag

SEQ ID NO: 12603 - DNA, 301 bp, Artificial Sequence
  Notch1.3_Wrn.2
  crRNA array
  misc_feature (148)..(157): n is a, c, g, or t
cttggctttatatatcttgtggaaaggacgaaacaccgtaatttctactaagtgtagatagccacccccgccacgcctctaatttctactaagtgtagatgccatgtccagcagaacctttaatttctactaagtgtagatttttttnnnnnnnnnnaagcttggcgtggatccgatatcaactagatcttgagacaaatggcagtattcatccacaattttaaaagaaaaggggggattggggggtacagtgcaggggaaagaatagtagacataatagcaacagacatacaaactaaag

SEQ ID NO: 12604 - DNA, 301 bp, Artificial Sequence
  Notch1.3_Wrn.3
  crRNA array
  misc_feature (148)..(157): n is a, c, g, or t
cttggctttatatatcttgtggaaaggacgaaacaccgtaatttctactaagtgtagatagccacccccgccacgcctctaatttctactaagtgtagatctgcagcaggccaccgcaattaatttctactaagtgtagatttttttnnnnnnnnnnaagcttggcgtggatccgatatcaactagatcttgagacaaatggcagtattcatccacaattttaaaagaaaaggggggattggggggtacagtgcaggggaaagaatagtagacataatagcaacagacatacaaactaaag

SEQ ID NO: 12605 - DNA, 301 bp, Artificial Sequence
  Notch1.3_Wrn.4
  crRNA array
  misc_feature (148)..(157): n is a, c, g, or t
cttggctttatatatcttgtggaaaggacgaaacaccgtaatttctactaagtgtagatagccacccccgccacgcctctaatttctactaagtgtagattcgaaggacaatagatgatgtaatttctactaagtgtagatttttttnnnnnnnnnnaagcttggcgtggatccgatatcaactagatcttgagacaaatggcagtattcatccacaattttaaaagaaaaggggggattggggggtacagtgcaggggaaagaatagtagacataatagcaacagacatacaaactaaag

SEQ ID NO: 12606 - DNA, 301 bp, Artificial Sequence
  Notch1.4_Wrn.1
  crRNA array
  misc_feature (148)..(157): n is a, c, g, or t
cttggctttatatatcttgtggaaaggacgaaacaccgtaatttctactaagtgtagataaagtgtcagaggccagcaataatttctactaagtgtagatgcaaaccactcgggtaattttaatttctactaagtgtagatttttttnnnnnnnnnnaagcttggcgtggatccgatatcaactagatcttgagacaaatggcagtattcatccacaattttaaaagaaaaggggggattggggggtacagtgcaggggaaagaatagtagacataatagcaacagacatacaaactaaag

SEQ ID NO: 12607 - DNA, 301 bp, Artificial Sequence
  Notch1.4_Wrn.2
  crRNA array
  misc_feature (148)..(157): n is a, c, g, or t
cttggctttatatatcttgtggaaaggacgaaacaccgtaatttctactaagtgtagataaagtgtcagaggccagcaataatttctactaagtgtagatgccatgtccagcagaacctttaatttctactaagtgtagatttttttnnnnnnnnnnaagcttggcgtggatccgatatcaactagatcttgagacaaatggcagtattcatccacaattttaaaagaaaaggggggattggggggtacagtgcaggggaaagaatagtagacataatagcaacagacatacaaactaaag

SEQ ID NO: 12608 - DNA, 301 bp, Artificial Sequence
  Notch1.4_Wrn.3
  crRNA array
  misc_feature (148)..(157): n is a, c, g, or t
cttggctttatatatcttgtggaaaggacgaaacaccgtaatttctactaagtgtagataaagtgtcagaggccagcaataatttctactaagtgtagatctgcagcaggccaccgcaattaatttctactaagtgtagatttttttnnnnnnnnnnaagcttggcgtggatccgatatcaactagatcttgagacaaatggcagtattcatccacaattttaaaagaaaaggggggattggggggtacagtgcaggggaaagaatagtagacataatagcaacagacatacaaactaaag

SEQ ID NO: 12609 - DNA, 301 bp, Artificial Sequence
  Notch1.4_Wrn.4
  crRNA array
  misc_feature (148)..(157): n is a, c, g, or t
cttggctttatatatcttgtggaaaggacgaaacaccgtaatttctactaagtgtagataaagtgtcagaggccagcaataatttctactaagtgtagattcgaaggacaatagatgatgtaatttctactaagtgtagatttttttnnnnnnnnnnaagcttggcgtggatccgatatcaactagatcttgagacaaatggcagtattcatccacaattttaaaagaaaaggggggattggggggtacagtgcaggggaaagaatagtagacataatagcaacagacatacaaactaaag

SEQ ID NO: 12610 - DNA, 301 bp, Artificial Sequence
  Notch1.1_Brca2.1
  crRNA array
  misc_feature (148)..(157): n is a, c, g, or t
cttggctttatatatcttgtggaaaggacgaaacaccgtaatttctactaagtgtagattgggccaacgatgccaggactaatttctactaagtgtagatctaagcgtagaaccagaaattaatttctactaagtgtagatttttttnnnnnnnnnnaagcttggcgtggatccgatatcaactagatcttgagacaaatggcagtattcatccacaattttaaaagaaaaggggggattggggggtacagtgcaggggaaagaatagtagacataatagcaacagacatacaaactaaag

SEQ ID NO: 12611 - DNA, 301 bp, Artificial Sequence
  Notch1.1_Brca2.2
  crRNA array
  misc_feature (148)..(157): n is a, c, g, or t
cttggctttatatatcttgtggaaaggacgaaacaccgtaatttctactaagtgtagattgggccaacgatgccaggactaatttctactaagtgtagatgatccaggtgtaacaagccataatttctactaagtgtagatttttttnnnnnnnnnnaagcttggcgtggatccgatatcaactagatcttgagacaaatggcagtattcatccacaattttaaaagaaaaggggggattggggggtacagtgcaggggaaagaatagtagacataatagcaacagacatacaaactaaag

SEQ ID NO: 12612 - DNA, 301 bp, Artificial Sequence
  Notch1.1_Brca2.3
  crRNA array
  misc_feature (148)..(157): n is a, c, g, or t
cttggctttatatatcttgtggaaaggacgaaacaccgtaatttctactaagtgtagattgggccaacgatgccaggactaatttctactaagtgtagattgaatataaactgggccacttaatttctactaagtgtagatttttttnnnnnnnnnnaagcttggcgtggatccgatatcaactagatcttgagacaaatggcagtattcatccacaattttaaaagaaaaggggggattggggggtacagtgcaggggaaagaatagtagacataatagcaacagacatacaaactaaag

SEQ ID NO: 12613 - DNA, 301 bp, Artificial Sequence
  Notch1.1_Brca2.4
  crRNA array
  misc_feature (148)..(157): n is a, c, g, or t
cttggctttatatatcttgtggaaaggacgaaacaccgtaatttctactaagtgtagattgggccaacgatgccaggactaatttctactaagtgtagatgaaacgccgtatatatagagtaatttctactaagtgtagatttttttnnnnnnnnnnaagcttggcgtggatccgatatcaactagatcttgagacaaatggcagtattcatccacaattttaaaagaaaaggggggattggggggtacagtgcaggggaaagaatagtagacataatagcaacagacatacaaactaaag

SEQ ID NO: 12614 - DNA, 301 bp, Artificial Sequence
  Notch1.2_Brca2.1
  crRNA array
  misc_feature (148)..(157): n is a, c, g, or t
cttggctttatatatcttgtggaaaggacgaaacaccgtaatttctactaagtgtagatgtcgccccagcatcctgaagtaatttctactaagtgtagatctaagcgtagaaccagaaattaatttctactaagtgtagatttttttnnnnnnnnnnaagcttggcgtggatccgatatcaactagatcttgagacaaatggcagtattcatccacaattttaaaagaaaaggggggattggggggtacagtgcaggggaaagaatagtagacataatagcaacagacatacaaactaaag

SEQ ID NO: 12615 - DNA, 301 bp, Artificial Sequence
  Notch1.2_Brca2.2
  crRNA array
  misc_feature (148)..(157): n is a, c, g, or t
cttggctttatatatcttgtggaaaggacgaaacaccgtaatttctactaagtgtagatgtcgccccagcatcctgaagtaatttctactaagtgtagatgatccaggtgtaacaagccataatttctactaagtgtagatttttttnnnnnnnnnnaagcttggcgtggatccgatatcaactagatcttgagacaaatggcagtattcatccacaattttaaaagaaaaggggggattggggggtacagtgcaggggaaagaatagtagacataatagcaacagacatacaaactaaag

SEQ ID NO: 12616 - DNA, 301 bp, Artificial Sequence
  Notch1.2_Brca2.3
  crRNA array
  misc_feature (148)..(157): n is a, c, g, or t
cttggctttatatatcttgtggaaaggacgaaacaccgtaatttctactaagtgtagatgtcgccccagcatcctgaagtaatttctactaagtgtagattgaatataaactgggccacttaatttctactaagtgtagatttttttnnnnnnnnnnaagcttggcgtggatccgatatcaactagatcttgagacaaatggcagtattcatccacaattttaaaagaaaaggggggattggggggtacagtgcaggggaaagaatagtagacataatagcaacagacatacaaactaaag

SEQ ID NO: 12617 - DNA, 301 bp, Artificial Sequence
  Notch1.2_Brca2.4
  crRNA array
  misc_feature (148)..(157): n is a, c, g, or t
cttggctttatatatcttgtggaaaggacgaaacaccgtaatttctactaagtgtagatgtcgccccagcatcctgaagtaatttctactaagtgtagatgaaacgccgtatatatagagtaatttctactaagtgtagatttttttnnnnnnnnnnaagcttggcgtggatccgatatcaactagatcttgagacaaatggcagtattcatccacaattttaaaagaaaaggggggattggggggtacagtgcaggggaaagaatagtagacataatagcaacagacatacaaactaaag

SEQ ID NO: 12618 - DNA, 301 bp, Artificial Sequence
  Notch1.3_Brca2.1
  crRNA array
  misc_feature (148)..(157): n is a, c, g, or t
cttggctttatatatcttgtggaaaggacgaaacaccgtaatttctactaagtgtagatagccacccccgccacgcctctaatttctactaagtgtagatctaagcgtagaaccagaaattaatttctactaagtgtagatttttttnnnnnnnnnnaagcttggcgtggatccgatatcaactagatcttgagacaaatggcagtattcatccacaattttaaaagaaaaggggggattggggggtacagtgcaggggaaagaatagtagacataatagcaacagacatacaaactaaag

SEQ ID NO: 12619 - DNA, 301 bp, Artificial Sequence
  Notch1.3_Brca2.2
  crRNA array
  misc_feature (148)..(157): n is a, c, g, or t
cttggctttatatatcttgtggaaaggacgaaacaccgtaatttctactaagtgtagatagccacccccgccacgcctctaatttctactaagtgtagatgatccaggtgtaacaagccataatttctactaagtgtagatttttttnnnnnnnnnnaagcttggcgtggatccgatatcaactagatcttgagacaaatggcagtattcatccacaattttaaaagaaaaggggggattggggggtacagtgcaggggaaagaatagtagacataatagcaacagacatacaaactaaag

SEQ ID NO: 12620 - DNA, 301 bp, Artificial Sequence
  Notch1.3_Brca2.3
  crRNA array
  misc_feature (148)..(157): n is a, c, g, or t
cttggctttatatatcttgtggaaaggacgaaacaccgtaatttctactaagtgtagatagccacccccgccacgcctctaatttctactaagtgtagattgaatataaactgggccacttaatttctactaagtgtagatttttttnnnnnnnnnnaagcttggcgtggatccgatatcaactagatcttgagacaaatggcagtattcatccacaattttaaaagaaaaggggggattggggggtacagtgcaggggaaagaatagtagacataatagcaacagacatacaaactaaag

SEQ ID NO: 12621 - DNA, 301 bp, Artificial Sequence
  Notch1.3_Brca2.4
  crRNA array
  misc_feature (148)..(157): n is a, c, g, or t
cttggctttatatatcttgtggaaaggacgaaacaccgtaatttctactaagtgtagatagccacccccgccacgcctctaatttctactaagtgtagatgaaacgccgtatatatagagtaatttctactaagtgtagatttttttnnnnnnnnnnaagcttggcgtggatccgatatcaactagatcttgagacaaatggcagtattcatccacaattttaaaagaaaaggggggattggggggtacagtgcaggggaaagaatagtagacataatagcaacagacatacaaactaaag

SEQ ID NO: 12622 - DNA, 301 bp, Artificial Sequence
  Notch1.4_Brca2.1
  crRNA array
  misc_feature (148)..(157): n is a, c, g, or t
cttggctttatatatcttgtggaaaggacgaaacaccgtaatttctactaagtgtagataaagtgtcagaggccagcaataatttctactaagtgtagatctaagcgtagaaccagaaattaatttctactaagtgtagatttttttnnnnnnnnnnaagcttggcgtggatccgatatcaactagatcttgagacaaatggcagtattcatccacaattttaaaagaaaaggggggattggggggtacagtgcaggggaaagaatagtagacataatagcaacagacatacaaactaaag

SEQ ID NO: 12623 - DNA, 301 bp, Artificial Sequence
  Notch1.4_Brca2.2
  crRNA array
  misc_feature (148)..(157): n is a, c, g, or t
cttggctttatatatcttgtggaaaggacgaaacaccgtaatttctactaagtgtagataaagtgtcagaggccagcaataatttctactaagtgtagatgatccaggtgtaacaagccataatttctactaagtgtagatttttttnnnnnnnnnnaagcttggcgtggatccgatatcaactagatcttgagacaaatggcagtattcatccacaattttaaaagaaaaggggggattggggggtacagtgcaggggaaagaatagtagacataatagcaacagacatacaaactaaag

SEQ ID NO: 12624 - DNA, 301 bp, Artificial Sequence
  Notch1.4_Brca2.3
  crRNA array
  misc_feature (148)..(157): n is a, c, g, or t
cttggctttatatatcttgtggaaaggacgaaacaccgtaatttctactaagtgtagataaagtgtcagaggccagcaataatttctactaagtgtagattgaatataaactgggccacttaatttctactaagtgtagatttttttnnnnnnnnnnaagcttggcgtggatccgatatcaactagatcttgagacaaatggcagtattcatccacaattttaaaagaaaaggggggattggggggtacagtgcaggggaaagaatagtagacataatagcaacagacatacaaactaaag

SEQ ID NO: 12625 - DNA, 301 bp, Artificial Sequence
  Notch1.4_Brca2.4
  crRNA array
  misc_feature (148)..(157): n is a, c, g, or t
cttggctttatatatcttgtggaaaggacgaaacaccgtaatttctactaagtgtagataaagtgtcagaggccagcaataatttctactaagtgtagatgaaacgccgtatatatagagtaatttctactaagtgtagatttttttnnnnnnnnnnaagcttggcgtggatccgatatcaactagatcttgagacaaatggcagtattcatccacaattttaaaagaaaaggggggattggggggtacagtgcaggggaaagaatagtagacataatagcaacagacatacaaactaaag

SEQ ID NO: 12626 - DNA, 301 bp, Artificial Sequence
  Notch1.1_Apc.1
  crRNA array
  misc_feature (148)..(157): n is a, c, g, or t
cttggctttatatatcttgtggaaaggacgaaacaccgtaatttctactaagtgtagattgggccaacgatgccaggactaatttctactaagtgtagatgtgatccacacgtgtagctgtaatttctactaagtgtagatttttttnnnnnnnnnnaagcttggcgtggatccgatatcaactagatcttgagacaaatggcagtattcatccacaattttaaaagaaaaggggggattggggggtacagtgcaggggaaagaatagtagacataatagcaacagacatacaaactaaag

SEQ ID NO: 12627 - DNA, 301 bp, Artificial Sequence
  Notch1.1_Apc.2
  crRNA array
  misc_feature (148)..(157): n is a, c, g, or t
cttggctttatatatcttgtggaaaggacgaaacaccgtaatttctactaagtgtagattgggccaacgatgccaggactaatttctactaagtgtagatcatctgctcgccaagacaaataatttctactaagtgtagatttttttnnnnnnnnnnaagcttggcgtggatccgatatcaactagatcttgagacaaatggcagtattcatccacaattttaaaagaaaaggggggattggggggtacagtgcaggggaaagaatagtagacataatagcaacagacatacaaactaaag

SEQ ID NO: 12628 - DNA, 301 bp, Artificial Sequence
  Notch1.1_Apc.3
  crRNA array
  misc_feature (148)..(157): n is a, c, g, or t
cttggctttatatatcttgtggaaaggacgaaacaccgtaatttctactaagtgtagattgggccaacgatgccaggactaatttctactaagtgtagatacgccaatcgacatgatgattaatttctactaagtgtagatttttttnnnnnnnnnnaagcttggcgtggatccgatatcaactagatcttgagacaaatggcagtattcatccacaattttaaaagaaaaggggggattggggggtacagtgcaggggaaagaatagtagacataatagcaacagacatacaaactaaag

SEQ ID NO: 12629 - DNA, 301 bp, Artificial Sequence
  Notch1.1_Apc.4
  crRNA array
  misc_feature (148)..(157): n is a, c, g, or t
cttggctttatatatcttgtggaaaggacgaaacaccgtaatttctactaagtgtagattgggccaacgatgccaggactaatttctactaagtgtagatcaccaggggatgatgtgccctaatttctactaagtgtagatttttttnnnnnnnnnnaagcttggcgtggatccgatatcaactagatcttgagacaaatggcagtattcatccacaattttaaaagaaaaggggggattggggggtacagtgcaggggaaagaatagtagacataatagcaacagacatacaaactaaag

SEQ ID NO: 12630 - DNA, 301 bp, Artificial Sequence
  Notch1.2_Apc.1
  crRNA array
  misc_feature (148)..(157): n is a, c, g, or t
cttggctttatatatcttgtggaaaggacgaaacaccgtaatttctactaagtgtagatgtcgccccagcatcctgaagtaatttctactaagtgtagatgtgatccacacgtgtagctgtaatttctactaagtgtagatttttttnnnnnnnnnnaagcttggcgtggatccgatatcaactagatcttgagacaaatggcagtattcatccacaattttaaaagaaaaggggggattggggggtacagtgcaggggaaagaatagtagacataatagcaacagacatacaaactaaag

SEQ ID NO: 12631 - DNA, 301 bp, Artificial Sequence
  Notch1.2_Apc.2
  crRNA array
  misc_feature (148)..(157): n is a, c, g, or t
cttggctttatatatcttgtggaaaggacgaaacaccgtaatttctactaagtgtagatgtcgccccagcatcctgaagtaatttctactaagtgtagatcatctgctcgccaagacaaataatttctactaagtgtagatttttttnnnnnnnnnnaagcttggcgtggatccgatatcaactagatcttgagacaaatggcagtattcatccacaattttaaaagaaaaggggggattggggggtacagtgcaggggaaagaatagtagacataatagcaacagacatacaaactaaag

SEQ ID NO: 12632 - DNA, 301 bp, Artificial Sequence
  Notch1.2_Apc.3
  crRNA array
  misc_feature (148)..(157): n is a, c, g, or t
cttggctttatatatcttgtggaaaggacgaaacaccgtaatttctactaagtgtagatgtcgccccagcatcctgaagtaatttctactaagtgtagatacgccaatcgacatgatgattaatttctactaagtgtagatttttttnnnnnnnnnnaagcttggcgtggatccgatatcaactagatcttgagacaaatggcagtattcatccacaattttaaaagaaaaggggggattggggggtacagtgcaggggaaagaatagtagacataatagcaacagacatacaaactaaag

SEQ ID NO: 12633 - DNA, 301 bp, Artificial Sequence
  Notch1.2_Apc.4
  crRNA array
  misc_feature (148)..(157): n is a, c, g, or t
cttggctttatatatcttgtggaaaggacgaaacaccgtaatttctactaagtgtagatgtcgccccagcatcctgaagtaatttctactaagtgtagatcaccaggggatgatgtgccctaatttctactaagtgtagatttttttnnnnnnnnnnaagcttggcgtggatccgatatcaactagatcttgagacaaatggcagtattcatccacaattttaaaagaaaaggggggattggggggtacagtgcaggggaaagaatagtagacataatagcaacagacatacaaactaaag

SEQ ID NO: 12634 - DNA, 301 bp, Artificial Sequence
  Notch1.3_Apc.1
  crRNA array
  misc_feature (148)..(157): n is a, c, g, or t
cttggctttatatatcttgtggaaaggacgaaacaccgtaatttctactaagtgtagatagccacccccgccacgcctctaatttctactaagtgtagatgtgatccacacgtgtagctgtaatttctactaagtgtagatttttttnnnnnnnnnnaagcttggcgtggatccgatatcaactagatcttgagacaaatggcagtattcatccacaattttaaaagaaaaggggggattggggggtacagtgcaggggaaagaatagtagacataatagcaacagacatacaaactaaag

SEQ ID NO: 12635 - DNA, 301 bp, Artificial Sequence
  Notch1.3_Apc.2
  crRNA array
  misc_feature (148)..(157): n is a, c, g, or t
cttggctttatatatcttgtggaaaggacgaaacaccgtaatttctactaagtgtagatagccacccccgccacgcctctaatttctactaagtgtagatcatctgctcgccaagacaaataatttctactaagtgtagatttttttnnnnnnnnnnaagcttggcgtggatccgatatcaactagatcttgagacaaatggcagtattcatccacaattttaaaagaaaaggggggattggggggtacagtgcaggggaaagaatagtagacataatagcaacagacatacaaactaaag

SEQ ID NO: 12636 - DNA, 301 bp, Artificial Sequence
  Notch1.3_Apc.3
  crRNA array
  misc_feature (148)..(157): n is a, c, g, or t
cttggctttatatatcttgtggaaaggacgaaacaccgtaatttctactaagtgtagatagccacccccgccacgcctctaatttctactaagtgtagatacgccaatcgacatgatgattaatttctactaagtgtagatttttttnnnnnnnnnnaagcttggcgtggatccgatatcaactagatcttgagacaaatggcagtattcatccacaattttaaaagaaaaggggggattggggggtacagtgcaggggaaagaatagtagacataatagcaacagacatacaaactaaag

SEQ ID NO: 12637 - DNA, 301 bp, Artificial Sequence
  Notch1.3_Apc.4
  crRNA array
  misc_feature (148)..(157): n is a, c, g, or t
cttggctttatatatcttgtggaaaggacgaaacaccgtaatttctactaagtgtagatagccacccccgccacgcctctaatttctactaagtgtagatcaccaggggatgatgtgccctaatttctactaagtgtagatttttttnnnnnnnnnnaagcttggcgtggatccgatatcaactagatcttgagacaaatggcagtattcatccacaattttaaaagaaaaggggggattggggggtacagtgcaggggaaagaatagtagacataatagcaacagacatacaaactaaag

SEQ ID NO: 12638 - DNA, 301 bp, Artificial Sequence
  Notch1.4_Apc.1
  crRNA array
  misc_feature (148)..(157): n is a, c, g, or t
cttggctttatatatcttgtggaaaggacgaaacaccgtaatttctactaagtgtagataaagtgtcagaggccagcaataatttctactaagtgtagatgtgatccacacgtgtagctgtaatttctactaagtgtagatttttttnnnnnnnnnnaagcttggcgtggatccgatatcaactagatcttgagacaaatggcagtattcatccacaattttaaaagaaaaggggggattggggggtacagtgcaggggaaagaatagtagacataatagcaacagacatacaaactaaag

SEQ ID NO: 12639 - DNA, 301 bp, Artificial Sequence
  Notch1.4_Apc.2
  crRNA array
  misc_feature (148)..(157): n is a, c, g, or t
cttggctttatatatcttgtggaaaggacgaaacaccgtaatttctactaagtgtagataaagtgtcagaggccagcaataatttctactaagtgtagatcatctgctcgccaagacaaataatttctactaagtgtagatttttttnnnnnnnnnnaagcttggcgtggatccgatatcaactagatcttgagacaaatggcagtattcatccacaattttaaaagaaaaggggggattggggggtacagtgcaggggaaagaatagtagacataatagcaacagacatacaaactaaag

SEQ ID NO: 12640 - DNA, 301 bp, Artificial Sequence
  Notch1.4_Apc.3
  crRNA array
  misc_feature (148)..(157): n is a, c, g, or t
cttggctttatatatcttgtggaaaggacgaaacaccgtaatttctactaagtgtagataaagtgtcagaggccagcaataatttctactaagtgtagatacgccaatcgacatgatgattaatttctactaagtgtagatttttttnnnnnnnnnnaagcttggcgtggatccgatatcaactagatcttgagacaaatggcagtattcatccacaattttaaaagaaaaggggggattggggggtacagtgcaggggaaagaatagtagacataatagcaacagacatacaaactaaag

SEQ ID NO: 12641 - DNA, 301 bp, Artificial Sequence
  Notch1.4_Apc.4
  crRNA array
  misc_feature (148)..(157): n is a, c, g, or t
cttggctttatatatcttgtggaaaggacgaaacaccgtaatttctactaagtgtagataaagtgtcagaggccagcaataatttctactaagtgtagatcaccaggggatgatgtgccctaatttctactaagtgtagatttttttnnnnnnnnnnaagcttggcgtggatccgatatcaactagatcttgagacaaatggcagtattcatccacaattttaaaagaaaaggggggattggggggtacagtgcaggggaaagaatagtagacataatagcaacagacatacaaactaaag

SEQ ID NO: 12642 - DNA, 301 bp, Artificial Sequence
  Notch1.1_Fanca.1
  crRNA array
  misc_feature (148)..(157): n is a, c, g, or t
cttggctttatatatcttgtggaaaggacgaaacaccgtaatttctactaagtgtagattgggccaacgatgccaggactaatttctactaagtgtagatggaggccccggggcccaccataatttctactaagtgtagatttttttnnnnnnnnnnaagcttggcgtggatccgatatcaactagatcttgagacaaatggcagtattcatccacaattttaaaagaaaaggggggattggggggtacagtgcaggggaaagaatagtagacataatagcaacagacatacaaactaaag

SEQ ID NO: 12643 - DNA, 301 bp, Artificial Sequence
  Notch1.1_Fanca.2
  crRNA array
  misc_feature (148)..(157): n is a, c, g, or t
cttggctttatatatcttgtggaaaggacgaaacaccgtaatttctactaagtgtagattgggccaacgatgccaggactaatttctactaagtgtagatagagctaccacctagacagctaatttctactaagtgtagatttttttnnnnnnnnnnaagcttggcgtggatccgatatcaactagatcttgagacaaatggcagtattcatccacaattttaaaagaaaaggggggattggggggtacagtgcaggggaaagaatagtagacataatagcaacagacatacaaactaaag

SEQ ID NO: 12644 - DNA, 301 bp, Artificial Sequence
  Notch1.1_Fanca.3
  crRNA array
  misc_feature (148)..(157): n is a, c, g, or t
cttggctttatatatcttgtggaaaggacgaaacaccgtaatttctactaagtgtagattgggccaacgatgccaggactaatttctactaagtgtagataccaactgctgtgcctcgggtaatttctactaagtgtagatttttttnnnnnnnnnnaagcttggcgtggatccgatatcaactagatcttgagacaaatggcagtattcatccacaattttaaaagaaaaggggggattggggggtacagtgcaggggaaagaatagtagacataatagcaacagacatacaaactaaag

SEQ ID NO: 12645 - DNA, 301 bp, Artificial Sequence
  Notch1.1_Fanca.4
  crRNA array
  misc_feature (148)..(157): n is a, c, g, or t
cttggctttatatatcttgtggaaaggacgaaacaccgtaatttctactaagtgtagattgggccaacgatgccaggactaatttctactaagtgtagatcacccacccctggtgccaagtaatttctactaagtgtagatttttttnnnnnnnnnnaagcttggcgtggatccgatatcaactagatcttgagacaaatggcagtattcatccacaattttaaaagaaaaggggggattggggggtacagtgcaggggaaagaatagtagacataatagcaacagacatacaaactaaag

SEQ ID NO: 12646 - DNA, 301 bp, Artificial Sequence
  Notch1.2_Fanca.1
  crRNA array
  misc_feature (148)..(157): n is a, c, g, or t
cttggctttatatatcttgtggaaaggacgaaacaccgtaatttctactaagtgtagatgtcgccccagcatcctgaagtaatttctactaagtgtagatggaggccccggggcccaccataatttctactaagtgtagatttttttnnnnnnnnnnaagcttggcgtggatccgatatcaactagatcttgagacaaatggcagtattcatccacaattttaaaagaaaaggggggattggggggtacagtgcaggggaaagaatagtagacataatagcaacagacatacaaactaaag

SEQ ID NO: 12647 - DNA, 301 bp, Artificial Sequence
  Notch1.2_Fanca.2
  crRNA array
  misc_feature (148)..(157): n is a, c, g, or t
cttggctttatatatcttgtggaaaggacgaaacaccgtaatttctactaagtgtagatgtcgccccagcatcctgaagtaatttctactaagtgtagatagagctaccacctagacagctaatttctactaagtgtagatttttttnnnnnnnnnnaagcttggcgtggatccgatatcaactagatcttgagacaaatggcagtattcatccacaattttaaaagaaaaggggggattggggggtacagtgcaggggaaagaatagtagacataatagcaacagacatacaaactaaag

SEQ ID NO: 12648 - DNA, 301 bp, Artificial Sequence
  Notch1.2_Fanca.3
  crRNA array
  misc_feature (148)..(157): n is a, c, g, or t
cttggctttatatatcttgtggaaaggacgaaacaccgtaatttctactaagtgtagatgtcgccccagcatcctgaagtaatttctactaagtgtagataccaactgctgtgcctcgggtaatttctactaagtgtagatttttttnnnnnnnnnnaagcttggcgtggatccgatatcaactagatcttgagacaaatggcagtattcatccacaattttaaaagaaaaggggggattggggggtacagtgcaggggaaagaatagtagacataatagcaacagacatacaaactaaag

SEQ ID NO: 12649 - DNA, 301 bp, Artificial Sequence
  Notch1.2_Fanca.4
  crRNA array
  misc_feature (148)..(157): n is a, c, g, or t
cttggctttatatatcttgtggaaaggacgaaacaccgtaatttctactaagtgtagatgtcgccccagcatcctgaagtaatttctactaagtgtagatcacccacccctggtgccaagtaatttctactaagtgtagatttttttnnnnnnnnnnaagcttggcgtggatccgatatcaactagatcttgagacaaatggcagtattcatccacaattttaaaagaaaaggggggattggggggtacagtgcaggggaaagaatagtagacataatagcaacagacatacaaactaaag

SEQ ID NO: 12650 - DNA, 301 bp, Artificial Sequence
  Notch1.3_Fanca.1
  crRNA array
  misc_feature (148)..(157): n is a, c, g, or t
cttggctttatatatcttgtggaaaggacgaaacaccgtaatttctactaagtgtagatagccacccccgccacgcctctaatttctactaagtgtagatggaggccccggggcccaccataatttctactaagtgtagatttttttnnnnnnnnnnaagcttggcgtggatccgatatcaactagatcttgagacaaatggcagtattcatccacaattttaaaagaaaaggggggattggggggtacagtgcaggggaaagaatagtagacataatagcaacagacatacaaactaaag

SEQ ID NO: 12651 - DNA, 301 bp, Artificial Sequence
  Notch1.3_Fanca.2
  crRNA array
  misc_feature (148)..(157): n is a, c, g, or t
cttggctttatatatcttgtggaaaggacgaaacaccgtaatttctactaagtgtagatagccacccccgccacgcctctaatttctactaagtgtagatagagctaccacctagacagctaatttctactaagtgtagatttttttnnnnnnnnnnaagcttggcgtggatccgatatcaactagatcttgagacaaatggcagtattcatccacaattttaaaagaaaaggggggattggggggtacagtgcaggggaaagaatagtagacataatagcaacagacatacaaactaaag

SEQ ID NO: 12652 - DNA, 301 bp, Artificial Sequence
  Notch1.3_Fanca.3
  crRNA array
  misc_feature (148)..(157): n is a, c, g, or t
cttggctttatatatcttgtggaaaggacgaaacaccgtaatttctactaagtgtagatagccacccccgccacgcctctaatttctactaagtgtagataccaactgctgtgcctcgggtaatttctactaagtgtagatttttttnnnnnnnnnnaagcttggcgtggatccgatatcaactagatcttgagacaaatggcagtattcatccacaattttaaaagaaaaggggggattggggggtacagtgcaggggaaagaatagtagacataatagcaacagacatacaaactaaag

SEQ ID NO: 12653 - DNA, 301 bp, Artificial Sequence
  Notch1.3_Fanca.4
  crRNA array
  misc_feature (148)..(157): n is a, c, g, or t
cttggctttatatatcttgtggaaaggacgaaacaccgtaatttctactaagtgtagatagccacccccgccacgcctctaatttctactaagtgtagatcacccacccctggtgccaagtaatttctactaagtgtagatttttttnnnnnnnnnnaagcttggcgtggatccgatatcaactagatcttgagacaaatggcagtattcatccacaattttaaaagaaaaggggggattggggggtacagtgcaggggaaagaatagtagacataatagcaacagacatacaaactaaag

SEQ ID NO: 12654 - DNA, 301 bp, Artificial Sequence
  Notch1.4_Fanca.1
  crRNA array
  misc_feature (148)..(157): n is a, c, g, or t
cttggctttatatatcttgtggaaaggacgaaacaccgtaatttctactaagtgtagataaagtgtcagaggccagcaataatttctactaagtgtagatggaggccccggggcccaccataatttctactaagtgtagatttttttnnnnnnnnnnaagcttggcgtggatccgatatcaactagatcttgagacaaatggcagtattcatccacaattttaaaagaaaaggggggattggggggtacagtgcaggggaaagaatagtagacataatagcaacagacatacaaactaaag

SEQ ID NO: 12655 - DNA, 301 bp, Artificial Sequence
  Notch1.4_Fanca.2
  crRNA array
  misc_feature (148)..(157): n is a, c, g, or t
cttggctttatatatcttgtggaaaggacgaaacaccgtaatttctactaagtgtagataaagtgtcagaggccagcaataatttctactaagtgtagatagagctaccacctagacagctaatttctactaagtgtagatttttttnnnnnnnnnnaagcttggcgtggatccgatatcaactagatcttgagacaaatggcagtattcatccacaattttaaaagaaaaggggggattggggggtacagtgcaggggaaagaatagtagacataatagcaacagacatacaaactaaag

SEQ ID NO: 12656 - DNA, 301 bp, Artificial Sequence
  Notch1.4_Fanca.3
  crRNA array
  misc_feature (148)..(157): n is a, c, g, or t
cttggctttatatatcttgtggaaaggacgaaacaccgtaatttctactaagtgtagataaagtgtcagaggccagcaataatttctactaagtgtagataccaactgctgtgcctcgggtaatttctactaagtgtagatttttttnnnnnnnnnnaagcttggcgtggatccgatatcaactagatcttgagacaaatggcagtattcatccacaattttaaaagaaaaggggggattggggggtacagtgcaggggaaagaatagtagacataatagcaacagacatacaaactaaag

SEQ ID NO: 12657 - DNA, 301 bp, Artificial Sequence
  Notch1.4_Fanca.4
  crRNA array
  misc_feature (148)..(157): n is a, c, g, or t
cttggctttatatatcttgtggaaaggacgaaacaccgtaatttctactaagtgtagataaagtgtcagaggccagcaataatttctactaagtgtagatcacccacccctggtgccaagtaatttctactaagtgtagatttttttnnnnnnnnnnaagcttggcgtggatccgatatcaactagatcttgagacaaatggcagtattcatccacaattttaaaagaaaaggggggattggggggtacagtgcaggggaaagaatagtagacataatagcaacagacatacaaactaaag

SEQ ID NO: 12658 - DNA, 301 bp, Artificial Sequence
  Notch1.1_Nf1.1
  crRNA array
  misc_feature (148)..(157): n is a, c, g, or t
cttggctttatatatcttgtggaaaggacgaaacaccgtaatttctactaagtgtagattgggccaacgatgccaggactaatttctactaagtgtagattggcgatccggaatcctctgtaatttctactaagtgtagatttttttnnnnnnnnnnaagcttggcgtggatccgatatcaactagatcttgagacaaatggcagtattcatccacaattttaaaagaaaaggggggattggggggtacagtgcaggggaaagaatagtagacataatagcaacagacatacaaactaaag

SEQ ID NO: 12659 - DNA, 301 bp, Artificial Sequence
  Notch1.1_Nf1.2
  crRNA array
  misc_feature (148)..(157): n is a, c, g, or t
cttggctttatatatcttgtggaaaggacgaaacaccgtaatttctactaagtgtagattgggccaacgatgccaggactaatttctactaagtgtagatggaaacacaacgctggcctctaatttctactaagtgtagatttttttnnnnnnnnnnaagcttggcgtggatccgatatcaactagatcttgagacaaatggcagtattcatccacaattttaaaagaaaaggggggattggggggtacagtgcaggggaaagaatagtagacataatagcaacagacatacaaactaaag

SEQ ID NO: 12660 - DNA, 301 bp, Artificial Sequence
  Notch1.1_Nf1.3
  crRNA array
  misc_feature (148)..(157): n is a, c, g, or t
cttggctttatatatcttgtggaaaggacgaaacaccgtaatttctactaagtgtagattgggccaacgatgccaggactaatttctactaagtgtagataatgatggaacgcagtcgcataatttctactaagtgtagatttttttnnnnnnnnnnaagcttggcgtggatccgatatcaactagatcttgagacaaatggcagtattcatccacaattttaaaagaaaaggggggattggggggtacagtgcaggggaaagaatagtagacataatagcaacagacatacaaactaaag

SEQ ID NO: 12661 - DNA, 301 bp, Artificial Sequence
  Notch1.1_Nf1.4
  crRNA array
  misc_feature (148)..(157): n is a, c, g, or t
cttggctttatatatcttgtggaaaggacgaaacaccgtaatttctactaagtgtagattgggccaacgatgccaggactaatttctactaagtgtagattgcaaaaccatccaccaagttaatttctactaagtgtagatttttttnnnnnnnnnnaagcttggcgtggatccgatatcaactagatcttgagacaaatggcagtattcatccacaattttaaaagaaaaggggggattggggggtacagtgcaggggaaagaatagtagacataatagcaacagacatacaaactaaag

SEQ ID NO: 12662 - DNA, 301 bp, Artificial Sequence
  Notch1.2_Nf1.1
  crRNA array
  misc_feature (148)..(157): n is a, c, g, or t
cttggctttatatatcttgtggaaaggacgaaacaccgtaatttctactaagtgtagatgtcgccccagcatcctgaagtaatttctactaagtgtagattggcgatccggaatcctctgtaatttctactaagtgtagatttttttnnnnnnnnnnaagcttggcgtggatccgatatcaactagatcttgagacaaatggcagtattcatccacaattttaaaagaaaaggggggattggggggtacagtgcaggggaaagaatagtagacataatagcaacagacatacaaactaaag

SEQ ID NO: 12663 - DNA, 301 bp, Artificial Sequence
  Notch1.2_Nf1.2
  crRNA array
  misc_feature (148)..(157): n is a, c, g, or t
cttggctttatatatcttgtggaaaggacgaaacaccgtaatttctactaagtgtagatgtcgccccagcatcctgaagtaatttctactaagtgtagatggaaacacaacgctggcctctaatttctactaagtgtagatttttttnnnnnnnnnnaagcttggcgtggatccgatatcaactagatcttgagacaaatggcagtattcatccacaattttaaaagaaaaggggggattggggggtacagtgcaggggaaagaatagtagacataatagcaacagacatacaaactaaag

SEQ ID NO: 12664 - DNA, 301 bp, Artificial Sequence
  Notch1.2_Nf1.3
  crRNA array
  misc_feature (148)..(157): n is a, c, g, or t
cttggctttatatatcttgtggaaaggacgaaacaccgtaatttctactaagtgtagatgtcgccccagcatcctgaagtaatttctactaagtgtagataatgatggaacgcagtcgcataatttctactaagtgtagatttttttnnnnnnnnnnaagcttggcgtggatccgatatcaactagatcttgagacaaatggcagtattcatccacaattttaaaagaaaaggggggattggggggtacagtgcaggggaaagaatagtagacataatagcaacagacatacaaactaaag

SEQ ID NO: 12665 - DNA, 301 bp, Artificial Sequence
  Notch1.2_Nf1.4
  crRNA array
  misc_feature (148)..(157): n is a, c, g, or t
cttggctttatatatcttgtggaaaggacgaaacaccgtaatttctactaagtgtagatgtcgccccagcatcctgaagtaatttctactaagtgtagattgcaaaaccatccaccaagttaatttctactaagtgtagatttttttnnnnnnnnnnaagcttggcgtggatccgatatcaactagatcttgagacaaatggcagtattcatccacaattttaaaagaaaaggggggattggggggtacagtgcaggggaaagaatagtagacataatagcaacagacatacaaactaaag

SEQ ID NO: 12666 - DNA, 301 bp, Artificial Sequence
  Notch1.3_Nf1.1
  crRNA array
  misc_feature (148)..(157): n is a, c, g, or t
cttggctttatatatcttgtggaaaggacgaaacaccgtaatttctactaagtgtagatagccacccccgccacgcctctaatttctactaagtgtagattggcgatccggaatcctctgtaatttctactaagtgtagatttttttnnnnnnnnnnaagcttggcgtggatccgatatcaactagatcttgagacaaatggcagtattcatccacaattttaaaagaaaaggggggattggggggtacagtgcaggggaaagaatagtagacataatagcaacagacatacaaactaaag

SEQ ID NO: 12667 - DNA, 301 bp, Artificial Sequence
  Notch1.3_Nf1.2
  crRNA array
  misc_feature (148)..(157): n is a, c, g, or t
cttggctttatatatcttgtggaaaggacgaaacaccgtaatttctactaagtgtagatagccacccccgccacgcctctaatttctactaagtgtagatggaaacacaacgctggcctctaatttctactaagtgtagatttttttnnnnnnnnnnaagcttggcgtggatccgatatcaactagatcttgagacaaatggcagtattcatccacaattttaaaagaaaaggggggattggggggtacagtgcaggggaaagaatagtagacataatagcaacagacatacaaactaaag

SEQ ID NO: 12668 - DNA, 301 bp, Artificial Sequence
  Notch1.3_Nf1.3
  crRNA array
  misc_feature (148)..(157): n is a, c, g, or t
cttggctttatatatcttgtggaaaggacgaaacaccgtaatttctactaagtgtagatagccacccccgccacgcctctaatttctactaagtgtagataatgatggaacgcagtcgcataatttctactaagtgtagatttttttnnnnnnnnnnaagcttggcgtggatccgatatcaactagatcttgagacaaatggcagtattcatccacaattttaaaagaaaaggggggattggggggtacagtgcaggggaaagaatagtagacataatagcaacagacatacaaactaaag

SEQ ID NO: 12669 - DNA, 301 bp, Artificial Sequence
  Notch1.3_Nf1.4
  crRNA array
  misc_feature (148)..(157): n is a, c, g, or t
cttggctttatatatcttgtggaaaggacgaaacaccgtaatttctactaagtgtagatagccacccccgccacgcctctaatttctactaagtgtagattgcaaaaccatccaccaagttaatttctactaagtgtagatttttttnnnnnnnnnnaagcttggcgtggatccgatatcaactagatcttgagacaaatggcagtattcatccacaattttaaaagaaaaggggggattggggggtacagtgcaggggaaagaatagtagacataatagcaacagacatacaaactaaag

SEQ ID NO: 12670 - DNA, 301 bp, Artificial Sequence
  Notch1.4_Nf1.1
  crRNA array
  misc_feature (148)..(157): n is a, c, g, or t
cttggctttatatatcttgtggaaaggacgaaacaccgtaatttctactaagtgtagataaagtgtcagaggccagcaataatttctactaagtgtagattggcgatccggaatcctctgtaatttctactaagtgtagatttttttnnnnnnnnnnaagcttggcgtggatccgatatcaactagatcttgagacaaatggcagtattcatccacaattttaaaagaaaaggggggattggggggtacagtgcaggggaaagaatagtagacataatagcaacagacatacaaactaaag

SEQ ID NO: 12671 - DNA, 301 bp, Artificial Sequence
  Notch1.4_Nf1.2
  crRNA array
  misc_feature (148)..(157): n is a, c, g, or t
cttggctttatatatcttgtggaaaggacgaaacaccgtaatttctactaagtgtagataaagtgtcagaggccagcaataatttctactaagtgtagatggaaacacaacgctggcctctaatttctactaagtgtagatttttttnnnnnnnnnnaagcttggcgtggatccgatatcaactagatcttgagacaaatggcagtattcatccacaattttaaaagaaaaggggggattggggggtacagtgcaggggaaagaatagtagacataatagcaacagacatacaaactaaag

SEQ ID NO: 12672 - DNA, 301 bp, Artificial Sequence
  Notch1.4_Nf1.3
  crRNA array
  misc_feature (148)..(157): n is a, c, g, or t
cttggctttatatatcttgtggaaaggacgaaacaccgtaatttctactaagtgtagataaagtgtcagaggccagcaataatttctactaagtgtagataatgatggaacgcagtcgcataatttctactaagtgtagatttttttnnnnnnnnnnaagcttggcgtggatccgatatcaactagatcttgagacaaatggcagtattcatccacaattttaaaagaaaaggggggattggggggtacagtgcaggggaaagaatagtagacataatagcaacagacatacaaactaaag

SEQ ID NO: 12673 - DNA, 301 bp, Artificial Sequence
  Notch1.4_Nf1.4
  crRNA array
  misc_feature (148)..(157): n is a, c, g, or t
cttggctttatatatcttgtggaaaggacgaaacaccgtaatttctactaagtgtagataaagtgtcagaggccagcaataatttctactaagtgtagattgcaaaaccatccaccaagttaatttctactaagtgtagatttttttnnnnnnnnnnaagcttggcgtggatccgatatcaactagatcttgagacaaatggcagtattcatccacaattttaaaagaaaaggggggattggggggtacagtgcaggggaaagaatagtagacataatagcaacagacatacaaactaaag

SEQ ID NO: 12674 - DNA, 301 bp, Artificial Sequence
  Notch1.1_Kdm6a.1
  crRNA array
  misc_feature (148)..(157): n is a, c, g, or t
cttggctttatatatcttgtggaaaggacgaaacaccgtaatttctactaagtgtagattgggccaacgatgccaggactaatttctactaagtgtagatgctgccgcctctcgcggcagtaatttctactaagtgtagatttttttnnnnnnnnnnaagcttggcgtggatccgatatcaactagatcttgagacaaatggcagtattcatccacaattttaaaagaaaaggggggattggggggtacagtgcaggggaaagaatagtagacataatagcaacagacatacaaactaaag

SEQ ID NO: 12675 - DNA, 301 bp, Artificial Sequence
  Notch1.1_Kdm6a.2
  crRNA array
  misc_feature (148)..(157): n is a, c, g, or t
cttggctttatatatcttgtggaaaggacgaaacaccgtaatttctactaagtgtagattgggccaacgatgccaggactaatttctactaagtgtagatgctgcaggtaaggcacgttttaatttctactaagtgtagatttttttnnnnnnnnnnaagcttggcgtggatccgatatcaactagatcttgagacaaatggcagtattcatccacaattttaaaagaaaaggggggattggggggtacagtgcaggggaaagaatagtagacataatagcaacagacatacaaactaaag

SEQ ID NO: 12676 - DNA, 301 bp, Artificial Sequence
  Notch1.1_Kdm6a.3
  crRNA array
  misc_feature (148)..(157): n is a, c, g, or t
cttggctttatatatcttgtggaaaggacgaaacaccgtaatttctactaagtgtagattgggccaacgatgccaggactaatttctactaagtgtagattgctggtgccggggaagttttaatttctactaagtgtagatttttttnnnnnnnnnnaagcttggcgtggatccgatatcaactagatcttgagacaaatggcagtattcatccacaattttaaaagaaaaggggggattggggggtacagtgcaggggaaagaatagtagacataatagcaacagacatacaaactaaag

SEQ ID NO: 12677 - DNA, 301 bp, Artificial Sequence
  Notch1.1_Kdm6a.4
  crRNA array
  misc_feature (148)..(157): n is a, c, g, or t
cttggctttatatatcttgtggaaaggacgaaacaccgtaatttctactaagtgtagattgggccaacgatgccaggactaatttctactaagtgtagattgtctcctacgaatcccccctaatttctactaagtgtagatttttttnnnnnnnnnnaagcttggcgtggatccgatatcaactagatcttgagacaaatggcagtattcatccacaattttaaaagaaaaggggggattggggggtacagtgcaggggaaagaatagtagacataatagcaacagacatacaaactaaag

SEQ ID NO: 12678 - DNA, 301 bp, Artificial Sequence
  Notch1.2_Kdm6a.1
  crRNA array
  misc_feature (148)..(157): n is a, c, g, or t
cttggctttatatatcttgtggaaaggacgaaacaccgtaatttctactaagtgtagatgtcgccccagcatcctgaagtaatttctactaagtgtagatgctgccgcctctcgcggcagtaatttctactaagtgtagatttttttnnnnnnnnnnaagcttggcgtggatccgatatcaactagatcttgagacaaatggcagtattcatccacaattttaaaagaaaaggggggattggggggtacagtgcaggggaaagaatagtagacataatagcaacagacatacaaactaaag

SEQ ID NO: 12679 - DNA, 301 bp, Artificial Sequence
  Notch1.2_Kdm6a.2
  crRNA array
  misc_feature (148)..(157): n is a, c, g, or t
cttggctttatatatcttgtggaaaggacgaaacaccgtaatttctactaagtgtagatgtcgccccagcatcctgaagtaatttctactaagtgtagatgctgcaggtaaggcacgttttaatttctactaagtgtagatttttttnnnnnnnnnnaagcttggcgtggatccgatatcaactagatcttgagacaaatggcagtattcatccacaattttaaaagaaaaggggggattggggggtacagtgcaggggaaagaatagtagacataatagcaacagacatacaaactaaag

SEQ ID NO: 12680 - DNA, 301 bp, Artificial Sequence
  Notch1.2_Kdm6a.3
  crRNA array
  misc_feature (148)..(157): n is a, c, g, or t
cttggctttatatatcttgtggaaaggacgaaacaccgtaatttctactaagtgtagatgtcgccccagcatcctgaagtaatttctactaagtgtagattgctggtgccggggaagttttaatttctactaagtgtagatttttttnnnnnnnnnnaagcttggcgtggatccgatatcaactagatcttgagacaaatggcagtattcatccacaattttaaaagaaaaggggggattggggggtacagtgcaggggaaagaatagtagacataatagcaacagacatacaaactaaag

SEQ ID NO: 12681 - DNA, 301 bp, Artificial Sequence
  Notch1.2_Kdm6a.4
  crRNA array
  misc_feature (148)..(157): n is a, c, g, or t
cttggctttatatatcttgtggaaaggacgaaacaccgtaatttctactaagtgtagatgtcgccccagcatcctgaagtaatttctactaagtgtagattgtctcctacgaatcccccctaatttctactaagtgtagatttttttnnnnnnnnnnaagcttggcgtggatccgatatcaactagatcttgagacaaatggcagtattcatccacaattttaaaagaaaaggggggattggggggtacagtgcaggggaaagaatagtagacataatagcaacagacatacaaactaaag

SEQ ID NO: 12682 - DNA, 301 bp, Artificial Sequence
  Notch1.3_Kdm6a.1
  crRNA array
  misc_feature (148)..(157): n is a, c, g, or t
cttggctttatatatcttgtggaaaggacgaaacaccgtaatttctactaagtgtagatagccacccccgccacgcctctaatttctactaagtgtagatgctgccgcctctcgcggcagtaatttctactaagtgtagatttttttnnnnnnnnnnaagcttggcgtggatccgatatcaactagatcttgagacaaatggcagtattcatccacaattttaaaagaaaaggggggattggggggtacagtgcaggggaaagaatagtagacataatagcaacagacatacaaactaaag

SEQ ID NO: 12683 - DNA, 301 bp, Artificial Sequence
  Notch1.3_Kdm6a.2
  crRNA array
  misc_feature (148)..(157): n is a, c, g, or t
cttggctttatatatcttgtggaaaggacgaaacaccgtaatttctactaagtgtagatagccacccccgccacgcctctaatttctactaagtgtagatgctgcaggtaaggcacgttttaatttctactaagtgtagatttttttnnnnnnnnnnaagcttggcgtggatccgatatcaactagatcttgagacaaatggcagtattcatccacaattttaaaagaaaaggggggattggggggtacagtgcaggggaaagaatagtagacataatagcaacagacatacaaactaaag

SEQ ID NO: 12684 - DNA, 301 bp, Artificial Sequence
  Notch1.3_Kdm6a.3
  crRNA array
  misc_feature (148)..(157): n is a, c, g, or t
cttggctttatatatcttgtggaaaggacgaaacaccgtaatttctactaagtgtagatagccacccccgccacgcctctaatttctactaagtgtagattgctggtgccggggaagttttaatttctactaagtgtagatttttttnnnnnnnnnnaagcttggcgtggatccgatatcaactagatcttgagacaaatggcagtattcatccacaattttaaaagaaaaggggggattggggggtacagtgcaggggaaagaatagtagacataatagcaacagacatacaaactaaag

SEQ ID NO: 12685 - DNA, 301 bp, Artificial Sequence
  Notch1.3_Kdm6a.4
  crRNA array
  misc_feature (148)..(157): n is a, c, g, or t
cttggctttatatatcttgtggaaaggacgaaacaccgtaatttctactaagtgtagatagccacccccgccacgcctctaatttctactaagtgtagattgtctcctacgaatcccccctaatttctactaagtgtagatttttttnnnnnnnnnnaagcttggcgtggatccgatatcaactagatcttgagacaaatggcagtattcatccacaattttaaaagaaaaggggggattggggggtacagtgcaggggaaagaatagtagacataatagcaacagacatacaaactaaag

SEQ ID NO: 12686 - DNA, 301 bp, Artificial Sequence
  Notch1.4_Kdm6a.1
  crRNA array
  misc_feature (148)..(157): n is a, c, g, or t
cttggctttatatatcttgtggaaaggacgaaacaccgtaatttctactaagtgtagataaagtgtcagaggccagcaataatttctactaagtgtagatgctgccgcctctcgcggcagtaatttctactaagtgtagatttttttnnnnnnnnnnaagcttggcgtggatccgatatcaactagatcttgagacaaatggcagtattcatccacaattttaaaagaaaaggggggattggggggtacagtgcaggggaaagaatagtagacataatagcaacagacatacaaactaaag

SEQ ID NO: 12687 - DNA, 301 bp, Artificial Sequence
  Notch1.4_Kdm6a.2
  crRNA array
  misc_feature (148)..(157): n is a, c, g, or t
cttggctttatatatcttgtggaaaggacgaaacaccgtaatttctactaagtgtagataaagtgtcagaggccagcaataatttctactaagtgtagatgctgcaggtaaggcacgttttaatttctactaagtgtagatttttttnnnnnnnnnnaagcttggcgtggatccgatatcaactagatcttgagacaaatggcagtattcatccacaattttaaaagaaaaggggggattggggggtacagtgcaggggaaagaatagtagacataatagcaacagacatacaaactaaag

SEQ ID NO: 12688 - DNA, 301 bp, Artificial Sequence
  Notch1.4_Kdm6a.3
  crRNA array
  misc_feature (148)..(157): n is a, c, g, or t
cttggctttatatatcttgtggaaaggacgaaacaccgtaatttctactaagtgtagataaagtgtcagaggccagcaataatttctactaagtgtagattgctggtgccggggaagttttaatttctactaagtgtagatttttttnnnnnnnnnnaagcttggcgtggatccgatatcaactagatcttgagacaaatggcagtattcatccacaattttaaaagaaaaggggggattggggggtacagtgcaggggaaagaatagtagacataatagcaacagacatacaaactaaag

SEQ ID NO: 12689 - DNA, 301 bp, Artificial Sequence
  Notch1.4_Kdm6a.4
  crRNA array
  misc_feature (148)..(157): n is a, c, g, or t
cttggctttatatatcttgtggaaaggacgaaacaccgtaatttctactaagtgtagataaagtgtcagaggccagcaataatttctactaagtgtagattgtctcctacgaatcccccctaatttctactaagtgtagatttttttnnnnnnnnnnaagcttggcgtggatccgatatcaactagatcttgagacaaatggcagtattcatccacaattttaaaagaaaaggggggattggggggtacagtgcaggggaaagaatagtagacataatagcaacagacatacaaactaaag

SEQ ID NO: 12690 - DNA, 301 bp, Artificial Sequence
  Notch1.1_Ercc5.1
  crRNA array
  misc_feature (148)..(157): n is a, c, g, or t
cttggctttatatatcttgtggaaaggacgaaacaccgtaatttctactaagtgtagattgggccaacgatgccaggactaatttctactaagtgtagatacggcacgagcaagagacactaatttctactaagtgtagatttttttnnnnnnnnnnaagcttggcgtggatccgatatcaactagatcttgagacaaatggcagtattcatccacaattttaaaagaaaaggggggattggggggtacagtgcaggggaaagaatagtagacataatagcaacagacatacaaactaaag

SEQ ID NO: 12691 - DNA, 301 bp, Artificial Sequence
  Notch1.1_Ercc5.2
  crRNA array
  misc_feature (148)..(157): n is a, c, g, or t
cttggctttatatatcttgtggaaaggacgaaacaccgtaatttctactaagtgtagattgggccaacgatgccaggactaatttctactaagtgtagatgagtatcacatcggtgactctaatttctactaagtgtagatttttttnnnnnnnnnnaagcttggcgtggatccgatatcaactagatcttgagacaaatggcagtattcatccacaattttaaaagaaaaggggggattggggggtacagtgcaggggaaagaatagtagacataatagcaacagacatacaaactaaag

SEQ ID NO: 12692 - DNA, 301 bp, Artificial Sequence
  Notch1.1_Ercc5.3
  crRNA array
  misc_feature (148)..(157): n is a, c, g, or t
cttggctttatatatcttgtggaaaggacgaaacaccgtaatttctactaagtgtagattgggccaacgatgccaggactaatttctactaagtgtagatggagtgggtccaggcctcgttaatttctactaagtgtagatttttttnnnnnnnnnnaagcttggcgtggatccgatatcaactagatcttgagacaaatggcagtattcatccacaattttaaaagaaaaggggggattggggggtacagtgcaggggaaagaatagtagacataatagcaacagacatacaaactaaag

SEQ ID NO: 12693 - DNA, 301 bp, Artificial Sequence
  Notch1.1_Ercc5.4
  crRNA array
  misc_feature (148)..(157): n is a, c, g, or t
cttggctttatatatcttgtggaaaggacgaaacaccgtaatttctactaagtgtagattgggccaacgatgccaggactaatttctactaagtgtagatcagagccggtggaataatgttaatttctactaagtgtagatttttttnnnnnnnnnnaagcttggcgtggatccgatatcaactagatcttgagacaaatggcagtattcatccacaattttaaaagaaaaggggggattggggggtacagtgcaggggaaagaatagtagacataatagcaacagacatacaaactaaag

SEQ ID NO: 12694 - DNA, 301 bp, Artificial Sequence
  Notch1.2_Ercc5.1
  crRNA array
  misc_feature (148)..(157): n is a, c, g, or t
cttggctttatatatcttgtggaaaggacgaaacaccgtaatttctactaagtgtagatgtcgccccagcatcctgaagtaatttctactaagtgtagatacggcacgagcaagagacactaatttctactaagtgtagatttttttnnnnnnnnnnaagcttggcgtggatccgatatcaactagatcttgagacaaatggcagtattcatccacaattttaaaagaaaaggggggattggggggtacagtgcaggggaaagaatagtagacataatagcaacagacatacaaactaaag

SEQ ID NO: 12695 - DNA, 301 bp, Artificial Sequence
  Notch1.2_Ercc5.2
  crRNA array
  misc_feature (148)..(157): n is a, c, g, or t
cttggctttatatatcttgtggaaaggacgaaacaccgtaatttctactaagtgtagatgtcgccccagcatcctgaagtaatttctactaagtgtagatgagtatcacatcggtgactctaatttctactaagtgtagatttttttnnnnnnnnnnaagcttggcgtggatccgatatcaactagatcttgagacaaatggcagtattcatccacaattttaaaagaaaaggggggattggggggtacagtgcaggggaaagaatagtagacataatagcaacagacatacaaactaaag

SEQ ID NO: 12696 - DNA, 301 bp, Artificial Sequence
  Notch1.2_Ercc5.3
  crRNA array
  misc_feature (148)..(157): n is a, c, g, or t
cttggctttatatatcttgtggaaaggacgaaacaccgtaatttctactaagtgtagatgtcgccccagcatcctgaagtaatttctactaagtgtagatggagtgggtccaggcctcgttaatttctactaagtgtagatttttttnnnnnnnnnnaagcttggcgtggatccgatatcaactagatcttgagacaaatggcagtattcatccacaattttaaaagaaaaggggggattggggggtacagtgcaggggaaagaatagtagacataatagcaacagacatacaaactaaag

SEQ ID NO: 12697 - DNA, 301 bp, Artificial Sequence
  Notch1.2_Ercc5.4
  crRNA array
  misc_feature (148)..(157): n is a, c, g, or t
cttggctttatatatcttgtggaaaggacgaaacaccgtaatttctactaagtgtagatgtcgccccagcatcctgaagtaatttctactaagtgtagatcagagccggtggaataatgttaatttctactaagtgtagatttttttnnnnnnnnnnaagcttggcgtggatccgatatcaactagatcttgagacaaatggcagtattcatccacaattttaaaagaaaaggggggattggggggtacagtgcaggggaaagaatagtagacataatagcaacagacatacaaactaaag

SEQ ID NO: 12698 - DNA, 301 bp, Artificial Sequence
  Notch1.3_Ercc5.1
  crRNA array
  misc_feature (148)..(157): n is a, c, g, or t
cttggctttatatatcttgtggaaaggacgaaacaccgtaatttctactaagtgtagatagccacccccgccacgcctctaatttctactaagtgtagatacggcacgagcaagagacactaatttctactaagtgtagatttttttnnnnnnnnnnaagcttggcgtggatccgatatcaactagatcttgagacaaatggcagtattcatccacaattttaaaagaaaaggggggattggggggtacagtgcaggggaaagaatagtagacataatagcaacagacatacaaactaaag

SEQ ID NO: 12699 - DNA, 301 bp, Artificial Sequence
  Notch1.3_Ercc5.2
  crRNA array
  misc_feature (148)..(157): n is a, c, g, or t
cttggctttatatatcttgtggaaaggacgaaacaccgtaatttctactaagtgtagatagccacccccgccacgcctctaatttctactaagtgtagatgagtatcacatcggtgactctaatttctactaagtgtagatttttttnnnnnnnnnnaagcttggcgtggatccgatatcaactagatcttgagacaaatggcagtattcatccacaattttaaaagaaaaggggggattggggggtacagtgcaggggaaagaatagtagacataatagcaacagacatacaaactaaag

SEQ ID NO: 12700 - DNA, 301 bp, Artificial Sequence
  Notch1.3_Ercc5.3
  crRNA array
  misc_feature (148)..(157): n is a, c, g, or t
cttggctttatatatcttgtggaaaggacgaaacaccgtaatttctactaagtgtagatagccacccccgccacgcctctaatttctactaagtgtagatggagtgggtccaggcctcgttaatttctactaagtgtagatttttttnnnnnnnnnnaagcttggcgtggatccgatatcaactagatcttgagacaaatggcagtattcatccacaattttaaaagaaaaggggggattggggggtacagtgcaggggaaagaatagtagacataatagcaacagacatacaaactaaag

SEQ ID NO: 12701 - DNA, 301 bp, Artificial Sequence
  Notch1.3_Ercc5.4
  crRNA array
  misc_feature (148)..(157): n is a, c, g, or t
cttggctttatatatcttgtggaaaggacgaaacaccgtaatttctactaagtgtagatagccacccccgccacgcctctaatttctactaagtgtagatcagagccggtggaataatgttaatttctactaagtgtagatttttttnnnnnnnnnnaagcttggcgtggatccgatatcaactagatcttgagacaaatggcagtattcatccacaattttaaaagaaaaggggggattggggggtacagtgcaggggaaagaatagtagacataatagcaacagacatacaaactaaag

SEQ ID NO: 12702 - DNA, 301 bp, Artificial Sequence
  Notch1.4_Ercc5.1
  crRNA array
  misc_feature (148)..(157): n is a, c, g, or t
cttggctttatatatcttgtggaaaggacgaaacaccgtaatttctactaagtgtagataaagtgtcagaggccagcaataatttctactaagtgtagatacggcacgagcaagagacactaatttctactaagtgtagatttttttnnnnnnnnnnaagcttggcgtggatccgatatcaactagatcttgagacaaatggcagtattcatccacaattttaaaagaaaaggggggattggggggtacagtgcaggggaaagaatagtagacataatagcaacagacatacaaactaaag

SEQ ID NO: 12703 - DNA, 301 bp, Artificial Sequence
  Notch1.4_Ercc5.2
  crRNA array
  misc_feature (148)..(157): n is a, c, g, or t
cttggctttatatatcttgtggaaaggacgaaacaccgtaatttctactaagtgtagataaagtgtcagaggccagcaataatttctactaagtgtagatgagtatcacatcggtgactctaatttctactaagtgtagatttttttnnnnnnnnnnaagcttggcgtggatccgatatcaactagatcttgagacaaatggcagtattcatccacaattttaaaagaaaaggggggattggggggtacagtgcaggggaaagaatagtagacataatagcaacagacatacaaactaaag

SEQ ID NO: 12704 - DNA, 301 bp, Artificial Sequence
  Notch1.4_Ercc5.3
  crRNA array
  misc_feature (148)..(157): n is a, c, g, or t
cttggctttatatatcttgtggaaaggacgaaacaccgtaatttctactaagtgtagataaagtgtcagaggccagcaataatttctactaagtgtagatggagtgggtccaggcctcgttaatttctactaagtgtagatttttttnnnnnnnnnnaagcttggcgtggatccgatatcaactagatcttgagacaaatggcagtattcatccacaattttaaaagaaaaggggggattggggggtacagtgcaggggaaagaatagtagacataatagcaacagacatacaaactaaag

SEQ ID NO: 12705 - DNA, 301 bp, Artificial Sequence
  Notch1.4_Ercc5.4
  crRNA array
  misc_feature (148)..(157): n is a, c, g, or t
cttggctttatatatcttgtggaaaggacgaaacaccgtaatttctactaagtgtagataaagtgtcagaggccagcaataatttctactaagtgtagatcagagccggtggaataatgttaatttctactaagtgtagatttttttnnnnnnnnnnaagcttggcgtggatccgatatcaactagatcttgagacaaatggcagtattcatccacaattttaaaagaaaaggggggattggggggtacagtgcaggggaaagaatagtagacataatagcaacagacatacaaactaaag

SEQ ID NO: 12706 - DNA, 301 bp, Artificial Sequence
  Notch1.1_Arid1b.1
  crRNA array
  misc_feature (148)..(157): n is a, c, g, or t
cttggctttatatatcttgtggaaaggacgaaacaccgtaatttctactaagtgtagattgggccaacgatgccaggactaatttctactaagtgtagatgctgctgctgtagtgcgtggtaatttctactaagtgtagatttttttnnnnnnnnnnaagcttggcgtggatccgatatcaactagatcttgagacaaatggcagtattcatccacaattttaaaagaaaaggggggattggggggtacagtgcaggggaaagaatagtagacataatagcaacagacatacaaactaaag

SEQ ID NO: 12707 - DNA, 301 bp, Artificial Sequence
  Notch1.1_Arid1b.2
  crRNA array
  misc_feature (148)..(157): n is a, c, g, or t
cttggctttatatatcttgtggaaaggacgaaacaccgtaatttctactaagtgtagattgggccaacgatgccaggactaatttctactaagtgtagatagtgcaaaactgagcgcgggtaatttctactaagtgtagatttttttnnnnnnnnnnaagcttggcgtggatccgatatcaactagatcttgagacaaatggcagtattcatccacaattttaaaagaaaaggggggattggggggtacagtgcaggggaaagaatagtagacataatagcaacagacatacaaactaaag

SEQ ID NO: 12708 - DNA, 301 bp, Artificial Sequence
  Notch1.1_Arid1b.3
  crRNA array
  misc_feature (148)..(157): n is a, c, g, or t
cttggctttatatatcttgtggaaaggacgaaacaccgtaatttctactaagtgtagattgggccaacgatgccaggactaatttctactaagtgtagatcactcaaaggcgaacaggtataatttctactaagtgtagatttttttnnnnnnnnnnaagcttggcgtggatccgatatcaactagatcttgagacaaatggcagtattcatccacaattttaaaagaaaaggggggattggggggtacagtgcaggggaaagaatagtagacataatagcaacagacatacaaactaaag

SEQ ID NO: 12709 - DNA, 301 bp, Artificial Sequence
  Notch1.1_Arid1b.4
  crRNA array
  misc_feature (148)..(157): n is a, c, g, or t
cttggctttatatatcttgtggaaaggacgaaacaccgtaatttctactaagtgtagattgggccaacgatgccaggactaatttctactaagtgtagatctcctggctccgtagaagcataatttctactaagtgtagatttttttnnnnnnnnnnaagcttggcgtggatccgatatcaactagatcttgagacaaatggcagtattcatccacaattttaaaagaaaaggggggattggggggtacagtgcaggggaaagaatagtagacataatagcaacagacatacaaactaaag

SEQ ID NO: 12710 - DNA, 301 bp, Artificial Sequence
  Notch1.2_Arid1b.1
  crRNA array
  misc_feature (148)..(157): n is a, c, g, or t
cttggctttatatatcttgtggaaaggacgaaacaccgtaatttctactaagtgtagatgtcgccccagcatcctgaagtaatttctactaagtgtagatgctgctgctgtagtgcgtggtaatttctactaagtgtagatttttttnnnnnnnnnnaagcttggcgtggatccgatatcaactagatcttgagacaaatggcagtattcatccacaattttaaaagaaaaggggggattggggggtacagtgcaggggaaagaatagtagacataatagcaacagacatacaaactaaag

SEQ ID NO: 12711 - DNA, 301 bp, Artificial Sequence
  Notch1.2_Arid1b.2
  crRNA array
  misc_feature (148)..(157): n is a, c, g, or t
cttggctttatatatcttgtggaaaggacgaaacaccgtaatttctactaagtgtagatgtcgccccagcatcctgaagtaatttctactaagtgtagatagtgcaaaactgagcgcgggtaatttctactaagtgtagatttttttnnnnnnnnnnaagcttggcgtggatccgatatcaactagatcttgagacaaatggcagtattcatccacaattttaaaagaaaaggggggattggggggtacagtgcaggggaaagaatagtagacataatagcaacagacatacaaactaaag

SEQ ID NO: 12712 - DNA, 301 bp, Artificial Sequence
  Notch1.2_Arid1b.3
  crRNA array
  misc_feature (148)..(157): n is a, c, g, or t
cttggctttatatatcttgtggaaaggacgaaacaccgtaatttctactaagtgtagatgtcgccccagcatcctgaagtaatttctactaagtgtagatcactcaaaggcgaacaggtataatttctactaagtgtagatttttttnnnnnnnnnnaagcttggcgtggatccgatatcaactagatcttgagacaaatggcagtattcatccacaattttaaaagaaaaggggggattggggggtacagtgcaggggaaagaatagtagacataatagcaacagacatacaaactaaag

SEQ ID NO: 12713 - DNA, 301 bp, Artificial Sequence
  Notch1.2_Arid1b.4
  crRNA array
  misc_feature (148)..(157): n is a, c, g, or t
cttggctttatatatcttgtggaaaggacgaaacaccgtaatttctactaagtgtagatgtcgccccagcatcctgaagtaatttctactaagtgtagatctcctggctccgtagaagcataatttctactaagtgtagatttttttnnnnnnnnnnaagcttggcgtggatccgatatcaactagatcttgagacaaatggcagtattcatccacaattttaaaagaaaaggggggattggggggtacagtgcaggggaaagaatagtagacataatagcaacagacatacaaactaaag

SEQ ID NO: 12714 - DNA, 301 bp, Artificial Sequence
  Notch1.3_Arid1b.1
  crRNA array
  misc_feature (148)..(157): n is a, c, g, or t
cttggctttatatatcttgtggaaaggacgaaacaccgtaatttctactaagtgtagatagccacccccgccacgcctctaatttctactaagtgtagatgctgctgctgtagtgcgtggtaatttctactaagtgtagatttttttnnnnnnnnnnaagcttggcgtggatccgatatcaactagatcttgagacaaatggcagtattcatccacaattttaaaagaaaaggggggattggggggtacagtgcaggggaaagaatagtagacataatagcaacagacatacaaactaaag

SEQ ID NO: 12715 - DNA, 301 bp, Artificial Sequence
  Notch1.3_Arid1b.2
  crRNA array
  misc_feature (148)..(157): n is a, c, g, or t
cttggctttatatatcttgtggaaaggacgaaacaccgtaatttctactaagtgtagatagccacccccgccacgcctctaatttctactaagtgtagatagtgcaaaactgagcgcgggtaatttctactaagtgtagatttttttnnnnnnnnnnaagcttggcgtggatccgatatcaactagatcttgagacaaatggcagtattcatccacaattttaaaagaaaaggggggattggggggtacagtgcaggggaaagaatagtagacataatagcaacagacatacaaactaaag

SEQ ID NO: 12716 - DNA, 301 bp, Artificial Sequence
  Notch1.3_Arid1b.3
  crRNA array
  misc_feature (148)..(157): n is a, c, g, or t
cttggctttatatatcttgtggaaaggacgaaacaccgtaatttctactaagtgtagatagccacccccgccacgcctctaatttctactaagtgtagatcactcaaaggcgaacaggtataatttctactaagtgtagatttttttnnnnnnnnnnaagcttggcgtggatccgatatcaactagatcttgagacaaatggcagtattcatccacaattttaaaagaaaaggggggattggggggtacagtgcaggggaaagaatagtagacataatagcaacagacatacaaactaaag

SEQ ID NO: 12717 - DNA, 301 bp, Artificial Sequence
  Notch1.3_Arid1b.4
  crRNA array
  misc_feature (148)..(157): n is a, c, g, or t
cttggctttatatatcttgtggaaaggacgaaacaccgtaatttctactaagtgtagatagccacccccgccacgcctctaatttctactaagtgtagatctcctggctccgtagaagcataatttctactaagtgtagatttttttnnnnnnnnnnaagcttggcgtggatccgatatcaactagatcttgagacaaatggcagtattcatccacaattttaaaagaaaaggggggattggggggtacagtgcaggggaaagaatagtagacataatagcaacagacatacaaactaaag

SEQ ID NO: 12718 - DNA, 301 bp, Artificial Sequence
  Notch1.4_Arid1b.1
  crRNA array
  misc_feature (148)..(157): n is a, c, g, or t
cttggctttatatatcttgtggaaaggacgaaacaccgtaatttctactaagtgtagataaagtgtcagaggccagcaataatttctactaagtgtagatgctgctgctgtagtgcgtggtaatttctactaagtgtagatttttttnnnnnnnnnnaagcttggcgtggatccgatatcaactagatcttgagacaaatggcagtattcatccacaattttaaaagaaaaggggggattggggggtacagtgcaggggaaagaatagtagacataatagcaacagacatacaaactaaag

SEQ ID NO: 12719 - DNA, 301 bp, Artificial Sequence
  Notch1.4_Arid1b.2
  crRNA array
  misc_feature (148)..(157): n is a, c, g, or t
cttggctttatatatcttgtggaaaggacgaaacaccgtaatttctactaagtgtagataaagtgtcagaggccagcaataatttctactaagtgtagatagtgcaaaactgagcgcgggtaatttctactaagtgtagatttttttnnnnnnnnnnaagcttggcgtggatccgatatcaactagatcttgagacaaatggcagtattcatccacaattttaaaagaaaaggggggattggggggtacagtgcaggggaaagaatagtagacataatagcaacagacatacaaactaaag

SEQ ID NO: 12720 - DNA, 301 bp, Artificial Sequence
  Notch1.4_Arid1b.3
  crRNA array
  misc_feature (148)..(157): n is a, c, g, or t
cttggctttatatatcttgtggaaaggacgaaacaccgtaatttctactaagtgtagataaagtgtcagaggccagcaataatttctactaagtgtagatcactcaaaggcgaacaggtataatttctactaagtgtagatttttttnnnnnnnnnnaagcttggcgtggatccgatatcaactagatcttgagacaaatggcagtattcatccacaattttaaaagaaaaggggggattggggggtacagtgcaggggaaagaatagtagacataatagcaacagacatacaaactaaag

SEQ ID NO: 12721 - DNA, 301 bp, Artificial Sequence
  Notch1.4_Arid1b.4
  crRNA array
  misc_feature (148)..(157): n is a, c, g, or t
cttggctttatatatcttgtggaaaggacgaaacaccgtaatttctactaagtgtagataaagtgtcagaggccagcaataatttctactaagtgtagatctcctggctccgtagaagcataatttctactaagtgtagatttttttnnnnnnnnnnaagcttggcgtggatccgatatcaactagatcttgagacaaatggcagtattcatccacaattttaaaagaaaaggggggattggggggtacagtgcaggggaaagaatagtagacataatagcaacagacatacaaactaaag

SEQ ID NO: 12722 - DNA, 301 bp, Artificial Sequence
  Notch1.1_Rb1.1
  crRNA array
  misc_feature (148)..(157): n is a, c, g, or t
cttggctttatatatcttgtggaaaggacgaaacaccgtaatttctactaagtgtagattgggccaacgatgccaggactaatttctactaagtgtagattctgacatgatcgggtaccttaatttctactaagtgtagatttttttnnnnnnnnnnaagcttggcgtggatccgatatcaactagatcttgagacaaatggcagtattcatccacaattttaaaagaaaaggggggattggggggtacagtgcaggggaaagaatagtagacataatagcaacagacatacaaactaaag

SEQ ID NO: 12723 - DNA, 301 bp, Artificial Sequence
  Notch1.1_Rb1.2
  crRNA array
  misc_feature (148)..(157): n is a, c, g, or t
cttggctttatatatcttgtggaaaggacgaaacaccgtaatttctactaagtgtagattgggccaacgatgccaggactaatttctactaagtgtagatgtctctgcatgaaaacggagtaatttctactaagtgtagatttttttnnnnnnnnnnaagcttggcgtggatccgatatcaactagatcttgagacaaatggcagtattcatccacaattttaaaagaaaaggggggattggggggtacagtgcaggggaaagaatagtagacataatagcaacagacatacaaactaaag

SEQ ID NO: 12724 - DNA, 301 bp, Artificial Sequence
  Notch1.1_Rb1.3
  crRNA array
  misc_feature (148)..(157): n is a, c, g, or t
cttggctttatatatcttgtggaaaggacgaaacaccgtaatttctactaagtgtagattgggccaacgatgccaggactaatttctactaagtgtagatagccaatctggtctaataactaatttctactaagtgtagatttttttnnnnnnnnnnaagcttggcgtggatccgatatcaactagatcttgagacaaatggcagtattcatccacaattttaaaagaaaaggggggattggggggtacagtgcaggggaaagaatagtagacataatagcaacagacatacaaactaaag

SEQ ID NO: 12725 - DNA, 301 bp, Artificial Sequence
  Notch1.1_Rb1.4
  crRNA array
  misc_feature (148)..(157): n is a, c, g, or t
cttggctttatatatcttgtggaaaggacgaaacaccgtaatttctactaagtgtagattgggccaacgatgccaggactaatttctactaagtgtagattgtagctcagtaaaagtgaataatttctactaagtgtagatttttttnnnnnnnnnnaagcttggcgtggatccgatatcaactagatcttgagacaaatggcagtattcatccacaattttaaaagaaaaggggggattggggggtacagtgcaggggaaagaatagtagacataatagcaacagacatacaaactaaag

SEQ ID NO: 12726 - DNA, 301 bp, Artificial Sequence
  Notch1.2_Rb1.1
  crRNA array
  misc_feature (148)..(157): n is a, c, g, or t
cttggctttatatatcttgtggaaaggacgaaacaccgtaatttctactaagtgtagatgtcgccccagcatcctgaagtaatttctactaagtgtagattctgacatgatcgggtaccttaatttctactaagtgtagatttttttnnnnnnnnnnaagcttggcgtggatccgatatcaactagatcttgagacaaatggcagtattcatccacaattttaaaagaaaaggggggattggggggtacagtgcaggggaaagaatagtagacataatagcaacagacatacaaactaaag

SEQ ID NO: 12727 - DNA, 301 bp, Artificial Sequence
  Notch1.2_Rb1.2
  crRNA array
  misc_feature (148)..(157): n is a, c, g, or t
cttggctttatatatcttgtggaaaggacgaaacaccgtaatttctactaagtgtagatgtcgccccagcatcctgaagtaatttctactaagtgtagatgtctctgcatgaaaacggagtaatttctactaagtgtagatttttttnnnnnnnnnnaagcttggcgtggatccgatatcaactagatcttgagacaaatggcagtattcatccacaattttaaaagaaaaggggggattggggggtacagtgcaggggaaagaatagtagacataatagcaacagacatacaaactaaag

SEQ ID NO: 12728 - DNA, 301 bp, Artificial Sequence
  Notch1.2_Rb1.3
  crRNA array
  misc_feature (148)..(157): n is a, c, g, or t
cttggctttatatatcttgtggaaaggacgaaacaccgtaatttctactaagtgtagatgtcgccccagcatcctgaagtaatttctactaagtgtagatagccaatctggtctaataactaatttctactaagtgtagatttttttnnnnnnnnnnaagcttggcgtggatccgatatcaactagatcttgagacaaatggcagtattcatccacaattttaaaagaaaaggggggattggggggtacagtgcaggggaaagaatagtagacataatagcaacagacatacaaactaaag

SEQ ID NO: 12729 - DNA, 301 bp, Artificial Sequence
  Notch1.2_Rb1.4
  crRNA array
  misc_feature (148)..(157): n is a, c, g, or t
cttggctttatatatcttgtggaaaggacgaaacaccgtaatttctactaagtgtagatgtcgccccagcatcctgaagtaatttctactaagtgtagattgtagctcagtaaaagtgaataatttctactaagtgtagatttttttnnnnnnnnnnaagcttggcgtggatccgatatcaactagatcttgagacaaatggcagtattcatccacaattttaaaagaaaaggggggattggggggtacagtgcaggggaaagaatagtagacataatagcaacagacatacaaactaaag

SEQ ID NO: 12730 - DNA, 301 bp, Artificial Sequence
  Notch1.3_Rb1.1
  crRNA array
  misc_feature (148)..(157): n is a, c, g, or t
cttggctttatatatcttgtggaaaggacgaaacaccgtaatttctactaagtgtagatagccacccccgccacgcctctaatttctactaagtgtagattctgacatgatcgggtaccttaatttctactaagtgtagatttttttnnnnnnnnnnaagcttggcgtggatccgatatcaactagatcttgagacaaatggcagtattcatccacaattttaaaagaaaaggggggattggggggtacagtgcaggggaaagaatagtagacataatagcaacagacatacaaactaaag

SEQ ID NO: 12731 - DNA, 301 bp, Artificial Sequence
  Notch1.3_Rb1.2
  crRNA array
  misc_feature (148)..(157): n is a, c, g, or t
cttggctttatatatcttgtggaaaggacgaaacaccgtaatttctactaagtgtagatagccacccccgccacgcctctaatttctactaagtgtagatgtctctgcatgaaaacggagtaatttctactaagtgtagatttttttnnnnnnnnnnaagcttggcgtggatccgatatcaactagatcttgagacaaatggcagtattcatccacaattttaaaagaaaaggggggattggggggtacagtgcaggggaaagaatagtagacataatagcaacagacatacaaactaaag

SEQ ID NO: 12732 - DNA, 301 bp, Artificial Sequence
  Notch1.3_Rb1.3
  crRNA array
  misc_feature (148)..(157): n is a, c, g, or t
cttggctttatatatcttgtggaaaggacgaaacaccgtaatttctactaagtgtagatagccacccccgccacgcctctaatttctactaagtgtagatagccaatctggtctaataactaatttctactaagtgtagatttttttnnnnnnnnnnaagcttggcgtggatccgatatcaactagatcttgagacaaatggcagtattcatccacaattttaaaagaaaaggggggattggggggtacagtgcaggggaaagaatagtagacataatagcaacagacatacaaactaaag

SEQ ID NO: 12733 - DNA, 301 bp, Artificial Sequence
  Notch1.3_Rb1.4
  crRNA array
  misc_feature (148)..(157): n is a, c, g, or t
cttggctttatatatcttgtggaaaggacgaaacaccgtaatttctactaagtgtagatagccacccccgccacgcctctaatttctactaagtgtagattgtagctcagtaaaagtgaataatttctactaagtgtagatttttttnnnnnnnnnnaagcttggcgtggatccgatatcaactagatcttgagacaaatggcagtattcatccacaattttaaaagaaaaggggggattggggggtacagtgcaggggaaagaatagtagacataatagcaacagacatacaaactaaag

SEQ ID NO: 12734 - DNA, 301 bp, Artificial Sequence
  Notch1.4_Rb1.1
  crRNA array
  misc_feature (148)..(157): n is a, c, g, or t
cttggctttatatatcttgtggaaaggacgaaacaccgtaatttctactaagtgtagataaagtgtcagaggccagcaataatttctactaagtgtagattctgacatgatcgggtaccttaatttctactaagtgtagatttttttnnnnnnnnnnaagcttggcgtggatccgatatcaactagatcttgagacaaatggcagtattcatccacaattttaaaagaaaaggggggattggggggtacagtgcaggggaaagaatagtagacataatagcaacagacatacaaactaaag

SEQ ID NO: 12735 - DNA, 301 bp, Artificial Sequence
  Notch1.4_Rb1.2
  crRNA array
  misc_feature (148)..(157): n is a, c, g, or t
cttggctttatatatcttgtggaaaggacgaaacaccgtaatttctactaagtgtagataaagtgtcagaggccagcaataatttctactaagtgtagatgtctctgcatgaaaacggagtaatttctactaagtgtagatttttttnnnnnnnnnnaagcttggcgtggatccgatatcaactagatcttgagacaaatggcagtattcatccacaattttaaaagaaaaggggggattggggggtacagtgcaggggaaagaatagtagacataatagcaacagacatacaaactaaag

SEQ ID NO: 12736 - DNA, 301 bp, Artificial Sequence
  Notch1.4_Rb1.3
  crRNA array
  misc_feature (148)..(157): n is a, c, g, or t
cttggctttatatatcttgtggaaaggacgaaacaccgtaatttctactaagtgtagataaagtgtcagaggccagcaataatttctactaagtgtagatagccaatctggtctaataactaatttctactaagtgtagatttttttnnnnnnnnnnaagcttggcgtggatccgatatcaactagatcttgagacaaatggcagtattcatccacaattttaaaagaaaaggggggattggggggtacagtgcaggggaaagaatagtagacataatagcaacagacatacaaactaaag

SEQ ID NO: 12737 - DNA, 301 bp, Artificial Sequence
  Notch1.4_Rb1.4
  crRNA array
  misc_feature (148)..(157): n is a, c, g, or t
cttggctttatatatcttgtggaaaggacgaaacaccgtaatttctactaagtgtagataaagtgtcagaggccagcaataatttctactaagtgtagattgtagctcagtaaaagtgaataatttctactaagtgtagatttttttnnnnnnnnnnaagcttggcgtggatccgatatcaactagatcttgagacaaatggcagtattcatccacaattttaaaagaaaaggggggattggggggtacagtgcaggggaaagaatagtagacataatagcaacagacatacaaactaaag

SEQ ID NO: 12738 - DNA, 301 bp, Artificial Sequence
  Notch1.1_Kmt2c.1
  crRNA array
  misc_feature (148)..(157): n is a, c, g, or t
cttggctttatatatcttgtggaaaggacgaaacaccgtaatttctactaagtgtagattgggccaacgatgccaggactaatttctactaagtgtagatactcgacctccacctccctataatttctactaagtgtagatttttttnnnnnnnnnnaagcttggcgtggatccgatatcaactagatcttgagacaaatggcagtattcatccacaattttaaaagaaaaggggggattggggggtacagtgcaggggaaagaatagtagacataatagcaacagacatacaaactaaag

SEQ ID NO: 12739 - DNA, 301 bp, Artificial Sequence
  Notch1.1_Kmt2c.2
  crRNA array
  misc_feature (148)..(157): n is a, c, g, or t
cttggctttatatatcttgtggaaaggacgaaacaccgtaatttctactaagtgtagattgggccaacgatgccaggactaatttctactaagtgtagatcccaaagatcagcgtggacctaatttctactaagtgtagatttttttnnnnnnnnnnaagcttggcgtggatccgatatcaactagatcttgagacaaatggcagtattcatccacaattttaaaagaaaaggggggattggggggtacagtgcaggggaaagaatagtagacataatagcaacagacatacaaactaaag

SEQ ID NO: 12740 - DNA, 301 bp, Artificial Sequence
  Notch1.1_Kmt2c.3
  crRNA array
  misc_feature (148)..(157): n is a, c, g, or t
cttggctttatatatcttgtggaaaggacgaaacaccgtaatttctactaagtgtagattgggccaacgatgccaggactaatttctactaagtgtagataaaagatccgaatcgatgcgtaatttctactaagtgtagatttttttnnnnnnnnnnaagcttggcgtggatccgatatcaactagatcttgagacaaatggcagtattcatccacaattttaaaagaaaaggggggattggggggtacagtgcaggggaaagaatagtagacataatagcaacagacatacaaactaaag

SEQ ID NO: 12741 - DNA, 301 bp, Artificial Sequence
  Notch1.1_Kmt2c.4
  crRNA array
  misc_feature (148)..(157): n is a, c, g, or t
cttggctttatatatcttgtggaaaggacgaaacaccgtaatttctactaagtgtagattgggccaacgatgccaggactaatttctactaagtgtagatctgaggcacatggaagcgattaatttctactaagtgtagatttttttnnnnnnnnnnaagcttggcgtggatccgatatcaactagatcttgagacaaatggcagtattcatccacaattttaaaagaaaaggggggattggggggtacagtgcaggggaaagaatagtagacataatagcaacagacatacaaactaaag

SEQ ID NO: 12742 - DNA, 301 bp, Artificial Sequence
  Notch1.2_Kmt2c.1
  crRNA array
  misc_feature (148)..(157): n is a, c, g, or t
cttggctttatatatcttgtggaaaggacgaaacaccgtaatttctactaagtgtagatgtcgccccagcatcctgaagtaatttctactaagtgtagatactcgacctccacctccctataatttctactaagtgtagatttttttnnnnnnnnnnaagcttggcgtggatccgatatcaactagatcttgagacaaatggcagtattcatccacaattttaaaagaaaaggggggattggggggtacagtgcaggggaaagaatagtagacataatagcaacagacatacaaactaaag

SEQ ID NO: 12743 - DNA, 301 bp, Artificial Sequence
  Notch1.2_Kmt2c.2
  crRNA array
  misc_feature (148)..(157): n is a, c, g, or t
cttggctttatatatcttgtggaaaggacgaaacaccgtaatttctactaagtgtagatgtcgccccagcatcctgaagtaatttctactaagtgtagatcccaaagatcagcgtggacctaatttctactaagtgtagatttttttnnnnnnnnnnaagcttggcgtggatccgatatcaactagatcttgagacaaatggcagtattcatccacaattttaaaagaaaaggggggattggggggtacagtgcaggggaaagaatagtagacataatagcaacagacatacaaactaaag

SEQ ID NO: 12744 - DNA, 301 bp, Artificial Sequence
  Notch1.2_Kmt2c.3
  crRNA array
  misc_feature (148)..(157): n is a, c, g, or t
cttggctttatatatcttgtggaaaggacgaaacaccgtaatttctactaagtgtagatgtcgccccagcatcctgaagtaatttctactaagtgtagataaaagatccgaatcgatgcgtaatttctactaagtgtagatttttttnnnnnnnnnnaagcttggcgtggatccgatatcaactagatcttgagacaaatggcagtattcatccacaattttaaaagaaaaggggggattggggggtacagtgcaggggaaagaatagtagacataatagcaacagacatacaaactaaag

SEQ ID NO: 12745 - DNA, 301 bp, Artificial Sequence
  Notch1.2_Kmt2c.4
  crRNA array
  misc_feature (148)..(157): n is a, c, g, or t
cttggctttatatatcttgtggaaaggacgaaacaccgtaatttctactaagtgtagatgtcgccccagcatcctgaagtaatttctactaagtgtagatctgaggcacatggaagcgattaatttctactaagtgtagatttttttnnnnnnnnnnaagcttggcgtggatccgatatcaactagatcttgagacaaatggcagtattcatccacaattttaaaagaaaaggggggattggggggtacagtgcaggggaaagaatagtagacataatagcaacagacatacaaactaaag

SEQ ID NO: 12746 - DNA, 301 bp, Artificial Sequence
  Notch1.3_Kmt2c.1
  crRNA array
  misc_feature (148)..(157): n is a, c, g, or t
cttggctttatatatcttgtggaaaggacgaaacaccgtaatttctactaagtgtagatagccacccccgccacgcctctaatttctactaagtgtagatactcgacctccacctccctataatttctactaagtgtagatttttttnnnnnnnnnnaagcttggcgtggatccgatatcaactagatcttgagacaaatggcagtattcatccacaattttaaaagaaaaggggggattggggggtacagtgcaggggaaagaatagtagacataatagcaacagacatacaaactaaag

SEQ ID NO: 12747 - DNA, 301 bp, Artificial Sequence
  Notch1.3_Kmt2c.2
  crRNA array
  misc_feature (148)..(157): n is a, c, g, or t
cttggctttatatatcttgtggaaaggacgaaacaccgtaatttctactaagtgtagatagccacccccgccacgcctctaatttctactaagtgtagatcccaaagatcagcgtggacctaatttctactaagtgtagatttttttnnnnnnnnnnaagcttggcgtggatccgatatcaactagatcttgagacaaatggcagtattcatccacaattttaaaagaaaaggggggattggggggtacagtgcaggggaaagaatagtagacataatagcaacagacatacaaactaaag

SEQ ID NO: 12748 - DNA, 301 bp, Artificial Sequence
  Notch1.3_Kmt2c.3
  crRNA array
  misc_feature (148)..(157): n is a, c, g, or t
cttggctttatatatcttgtggaaaggacgaaacaccgtaatttctactaagtgtagatagccacccccgccacgcctctaatttctactaagtgtagataaaagatccgaatcgatgcgtaatttctactaagtgtagatttttttnnnnnnnnnnaagcttggcgtggatccgatatcaactagatcttgagacaaatggcagtattcatccacaattttaaaagaaaaggggggattggggggtacagtgcaggggaaagaatagtagacataatagcaacagacatacaaactaaag

SEQ ID NO: 12749 - DNA, 301 bp, Artificial Sequence
  Notch1.3_Kmt2c.4
  crRNA array
  misc_feature (148)..(157): n is a, c, g, or t
cttggctttatatatcttgtggaaaggacgaaacaccgtaatttctactaagtgtagatagccacccccgccacgcctctaatttctactaagtgtagatctgaggcacatggaagcgattaatttctactaagtgtagatttttttnnnnnnnnnnaagcttggcgtggatccgatatcaactagatcttgagacaaatggcagtattcatccacaattttaaaagaaaaggggggattggggggtacagtgcaggggaaagaatagtagacataatagcaacagacatacaaactaaag

SEQ ID NO: 12750 - DNA, 301 bp, Artificial Sequence
  Notch1.4_Kmt2c.1
  crRNA array
  misc_feature (148)..(157): n is a, c, g, or t
cttggctttatatatcttgtggaaaggacgaaacaccgtaatttctactaagtgtagataaagtgtcagaggccagcaataatttctactaagtgtagatactcgacctccacctccctataatttctactaagtgtagatttttttnnnnnnnnnnaagcttggcgtggatccgatatcaactagatcttgagacaaatggcagtattcatccacaattttaaaagaaaaggggggattggggggtacagtgcaggggaaagaatagtagacataatagcaacagacatacaaactaaag

SEQ ID NO: 12751 - DNA, 301 bp, Artificial Sequence
  Notch1.4_Kmt2c.2
  crRNA array
  misc_feature (148)..(157): n is a, c, g, or t
cttggctttatatatcttgtggaaaggacgaaacaccgtaatttctactaagtgtagataaagtgtcagaggccagcaataatttctactaagtgtagatcccaaagatcagcgtggacctaatttctactaagtgtagatttttttnnnnnnnnnnaagcttggcgtggatccgatatcaactagatcttgagacaaatggcagtattcatccacaattttaaaagaaaaggggggattggggggtacagtgcaggggaaagaatagtagacataatagcaacagacatacaaactaaag

SEQ ID NO: 12752 - DNA, 301 bp, Artificial Sequence
  Notch1.4_Kmt2c.3
  crRNA array
  misc_feature (148)..(157): n is a, c, g, or t
cttggctttatatatcttgtggaaaggacgaaacaccgtaatttctactaagtgtagataaagtgtcagaggccagcaataatttctactaagtgtagataaaagatccgaatcgatgcgtaatttctactaagtgtagatttttttnnnnnnnnnnaagcttggcgtggatccgatatcaactagatcttgagacaaatggcagtattcatccacaattttaaaagaaaaggggggattggggggtacagtgcaggggaaagaatagtagacataatagcaacagacatacaaactaaag

SEQ ID NO: 12753 - DNA, 301 bp, Artificial Sequence
  Notch1.4_Kmt2c.4
  crRNA array
  misc_feature (148)..(157): n is a, c, g, or t
cttggctttatatatcttgtggaaaggacgaaacaccgtaatttctactaagtgtagataaagtgtcagaggccagcaataatttctactaagtgtagatctgaggcacatggaagcgattaatttctactaagtgtagatttttttnnnnnnnnnnaagcttggcgtggatccgatatcaactagatcttgagacaaatggcagtattcatccacaattttaaaagaaaaggggggattggggggtacagtgcaggggaaagaatagtagacataatagcaacagacatacaaactaaag

SEQ ID NO: 12754 - DNA, 301 bp, Artificial Sequence
  Notch1.1_Pten.1
  crRNA array
  misc_feature (148)..(157): n is a, c, g, or t
cttggctttatatatcttgtggaaaggacgaaacaccgtaatttctactaagtgtagattgggccaacgatgccaggactaatttctactaagtgtagataagcgtggtgcgtgacgcactaatttctactaagtgtagatttttttnnnnnnnnnnaagcttggcgtggatccgatatcaactagatcttgagacaaatggcagtattcatccacaattttaaaagaaaaggggggattggggggtacagtgcaggggaaagaatagtagacataatagcaacagacatacaaactaaag

SEQ ID NO: 12755 - DNA, 301 bp, Artificial Sequence
  Notch1.1_Pten.2
  crRNA array
  misc_feature (148)..(157): n is a, c, g, or t
cttggctttatatatcttgtggaaaggacgaaacaccgtaatttctactaagtgtagattgggccaacgatgccaggactaatttctactaagtgtagattgtcaccagctgaagtggcttaatttctactaagtgtagatttttttnnnnnnnnnnaagcttggcgtggatccgatatcaactagatcttgagacaaatggcagtattcatccacaattttaaaagaaaaggggggattggggggtacagtgcaggggaaagaatagtagacataatagcaacagacatacaaactaaag

SEQ ID NO: 12756 - DNA, 301 bp, Artificial Sequence
  Notch1.1_Pten.3
  crRNA array
  misc_feature (148)..(157): n is a, c, g, or t
cttggctttatatatcttgtggaaaggacgaaacaccgtaatttctactaagtgtagattgggccaacgatgccaggactaatttctactaagtgtagatggagtcaagaggctgatttttaatttctactaagtgtagatttttttnnnnnnnnnnaagcttggcgtggatccgatatcaactagatcttgagacaaatggcagtattcatccacaattttaaaagaaaaggggggattggggggtacagtgcaggggaaagaatagtagacataatagcaacagacatacaaactaaag

SEQ ID NO: 12757 - DNA, 301 bp, Artificial Sequence
  Notch1.1_Pten.4
  crRNA array
  misc_feature (148)..(157): n is a, c, g, or t
cttggctttatatatcttgtggaaaggacgaaacaccgtaatttctactaagtgtagattgggccaacgatgccaggactaatttctactaagtgtagatctgtaagctaaaccactacataatttctactaagtgtagatttttttnnnnnnnnnnaagcttggcgtggatccgatatcaactagatcttgagacaaatggcagtattcatccacaattttaaaagaaaaggggggattggggggtacagtgcaggggaaagaatagtagacataatagcaacagacatacaaactaaag

SEQ ID NO: 12758 - DNA, 301 bp, Artificial Sequence
  Notch1.2_Pten.1
  crRNA array
  misc_feature (148)..(157): n is a, c, g, or t
cttggctttatatatcttgtggaaaggacgaaacaccgtaatttctactaagtgtagatgtcgccccagcatcctgaagtaatttctactaagtgtagataagcgtggtgcgtgacgcactaatttctactaagtgtagatttttttnnnnnnnnnnaagcttggcgtggatccgatatcaactagatcttgagacaaatggcagtattcatccacaattttaaaagaaaaggggggattggggggtacagtgcaggggaaagaatagtagacataatagcaacagacatacaaactaaag

SEQ ID NO: 12759 - DNA, 301 bp, Artificial Sequence
  Notch1.2_Pten.2
  crRNA array
  misc_feature (148)..(157): n is a, c, g, or t
cttggctttatatatcttgtggaaaggacgaaacaccgtaatttctactaagtgtagatgtcgccccagcatcctgaagtaatttctactaagtgtagattgtcaccagctgaagtggcttaatttctactaagtgtagatttttttnnnnnnnnnnaagcttggcgtggatccgatatcaactagatcttgagacaaatggcagtattcatccacaattttaaaagaaaaggggggattggggggtacagtgcaggggaaagaatagtagacataatagcaacagacatacaaactaaag

SEQ ID NO: 12760 - DNA, 301 bp, Artificial Sequence
  Notch1.2_Pten.3
  crRNA array
  misc_feature (148)..(157): n is a, c, g, or t
cttggctttatatatcttgtggaaaggacgaaacaccgtaatttctactaagtgtagatgtcgccccagcatcctgaagtaatttctactaagtgtagatggagtcaagaggctgatttttaatttctactaagtgtagatttttttnnnnnnnnnnaagcttggcgtggatccgatatcaactagatcttgagacaaatggcagtattcatccacaattttaaaagaaaaggggggattggggggtacagtgcaggggaaagaatagtagacataatagcaacagacatacaaactaaag

SEQ ID NO: 12761 - DNA, 301 bp, Artificial Sequence
  Notch1.2_Pten.4
  crRNA array
  misc_feature (148)..(157): n is a, c, g, or t
cttggctttatatatcttgtggaaaggacgaaacaccgtaatttctactaagtgtagatgtcgccccagcatcctgaagtaatttctactaagtgtagatctgtaagctaaaccactacataatttctactaagtgtagatttttttnnnnnnnnnnaagcttggcgtggatccgatatcaactagatcttgagacaaatggcagtattcatccacaattttaaaagaaaaggggggattggggggtacagtgcaggggaaagaatagtagacataatagcaacagacatacaaactaaag

SEQ ID NO: 12762 - DNA, 301 bp, Artificial Sequence
  Notch1.3_Pten.1
  crRNA array
  misc_feature (148)..(157): n is a, c, g, or t
cttggctttatatatcttgtggaaaggacgaaacaccgtaatttctactaagtgtagatagccacccccgccacgcctctaatttctactaagtgtagataagcgtggtgcgtgacgcactaatttctactaagtgtagatttttttnnnnnnnnnnaagcttggcgtggatccgatatcaactagatcttgagacaaatggcagtattcatccacaattttaaaagaaaaggggggattggggggtacagtgcaggggaaagaatagtagacataatagcaacagacatacaaactaaag

SEQ ID NO: 12763 - DNA, 301 bp, Artificial Sequence
  Notch1.3_Pten.2
  crRNA array
  misc_feature (148)..(157): n is a, c, g, or t
cttggctttatatatcttgtggaaaggacgaaacaccgtaatttctactaagtgtagatagccacccccgccacgcctctaatttctactaagtgtagattgtcaccagctgaagtggcttaatttctactaagtgtagatttttttnnnnnnnnnnaagcttggcgtggatccgatatcaactagatcttgagacaaatggcagtattcatccacaattttaaaagaaaaggggggattggggggtacagtgcaggggaaagaatagtagacataatagcaacagacatacaaactaaag

SEQ ID NO: 12764 - DNA, 301 bp, Artificial Sequence
  Notch1.3_Pten.3
  crRNA array
  misc_feature (148)..(157): n is a, c, g, or t
cttggctttatatatcttgtggaaaggacgaaacaccgtaatttctactaagtgtagatagccacccccgccacgcctctaatttctactaagtgtagatggagtcaagaggctgatttttaatttctactaagtgtagatttttttnnnnnnnnnnaagcttggcgtggatccgatatcaactagatcttgagacaaatggcagtattcatccacaattttaaaagaaaaggggggattggggggtacagtgcaggggaaagaatagtagacataatagcaacagacatacaaactaaag

SEQ ID NO: 12765 - DNA, 301 bp, Artificial Sequence
  Notch1.3_Pten.4
  crRNA array
  misc_feature (148)..(157): n is a, c, g, or t
cttggctttatatatcttgtggaaaggacgaaacaccgtaatttctactaagtgtagatagccacccccgccacgcctctaatttctactaagtgtagatctgtaagctaaaccactacataatttctactaagtgtagatttttttnnnnnnnnnnaagcttggcgtggatccgatatcaactagatcttgagacaaatggcagtattcatccacaattttaaaagaaaaggggggattggggggtacagtgcaggggaaagaatagtagacataatagcaacagacatacaaactaaag

SEQ ID NO: 12766 - DNA, 301 bp, Artificial Sequence
  Notch1.4_Pten.1
  crRNA array
  misc_feature (148)..(157): n is a, c, g, or t
cttggctttatatatcttgtggaaaggacgaaacaccgtaatttctactaagtgtagataaagtgtcagaggccagcaataatttctactaagtgtagataagcgtggtgcgtgacgcactaatttctactaagtgtagatttttttnnnnnnnnnnaagcttggcgtggatccgatatcaactagatcttgagacaaatggcagtattcatccacaattttaaaagaaaaggggggattggggggtacagtgcaggggaaagaatagtagacataatagcaacagacatacaaactaaag

SEQ ID NO: 12767 - DNA, 301 bp, Artificial Sequence
  Notch1.4_Pten.2
  crRNA array
  misc_feature (148)..(157): n is a, c, g, or t
cttggctttatatatcttgtggaaaggacgaaacaccgtaatttctactaagtgtagataaagtgtcagaggccagcaataatttctactaagtgtagattgtcaccagctgaagtggcttaatttctactaagtgtagatttttttnnnnnnnnnnaagcttggcgtggatccgatatcaactagatcttgagacaaatggcagtattcatccacaattttaaaagaaaaggggggattggggggtacagtgcaggggaaagaatagtagacataatagcaacagacatacaaactaaag

SEQ ID NO: 12768 - DNA, 301 bp, Artificial Sequence
  Notch1.4_Pten.3
  crRNA array
  misc_feature (148)..(157): n is a, c, g, or t
cttggctttatatatcttgtggaaaggacgaaacaccgtaatttctactaagtgtagataaagtgtcagaggccagcaataatttctactaagtgtagatggagtcaagaggctgatttttaatttctactaagtgtagatttttttnnnnnnnnnnaagcttggcgtggatccgatatcaactagatcttgagacaaatggcagtattcatccacaattttaaaagaaaaggggggattggggggtacagtgcaggggaaagaatagtagacataatagcaacagacatacaaactaaag

SEQ ID NO: 12769 - DNA, 301 bp, Artificial Sequence
  Notch1.4_Pten.4
  crRNA array
  misc_feature (148)..(157): n is a, c, g, or t
cttggctttatatatcttgtggaaaggacgaaacaccgtaatttctactaagtgtagataaagtgtcagaggccagcaataatttctactaagtgtagatctgtaagctaaaccactacataatttctactaagtgtagatttttttnnnnnnnnnnaagcttggcgtggatccgatatcaactagatcttgagacaaatggcagtattcatccacaattttaaaagaaaaggggggattggggggtacagtgcaggggaaagaatagtagacataatagcaacagacatacaaactaaag

SEQ ID NO: 12770 - DNA, 301 bp, Artificial Sequence
  Notch1.1_Atm.1
  crRNA array
  misc_feature (148)..(157): n is a, c, g, or t
cttggctttatatatcttgtggaaaggacgaaacaccgtaatttctactaagtgtagattgggccaacgatgccaggactaatttctactaagtgtagatgagaaagtctccgaatcgtttaatttctactaagtgtagatttttttnnnnnnnnnnaagcttggcgtggatccgatatcaactagatcttgagacaaatggcagtattcatccacaattttaaaagaaaaggggggattggggggtacagtgcaggggaaagaatagtagacataatagcaacagacatacaaactaaag

SEQ ID NO: 12771 - DNA, 301 bp, Artificial Sequence
  Notch1.1_Atm.2
  crRNA array
  misc_feature (148)..(157): n is a, c, g, or t
cttggctttatatatcttgtggaaaggacgaaacaccgtaatttctactaagtgtagattgggccaacgatgccaggactaatttctactaagtgtagatcctacgagggcacgagagactaatttctactaagtgtagatttttttnnnnnnnnnnaagcttggcgtggatccgatatcaactagatcttgagacaaatggcagtattcatccacaattttaaaagaaaaggggggattggggggtacagtgcaggggaaagaatagtagacataatagcaacagacatacaaactaaag

SEQ ID NO: 12772 - DNA, 301 bp, Artificial Sequence
  Notch1.1_Atm.3
  crRNA array
  misc_feature (148)..(157): n is a, c, g, or t
cttggctttatatatcttgtggaaaggacgaaacaccgtaatttctactaagtgtagattgggccaacgatgccaggactaatttctactaagtgtagattgaaagtctccgatatgccataatttctactaagtgtagatttttttnnnnnnnnnnaagcttggcgtggatccgatatcaactagatcttgagacaaatggcagtattcatccacaattttaaaagaaaaggggggattggggggtacagtgcaggggaaagaatagtagacataatagcaacagacatacaaactaaag

SEQ ID NO: 12773 - DNA, 301 bp, Artificial Sequence
  Notch1.1_Atm.4
  crRNA array
  misc_feature (148)..(157): n is a, c, g, or t
cttggctttatatatcttgtggaaaggacgaaacaccgtaatttctactaagtgtagattgggccaacgatgccaggactaatttctactaagtgtagatggtggtgatcagtcaagtagtaatttctactaagtgtagatttttttnnnnnnnnnnaagcttggcgtggatccgatatcaactagatcttgagacaaatggcagtattcatccacaattttaaaagaaaaggggggattggggggtacagtgcaggggaaagaatagtagacataatagcaacagacatacaaactaaag

SEQ ID NO: 12774 - DNA, 301 bp, Artificial Sequence
  Notch1.2_Atm.1
  crRNA array
  misc_feature (148)..(157): n is a, c, g, or t
cttggctttatatatcttgtggaaaggacgaaacaccgtaatttctactaagtgtagatgtcgccccagcatcctgaagtaatttctactaagtgtagatgagaaagtctccgaatcgtttaatttctactaagtgtagatttttttnnnnnnnnnnaagcttggcgtggatccgatatcaactagatcttgagacaaatggcagtattcatccacaattttaaaagaaaaggggggattggggggtacagtgcaggggaaagaatagtagacataatagcaacagacatacaaactaaag

SEQ ID NO: 12775 - DNA, 301 bp, Artificial Sequence
  Notch1.2_Atm.2
  crRNA array
  misc_feature (148)..(157): n is a, c, g, or t
cttggctttatatatcttgtggaaaggacgaaacaccgtaatttctactaagtgtagatgtcgccccagcatcctgaagtaatttctactaagtgtagatcctacgagggcacgagagactaatttctactaagtgtagatttttttnnnnnnnnnnaagcttggcgtggatccgatatcaactagatcttgagacaaatggcagtattcatccacaattttaaaagaaaaggggggattggggggtacagtgcaggggaaagaatagtagacataatagcaacagacatacaaactaaag

SEQ ID NO: 12776 - DNA, 301 bp, Artificial Sequence
  Notch1.2_Atm.3
  crRNA array
  misc_feature (148)..(157): n is a, c, g, or t
cttggctttatatatcttgtggaaaggacgaaacaccgtaatttctactaagtgtagatgtcgccccagcatcctgaagtaatttctactaagtgtagattgaaagtctccgatatgccataatttctactaagtgtagatttttttnnnnnnnnnnaagcttggcgtggatccgatatcaactagatcttgagacaaatggcagtattcatccacaattttaaaagaaaaggggggattggggggtacagtgcaggggaaagaatagtagacataatagcaacagacatacaaactaaag

SEQ ID NO: 12777 - DNA, 301 bp, Artificial Sequence
  Notch1.2_Atm.4
  crRNA array
  misc_feature (148)..(157): n is a, c, g, or t
cttggctttatatatcttgtggaaaggacgaaacaccgtaatttctactaagtgtagatgtcgccccagcatcctgaagtaatttctactaagtgtagatggtggtgatcagtcaagtagtaatttctactaagtgtagatttttttnnnnnnnnnnaagcttggcgtggatccgatatcaactagatcttgagacaaatggcagtattcatccacaattttaaaagaaaaggggggattggggggtacagtgcaggggaaagaatagtagacataatagcaacagacatacaaactaaag

SEQ ID NO: 12778 - DNA, 301 bp, Artificial Sequence
  Notch1.3_Atm.1
  crRNA array
  misc_feature (148)..(157): n is a, c, g, or t
cttggctttatatatcttgtggaaaggacgaaacaccgtaatttctactaagtgtagatagccacccccgccacgcctctaatttctactaagtgtagatgagaaagtctccgaatcgtttaatttctactaagtgtagatttttttnnnnnnnnnnaagcttggcgtggatccgatatcaactagatcttgagacaaatggcagtattcatccacaattttaaaagaaaaggggggattggggggtacagtgcaggggaaagaatagtagacataatagcaacagacatacaaactaaag

SEQ ID NO: 12779 - DNA, 301 bp, Artificial Sequence
  Notch1.3_Atm.2
  crRNA array
  misc_feature (148)..(157): n is a, c, g, or t
cttggctttatatatcttgtggaaaggacgaaacaccgtaatttctactaagtgtagatagccacccccgccacgcctctaatttctactaagtgtagatcctacgagggcacgagagactaatttctactaagtgtagatttttttnnnnnnnnnnaagcttggcgtggatccgatatcaactagatcttgagacaaatggcagtattcatccacaattttaaaagaaaaggggggattggggggtacagtgcaggggaaagaatagtagacataatagcaacagacatacaaactaaag

SEQ ID NO: 12780 - DNA, 301 bp, Artificial Sequence
  Notch1.3_Atm.3
  crRNA array
  misc_feature (148)..(157): n is a, c, g, or t
cttggctttatatatcttgtggaaaggacgaaacaccgtaatttctactaagtgtagatagccacccccgccacgcctctaatttctactaagtgtagattgaaagtctccgatatgccataatttctactaagtgtagatttttttnnnnnnnnnnaagcttggcgtggatccgatatcaactagatcttgagacaaatggcagtattcatccacaattttaaaagaaaaggggggattggggggtacagtgcaggggaaagaatagtagacataatagcaacagacatacaaactaaag

SEQ ID NO: 12781 - DNA, 301 bp, Artificial Sequence
  Notch1.3_Atm.4
  crRNA array
  misc_feature (148)..(157): n is a, c, g, or t
cttggctttatatatcttgtggaaaggacgaaacaccgtaatttctactaagtgtagatagccacccccgccacgcctctaatttctactaagtgtagatggtggtgatcagtcaagtagtaatttctactaagtgtagatttttttnnnnnnnnnnaagcttggcgtggatccgatatcaactagatcttgagacaaatggcagtattcatccacaattttaaaagaaaaggggggattggggggtacagtgcaggggaaagaatagtagacataatagcaacagacatacaaactaaag

SEQ ID NO: 12782 - DNA, 301 bp, Artificial Sequence
  Notch1.4_Atm.1
  crRNA array
  misc_feature (148)..(157): n is a, c, g, or t
cttggctttatatatcttgtggaaaggacgaaacaccgtaatttctactaagtgtagataaagtgtcagaggccagcaataatttctactaagtgtagatgagaaagtctccgaatcgtttaatttctactaagtgtagatttttttnnnnnnnnnnaagcttggcgtggatccgatatcaactagatcttgagacaaatggcagtattcatccacaattttaaaagaaaaggggggattggggggtacagtgcaggggaaagaatagtagacataatagcaacagacatacaaactaaag

SEQ ID NO: 12783 - DNA, 301 bp, Artificial Sequence
  Notch1.4_Atm.2
  crRNA array
  misc_feature (148)..(157): n is a, c, g, or t
cttggctttatatatcttgtggaaaggacgaaacaccgtaatttctactaagtgtagataaagtgtcagaggccagcaataatttctactaagtgtagatcctacgagggcacgagagactaatttctactaagtgtagatttttttnnnnnnnnnnaagcttggcgtggatccgatatcaactagatcttgagacaaatggcagtattcatccacaattttaaaagaaaaggggggattggggggtacagtgcaggggaaagaatagtagacataatagcaacagacatacaaactaaag

SEQ ID NO: 12784 - DNA, 301 bp, Artificial Sequence
  Notch1.4_Atm.3
  crRNA array
  misc_feature (148)..(157): n is a, c, g, or t
cttggctttatatatcttgtggaaaggacgaaacaccgtaatttctactaagtgtagataaagtgtcagaggccagcaataatttctactaagtgtagattgaaagtctccgatatgccataatttctactaagtgtagatttttttnnnnnnnnnnaagcttggcgtggatccgatatcaactagatcttgagacaaatggcagtattcatccacaattttaaaagaaaaggggggattggggggtacagtgcaggggaaagaatagtagacataatagcaacagacatacaaactaaag

SEQ ID NO: 12785 - DNA, 301 bp, Artificial Sequence
  Notch1.4_Atm.4
  crRNA array
  misc_feature (148)..(157): n is a, c, g, or t
cttggctttatatatcttgtggaaaggacgaaacaccgtaatttctactaagtgtagataaagtgtcagaggccagcaataatttctactaagtgtagatggtggtgatcagtcaagtagtaatttctactaagtgtagatttttttnnnnnnnnnnaagcttggcgtggatccgatatcaactagatcttgagacaaatggcagtattcatccacaattttaaaagaaaaggggggattggggggtacagtgcaggggaaagaatagtagacataatagcaacagacatacaaactaaag

SEQ ID NO: 12786 - DNA, 301 bp, Artificial Sequence
  Arid1a.1_Trim72.1
  crRNA array
  misc_feature (148)..(157): n is a, c, g, or t
cttggctttatatatcttgtggaaaggacgaaacaccgtaatttctactaagtgtagatcccgcgctcggccgctgccgtaatttctactaagtgtagataccccagctctgcgcacccgtaatttctactaagtgtagatttttttnnnnnnnnnnaagcttggcgtggatccgatatcaactagatcttgagacaaatggcagtattcatccacaattttaaaagaaaaggggggattggggggtacagtgcaggggaaagaatagtagacataatagcaacagacatacaaactaaag

SEQ ID NO: 12787 - DNA, 301 bp, Artificial Sequence
  Arid1a.1_Trim72.2
  crRNA array
  misc_feature (148)..(157): n is a, c, g, or t
cttggctttatatatcttgtggaaaggacgaaacaccgtaatttctactaagtgtagatcccgcgctcggccgctgccgtaatttctactaagtgtagatcacgagcgtctgcccgggcctaatttctactaagtgtagatttttttnnnnnnnnnnaagcttggcgtggatccgatatcaactagatcttgagacaaatggcagtattcatccacaattttaaaagaaaaggggggattggggggtacagtgcaggggaaagaatagtagacataatagcaacagacatacaaactaaag

SEQ ID NO: 12788 - DNA, 301 bp, Artificial Sequence
  Arid1a.1_Trim72.3
  crRNA array
  misc_feature (148)..(157): n is a, c, g, or t
cttggctttatatatcttgtggaaaggacgaaacaccgtaatttctactaagtgtagatcccgcgctcggccgctgccgtaatttctactaagtgtagatacgtgtgctggcacgacaagtaatttctactaagtgtagatttttttnnnnnnnnnnaagcttggcgtggatccgatatcaactagatcttgagacaaatggcagtattcatccacaattttaaaagaaaaggggggattggggggtacagtgcaggggaaagaatagtagacataatagcaacagacatacaaactaaag

SEQ ID NO: 12789 - DNA, 301 bp, Artificial Sequence
  Arid1a.1_Trim72.4
  crRNA array
  misc_feature (148)..(157): n is a, c, g, or t
cttggctttatatatcttgtggaaaggacgaaacaccgtaatttctactaagtgtagatcccgcgctcggccgctgccgtaatttctactaagtgtagattgccgtgcctgcctgatccgtaatttctactaagtgtagatttttttnnnnnnnnnnaagcttggcgtggatccgatatcaactagatcttgagacaaatggcagtattcatccacaattttaaaagaaaaggggggattggggggtacagtgcaggggaaagaatagtagacataatagcaacagacatacaaactaaag

SEQ ID NO: 12790 - DNA, 301 bp, Artificial Sequence
  Arid1a.2_Trim72.1
  crRNA array
  misc_feature (148)..(157): n is a, c, g, or t
cttggctttatatatcttgtggaaaggacgaaacaccgtaatttctactaagtgtagatagtgcaagatcgagcgtggataatttctactaagtgtagataccccagctctgcgcacccgtaatttctactaagtgtagatttttttnnnnnnnnnnaagcttggcgtggatccgatatcaactagatcttgagacaaatggcagtattcatccacaattttaaaagaaaaggggggattggggggtacagtgcaggggaaagaatagtagacataatagcaacagacatacaaactaaag

SEQ ID NO: 12791 - DNA, 301 bp, Artificial Sequence
  Arid1a.2_Trim72.2
  crRNA array
  misc_feature (148)..(157): n is a, c, g, or t
cttggctttatatatcttgtggaaaggacgaaacaccgtaatttctactaagtgtagatagtgcaagatcgagcgtggataatttctactaagtgtagatcacgagcgtctgcccgggcctaatttctactaagtgtagatttttttnnnnnnnnnnaagcttggcgtggatccgatatcaactagatcttgagacaaatggcagtattcatccacaattttaaaagaaaaggggggattggggggtacagtgcaggggaaagaatagtagacataatagcaacagacatacaaactaaag

SEQ ID NO: 12792 - DNA, 301 bp, Artificial Sequence
  Arid1a.2_Trim72.3
  crRNA array
  misc_feature (148)..(157): n is a, c, g, or t
cttggctttatatatcttgtggaaaggacgaaacaccgtaatttctactaagtgtagatagtgcaagatcgagcgtggataatttctactaagtgtagatacgtgtgctggcacgacaagtaatttctactaagtgtagatttttttnnnnnnnnnnaagcttggcgtggatccgatatcaactagatcttgagacaaatggcagtattcatccacaattttaaaagaaaaggggggattggggggtacagtgcaggggaaagaatagtagacataatagcaacagacatacaaactaaag

SEQ ID NO: 12793 - DNA, 301 bp, Artificial Sequence
  Arid1a.2_Trim72.4
  crRNA array
  misc_feature (148)..(157): n is a, c, g, or t
cttggctttatatatcttgtggaaaggacgaaacaccgtaatttctactaagtgtagatagtgcaagatcgagcgtggataatttctactaagtgtagattgccgtgcctgcctgatccgtaatttctactaagtgtagatttttttnnnnnnnnnnaagcttggcgtggatccgatatcaactagatcttgagacaaatggcagtattcatccacaattttaaaagaaaaggggggattggggggtacagtgcaggggaaagaatagtagacataatagcaacagacatacaaactaaag

SEQ ID NO: 12794 - DNA, 301 bp, Artificial Sequence
  Arid1a.3_Trim72.1
  crRNA array
  misc_feature (148)..(157): n is a, c, g, or t
cttggctttatatatcttgtggaaaggacgaaacaccgtaatttctactaagtgtagatagtgagctggcagcactgcttaatttctactaagtgtagataccccagctctgcgcacccgtaatttctactaagtgtagatttttttnnnnnnnnnnaagcttggcgtggatccgatatcaactagatcttgagacaaatggcagtattcatccacaattttaaaagaaaaggggggattggggggtacagtgcaggggaaagaatagtagacataatagcaacagacatacaaactaaag

SEQ ID NO: 12795 - DNA, 301 bp, Artificial Sequence
  Arid1a.3_Trim72.2
  crRNA array
  misc_feature (148)..(157): n is a, c, g, or t
cttggctttatatatcttgtggaaaggacgaaacaccgtaatttctactaagtgtagatagtgagctggcagcactgcttaatttctactaagtgtagatcacgagcgtctgcccgggcctaatttctactaagtgtagatttttttnnnnnnnnnnaagcttggcgtggatccgatatcaactagatcttgagacaaatggcagtattcatccacaattttaaaagaaaaggggggattggggggtacagtgcaggggaaagaatagtagacataatagcaacagacatacaaactaaag

SEQ ID NO: 12796 - DNA, 301 bp, Artificial Sequence
  Arid1a.3_Trim72.3
  crRNA array
  misc_feature (148)..(157): n is a, c, g, or t
cttggctttatatatcttgtggaaaggacgaaacaccgtaatttctactaagtgtagatagtgagctggcagcactgcttaatttctactaagtgtagatacgtgtgctggcacgacaagtaatttctactaagtgtagatttttttnnnnnnnnnnaagcttggcgtggatccgatatcaactagatcttgagacaaatggcagtattcatccacaattttaaaagaaaaggggggattggggggtacagtgcaggggaaagaatagtagacataatagcaacagacatacaaactaaag

SEQ ID NO: 12797 - DNA, 301 bp, Artificial Sequence
  Arid1a.3_Trim72.4
  crRNA array
  misc_feature (148)..(157): n is a, c, g, or t
cttggctttatatatcttgtggaaaggacgaaacaccgtaatttctactaagtgtagatagtgagctggcagcactgcttaatttctactaagtgtagattgccgtgcctgcctgatccgtaatttctactaagtgtagatttttttnnnnnnnnnnaagcttggcgtggatccgatatcaactagatcttgagacaaatggcagtattcatccacaattttaaaagaaaaggggggattggggggtacagtgcaggggaaagaatagtagacataatagcaacagacatacaaactaaag

SEQ ID NO: 12798 - DNA, 301 bp, Artificial Sequence
  Arid1a.4_Trim72.1
  crRNA array
  misc_feature (148)..(157): n is a, c, g, or t
cttggctttatatatcttgtggaaaggacgaaacaccgtaatttctactaagtgtagatgccgagaccgagtctctgcataatttctactaagtgtagataccccagctctgcgcacccgtaatttctactaagtgtagatttttttnnnnnnnnnnaagcttggcgtggatccgatatcaactagatcttgagacaaatggcagtattcatccacaattttaaaagaaaaggggggattggggggtacagtgcaggggaaagaatagtagacataatagcaacagacatacaaactaaag

SEQ ID NO: 12799 - DNA, 301 bp, Artificial Sequence
  Arid1a.4_Trim72.2
  crRNA array
  misc_feature (148)..(157): n is a, c, g, or t
cttggctttatatatcttgtggaaaggacgaaacaccgtaatttctactaagtgtagatgccgagaccgagtctctgcataatttctactaagtgtagatcacgagcgtctgcccgggcctaatttctactaagtgtagatttttttnnnnnnnnnnaagcttggcgtggatccgatatcaactagatcttgagacaaatggcagtattcatccacaattttaaaagaaaaggggggattggggggtacagtgcaggggaaagaatagtagacataatagcaacagacatacaaactaaag

SEQ ID NO: 12800 - DNA, 301 bp, Artificial Sequence
  Arid1a.4_Trim72.3
  crRNA array
  misc_feature (148)..(157): n is a, c, g, or t
cttggctttatatatcttgtggaaaggacgaaacaccgtaatttctactaagtgtagatgccgagaccgagtctctgcataatttctactaagtgtagatacgtgtgctggcacgacaagtaatttctactaagtgtagatttttttnnnnnnnnnnaagcttggcgtggatccgatatcaactagatcttgagacaaatggcagtattcatccacaattttaaaagaaaaggggggattggggggtacagtgcaggggaaagaatagtagacataatagcaacagacatacaaactaaag

SEQ ID NO: 12801 - DNA, 301 bp, Artificial Sequence
  Arid1a.4_Trim72.4
  crRNA array
  misc_feature (148)..(157): n is a, c, g, or t
cttggctttatatatcttgtggaaaggacgaaacaccgtaatttctactaagtgtagatgccgagaccgagtctctgcataatttctactaagtgtagattgccgtgcctgcctgatccgtaatttctactaagtgtagatttttttnnnnnnnnnnaagcttggcgtggatccgatatcaactagatcttgagacaaatggcagtattcatccacaattttaaaagaaaaggggggattggggggtacagtgcaggggaaagaatagtagacataatagcaacagacatacaaactaaag

SEQ ID NO: 12802 - DNA, 301 bp, Artificial Sequence
  Arid1a.1_Zfhx3.1
  crRNA array
  misc_feature (148)..(157): n is a, c, g, or t
cttggctttatatatcttgtggaaaggacgaaacaccgtaatttctactaagtgtagatcccgcgctcggccgctgccgtaatttctactaagtgtagatcgctgcgaggtgtgtaactataatttctactaagtgtagatttttttnnnnnnnnnnaagcttggcgtggatccgatatcaactagatcttgagacaaatggcagtattcatccacaattttaaaagaaaaggggggattggggggtacagtgcaggggaaagaatagtagacataatagcaacagacatacaaactaaag

SEQ ID NO: 12803 - DNA, 301 bp, Artificial Sequence
  Arid1a.1_Zfhx3.2
  crRNA array
  misc_feature (148)..(157): n is a, c, g, or t
cttggctttatatatcttgtggaaaggacgaaacaccgtaatttctactaagtgtagatcccgcgctcggccgctgccgtaatttctactaagtgtagatacgtgcgacacaaaagcaactaatttctactaagtgtagatttttttnnnnnnnnnnaagcttggcgtggatccgatatcaactagatcttgagacaaatggcagtattcatccacaattttaaaagaaaaggggggattggggggtacagtgcaggggaaagaatagtagacataatagcaacagacatacaaactaaag

SEQ ID NO: 12804 - DNA, 301 bp, Artificial Sequence
  Arid1a.1_Zfhx3.3
  crRNA array
  misc_feature (148)..(157): n is a, c, g, or t
cttggctttatatatcttgtggaaaggacgaaacaccgtaatttctactaagtgtagatcccgcgctcggccgctgccgtaatttctactaagtgtagattgctctacggcaagaggaaataatttctactaagtgtagatttttttnnnnnnnnnnaagcttggcgtggatccgatatcaactagatcttgagacaaatggcagtattcatccacaattttaaaagaaaaggggggattggggggtacagtgcaggggaaagaatagtagacataatagcaacagacatacaaactaaag

SEQ ID NO: 12805 - DNA, 301 bp, Artificial Sequence
  Arid1a.1_Zfhx3.4
  crRNA array
  misc_feature (148)..(157): n is a, c, g, or t
cttggctttatatatcttgtggaaaggacgaaacaccgtaatttctactaagtgtagatcccgcgctcggccgctgccgtaatttctactaagtgtagatagtgagcggcagactgcgagtaatttctactaagtgtagatttttttnnnnnnnnnnaagcttggcgtggatccgatatcaactagatcttgagacaaatggcagtattcatccacaattttaaaagaaaaggggggattggggggtacagtgcaggggaaagaatagtagacataatagcaacagacatacaaactaaag

SEQ ID NO: 12806 - DNA, 301 bp, Artificial Sequence
  Arid1a.2_Zfhx3.1
  crRNA array
  misc_feature (148)..(157): n is a, c, g, or t
cttggctttatatatcttgtggaaaggacgaaacaccgtaatttctactaagtgtagatagtgcaagatcgagcgtggataatttctactaagtgtagatcgctgcgaggtgtgtaactataatttctactaagtgtagatttttttnnnnnnnnnnaagcttggcgtggatccgatatcaactagatcttgagacaaatggcagtattcatccacaattttaaaagaaaaggggggattggggggtacagtgcaggggaaagaatagtagacataatagcaacagacatacaaactaaag

SEQ ID NO: 12807 - DNA, 301 bp, Artificial Sequence
  Arid1a.2_Zfhx3.2
  crRNA array
  misc_feature (148)..(157): n is a, c, g, or t
cttggctttatatatcttgtggaaaggacgaaacaccgtaatttctactaagtgtagatagtgcaagatcgagcgtggataatttctactaagtgtagatacgtgcgacacaaaagcaactaatttctactaagtgtagatttttttnnnnnnnnnnaagcttggcgtggatccgatatcaactagatcttgagacaaatggcagtattcatccacaattttaaaagaaaaggggggattggggggtacagtgcaggggaaagaatagtagacataatagcaacagacatacaaactaaag

SEQ ID NO: 12808 - DNA, 301 bp, Artificial Sequence
  Arid1a.2_Zfhx3.3
  crRNA array
  misc_feature (148)..(157): n is a, c, g, or t
cttggctttatatatcttgtggaaaggacgaaacaccgtaatttctactaagtgtagatagtgcaagatcgagcgtggataatttctactaagtgtagattgctctacggcaagaggaaataatttctactaagtgtagatttttttnnnnnnnnnnaagcttggcgtggatccgatatcaactagatcttgagacaaatggcagtattcatccacaattttaaaagaaaaggggggattggggggtacagtgcaggggaaagaatagtagacataatagcaacagacatacaaactaaag

SEQ ID NO: 12809 - DNA, 301 bp, Artificial Sequence
  Arid1a.2_Zfhx3.4
  crRNA array
  misc_feature (148)..(157): n is a, c, g, or t
cttggctttatatatcttgtggaaaggacgaaacaccgtaatttctactaagtgtagatagtgcaagatcgagcgtggataatttctactaagtgtagatagtgagcggcagactgcgagtaatttctactaagtgtagatttttttnnnnnnnnnnaagcttggcgtggatccgatatcaactagatcttgagacaaatggcagtattcatccacaattttaaaagaaaaggggggattggggggtacagtgcaggggaaagaatagtagacataatagcaacagacatacaaactaaag

SEQ ID NO: 12810 - DNA, 301 bp, Artificial Sequence
  Arid1a.3_Zfhx3.1
  crRNA array
  misc_feature (148)..(157): n is a, c, g, or t
cttggctttatatatcttgtggaaaggacgaaacaccgtaatttctactaagtgtagatagtgagctggcagcactgcttaatttctactaagtgtagatcgctgcgaggtgtgtaactataatttctactaagtgtagatttttttnnnnnnnnnnaagcttggcgtggatccgatatcaactagatcttgagacaaatggcagtattcatccacaattttaaaagaaaaggggggattggggggtacagtgcaggggaaagaatagtagacataatagcaacagacatacaaactaaag

SEQ ID NO: 12811 - DNA, 301 bp, Artificial Sequence
  Arid1a.3_Zfhx3.2
  crRNA array
  misc_feature (148)..(157): n is a, c, g, or t
cttggctttatatatcttgtggaaaggacgaaacaccgtaatttctactaagtgtagatagtgagctggcagcactgcttaatttctactaagtgtagatacgtgcgacacaaaagcaactaatttctactaagtgtagatttttttnnnnnnnnnnaagcttggcgtggatccgatatcaactagatcttgagacaaatggcagtattcatccacaattttaaaagaaaaggggggattggggggtacagtgcaggggaaagaatagtagacataatagcaacagacatacaaactaaag

SEQ ID NO: 12812 - DNA, 301 bp, Artificial Sequence
  Arid1a.3_Zfhx3.3
  crRNA array
  misc_feature (148)..(157): n is a, c, g, or t
cttggctttatatatcttgtggaaaggacgaaacaccgtaatttctactaagtgtagatagtgagctggcagcactgcttaatttctactaagtgtagattgctctacggcaagaggaaataatttctactaagtgtagatttttttnnnnnnnnnnaagcttggcgtggatccgatatcaactagatcttgagacaaatggcagtattcatccacaattttaaaagaaaaggggggattggggggtacagtgcaggggaaagaatagtagacataatagcaacagacatacaaactaaag

SEQ ID NO: 12813 - DNA, 301 bp, Artificial Sequence
  Arid1a.3_Zfhx3.4
  crRNA array
  misc_feature (148)..(157): n is a, c, g, or t
cttggctttatatatcttgtggaaaggacgaaacaccgtaatttctactaagtgtagatagtgagctggcagcactgcttaatttctactaagtgtagatagtgagcggcagactgcgagtaatttctactaagtgtagatttttttnnnnnnnnnnaagcttggcgtggatccgatatcaactagatcttgagacaaatggcagtattcatccacaattttaaaagaaaaggggggattggggggtacagtgcaggggaaagaatagtagacataatagcaacagacatacaaactaaag

SEQ ID NO: 12814 - DNA, 301 bp, Artificial Sequence
  Arid1a.4_Zfhx3.1
  crRNA array
  misc_feature (148)..(157): n is a, c, g, or t
cttggctttatatatcttgtggaaaggacgaaacaccgtaatttctactaagtgtagatgccgagaccgagtctctgcataatttctactaagtgtagatcgctgcgaggtgtgtaactataatttctactaagtgtagatttttttnnnnnnnnnnaagcttggcgtggatccgatatcaactagatcttgagacaaatggcagtattcatccacaattttaaaagaaaaggggggattggggggtacagtgcaggggaaagaatagtagacataatagcaacagacatacaaactaaag

SEQ ID NO: 12815 - DNA, 301 bp, Artificial Sequence
  Arid1a.4_Zfhx3.2
  crRNA array
  misc_feature (148)..(157): n is a, c, g, or t
cttggctttatatatcttgtggaaaggacgaaacaccgtaatttctactaagtgtagatgccgagaccgagtctctgcataatttctactaagtgtagatacgtgcgacacaaaagcaactaatttctactaagtgtagatttttttnnnnnnnnnnaagcttggcgtggatccgatatcaactagatcttgagacaaatggcagtattcatccacaattttaaaagaaaaggggggattggggggtacagtgcaggggaaagaatagtagacataatagcaacagacatacaaactaaag

SEQ ID NO: 12816 - DNA, 301 bp, Artificial Sequence
  Arid1a.4_Zfhx3.3
  crRNA array
  misc_feature (148)..(157): n is a, c, g, or t
cttggctttatatatcttgtggaaaggacgaaacaccgtaatttctactaagtgtagatgccgagaccgagtctctgcataatttctactaagtgtagattgctctacggcaagaggaaataatttctactaagtgtagatttttttnnnnnnnnnnaagcttggcgtggatccgatatcaactagatcttgagacaaatggcagtattcatccacaattttaaaagaaaaggggggattggggggtacagtgcaggggaaagaatagtagacataatagcaacagacatacaaactaaag

SEQ ID NO: 12817 - DNA, 301 bp, Artificial Sequence
  Arid1a.4_Zfhx3.4
  crRNA array
  misc_feature (148)..(157): n is a, c, g, or t
cttggctttatatatcttgtggaaaggacgaaacaccgtaatttctactaagtgtagatgccgagaccgagtctctgcataatttctactaagtgtagatagtgagcggcagactgcgagtaatttctactaagtgtagatttttttnnnnnnnnnnaagcttggcgtggatccgatatcaactagatcttgagacaaatggcagtattcatccacaattttaaaagaaaaggggggattggggggtacagtgcaggggaaagaatagtagacataatagcaacagacatacaaactaaag

SEQ ID NO: 12818 - DNA, 301 bp, Artificial Sequence
  Arid1a.1_Crebbp.1
  crRNA array
  misc_feature (148)..(157): n is a, c, g, or t
cttggctttatatatcttgtggaaaggacgaaacaccgtaatttctactaagtgtagatcccgcgctcggccgctgccgtaatttctactaagtgtagatctcacggcggcggcgggccgtaatttctactaagtgtagatttttttnnnnnnnnnnaagcttggcgtggatccgatatcaactagatcttgagacaaatggcagtattcatccacaattttaaaagaaaaggggggattggggggtacagtgcaggggaaagaatagtagacataatagcaacagacatacaaactaaag

SEQ ID NO: 12819 - DNA, 301 bp, Artificial Sequence
  Arid1a.1_Crebbp.2
  crRNA array
  misc_feature (148)..(157): n is a, c, g, or t
cttggctttatatatcttgtggaaaggacgaaacaccgtaatttctactaagtgtagatcccgcgctcggccgctgccgtaatttctactaagtgtagatcgcgagcaggtgaagatggctaatttctactaagtgtagatttttttnnnnnnnnnnaagcttggcgtggatccgatatcaactagatcttgagacaaatggcagtattcatccacaattttaaaagaaaaggggggattggggggtacagtgcaggggaaagaatagtagacataatagcaacagacatacaaactaaag

SEQ ID NO: 12820 - DNA, 301 bp, Artificial Sequence
  Arid1a.1_Crebbp.3
  crRNA array
  misc_feature (148)..(157): n is a, c, g, or t
cttggctttatatatcttgtggaaaggacgaaacaccgtaatttctactaagtgtagatcccgcgctcggccgctgccgtaatttctactaagtgtagatggctccgccgcccgcccgcgtaatttctactaagtgtagatttttttnnnnnnnnnnaagcttggcgtggatccgatatcaactagatcttgagacaaatggcagtattcatccacaattttaaaagaaaaggggggattggggggtacagtgcaggggaaagaatagtagacataatagcaacagacatacaaactaaag

SEQ ID NO: 12821 - DNA, 301 bp, Artificial Sequence
  Arid1a.1_Crebbp.4
  crRNA array
  misc_feature (148)..(157): n is a, c, g, or t
cttggctttatatatcttgtggaaaggacgaaacaccgtaatttctactaagtgtagatcccgcgctcggccgctgccgtaatttctactaagtgtagattggactagatgactccgtagtaatttctactaagtgtagatttttttnnnnnnnnnnaagcttggcgtggatccgatatcaactagatcttgagacaaatggcagtattcatccacaattttaaaagaaaaggggggattggggggtacagtgcaggggaaagaatagtagacataatagcaacagacatacaaactaaag

SEQ ID NO: 12822 - DNA, 301 bp, Artificial Sequence
  Arid1a.2_Crebbp.1
  crRNA array
  misc_feature (148)..(157): n is a, c, g, or t
cttggctttatatatcttgtggaaaggacgaaacaccgtaatttctactaagtgtagatagtgcaagatcgagcgtggataatttctactaagtgtagatctcacggcggcggcgggccgtaatttctactaagtgtagatttttttnnnnnnnnnnaagcttggcgtggatccgatatcaactagatcttgagacaaatggcagtattcatccacaattttaaaagaaaaggggggattggggggtacagtgcaggggaaagaatagtagacataatagcaacagacatacaaactaaag

SEQ ID NO: 12823 - DNA, 301 bp, Artificial Sequence
  Arid1a.2_Crebbp.2
  crRNA array
  misc_feature (148)..(157): n is a, c, g, or t
cttggctttatatatcttgtggaaaggacgaaacaccgtaatttctactaagtgtagatagtgcaagatcgagcgtggataatttctactaagtgtagatcgcgagcaggtgaagatggctaatttctactaagtgtagatttttttnnnnnnnnnnaagcttggcgtggatccgatatcaactagatcttgagacaaatggcagtattcatccacaattttaaaagaaaaggggggattggggggtacagtgcaggggaaagaatagtagacataatagcaacagacatacaaactaaag

SEQ ID NO: 12824 - DNA, 301 bp, Artificial Sequence
  Arid1a.2_Crebbp.3
  crRNA array
  misc_feature (148)..(157): n is a, c, g, or t
cttggctttatatatcttgtggaaaggacgaaacaccgtaatttctactaagtgtagatagtgcaagatcgagcgtggataatttctactaagtgtagatggctccgccgcccgcccgcgtaatttctactaagtgtagatttttttnnnnnnnnnnaagcttggcgtggatccgatatcaactagatcttgagacaaatggcagtattcatccacaattttaaaagaaaaggggggattggggggtacagtgcaggggaaagaatagtagacataatagcaacagacatacaaactaaag

SEQ ID NO: 12825 - DNA, 301 bp, Artificial Sequence
  Arid1a.2_Crebbp.4
  crRNA array
  misc_feature (148)..(157): n is a, c, g, or t
cttggctttatatatcttgtggaaaggacgaaacaccgtaatttctactaagtgtagatagtgcaagatcgagcgtggataatttctactaagtgtagattggactagatgactccgtagtaatttctactaagtgtagatttttttnnnnnnnnnnaagcttggcgtggatccgatatcaactagatcttgagacaaatggcagtattcatccacaattttaaaagaaaaggggggattggggggtacagtgcaggggaaagaatagtagacataatagcaacagacatacaaactaaag

SEQ ID NO: 12826 - DNA, 301 bp, Artificial Sequence
  Arid1a.3_Crebbp.1
  crRNA array
  misc_feature (148)..(157): n is a, c, g, or t
cttggctttatatatcttgtggaaaggacgaaacaccgtaatttctactaagtgtagatagtgagctggcagcactgcttaatttctactaagtgtagatctcacggcggcggcgggccgtaatttctactaagtgtagatttttttnnnnnnnnnnaagcttggcgtggatccgatatcaactagatcttgagacaaatggcagtattcatccacaattttaaaagaaaaggggggattggggggtacagtgcaggggaaagaatagtagacataatagcaacagacatacaaactaaag

SEQ ID NO: 12827 - DNA, 301 bp, Artificial Sequence
  Arid1a.3_Crebbp.2
  crRNA array
  misc_feature (148)..(157): n is a, c, g, or t
cttggctttatatatcttgtggaaaggacgaaacaccgtaatttctactaagtgtagatagtgagctggcagcactgcttaatttctactaagtgtagatcgcgagcaggtgaagatggctaatttctactaagtgtagatttttttnnnnnnnnnnaagcttggcgtggatccgatatcaactagatcttgagacaaatggcagtattcatccacaattttaaaagaaaaggggggattggggggtacagtgcaggggaaagaatagtagacataatagcaacagacatacaaactaaag

SEQ ID NO: 12828 - DNA, 301 bp, Artificial Sequence
  Arid1a.3_Crebbp.3
  crRNA array
  misc_feature (148)..(157): n is a, c, g, or t
cttggctttatatatcttgtggaaaggacgaaacaccgtaatttctactaagtgtagatagtgagctggcagcactgcttaatttctactaagtgtagatggctccgccgcccgcccgcgtaatttctactaagtgtagatttttttnnnnnnnnnnaagcttggcgtggatccgatatcaactagatcttgagacaaatggcagtattcatccacaattttaaaagaaaaggggggattggggggtacagtgcaggggaaagaatagtagacataatagcaacagacatacaaactaaag

SEQ ID NO: 12829 - DNA, 301 bp, Artificial Sequence
  Arid1a.3_Crebbp.4
  crRNA array
  misc_feature (148)..(157): n is a, c, g, or t
cttggctttatatatcttgtggaaaggacgaaacaccgtaatttctactaagtgtagatagtgagctggcagcactgcttaatttctactaagtgtagattggactagatgactccgtagtaatttctactaagtgtagatttttttnnnnnnnnnnaagcttggcgtggatccgatatcaactagatcttgagacaaatggcagtattcatccacaattttaaaagaaaaggggggattggggggtacagtgcaggggaaagaatagtagacataatagcaacagacatacaaactaaag

SEQ ID NO: 12830 - DNA, 301 bp, Artificial Sequence
  Arid1a.4_Crebbp.1
  crRNA array
  misc_feature (148)..(157): n is a, c, g, or t
cttggctttatatatcttgtggaaaggacgaaacaccgtaatttctactaagtgtagatgccgagaccgagtctctgcataatttctactaagtgtagatctcacggcggcggcgggccgtaatttctactaagtgtagatttttttnnnnnnnnnnaagcttggcgtggatccgatatcaactagatcttgagacaaatggcagtattcatccacaattttaaaagaaaaggggggattggggggtacagtgcaggggaaagaatagtagacataatagcaacagacatacaaactaaag

SEQ ID NO: 12831 - DNA, 301 bp, Artificial Sequence
  Arid1a.4_Crebbp.2
  crRNA array
  misc_feature (148)..(157): n is a, c, g, or t
cttggctttatatatcttgtggaaaggacgaaacaccgtaatttctactaagtgtagatgccgagaccgagtctctgcataatttctactaagtgtagatcgcgagcaggtgaagatggctaatttctactaagtgtagatttttttnnnnnnnnnnaagcttggcgtggatccgatatcaactagatcttgagacaaatggcagtattcatccacaattttaaaagaaaaggggggattggggggtacagtgcaggggaaagaatagtagacataatagcaacagacatacaaactaaag

SEQ ID NO: 12832 - DNA, 301 bp, Artificial Sequence
  Arid1a.4_Crebbp.3
  crRNA array
  misc_feature (148)..(157): n is a, c, g, or t
cttggctttatatatcttgtggaaaggacgaaacaccgtaatttctactaagtgtagatgccgagaccgagtctctgcataatttctactaagtgtagatggctccgccgcccgcccgcgtaatttctactaagtgtagatttttttnnnnnnnnnnaagcttggcgtggatccgatatcaactagatcttgagacaaatggcagtattcatccacaattttaaaagaaaaggggggattggggggtacagtgcaggggaaagaatagtagacataatagcaacagacatacaaactaaag

SEQ ID NO: 12833 - DNA, 301 bp, Artificial Sequence
  Arid1a.4_Crebbp.4
  crRNA array
  misc_feature (148)..(157): n is a, c, g, or t
cttggctttatatatcttgtggaaaggacgaaacaccgtaatttctactaagtgtagatgccgagaccgagtctctgcataatttctactaagtgtagattggactagatgactccgtagtaatttctactaagtgtagatttttttnnnnnnnnnnaagcttggcgtggatccgatatcaactagatcttgagacaaatggcagtattcatccacaattttaaaagaaaaggggggattggggggtacagtgcaggggaaagaatagtagacataatagcaacagacatacaaactaaag

SEQ ID NO: 12834 - DNA, 301 bp, Artificial Sequence
  Arid1a.1_Cdkn2a.1
  crRNA array
  misc_feature (148)..(157): n is a, c, g, or t
cttggctttatatatcttgtggaaaggacgaaacaccgtaatttctactaagtgtagatcccgcgctcggccgctgccgtaatttctactaagtgtagatcaatcacgggagggagcagataatttctactaagtgtagatttttttnnnnnnnnnnaagcttggcgtggatccgatatcaactagatcttgagacaaatggcagtattcatccacaattttaaaagaaaaggggggattggggggtacagtgcaggggaaagaatagtagacataatagcaacagacatacaaactaaag

SEQ ID NO: 12835 - DNA, 301 bp, Artificial Sequence
  Arid1a.1_Cdkn2a.2
  crRNA array
  misc_feature (148)..(157): n is a, c, g, or t
cttggctttatatatcttgtggaaaggacgaaacaccgtaatttctactaagtgtagatcccgcgctcggccgctgccgtaatttctactaagtgtagatgcccaacgccccgaactctttaatttctactaagtgtagatttttttnnnnnnnnnnaagcttggcgtggatccgatatcaactagatcttgagacaaatggcagtattcatccacaattttaaaagaaaaggggggattggggggtacagtgcaggggaaagaatagtagacataatagcaacagacatacaaactaaag

SEQ ID NO: 12836 - DNA, 301 bp, Artificial Sequence
  Arid1a.1_Cdkn2a.3
  crRNA array
  misc_feature (148)..(157): n is a, c, g, or t
cttggctttatatatcttgtggaaaggacgaaacaccgtaatttctactaagtgtagatcccgcgctcggccgctgccgtaatttctactaagtgtagattgtaccgctgggaacgtcgctaatttctactaagtgtagatttttttnnnnnnnnnnaagcttggcgtggatccgatatcaactagatcttgagacaaatggcagtattcatccacaattttaaaagaaaaggggggattggggggtacagtgcaggggaaagaatagtagacataatagcaacagacatacaaactaaag

SEQ ID NO: 12837 - DNA, 301 bp, Artificial Sequence
  Arid1a.1_Cdkn2a.4
  crRNA array
  misc_feature (148)..(157): n is a, c, g, or t
cttggctttatatatcttgtggaaaggacgaaacaccgtaatttctactaagtgtagatcccgcgctcggccgctgccgtaatttctactaagtgtagataagccacatgctagacacgctaatttctactaagtgtagatttttttnnnnnnnnnnaagcttggcgtggatccgatatcaactagatcttgagacaaatggcagtattcatccacaattttaaaagaaaaggggggattggggggtacagtgcaggggaaagaatagtagacataatagcaacagacatacaaactaaag

SEQ ID NO: 12838 - DNA, 301 bp, Artificial Sequence
  Arid1a.2_Cdkn2a.1
  crRNA array
  misc_feature (148)..(157): n is a, c, g, or t
cttggctttatatatcttgtggaaaggacgaaacaccgtaatttctactaagtgtagatagtgcaagatcgagcgtggataatttctactaagtgtagatcaatcacgggagggagcagataatttctactaagtgtagatttttttnnnnnnnnnnaagcttggcgtggatccgatatcaactagatcttgagacaaatggcagtattcatccacaattttaaaagaaaaggggggattggggggtacagtgcaggggaaagaatagtagacataatagcaacagacatacaaactaaag

SEQ ID NO: 12839 - DNA, 301 bp, Artificial Sequence
  Arid1a.2_Cdkn2a.2
  crRNA array
  misc_feature (148)..(157): n is a, c, g, or t
cttggctttatatatcttgtggaaaggacgaaacaccgtaatttctactaagtgtagatagtgcaagatcgagcgtggataatttctactaagtgtagatgcccaacgccccgaactctttaatttctactaagtgtagatttttttnnnnnnnnnnaagcttggcgtggatccgatatcaactagatcttgagacaaatggcagtattcatccacaattttaaaagaaaaggggggattggggggtacagtgcaggggaaagaatagtagacataatagcaacagacatacaaactaaag

SEQ ID NO: 12840 - DNA, 301 bp, Artificial Sequence
  Arid1a.2_Cdkn2a.3
  crRNA array
  misc_feature (148)..(157): n is a, c, g, or t
cttggctttatatatcttgtggaaaggacgaaacaccgtaatttctactaagtgtagatagtgcaagatcgagcgtggataatttctactaagtgtagattgtaccgctgggaacgtcgctaatttctactaagtgtagatttttttnnnnnnnnnnaagcttggcgtggatccgatatcaactagatcttgagacaaatggcagtattcatccacaattttaaaagaaaaggggggattggggggtacagtgcaggggaaagaatagtagacataatagcaacagacatacaaactaaag

SEQ ID NO: 12841 - DNA, 301 bp, Artificial Sequence
  Arid1a.2_Cdkn2a.4
  crRNA array
  misc_feature (148)..(157): n is a, c, g, or t
cttggctttatatatcttgtggaaaggacgaaacaccgtaatttctactaagtgtagatagtgcaagatcgagcgtggataatttctactaagtgtagataagccacatgctagacacgctaatttctactaagtgtagatttttttnnnnnnnnnnaagcttggcgtggatccgatatcaactagatcttgagacaaatggcagtattcatccacaattttaaaagaaaaggggggattggggggtacagtgcaggggaaagaatagtagacataatagcaacagacatacaaactaaag

SEQ ID NO: 12842 - DNA, 301 bp, Artificial Sequence
  Arid1a.3_Cdkn2a.1
  crRNA array
  misc_feature (148)..(157): n is a, c, g, or t
cttggctttatatatcttgtggaaaggacgaaacaccgtaatttctactaagtgtagatagtgagctggcagcactgcttaatttctactaagtgtagatcaatcacgggagggagcagataatttctactaagtgtagatttttttnnnnnnnnnnaagcttggcgtggatccgatatcaactagatcttgagacaaatggcagtattcatccacaattttaaaagaaaaggggggattggggggtacagtgcaggggaaagaatagtagacataatagcaacagacatacaaactaaag

SEQ ID NO: 12843 - DNA, 301 bp, Artificial Sequence
  Arid1a.3_Cdkn2a.2
  crRNA array
  misc_feature (148)..(157): n is a, c, g, or t
cttggctttatatatcttgtggaaaggacgaaacaccgtaatttctactaagtgtagatagtgagctggcagcactgcttaatttctactaagtgtagatgcccaacgccccgaactctttaatttctactaagtgtagatttttttnnnnnnnnnnaagcttggcgtggatccgatatcaactagatcttgagacaaatggcagtattcatccacaattttaaaagaaaaggggggattggggggtacagtgcaggggaaagaatagtagacataatagcaacagacatacaaactaaag

SEQ ID NO: 12844 - DNA, 301 bp, Artificial Sequence
  Arid1a.3_Cdkn2a.3
  crRNA array
  misc_feature (148)..(157): n is a, c, g, or t
cttggctttatatatcttgtggaaaggacgaaacaccgtaatttctactaagtgtagatagtgagctggcagcactgcttaatttctactaagtgtagattgtaccgctgggaacgtcgctaatttctactaagtgtagatttttttnnnnnnnnnnaagcttggcgtggatccgatatcaactagatcttgagacaaatggcagtattcatccacaattttaaaagaaaaggggggattggggggtacagtgcaggggaaagaatagtagacataatagcaacagacatacaaactaaag

SEQ ID NO: 12845 - DNA, 301 bp, Artificial Sequence
  Arid1a.3_Cdkn2a.4
  crRNA array
  misc_feature (148)..(157): n is a, c, g, or t
cttggctttatatatcttgtggaaaggacgaaacaccgtaatttctactaagtgtagatagtgagctggcagcactgcttaatttctactaagtgtagataagccacatgctagacacgctaatttctactaagtgtagatttttttnnnnnnnnnnaagcttggcgtggatccgatatcaactagatcttgagacaaatggcagtattcatccacaattttaaaagaaaaggggggattggggggtacagtgcaggggaaagaatagtagacataatagcaacagacatacaaactaaag

SEQ ID NO: 12846 - DNA, 301 bp, Artificial Sequence
  Arid1a.4_Cdkn2a.1
  crRNA array
  misc_feature (148)..(157): n is a, c, g, or t
cttggctttatatatcttgtggaaaggacgaaacaccgtaatttctactaagtgtagatgccgagaccgagtctctgcataatttctactaagtgtagatcaatcacgggagggagcagataatttctactaagtgtagatttttttnnnnnnnnnnaagcttggcgtggatccgatatcaactagatcttgagacaaatggcagtattcatccacaattttaaaagaaaaggggggattggggggtacagtgcaggggaaagaatagtagacataatagcaacagacatacaaactaaag

SEQ ID NO: 12847 - DNA, 301 bp, Artificial Sequence
  Arid1a.4_Cdkn2a.2
  crRNA array
  misc_feature (148)..(157): n is a, c, g, or t
cttggctttatatatcttgtggaaaggacgaaacaccgtaatttctactaagtgtagatgccgagaccgagtctctgcataatttctactaagtgtagatgcccaacgccccgaactctttaatttctactaagtgtagatttttttnnnnnnnnnnaagcttggcgtggatccgatatcaactagatcttgagacaaatggcagtattcatccacaattttaaaagaaaaggggggattggggggtacagtgcaggggaaagaatagtagacataatagcaacagacatacaaactaaag

SEQ ID NO: 12848 - DNA, 301 bp, Artificial Sequence
  Arid1a.4_Cdkn2a.3
  crRNA array
  misc_feature (148)..(157): n is a, c, g, or t
cttggctttatatatcttgtggaaaggacgaaacaccgtaatttctactaagtgtagatgccgagaccgagtctctgcataatttctactaagtgtagattgtaccgctgggaacgtcgctaatttctactaagtgtagatttttttnnnnnnnnnnaagcttggcgtggatccgatatcaactagatcttgagacaaatggcagtattcatccacaattttaaaagaaaaggggggattggggggtacagtgcaggggaaagaatagtagacataatagcaacagacatacaaactaaag

SEQ ID NO: 12849 - DNA, 301 bp, Artificial Sequence
  Arid1a.4_Cdkn2a.4
  crRNA array
  misc_feature (148)..(157): n is a, c, g, or t
cttggctttatatatcttgtggaaaggacgaaacaccgtaatttctactaagtgtagatgccgagaccgagtctctgcataatttctactaagtgtagataagccacatgctagacacgctaatttctactaagtgtagatttttttnnnnnnnnnnaagcttggcgtggatccgatatcaactagatcttgagacaaatggcagtattcatccacaattttaaaagaaaaggggggattggggggtacagtgcaggggaaagaatagtagacataatagcaacagacatacaaactaaag

SEQ ID NO: 12850 - DNA, 301 bp, Artificial Sequence
  Arid1a.1_Wrn.1
  crRNA array
  misc_feature (148)..(157): n is a, c, g, or t
cttggctttatatatcttgtggaaaggacgaaacaccgtaatttctactaagtgtagatcccgcgctcggccgctgccgtaatttctactaagtgtagatgcaaaccactcgggtaattttaatttctactaagtgtagatttttttnnnnnnnnnnaagcttggcgtggatccgatatcaactagatcttgagacaaatggcagtattcatccacaattttaaaagaaaaggggggattggggggtacagtgcaggggaaagaatagtagacataatagcaacagacatacaaactaaag

SEQ ID NO: 12851 - DNA, 301 bp, Artificial Sequence
  Arid1a.1_Wrn.2
  crRNA array
  misc_feature (148)..(157): n is a, c, g, or t
cttggctttatatatcttgtggaaaggacgaaacaccgtaatttctactaagtgtagatcccgcgctcggccgctgccgtaatttctactaagtgtagatgccatgtccagcagaacctttaatttctactaagtgtagatttttttnnnnnnnnnnaagcttggcgtggatccgatatcaactagatcttgagacaaatggcagtattcatccacaattttaaaagaaaaggggggattggggggtacagtgcaggggaaagaatagtagacataatagcaacagacatacaaactaaag

SEQ ID NO: 12852 - DNA, 301 bp, Artificial Sequence
  Arid1a.1_Wrn.3
  crRNA array
  misc_feature (148)..(157): n is a, c, g, or t
cttggctttatatatcttgtggaaaggacgaaacaccgtaatttctactaagtgtagatcccgcgctcggccgctgccgtaatttctactaagtgtagatctgcagcaggccaccgcaattaatttctactaagtgtagatttttttnnnnnnnnnnaagcttggcgtggatccgatatcaactagatcttgagacaaatggcagtattcatccacaattttaaaagaaaaggggggattggggggtacagtgcaggggaaagaatagtagacataatagcaacagacatacaaactaaag

SEQ ID NO: 12853 - DNA, 301 bp, Artificial Sequence
  Arid1a.1_Wrn.4
  crRNA array
  misc_feature (148)..(157): n is a, c, g, or t
cttggctttatatatcttgtggaaaggacgaaacaccgtaatttctactaagtgtagatcccgcgctcggccgctgccgtaatttctactaagtgtagattcgaaggacaatagatgatgtaatttctactaagtgtagatttttttnnnnnnnnnnaagcttggcgtggatccgatatcaactagatcttgagacaaatggcagtattcatccacaattttaaaagaaaaggggggattggggggtacagtgcaggggaaagaatagtagacataatagcaacagacatacaaactaaag

SEQ ID NO: 12854 - DNA, 301 bp, Artificial Sequence
  Arid1a.2_Wrn.1
  crRNA array
  misc_feature (148)..(157): n is a, c, g, or t
cttggctttatatatcttgtggaaaggacgaaacaccgtaatttctactaagtgtagatagtgcaagatcgagcgtggataatttctactaagtgtagatgcaaaccactcgggtaattttaatttctactaagtgtagatttttttnnnnnnnnnnaagcttggcgtggatccgatatcaactagatcttgagacaaatggcagtattcatccacaattttaaaagaaaaggggggattggggggtacagtgcaggggaaagaatagtagacataatagcaacagacatacaaactaaag

SEQ ID NO: 12855 - DNA, 301 bp, Artificial Sequence
  Arid1a.2_Wrn.2
  crRNA array
  misc_feature (148)..(157): n is a, c, g, or t
cttggctttatatatcttgtggaaaggacgaaacaccgtaatttctactaagtgtagatagtgcaagatcgagcgtggataatttctactaagtgtagatgccatgtccagcagaacctttaatttctactaagtgtagatttttttnnnnnnnnnnaagcttggcgtggatccgatatcaactagatcttgagacaaatggcagtattcatccacaattttaaaagaaaaggggggattggggggtacagtgcaggggaaagaatagtagacataatagcaacagacatacaaactaaag

SEQ ID NO: 12856 - DNA, 301 bp, Artificial Sequence
  Arid1a.2_Wrn.3
  crRNA array
  misc_feature (148)..(157): n is a, c, g, or t
cttggctttatatatcttgtggaaaggacgaaacaccgtaatttctactaagtgtagatagtgcaagatcgagcgtggataatttctactaagtgtagatctgcagcaggccaccgcaattaatttctactaagtgtagatttttttnnnnnnnnnnaagcttggcgtggatccgatatcaactagatcttgagacaaatggcagtattcatccacaattttaaaagaaaaggggggattggggggtacagtgcaggggaaagaatagtagacataatagcaacagacatacaaactaaag

SEQ ID NO: 12857 - DNA, 301 bp, Artificial Sequence
  Arid1a.2_Wrn.4
  crRNA array
  misc_feature (148)..(157): n is a, c, g, or t
cttggctttatatatcttgtggaaaggacgaaacaccgtaatttctactaagtgtagatagtgcaagatcgagcgtggataatttctactaagtgtagattcgaaggacaatagatgatgtaatttctactaagtgtagatttttttnnnnnnnnnnaagcttggcgtggatccgatatcaactagatcttgagacaaatggcagtattcatccacaattttaaaagaaaaggggggattggggggtacagtgcaggggaaagaatagtagacataatagcaacagacatacaaactaaag

SEQ ID NO: 12858 - DNA, 301 bp, Artificial Sequence
  Arid1a.3_Wrn.1
  crRNA array
  misc_feature (148)..(157): n is a, c, g, or t
cttggctttatatatcttgtggaaaggacgaaacaccgtaatttctactaagtgtagatagtgagctggcagcactgcttaatttctactaagtgtagatgcaaaccactcgggtaattttaatttctactaagtgtagatttttttnnnnnnnnnnaagcttggcgtggatccgatatcaactagatcttgagacaaatggcagtattcatccacaattttaaaagaaaaggggggattggggggtacagtgcaggggaaagaatagtagacataatagcaacagacatacaaactaaag

SEQ ID NO: 12859 - DNA, 301 bp, Artificial Sequence
  Arid1a.3_Wrn.2
  crRNA array
  misc_feature (148)..(157): n is a, c, g, or t
cttggctttatatatcttgtggaaaggacgaaacaccgtaatttctactaagtgtagatagtgagctggcagcactgcttaatttctactaagtgtagatgccatgtccagcagaacctttaatttctactaagtgtagatttttttnnnnnnnnnnaagcttggcgtggatccgatatcaactagatcttgagacaaatggcagtattcatccacaattttaaaagaaaaggggggattggggggtacagtgcaggggaaagaatagtagacataatagcaacagacatacaaactaaag

SEQ ID NO: 12860 - DNA, 301 bp, Artificial Sequence
  Arid1a.3_Wrn.3
  crRNA array
  misc_feature (148)..(157): n is a, c, g, or t
cttggctttatatatcttgtggaaaggacgaaacaccgtaatttctactaagtgtagatagtgagctggcagcactgcttaatttctactaagtgtagatctgcagcaggccaccgcaattaatttctactaagtgtagatttttttnnnnnnnnnnaagcttggcgtggatccgatatcaactagatcttgagacaaatggcagtattcatccacaattttaaaagaaaaggggggattggggggtacagtgcaggggaaagaatagtagacataatagcaacagacatacaaactaaag

SEQ ID NO: 12861 - DNA, 301 bp, Artificial Sequence
  Arid1a.3_Wrn.4
  crRNA array
  misc_feature (148)..(157): n is a, c, g, or t
cttggctttatatatcttgtggaaaggacgaaacaccgtaatttctactaagtgtagatagtgagctggcagcactgcttaatttctactaagtgtagattcgaaggacaatagatgatgtaatttctactaagtgtagatttttttnnnnnnnnnnaagcttggcgtggatccgatatcaactagatcttgagacaaatggcagtattcatccacaattttaaaagaaaaggggggattggggggtacagtgcaggggaaagaatagtagacataatagcaacagacatacaaactaaag

SEQ ID NO: 12862 - DNA, 301 bp, Artificial Sequence
  Arid1a.4_Wrn.1
  crRNA array
  misc_feature (148)..(157): n is a, c, g, or t
cttggctttatatatcttgtggaaaggacgaaacaccgtaatttctactaagtgtagatgccgagaccgagtctctgcataatttctactaagtgtagatgcaaaccactcgggtaattttaatttctactaagtgtagatttttttnnnnnnnnnnaagcttggcgtggatccgatatcaactagatcttgagacaaatggcagtattcatccacaattttaaaagaaaaggggggattggggggtacagtgcaggggaaagaatagtagacataatagcaacagacatacaaactaaag

SEQ ID NO: 12863 - DNA, 301 bp, Artificial Sequence
  Arid1a.4_Wrn.2
  crRNA array
  misc_feature (148)..(157): n is a, c, g, or t
cttggctttatatatcttgtggaaaggacgaaacaccgtaatttctactaagtgtagatgccgagaccgagtctctgcataatttctactaagtgtagatgccatgtccagcagaacctttaatttctactaagtgtagatttttttnnnnnnnnnnaagcttggcgtggatccgatatcaactagatcttgagacaaatggcagtattcatccacaattttaaaagaaaaggggggattggggggtacagtgcaggggaaagaatagtagacataatagcaacagacatacaaactaaag

SEQ ID NO: 12864 - DNA, 301 bp, Artificial Sequence
  Arid1a.4_Wrn.3
  crRNA array
  misc_feature (148)..(157): n is a, c, g, or t
cttggctttatatatcttgtggaaaggacgaaacaccgtaatttctactaagtgtagatgccgagaccgagtctctgcataatttctactaagtgtagatctgcagcaggccaccgcaattaatttctactaagtgtagatttttttnnnnnnnnnnaagcttggcgtggatccgatatcaactagatcttgagacaaatggcagtattcatccacaattttaaaagaaaaggggggattggggggtacagtgcaggggaaagaatagtagacataatagcaacagacatacaaactaaag

SEQ ID NO: 12865 - DNA, 301 bp, Artificial Sequence
  Arid1a.4_Wrn.4
  crRNA array
  misc_feature (148)..(157): n is a, c, g, or t
cttggctttatatatcttgtggaaaggacgaaacaccgtaatttctactaagtgtagatgccgagaccgagtctctgcataatttctactaagtgtagattcgaaggacaatagatgatgtaatttctactaagtgtagatttttttnnnnnnnnnnaagcttggcgtggatccgatatcaactagatcttgagacaaatggcagtattcatccacaattttaaaagaaaaggggggattggggggtacagtgcaggggaaagaatagtagacataatagcaacagacatacaaactaaag

SEQ ID NO: 12866 - DNA, 301 bp, Artificial Sequence
  Arid1a.1_Brca2.1
  crRNA array
  misc_feature (148)..(157): n is a, c, g, or t
cttggctttatatatcttgtggaaaggacgaaacaccgtaatttctactaagtgtagatcccgcgctcggccgctgccgtaatttctactaagtgtagatctaagcgtagaaccagaaattaatttctactaagtgtagatttttttnnnnnnnnnnaagcttggcgtggatccgatatcaactagatcttgagacaaatggcagtattcatccacaattttaaaagaaaaggggggattggggggtacagtgcaggggaaagaatagtagacataatagcaacagacatacaaactaaag

SEQ ID NO: 12867 - DNA, 301 bp, Artificial Sequence
  Arid1a.1_Brca2.2
  crRNA array
  misc_feature (148)..(157): n is a, c, g, or t
cttggctttatatatcttgtggaaaggacgaaacaccgtaatttctactaagtgtagatcccgcgctcggccgctgccgtaatttctactaagtgtagatgatccaggtgtaacaagccataatttctactaagtgtagatttttttnnnnnnnnnnaagcttggcgtggatccgatatcaactagatcttgagacaaatggcagtattcatccacaattttaaaagaaaaggggggattggggggtacagtgcaggggaaagaatagtagacataatagcaacagacatacaaactaaag

SEQ ID NO: 12868 - DNA, 301 bp, Artificial Sequence
  Arid1a.1_Brca2.3
  crRNA array
  misc_feature (148)..(157): n is a, c, g, or t
cttggctttatatatcttgtggaaaggacgaaacaccgtaatttctactaagtgtagatcccgcgctcggccgctgccgtaatttctactaagtgtagattgaatataaactgggccacttaatttctactaagtgtagatttttttnnnnnnnnnnaagcttggcgtggatccgatatcaactagatcttgagacaaatggcagtattcatccacaattttaaaagaaaaggggggattggggggtacagtgcaggggaaagaatagtagacataatagcaacagacatacaaactaaag

SEQ ID NO: 12869 - DNA, 301 bp, Artificial Sequence
  Arid1a.1_Brca2.4
  crRNA array
  misc_feature (148)..(157): n is a, c, g, or t
cttggctttatatatcttgtggaaaggacgaaacaccgtaatttctactaagtgtagatcccgcgctcggccgctgccgtaatttctactaagtgtagatgaaacgccgtatatatagagtaatttctactaagtgtagatttttttnnnnnnnnnnaagcttggcgtggatccgatatcaactagatcttgagacaaatggcagtattcatccacaattttaaaagaaaaggggggattggggggtacagtgcaggggaaagaatagtagacataatagcaacagacatacaaactaaag

SEQ ID NO: 12870 - DNA, 301 bp, Artificial Sequence
  Arid1a.2_Brca2.1
  crRNA array
  misc_feature (148)..(157): n is a, c, g, or t
cttggctttatatatcttgtggaaaggacgaaacaccgtaatttctactaagtgtagatagtgcaagatcgagcgtggataatttctactaagtgtagatctaagcgtagaaccagaaattaatttctactaagtgtagatttttttnnnnnnnnnnaagcttggcgtggatccgatatcaactagatcttgagacaaatggcagtattcatccacaattttaaaagaaaaggggggattggggggtacagtgcaggggaaagaatagtagacataatagcaacagacatacaaactaaag

SEQ ID NO: 12871 - DNA, 301 bp, Artificial Sequence
  Arid1a.2_Brca2.2
  crRNA array
  misc_feature (148)..(157): n is a, c, g, or t
cttggctttatatatcttgtggaaaggacgaaacaccgtaatttctactaagtgtagatagtgcaagatcgagcgtggataatttctactaagtgtagatgatccaggtgtaacaagccataatttctactaagtgtagatttttttnnnnnnnnnnaagcttggcgtggatccgatatcaactagatcttgagacaaatggcagtattcatccacaattttaaaagaaaaggggggattggggggtacagtgcaggggaaagaatagtagacataatagcaacagacatacaaactaaag

SEQ ID NO: 12872 - DNA, 301 bp, Artificial Sequence
  Arid1a.2_Brca2.3
  crRNA array
  misc_feature (148)..(157): n is a, c, g, or t
cttggctttatatatcttgtggaaaggacgaaacaccgtaatttctactaagtgtagatagtgcaagatcgagcgtggataatttctactaagtgtagattgaatataaactgggccacttaatttctactaagtgtagatttttttnnnnnnnnnnaagcttggcgtggatccgatatcaactagatcttgagacaaatggcagtattcatccacaattttaaaagaaaaggggggattggggggtacagtgcaggggaaagaatagtagacataatagcaacagacatacaaactaaag

SEQ ID NO: 12873 - DNA, 301 bp, Artificial Sequence
  Arid1a.2_Brca2.4
  crRNA array
  misc_feature (148)..(157): n is a, c, g, or t
cttggctttatatatcttgtggaaaggacgaaacaccgtaatttctactaagtgtagatagtgcaagatcgagcgtggataatttctactaagtgtagatgaaacgccgtatatatagagtaatttctactaagtgtagatttttttnnnnnnnnnnaagcttggcgtggatccgatatcaactagatcttgagacaaatggcagtattcatccacaattttaaaagaaaaggggggattggggggtacagtgcaggggaaagaatagtagacataatagcaacagacatacaaactaaag

SEQ ID NO: 12874 - DNA, 301 bp, Artificial Sequence
  Arid1a.3_Brca2.1
  crRNA array
  misc_feature (148)..(157): n is a, c, g, or t
cttggctttatatatcttgtggaaaggacgaaacaccgtaatttctactaagtgtagatagtgagctggcagcactgcttaatttctactaagtgtagatctaagcgtagaaccagaaattaatttctactaagtgtagatttttttnnnnnnnnnnaagcttggcgtggatccgatatcaactagatcttgagacaaatggcagtattcatccacaattttaaaagaaaaggggggattggggggtacagtgcaggggaaagaatagtagacataatagcaacagacatacaaactaaag

SEQ ID NO: 12875 - DNA, 301 bp, Artificial Sequence
  Arid1a.3_Brca2.2
  crRNA array
  misc_feature (148)..(157): n is a, c, g, or t
cttggctttatatatcttgtggaaaggacgaaacaccgtaatttctactaagtgtagatagtgagctggcagcactgcttaatttctactaagtgtagatgatccaggtgtaacaagccataatttctactaagtgtagatttttttnnnnnnnnnnaagcttggcgtggatccgatatcaactagatcttgagacaaatggcagtattcatccacaattttaaaagaaaaggggggattggggggtacagtgcaggggaaagaatagtagacataatagcaacagacatacaaactaaag

SEQ ID NO: 12876 - DNA, 301 bp, Artificial Sequence
  Arid1a.3_Brca2.3
  crRNA array
  misc_feature (148)..(157): n is a, c, g, or t
cttggctttatatatcttgtggaaaggacgaaacaccgtaatttctactaagtgtagatagtgagctggcagcactgcttaatttctactaagtgtagattgaatataaactgggccacttaatttctactaagtgtagatttttttnnnnnnnnnnaagcttggcgtggatccgatatcaactagatcttgagacaaatggcagtattcatccacaattttaaaagaaaaggggggattggggggtacagtgcaggggaaagaatagtagacataatagcaacagacatacaaactaaag

SEQ ID NO: 12877 - DNA, 301 bp, Artificial Sequence
  Arid1a.3_Brca2.4
  crRNA array
  misc_feature (148)..(157): n is a, c, g, or t
cttggctttatatatcttgtggaaaggacgaaacaccgtaatttctactaagtgtagatagtgagctggcagcactgcttaatttctactaagtgtagatgaaacgccgtatatatagagtaatttctactaagtgtagatttttttnnnnnnnnnnaagcttggcgtggatccgatatcaactagatcttgagacaaatggcagtattcatccacaattttaaaagaaaaggggggattggggggtacagtgcaggggaaagaatagtagacataatagcaacagacatacaaactaaag

SEQ ID NO: 12878 - DNA, 301 bp, Artificial Sequence
  Arid1a.4_Brca2.1
  crRNA array
  misc_feature (148)..(157): n is a, c, g, or t
cttggctttatatatcttgtggaaaggacgaaacaccgtaatttctactaagtgtagatgccgagaccgagtctctgcataatttctactaagtgtagatctaagcgtagaaccagaaattaatttctactaagtgtagatttttttnnnnnnnnnnaagcttggcgtggatccgatatcaactagatcttgagacaaatggcagtattcatccacaattttaaaagaaaaggggggattggggggtacagtgcaggggaaagaatagtagacataatagcaacagacatacaaactaaag

SEQ ID NO: 12879 - DNA, 301 bp, Artificial Sequence
  Arid1a.4_Brca2.2
  crRNA array
  misc_feature (148)..(157): n is a, c, g, or t
cttggctttatatatcttgtggaaaggacgaaacaccgtaatttctactaagtgtagatgccgagaccgagtctctgcataatttctactaagtgtagatgatccaggtgtaacaagccataatttctactaagtgtagatttttttnnnnnnnnnnaagcttggcgtggatccgatatcaactagatcttgagacaaatggcagtattcatccacaattttaaaagaaaaggggggattggggggtacagtgcaggggaaagaatagtagacataatagcaacagacatacaaactaaag

SEQ ID NO: 12880 - DNA, 301 bp, Artificial Sequence
  Arid1a.4_Brca2.3
  crRNA array
  misc_feature (148)..(157): n is a, c, g, or t
cttggctttatatatcttgtggaaaggacgaaacaccgtaatttctactaagtgtagatgccgagaccgagtctctgcataatttctactaagtgtagattgaatataaactgggccacttaatttctactaagtgtagatttttttnnnnnnnnnnaagcttggcgtggatccgatatcaactagatcttgagacaaatggcagtattcatccacaattttaaaagaaaaggggggattggggggtacagtgcaggggaaagaatagtagacataatagcaacagacatacaaactaaag

SEQ ID NO: 12881 - DNA, 301 bp, Artificial Sequence
  Arid1a.4_Brca2.4
  crRNA array
  misc_feature (148)..(157): n is a, c, g, or t
cttggctttatatatcttgtggaaaggacgaaacaccgtaatttctactaagtgtagatgccgagaccgagtctctgcataatttctactaagtgtagatgaaacgccgtatatatagagtaatttctactaagtgtagatttttttnnnnnnnnnnaagcttggcgtggatccgatatcaactagatcttgagacaaatggcagtattcatccacaattttaaaagaaaaggggggattggggggtacagtgcaggggaaagaatagtagacataatagcaacagacatacaaactaaag

SEQ ID NO: 12882 - DNA, 301 bp, Artificial Sequence
  Arid1a.1_Apc.1
  crRNA array
  misc_feature (148)..(157): n is a, c, g, or t
cttggctttatatatcttgtggaaaggacgaaacaccgtaatttctactaagtgtagatcccgcgctcggccgctgccgtaatttctactaagtgtagatgtgatccacacgtgtagctgtaatttctactaagtgtagatttttttnnnnnnnnnnaagcttggcgtggatccgatatcaactagatcttgagacaaatggcagtattcatccacaattttaaaagaaaaggggggattggggggtacagtgcaggggaaagaatagtagacataatagcaacagacatacaaactaaag

SEQ ID NO: 12883 - DNA, 301 bp, Artificial Sequence
  Arid1a.1_Apc.2
  crRNA array
  misc_feature (148)..(157): n is a, c, g, or t
cttggctttatatatcttgtggaaaggacgaaacaccgtaatttctactaagtgtagatcccgcgctcggccgctgccgtaatttctactaagtgtagatcatctgctcgccaagacaaataatttctactaagtgtagatttttttnnnnnnnnnnaagcttggcgtggatccgatatcaactagatcttgagacaaatggcagtattcatccacaattttaaaagaaaaggggggattggggggtacagtgcaggggaaagaatagtagacataatagcaacagacatacaaactaaag

SEQ ID NO: 12884 - DNA, 301 bp, Artificial Sequence
  Arid1a.1_Apc.3
  crRNA array
  misc_feature (148)..(157): n is a, c, g, or t
cttggctttatatatcttgtggaaaggacgaaacaccgtaatttctactaagtgtagatcccgcgctcggccgctgccgtaatttctactaagtgtagatacgccaatcgacatgatgattaatttctactaagtgtagatttttttnnnnnnnnnnaagcttggcgtggatccgatatcaactagatcttgagacaaatggcagtattcatccacaattttaaaagaaaaggggggattggggggtacagtgcaggggaaagaatagtagacataatagcaacagacatacaaactaaag

SEQ ID NO: 12885 - DNA, 301 bp, Artificial Sequence
  Arid1a.1_Apc.4
  crRNA array
  misc_feature (148)..(157): n is a, c, g, or t
cttggctttatatatcttgtggaaaggacgaaacaccgtaatttctactaagtgtagatcccgcgctcggccgctgccgtaatttctactaagtgtagatcaccaggggatgatgtgccctaatttctactaagtgtagatttttttnnnnnnnnnnaagcttggcgtggatccgatatcaactagatcttgagacaaatggcagtattcatccacaattttaaaagaaaaggggggattggggggtacagtgcaggggaaagaatagtagacataatagcaacagacatacaaactaaag

SEQ ID NO: 12886 - DNA, 301 bp, Artificial Sequence
  Arid1a.2_Apc.1
  crRNA array
  misc_feature (148)..(157): n is a, c, g, or t
cttggctttatatatcttgtggaaaggacgaaacaccgtaatttctactaagtgtagatagtgcaagatcgagcgtggataatttctactaagtgtagatgtgatccacacgtgtagctgtaatttctactaagtgtagatttttttnnnnnnnnnnaagcttggcgtggatccgatatcaactagatcttgagacaaatggcagtattcatccacaattttaaaagaaaaggggggattggggggtacagtgcaggggaaagaatagtagacataatagcaacagacatacaaactaaag

SEQ ID NO: 12887 - DNA, 301 bp, Artificial Sequence
  Arid1a.2_Apc.2
  crRNA array
  misc_feature (148)..(157): n is a, c, g, or t
cttggctttatatatcttgtggaaaggacgaaacaccgtaatttctactaagtgtagatagtgcaagatcgagcgtggataatttctactaagtgtagatcatctgctcgccaagacaaataatttctactaagtgtagatttttttnnnnnnnnnnaagcttggcgtggatccgatatcaactagatcttgagacaaatggcagtattcatccacaattttaaaagaaaaggggggattggggggtacagtgcaggggaaagaatagtagacataatagcaacagacatacaaactaaag

SEQ ID NO: 12888 - DNA, 301 bp, Artificial Sequence
  Arid1a.2_Apc.3
  crRNA array
  misc_feature (148)..(157): n is a, c, g, or t
cttggctttatatatcttgtggaaaggacgaaacaccgtaatttctactaagtgtagatagtgcaagatcgagcgtggataatttctactaagtgtagatacgccaatcgacatgatgattaatttctactaagtgtagatttttttnnnnnnnnnnaagcttggcgtggatccgatatcaactagatcttgagacaaatggcagtattcatccacaattttaaaagaaaaggggggattggggggtacagtgcaggggaaagaatagtagacataatagcaacagacatacaaactaaag

SEQ ID NO: 12889 - DNA, 301 bp, Artificial Sequence
  Arid1a.2_Apc.4
  crRNA array
  misc_feature (148)..(157): n is a, c, g, or t
cttggctttatatatcttgtggaaaggacgaaacaccgtaatttctactaagtgtagatagtgcaagatcgagcgtggataatttctactaagtgtagatcaccaggggatgatgtgccctaatttctactaagtgtagatttttttnnnnnnnnnnaagcttggcgtggatccgatatcaactagatcttgagacaaatggcagtattcatccacaattttaaaagaaaaggggggattggggggtacagtgcaggggaaagaatagtagacataatagcaacagacatacaaactaaag

SEQ ID NO: 12890 - DNA, 301 bp, Artificial Sequence
  Arid1a.3_Apc.1
  crRNA array
  misc_feature (148)..(157): n is a, c, g, or t
cttggctttatatatcttgtggaaaggacgaaacaccgtaatttctactaagtgtagatagtgagctggcagcactgcttaatttctactaagtgtagatgtgatccacacgtgtagctgtaatttctactaagtgtagatttttttnnnnnnnnnnaagcttggcgtggatccgatatcaactagatcttgagacaaatggcagtattcatccacaattttaaaagaaaaggggggattggggggtacagtgcaggggaaagaatagtagacataatagcaacagacatacaaactaaag

SEQ ID NO: 12891 - DNA, 301 bp, Artificial Sequence
  Arid1a.3_Apc.2
  crRNA array
  misc_feature (148)..(157): n is a, c, g, or t
cttggctttatatatcttgtggaaaggacgaaacaccgtaatttctactaagtgtagatagtgagctggcagcactgcttaatttctactaagtgtagatcatctgctcgccaagacaaataatttctactaagtgtagatttttttnnnnnnnnnnaagcttggcgtggatccgatatcaactagatcttgagacaaatggcagtattcatccacaattttaaaagaaaaggggggattggggggtacagtgcaggggaaagaatagtagacataatagcaacagacatacaaactaaag

SEQ ID NO: 12892 - DNA, 301 bp, Artificial Sequence
  Arid1a.3_Apc.3
  crRNA array
  misc_feature (148)..(157): n is a, c, g, or t
cttggctttatatatcttgtggaaaggacgaaacaccgtaatttctactaagtgtagatagtgagctggcagcactgcttaatttctactaagtgtagatacgccaatcgacatgatgattaatttctactaagtgtagatttttttnnnnnnnnnnaagcttggcgtggatccgatatcaactagatcttgagacaaatggcagtattcatccacaattttaaaagaaaaggggggattggggggtacagtgcaggggaaagaatagtagacataatagcaacagacatacaaactaaag

SEQ ID NO: 12893 - DNA, 301 bp, Artificial Sequence
  Arid1a.3_Apc.4
  crRNA array
  misc_feature (148)..(157): n is a, c, g, or t
cttggctttatatatcttgtggaaaggacgaaacaccgtaatttctactaagtgtagatagtgagctggcagcactgcttaatttctactaagtgtagatcaccaggggatgatgtgccctaatttctactaagtgtagatttttttnnnnnnnnnnaagcttggcgtggatccgatatcaactagatcttgagacaaatggcagtattcatccacaattttaaaagaaaaggggggattggggggtacagtgcaggggaaagaatagtagacataatagcaacagacatacaaactaaag

SEQ ID NO: 12894 - DNA, 301 bp, Artificial Sequence
  Arid1a.4_Apc.1
  crRNA array
  misc_feature (148)..(157): n is a, c, g, or t
cttggctttatatatcttgtggaaaggacgaaacaccgtaatttctactaagtgtagatgccgagaccgagtctctgcataatttctactaagtgtagatgtgatccacacgtgtagctgtaatttctactaagtgtagatttttttnnnnnnnnnnaagcttggcgtggatccgatatcaactagatcttgagacaaatggcagtattcatccacaattttaaaagaaaaggggggattggggggtacagtgcaggggaaagaatagtagacataatagcaacagacatacaaactaaag

SEQ ID NO: 12895 - DNA, 301 bp, Artificial Sequence
  Arid1a.4_Apc.2
  crRNA array
  misc_feature (148)..(157): n is a, c, g, or t
cttggctttatatatcttgtggaaaggacgaaacaccgtaatttctactaagtgtagatgccgagaccgagtctctgcataatttctactaagtgtagatcatctgctcgccaagacaaataatttctactaagtgtagatttttttnnnnnnnnnnaagcttggcgtggatccgatatcaactagatcttgagacaaatggcagtattcatccacaattttaaaagaaaaggggggattggggggtacagtgcaggggaaagaatagtagacataatagcaacagacatacaaactaaag

SEQ ID NO: 12896 - DNA, 301 bp, Artificial Sequence
  Arid1a.4_Apc.3
  crRNA array
  misc_feature (148)..(157): n is a, c, g, or t
cttggctttatatatcttgtggaaaggacgaaacaccgtaatttctactaagtgtagatgccgagaccgagtctctgcataatttctactaagtgtagatacgccaatcgacatgatgattaatttctactaagtgtagatttttttnnnnnnnnnnaagcttggcgtggatccgatatcaactagatcttgagacaaatggcagtattcatccacaattttaaaagaaaaggggggattggggggtacagtgcaggggaaagaatagtagacataatagcaacagacatacaaactaaag

SEQ ID NO: 12897 - DNA, 301 bp, Artificial Sequence
  Arid1a.4_Apc.4
  crRNA array
  misc_feature (148)..(157): n is a, c, g, or t
cttggctttatatatcttgtggaaaggacgaaacaccgtaatttctactaagtgtagatgccgagaccgagtctctgcataatttctactaagtgtagatcaccaggggatgatgtgccctaatttctactaagtgtagatttttttnnnnnnnnnnaagcttggcgtggatccgatatcaactagatcttgagacaaatggcagtattcatccacaattttaaaagaaaaggggggattggggggtacagtgcaggggaaagaatagtagacataatagcaacagacatacaaactaaag

SEQ ID NO: 12898 - DNA, 301 bp, Artificial Sequence
  Arid1a.1_Fanca.1
  crRNA array
  misc_feature (148)..(157): n is a, c, g, or t
cttggctttatatatcttgtggaaaggacgaaacaccgtaatttctactaagtgtagatcccgcgctcggccgctgccgtaatttctactaagtgtagatggaggccccggggcccaccataatttctactaagtgtagatttttttnnnnnnnnnnaagcttggcgtggatccgatatcaactagatcttgagacaaatggcagtattcatccacaattttaaaagaaaaggggggattggggggtacagtgcaggggaaagaatagtagacataatagcaacagacatacaaactaaag

SEQ ID NO: 12899 - DNA, 301 bp, Artificial Sequence
  Arid1a.1_Fanca.2
  crRNA array
  misc_feature (148)..(157): n is a, c, g, or t
cttggctttatatatcttgtggaaaggacgaaacaccgtaatttctactaagtgtagatcccgcgctcggccgctgccgtaatttctactaagtgtagatagagctaccacctagacagctaatttctactaagtgtagatttttttnnnnnnnnnnaagcttggcgtggatccgatatcaactagatcttgagacaaatggcagtattcatccacaattttaaaagaaaaggggggattggggggtacagtgcaggggaaagaatagtagacataatagcaacagacatacaaactaaag

SEQ ID NO: 12900 - DNA, 301 bp, Artificial Sequence
  Arid1a.1_Fanca.3
  crRNA array
  misc_feature (148)..(157): n is a, c, g, or t
cttggctttatatatcttgtggaaaggacgaaacaccgtaatttctactaagtgtagatcccgcgctcggccgctgccgtaatttctactaagtgtagataccaactgctgtgcctcgggtaatttctactaagtgtagatttttttnnnnnnnnnnaagcttggcgtggatccgatatcaactagatcttgagacaaatggcagtattcatccacaattttaaaagaaaaggggggattggggggtacagtgcaggggaaagaatagtagacataatagcaacagacatacaaactaaag

SEQ ID NO: 12901 - DNA, 301 bp, Artificial Sequence
  Arid1a.1_Fanca.4
  crRNA array
  misc_feature (148)..(157): n is a, c, g, or t
cttggctttatatatcttgtggaaaggacgaaacaccgtaatttctactaagtgtagatcccgcgctcggccgctgccgtaatttctactaagtgtagatcacccacccctggtgccaagtaatttctactaagtgtagatttttttnnnnnnnnnnaagcttggcgtggatccgatatcaactagatcttgagacaaatggcagtattcatccacaattttaaaagaaaaggggggattggggggtacagtgcaggggaaagaatagtagacataatagcaacagacatacaaactaaag

SEQ ID NO: 12902 - DNA, 301 bp, Artificial Sequence
  Arid1a.2_Fanca.1
  crRNA array
  misc_feature (148)..(157): n is a, c, g, or t
cttggctttatatatcttgtggaaaggacgaaacaccgtaatttctactaagtgtagatagtgcaagatcgagcgtggataatttctactaagtgtagatggaggccccggggcccaccataatttctactaagtgtagatttttttnnnnnnnnnnaagcttggcgtggatccgatatcaactagatcttgagacaaatggcagtattcatccacaattttaaaagaaaaggggggattggggggtacagtgcaggggaaagaatagtagacataatagcaacagacatacaaactaaag

SEQ ID NO: 12903 - DNA, 301 bp, Artificial Sequence
  Arid1a.2_Fanca.2
  crRNA array
  misc_feature (148)..(157): n is a, c, g, or t
cttggctttatatatcttgtggaaaggacgaaacaccgtaatttctactaagtgtagatagtgcaagatcgagcgtggataatttctactaagtgtagatagagctaccacctagacagctaatttctactaagtgtagatttttttnnnnnnnnnnaagcttggcgtggatccgatatcaactagatcttgagacaaatggcagtattcatccacaattttaaaagaaaaggggggattggggggtacagtgcaggggaaagaatagtagacataatagcaacagacatacaaactaaag

SEQ ID NO: 12904 - DNA, 301 bp, Artificial Sequence
  Arid1a.2_Fanca.3
  crRNA array
  misc_feature (148)..(157): n is a, c, g, or t
cttggctttatatatcttgtggaaaggacgaaacaccgtaatttctactaagtgtagatagtgcaagatcgagcgtggataatttctactaagtgtagataccaactgctgtgcctcgggtaatttctactaagtgtagatttttttnnnnnnnnnnaagcttggcgtggatccgatatcaactagatcttgagacaaatggcagtattcatccacaattttaaaagaaaaggggggattggggggtacagtgcaggggaaagaatagtagacataatagcaacagacatacaaactaaag

SEQ ID NO: 12905 - DNA, 301 bp, Artificial Sequence
  Arid1a.2_Fanca.4
  crRNA array
  misc_feature (148)..(157): n is a, c, g, or t
cttggctttatatatcttgtggaaaggacgaaacaccgtaatttctactaagtgtagatagtgcaagatcgagcgtggataatttctactaagtgtagatcacccacccctggtgccaagtaatttctactaagtgtagatttttttnnnnnnnnnnaagcttggcgtggatccgatatcaactagatcttgagacaaatggcagtattcatccacaattttaaaagaaaaggggggattggggggtacagtgcaggggaaagaatagtagacataatagcaacagacatacaaactaaag

SEQ ID NO: 12906 - DNA, 301 bp, Artificial Sequence
  Arid1a.3_Fanca.1
  crRNA array
  misc_feature (148)..(157): n is a, c, g, or t
cttggctttatatatcttgtggaaaggacgaaacaccgtaatttctactaagtgtagatagtgagctggcagcactgcttaatttctactaagtgtagatggaggccccggggcccaccataatttctactaagtgtagatttttttnnnnnnnnnnaagcttggcgtggatccgatatcaactagatcttgagacaaatggcagtattcatccacaattttaaaagaaaaggggggattggggggtacagtgcaggggaaagaatagtagacataatagcaacagacatacaaactaaag

SEQ ID NO: 12907 - DNA, 301 bp, Artificial Sequence
  Arid1a.3_Fanca.2
  crRNA array
  misc_feature (148)..(157): n is a, c, g, or t
cttggctttatatatcttgtggaaaggacgaaacaccgtaatttctactaagtgtagatagtgagctggcagcactgcttaatttctactaagtgtagatagagctaccacctagacagctaatttctactaagtgtagatttttttnnnnnnnnnnaagcttggcgtggatccgatatcaactagatcttgagacaaatggcagtattcatccacaattttaaaagaaaaggggggattggggggtacagtgcaggggaaagaatagtagacataatagcaacagacatacaaactaaag

SEQ ID NO: 12908 - DNA, 301 bp, Artificial Sequence
  Arid1a.3_Fanca.3
  crRNA array
  misc_feature (148)..(157): n is a, c, g, or t
cttggctttatatatcttgtggaaaggacgaaacaccgtaatttctactaagtgtagatagtgagctggcagcactgcttaatttctactaagtgtagataccaactgctgtgcctcgggtaatttctactaagtgtagatttttttnnnnnnnnnnaagcttggcgtggatccgatatcaactagatcttgagacaaatggcagtattcatccacaattttaaaagaaaaggggggattggggggtacagtgcaggggaaagaatagtagacataatagcaacagacatacaaactaaag

SEQ ID NO: 12909 - DNA, 301 bp, Artificial Sequence
  Arid1a.3_Fanca.4
  crRNA array
  misc_feature (148)..(157): n is a, c, g, or t
cttggctttatatatcttgtggaaaggacgaaacaccgtaatttctactaagtgtagatagtgagctggcagcactgcttaatttctactaagtgtagatcacccacccctggtgccaagtaatttctactaagtgtagatttttttnnnnnnnnnnaagcttggcgtggatccgatatcaactagatcttgagacaaatggcagtattcatccacaattttaaaagaaaaggggggattggggggtacagtgcaggggaaagaatagtagacataatagcaacagacatacaaactaaag

SEQ ID NO: 12910 - DNA, 301 bp, Artificial Sequence
  Arid1a.4_Fanca.1
  crRNA array
  misc_feature (148)..(157): n is a, c, g, or t
cttggctttatatatcttgtggaaaggacgaaacaccgtaatttctactaagtgtagatgccgagaccgagtctctgcataatttctactaagtgtagatggaggccccggggcccaccataatttctactaagtgtagatttttttnnnnnnnnnnaagcttggcgtggatccgatatcaactagatcttgagacaaatggcagtattcatccacaattttaaaagaaaaggggggattggggggtacagtgcaggggaaagaatagtagacataatagcaacagacatacaaactaaag

SEQ ID NO: 12911 - DNA, 301 bp, Artificial Sequence
  Arid1a.4_Fanca.2
  crRNA array
  misc_feature (148)..(157): n is a, c, g, or t
cttggctttatatatcttgtggaaaggacgaaacaccgtaatttctactaagtgtagatgccgagaccgagtctctgcataatttctactaagtgtagatagagctaccacctagacagctaatttctactaagtgtagatttttttnnnnnnnnnnaagcttggcgtggatccgatatcaactagatcttgagacaaatggcagtattcatccacaattttaaaagaaaaggggggattggggggtacagtgcaggggaaagaatagtagacataatagcaacagacatacaaactaaag

SEQ ID NO: 12912 - DNA, 301 bp, Artificial Sequence
  Arid1a.4_Fanca.3
  crRNA array
  misc_feature (148)..(157): n is a, c, g, or t
cttggctttatatatcttgtggaaaggacgaaacaccgtaatttctactaagtgtagatgccgagaccgagtctctgcataatttctactaagtgtagataccaactgctgtgcctcgggtaatttctactaagtgtagatttttttnnnnnnnnnnaagcttggcgtggatccgatatcaactagatcttgagacaaatggcagtattcatccacaattttaaaagaaaaggggggattggggggtacagtgcaggggaaagaatagtagacataatagcaacagacatacaaactaaag

SEQ ID NO: 12913 - DNA, 301 bp, Artificial Sequence
  Arid1a.4_Fanca.4
  crRNA array
  misc_feature (148)..(157): n is a, c, g, or t
cttggctttatatatcttgtggaaaggacgaaacaccgtaatttctactaagtgtagatgccgagaccgagtctctgcataatttctactaagtgtagatcacccacccctggtgccaagtaatttctactaagtgtagatttttttnnnnnnnnnnaagcttggcgtggatccgatatcaactagatcttgagacaaatggcagtattcatccacaattttaaaagaaaaggggggattggggggtacagtgcaggggaaagaatagtagacataatagcaacagacatacaaactaaag

SEQ ID NO: 12914 - DNA, 301 bp, Artificial Sequence
  Arid1a.1_Nf1.1
  crRNA array
  misc_feature (148)..(157): n is a, c, g, or t
cttggctttatatatcttgtggaaaggacgaaacaccgtaatttctactaagtgtagatcccgcgctcggccgctgccgtaatttctactaagtgtagattggcgatccggaatcctctgtaatttctactaagtgtagatttttttnnnnnnnnnnaagcttggcgtggatccgatatcaactagatcttgagacaaatggcagtattcatccacaattttaaaagaaaaggggggattggggggtacagtgcaggggaaagaatagtagacataatagcaacagacatacaaactaaag

SEQ ID NO: 12915 - DNA, 301 bp, Artificial Sequence
  Arid1a.1_Nf1.2
  crRNA array
  misc_feature (148)..(157): n is a, c, g, or t
cttggctttatatatcttgtggaaaggacgaaacaccgtaatttctactaagtgtagatcccgcgctcggccgctgccgtaatttctactaagtgtagatggaaacacaacgctggcctctaatttctactaagtgtagatttttttnnnnnnnnnnaagcttggcgtggatccgatatcaactagatcttgagacaaatggcagtattcatccacaattttaaaagaaaaggggggattggggggtacagtgcaggggaaagaatagtagacataatagcaacagacatacaaactaaag

SEQ ID NO: 12916 - DNA, 301 bp, Artificial Sequence
  Arid1a.1_Nf1.3
  crRNA array
  misc_feature (148)..(157): n is a, c, g, or t
cttggctttatatatcttgtggaaaggacgaaacaccgtaatttctactaagtgtagatcccgcgctcggccgctgccgtaatttctactaagtgtagataatgatggaacgcagtcgcataatttctactaagtgtagatttttttnnnnnnnnnnaagcttggcgtggatccgatatcaactagatcttgagacaaatggcagtattcatccacaattttaaaagaaaaggggggattggggggtacagtgcaggggaaagaatagtagacataatagcaacagacatacaaactaaag

SEQ ID NO: 12917 - DNA, 301 bp, Artificial Sequence
  Arid1a.1_Nf1.4
  crRNA array
  misc_feature (148)..(157): n is a, c, g, or t
cttggctttatatatcttgtggaaaggacgaaacaccgtaatttctactaagtgtagatcccgcgctcggccgctgccgtaatttctactaagtgtagattgcaaaaccatccaccaagttaatttctactaagtgtagatttttttnnnnnnnnnnaagcttggcgtggatccgatatcaactagatcttgagacaaatggcagtattcatccacaattttaaaagaaaaggggggattggggggtacagtgcaggggaaagaatagtagacataatagcaacagacatacaaactaaag

SEQ ID NO: 12918 - DNA, 301 bp, Artificial Sequence
  Arid1a.2_Nf1.1
  crRNA array
  misc_feature (148)..(157): n is a, c, g, or t
cttggctttatatatcttgtggaaaggacgaaacaccgtaatttctactaagtgtagatagtgcaagatcgagcgtggataatttctactaagtgtagattggcgatccggaatcctctgtaatttctactaagtgtagatttttttnnnnnnnnnnaagcttggcgtggatccgatatcaactagatcttgagacaaatggcagtattcatccacaattttaaaagaaaaggggggattggggggtacagtgcaggggaaagaatagtagacataatagcaacagacatacaaactaaag

SEQ ID NO: 12919 - DNA, 301 bp, Artificial Sequence
  Arid1a.2_Nf1.2
  crRNA array
  misc_feature (148)..(157): n is a, c, g, or t
cttggctttatatatcttgtggaaaggacgaaacaccgtaatttctactaagtgtagatagtgcaagatcgagcgtggataatttctactaagtgtagatggaaacacaacgctggcctctaatttctactaagtgtagatttttttnnnnnnnnnnaagcttggcgtggatccgatatcaactagatcttgagacaaatggcagtattcatccacaattttaaaagaaaaggggggattggggggtacagtgcaggggaaagaatagtagacataatagcaacagacatacaaactaaag

SEQ ID NO: 12920 - DNA, 301 bp, Artificial Sequence
  Arid1a.2_Nf1.3
  crRNA array
  misc_feature (148)..(157): n is a, c, g, or t
cttggctttatatatcttgtggaaaggacgaaacaccgtaatttctactaagtgtagatagtgcaagatcgagcgtggataatttctactaagtgtagataatgatggaacgcagtcgcataatttctactaagtgtagatttttttnnnnnnnnnnaagcttggcgtggatccgatatcaactagatcttgagacaaatggcagtattcatccacaattttaaaagaaaaggggggattggggggtacagtgcaggggaaagaatagtagacataatagcaacagacatacaaactaaag

SEQ ID NO: 12921 - DNA, 301 bp, Artificial Sequence
  Arid1a.2_Nf1.4
  crRNA array
  misc_feature (148)..(157): n is a, c, g, or t
cttggctttatatatcttgtggaaaggacgaaacaccgtaatttctactaagtgtagatagtgcaagatcgagcgtggataatttctactaagtgtagattgcaaaaccatccaccaagttaatttctactaagtgtagatttttttnnnnnnnnnnaagcttggcgtggatccgatatcaactagatcttgagacaaatggcagtattcatccacaattttaaaagaaaaggggggattggggggtacagtgcaggggaaagaatagtagacataatagcaacagacatacaaactaaag

SEQ ID NO: 12922 - DNA, 301 bp, Artificial Sequence
  Arid1a.3_Nf1.1
  crRNA array
  misc_feature (148)..(157): n is a, c, g, or t
cttggctttatatatcttgtggaaaggacgaaacaccgtaatttctactaagtgtagatagtgagctggcagcactgcttaatttctactaagtgtagattggcgatccggaatcctctgtaatttctactaagtgtagatttttttnnnnnnnnnnaagcttggcgtggatccgatatcaactagatcttgagacaaatggcagtattcatccacaattttaaaagaaaaggggggattggggggtacagtgcaggggaaagaatagtagacataatagcaacagacatacaaactaaag

SEQ ID NO: 12923 - DNA, 301 bp, Artificial Sequence
  Arid1a.3_Nf1.2
  crRNA array
  misc_feature (148)..(157): n is a, c, g, or t
cttggctttatatatcttgtggaaaggacgaaacaccgtaatttctactaagtgtagatagtgagctggcagcactgcttaatttctactaagtgtagatggaaacacaacgctggcctctaatttctactaagtgtagatttttttnnnnnnnnnnaagcttggcgtggatccgatatcaactagatcttgagacaaatggcagtattcatccacaattttaaaagaaaaggggggattggggggtacagtgcaggggaaagaatagtagacataatagcaacagacatacaaactaaag

SEQ ID NO: 12924 - DNA, 301 bp, Artificial Sequence
  Arid1a.3_Nf1.3
  crRNA array
  misc_feature (148)..(157): n is a, c, g, or t
cttggctttatatatcttgtggaaaggacgaaacaccgtaatttctactaagtgtagatagtgagctggcagcactgcttaatttctactaagtgtagataatgatggaacgcagtcgcataatttctactaagtgtagatttttttnnnnnnnnnnaagcttggcgtggatccgatatcaactagatcttgagacaaatggcagtattcatccacaattttaaaagaaaaggggggattggggggtacagtgcaggggaaagaatagtagacataatagcaacagacatacaaactaaag

SEQ ID NO: 12925 - DNA, 301 bp, Artificial Sequence
  Arid1a.3_Nf1.4
  crRNA array
  misc_feature (148)..(157): n is a, c, g, or t
cttggctttatatatcttgtggaaaggacgaaacaccgtaatttctactaagtgtagatagtgagctggcagcactgcttaatttctactaagtgtagattgcaaaaccatccaccaagttaatttctactaagtgtagatttttttnnnnnnnnnnaagcttggcgtggatccgatatcaactagatcttgagacaaatggcagtattcatccacaattttaaaagaaaaggggggattggggggtacagtgcaggggaaagaatagtagacataatagcaacagacatacaaactaaag

SEQ ID NO: 12926 - DNA, 301 bp, Artificial Sequence
  Arid1a.4_Nf1.1
  crRNA array
  misc_feature (148)..(157): n is a, c, g, or t
cttggctttatatatcttgtggaaaggacgaaacaccgtaatttctactaagtgtagatgccgagaccgagtctctgcataatttctactaagtgtagattggcgatccggaatcctctgtaatttctactaagtgtagatttttttnnnnnnnnnnaagcttggcgtggatccgatatcaactagatcttgagacaaatggcagtattcatccacaattttaaaagaaaaggggggattggggggtacagtgcaggggaaagaatagtagacataatagcaacagacatacaaactaaag

SEQ ID NO: 12927 - DNA, 301 bp, Artificial Sequence
  Arid1a.4_Nf1.2
  crRNA array
  misc_feature (148)..(157): n is a, c, g, or t
cttggctttatatatcttgtggaaaggacgaaacaccgtaatttctactaagtgtagatgccgagaccgagtctctgcataatttctactaagtgtagatggaaacacaacgctggcctctaatttctactaagtgtagatttttttnnnnnnnnnnaagcttggcgtggatccgatatcaactagatcttgagacaaatggcagtattcatccacaattttaaaagaaaaggggggattggggggtacagtgcaggggaaagaatagtagacataatagcaacagacatacaaactaaag

SEQ ID NO: 12928 - DNA, 301 bp, Artificial Sequence
  Arid1a.4_Nf1.3
  crRNA array
  misc_feature (148)..(157): n is a, c, g, or t
cttggctttatatatcttgtggaaaggacgaaacaccgtaatttctactaagtgtagatgccgagaccgagtctctgcataatttctactaagtgtagataatgatggaacgcagtcgcataatttctactaagtgtagatttttttnnnnnnnnnnaagcttggcgtggatccgatatcaactagatcttgagacaaatggcagtattcatccacaattttaaaagaaaaggggggattggggggtacagtgcaggggaaagaatagtagacataatagcaacagacatacaaactaaag

SEQ ID NO: 12929 - DNA, 301 bp, Artificial Sequence
  Arid1a.4_Nf1.4
  crRNA array
  misc_feature (148)..(157): n is a, c, g, or t
cttggctttatatatcttgtggaaaggacgaaacaccgtaatttctactaagtgtagatgccgagaccgagtctctgcataatttctactaagtgtagattgcaaaaccatccaccaagttaatttctactaagtgtagatttttttnnnnnnnnnnaagcttggcgtggatccgatatcaactagatcttgagacaaatggcagtattcatccacaattttaaaagaaaaggggggattggggggtacagtgcaggggaaagaatagtagacataatagcaacagacatacaaactaaag

SEQ ID NO: 12930 - DNA, 301 bp, Artificial Sequence
  Arid1a.1_Kdm6a.1
  crRNA array
  misc_feature (148)..(157): n is a, c, g, or t
cttggctttatatatcttgtggaaaggacgaaacaccgtaatttctactaagtgtagatcccgcgctcggccgctgccgtaatttctactaagtgtagatgctgccgcctctcgcggcagtaatttctactaagtgtagatttttttnnnnnnnnnnaagcttggcgtggatccgatatcaactagatcttgagacaaatggcagtattcatccacaattttaaaagaaaaggggggattggggggtacagtgcaggggaaagaatagtagacataatagcaacagacatacaaactaaag

SEQ ID NO: 12931 - DNA, 301 bp, Artificial Sequence
  Arid1a.1_Kdm6a.2
  crRNA array
  misc_feature (148)..(157): n is a, c, g, or t
cttggctttatatatcttgtggaaaggacgaaacaccgtaatttctactaagtgtagatcccgcgctcggccgctgccgtaatttctactaagtgtagatgctgcaggtaaggcacgttttaatttctactaagtgtagatttttttnnnnnnnnnnaagcttggcgtggatccgatatcaactagatcttgagacaaatggcagtattcatccacaattttaaaagaaaaggggggattggggggtacagtgcaggggaaagaatagtagacataatagcaacagacatacaaactaaag

SEQ ID NO: 12932 - DNA, 301 bp, Artificial Sequence
  Arid1a.1_Kdm6a.3
  crRNA array
  misc_feature (148)..(157): n is a, c, g, or t
cttggctttatatatcttgtggaaaggacgaaacaccgtaatttctactaagtgtagatcccgcgctcggccgctgccgtaatttctactaagtgtagattgctggtgccggggaagttttaatttctactaagtgtagatttttttnnnnnnnnnnaagcttggcgtggatccgatatcaactagatcttgagacaaatggcagtattcatccacaattttaaaagaaaaggggggattggggggtacagtgcaggggaaagaatagtagacataatagcaacagacatacaaactaaag

SEQ ID NO: 12933 - DNA, 301 bp, Artificial Sequence
  Arid1a.1_Kdm6a.4
  crRNA array
  misc_feature (148)..(157): n is a, c, g, or t
cttggctttatatatcttgtggaaaggacgaaacaccgtaatttctactaagtgtagatcccgcgctcggccgctgccgtaatttctactaagtgtagattgtctcctacgaatcccccctaatttctactaagtgtagatttttttnnnnnnnnnnaagcttggcgtggatccgatatcaactagatcttgagacaaatggcagtattcatccacaattttaaaagaaaaggggggattggggggtacagtgcaggggaaagaatagtagacataatagcaacagacatacaaactaaag

SEQ ID NO: 12934 - DNA, 301 bp, Artificial Sequence
  Arid1a.2_Kdm6a.1
  crRNA array
  misc_feature (148)..(157): n is a, c, g, or t
cttggctttatatatcttgtggaaaggacgaaacaccgtaatttctactaagtgtagatagtgcaagatcgagcgtggataatttctactaagtgtagatgctgccgcctctcgcggcagtaatttctactaagtgtagatttttttnnnnnnnnnnaagcttggcgtggatccgatatcaactagatcttgagacaaatggcagtattcatccacaattttaaaagaaaaggggggattggggggtacagtgcaggggaaagaatagtagacataatagcaacagacatacaaactaaag

SEQ ID NO: 12935 - DNA, 301 bp, Artificial Sequence
  Arid1a.2_Kdm6a.2
  crRNA array
  misc_feature (148)..(157): n is a, c, g, or t
cttggctttatatatcttgtggaaaggacgaaacaccgtaatttctactaagtgtagatagtgcaagatcgagcgtggataatttctactaagtgtagatgctgcaggtaaggcacgttttaatttctactaagtgtagatttttttnnnnnnnnnnaagcttggcgtggatccgatatcaactagatcttgagacaaatggcagtattcatccacaattttaaaagaaaaggggggattggggggtacagtgcaggggaaagaatagtagacataatagcaacagacatacaaactaaag

SEQ ID NO: 12936 - DNA, 301 bp, Artificial Sequence
  Arid1a.2_Kdm6a.3
  crRNA array
  misc_feature (148)..(157): n is a, c, g, or t
cttggctttatatatcttgtggaaaggacgaaacaccgtaatttctactaagtgtagatagtgcaagatcgagcgtggataatttctactaagtgtagattgctggtgccggggaagttttaatttctactaagtgtagatttttttnnnnnnnnnnaagcttggcgtggatccgatatcaactagatcttgagacaaatggcagtattcatccacaattttaaaagaaaaggggggattggggggtacagtgcaggggaaagaatagtagacataatagcaacagacatacaaactaaag

SEQ ID NO: 12937 - DNA, 301 bp, Artificial Sequence
  Arid1a.2_Kdm6a.4
  crRNA array
  misc_feature (148)..(157): n is a, c, g, or t
cttggctttatatatcttgtggaaaggacgaaacaccgtaatttctactaagtgtagatagtgcaagatcgagcgtggataatttctactaagtgtagattgtctcctacgaatcccccctaatttctactaagtgtagatttttttnnnnnnnnnnaagcttggcgtggatccgatatcaactagatcttgagacaaatggcagtattcatccacaattttaaaagaaaaggggggattggggggtacagtgcaggggaaagaatagtagacataatagcaacagacatacaaactaaag

SEQ ID NO: 12938 - DNA, 301 bp, Artificial Sequence
  Arid1a.3_Kdm6a.1
  crRNA array
  misc_feature (148)..(157): n is a, c, g, or t
cttggctttatatatcttgtggaaaggacgaaacaccgtaatttctactaagtgtagatagtgagctggcagcactgcttaatttctactaagtgtagatgctgccgcctctcgcggcagtaatttctactaagtgtagatttttttnnnnnnnnnnaagcttggcgtggatccgatatcaactagatcttgagacaaatggcagtattcatccacaattttaaaagaaaaggggggattggggggtacagtgcaggggaaagaatagtagacataatagcaacagacatacaaactaaag

SEQ ID NO: 12939 - DNA, 301 bp, Artificial Sequence
  Arid1a.3_Kdm6a.2
  crRNA array
  misc_feature (148)..(157): n is a, c, g, or t
cttggctttatatatcttgtggaaaggacgaaacaccgtaatttctactaagtgtagatagtgagctggcagcactgcttaatttctactaagtgtagatgctgcaggtaaggcacgttttaatttctactaagtgtagatttttttnnnnnnnnnnaagcttggcgtggatccgatatcaactagatcttgagacaaatggcagtattcatccacaattttaaaagaaaaggggggattggggggtacagtgcaggggaaagaatagtagacataatagcaacagacatacaaactaaag

SEQ ID NO: 12940 - DNA, 301 bp, Artificial Sequence
  Arid1a.3_Kdm6a.3
  crRNA array
  misc_feature (148)..(157): n is a, c, g, or t
cttggctttatatatcttgtggaaaggacgaaacaccgtaatttctactaagtgtagatagtgagctggcagcactgcttaatttctactaagtgtagattgctggtgccggggaagttttaatttctactaagtgtagatttttttnnnnnnnnnnaagcttggcgtggatccgatatcaactagatcttgagacaaatggcagtattcatccacaattttaaaagaaaaggggggattggggggtacagtgcaggggaaagaatagtagacataatagcaacagacatacaaactaaag

SEQ ID NO: 12941 - DNA, 301 bp, Artificial Sequence
  Arid1a.3_Kdm6a.4
  crRNA array
  misc_feature (148)..(157): n is a, c, g, or t
cttggctttatatatcttgtggaaaggacgaaacaccgtaatttctactaagtgtagatagtgagctggcagcactgcttaatttctactaagtgtagattgtctcctacgaatcccccctaatttctactaagtgtagatttttttnnnnnnnnnnaagcttggcgtggatccgatatcaactagatcttgagacaaatggcagtattcatccacaattttaaaagaaaaggggggattggggggtacagtgcaggggaaagaatagtagacataatagcaacagacatacaaactaaag

SEQ ID NO: 12942 - DNA, 301 bp, Artificial Sequence
  Arid1a.4_Kdm6a.1
  crRNA array
  misc_feature (148)..(157): n is a, c, g, or t
cttggctttatatatcttgtggaaaggacgaaacaccgtaatttctactaagtgtagatgccgagaccgagtctctgcataatttctactaagtgtagatgctgccgcctctcgcggcagtaatttctactaagtgtagatttttttnnnnnnnnnnaagcttggcgtggatccgatatcaactagatcttgagacaaatggcagtattcatccacaattttaaaagaaaaggggggattggggggtacagtgcaggggaaagaatagtagacataatagcaacagacatacaaactaaag

SEQ ID NO: 12943 - DNA, 301 bp, Artificial Sequence
  Arid1a.4_Kdm6a.2
  crRNA array
  misc_feature (148)..(157): n is a, c, g, or t
cttggctttatatatcttgtggaaaggacgaaacaccgtaatttctactaagtgtagatgccgagaccgagtctctgcataatttctactaagtgtagatgctgcaggtaaggcacgttttaatttctactaagtgtagatttttttnnnnnnnnnnaagcttggcgtggatccgatatcaactagatcttgagacaaatggcagtattcatccacaattttaaaagaaaaggggggattggggggtacagtgcaggggaaagaatagtagacataatagcaacagacatacaaactaaag

SEQ ID NO: 12944 - DNA, 301 bp, Artificial Sequence
  Arid1a.4_Kdm6a.3
  crRNA array
  misc_feature (148)..(157): n is a, c, g, or t
cttggctttatatatcttgtggaaaggacgaaacaccgtaatttctactaagtgtagatgccgagaccgagtctctgcataatttctactaagtgtagattgctggtgccggggaagttttaatttctactaagtgtagatttttttnnnnnnnnnnaagcttggcgtggatccgatatcaactagatcttgagacaaatggcagtattcatccacaattttaaaagaaaaggggggattggggggtacagtgcaggggaaagaatagtagacataatagcaacagacatacaaactaaag

SEQ ID NO: 12945 - DNA, 301 bp, Artificial Sequence
  Arid1a.4_Kdm6a.4
  crRNA array
  misc_feature (148)..(157): n is a, c, g, or t
cttggctttatatatcttgtggaaaggacgaaacaccgtaatttctactaagtgtagatgccgagaccgagtctctgcataatttctactaagtgtagattgtctcctacgaatcccccctaatttctactaagtgtagatttttttnnnnnnnnnnaagcttggcgtggatccgatatcaactagatcttgagacaaatggcagtattcatccacaattttaaaagaaaaggggggattggggggtacagtgcaggggaaagaatagtagacataatagcaacagacatacaaactaaag

SEQ ID NO: 12946 - DNA, 301 bp, Artificial Sequence
  Arid1a.1_Ercc5.1
  crRNA array
  misc_feature (148)..(157): n is a, c, g, or t
cttggctttatatatcttgtggaaaggacgaaacaccgtaatttctactaagtgtagatcccgcgctcggccgctgccgtaatttctactaagtgtagatacggcacgagcaagagacactaatttctactaagtgtagatttttttnnnnnnnnnnaagcttggcgtggatccgatatcaactagatcttgagacaaatggcagtattcatccacaattttaaaagaaaaggggggattggggggtacagtgcaggggaaagaatagtagacataatagcaacagacatacaaactaaag

SEQ ID NO: 12947 - DNA, 301 bp, Artificial Sequence
  Arid1a.1_Ercc5.2
  crRNA array
  misc_feature (148)..(157): n is a, c, g, or t
cttggctttatatatcttgtggaaaggacgaaacaccgtaatttctactaagtgtagatcccgcgctcggccgctgccgtaatttctactaagtgtagatgagtatcacatcggtgactctaatttctactaagtgtagatttttttnnnnnnnnnnaagcttggcgtggatccgatatcaactagatcttgagacaaatggcagtattcatccacaattttaaaagaaaaggggggattggggggtacagtgcaggggaaagaatagtagacataatagcaacagacatacaaactaaag

SEQ ID NO: 12948 - DNA, 301 bp, Artificial Sequence
  Arid1a.1_Ercc5.3
  crRNA array
  misc_feature (148)..(157): n is a, c, g, or t
cttggctttatatatcttgtggaaaggacgaaacaccgtaatttctactaagtgtagatcccgcgctcggccgctgccgtaatttctactaagtgtagatggagtgggtccaggcctcgttaatttctactaagtgtagatttttttnnnnnnnnnnaagcttggcgtggatccgatatcaactagatcttgagacaaatggcagtattcatccacaattttaaaagaaaaggggggattggggggtacagtgcaggggaaagaatagtagacataatagcaacagacatacaaactaaag

SEQ ID NO: 12949 - DNA, 301 bp, Artificial Sequence
  Arid1a.1_Ercc5.4
  crRNA array
  misc_feature (148)..(157): n is a, c, g, or t
cttggctttatatatcttgtggaaaggacgaaacaccgtaatttctactaagtgtagatcccgcgctcggccgctgccgtaatttctactaagtgtagatcagagccggtggaataatgttaatttctactaagtgtagatttttttnnnnnnnnnnaagcttggcgtggatccgatatcaactagatcttgagacaaatggcagtattcatccacaattttaaaagaaaaggggggattggggggtacagtgcaggggaaagaatagtagacataatagcaacagacatacaaactaaag

SEQ ID NO: 12950 - DNA, 301 bp, Artificial Sequence
  Arid1a.2_Ercc5.1
  crRNA array
  misc_feature (148)..(157): n is a, c, g, or t
cttggctttatatatcttgtggaaaggacgaaacaccgtaatttctactaagtgtagatagtgcaagatcgagcgtggataatttctactaagtgtagatacggcacgagcaagagacactaatttctactaagtgtagatttttttnnnnnnnnnnaagcttggcgtggatccgatatcaactagatcttgagacaaatggcagtattcatccacaattttaaaagaaaaggggggattggggggtacagtgcaggggaaagaatagtagacataatagcaacagacatacaaactaaag

SEQ ID NO: 12951 - DNA, 301 bp, Artificial Sequence
  Arid1a.2_Ercc5.2
  crRNA array
  misc_feature (148)..(157): n is a, c, g, or t
cttggctttatatatcttgtggaaaggacgaaacaccgtaatttctactaagtgtagatagtgcaagatcgagcgtggataatttctactaagtgtagatgagtatcacatcggtgactctaatttctactaagtgtagatttttttnnnnnnnnnnaagcttggcgtggatccgatatcaactagatcttgagacaaatggcagtattcatccacaattttaaaagaaaaggggggattggggggtacagtgcaggggaaagaatagtagacataatagcaacagacatacaaactaaag

SEQ ID NO: 12952 - DNA, 301 bp, Artificial Sequence
  Arid1a.2_Ercc5.3
  crRNA array
  misc_feature (148)..(157): n is a, c, g, or t
cttggctttatatatcttgtggaaaggacgaaacaccgtaatttctactaagtgtagatagtgcaagatcgagcgtggataatttctactaagtgtagatggagtgggtccaggcctcgttaatttctactaagtgtagatttttttnnnnnnnnnnaagcttggcgtggatccgatatcaactagatcttgagacaaatggcagtattcatccacaattttaaaagaaaaggggggattggggggtacagtgcaggggaaagaatagtagacataatagcaacagacatacaaactaaag

SEQ ID NO: 12953 - DNA, 301 bp, Artificial Sequence
  Arid1a.2_Ercc5.4
  crRNA array
  misc_feature (148)..(157): n is a, c, g, or t
cttggctttatatatcttgtggaaaggacgaaacaccgtaatttctactaagtgtagatagtgcaagatcgagcgtggataatttctactaagtgtagatcagagccggtggaataatgttaatttctactaagtgtagatttttttnnnnnnnnnnaagcttggcgtggatccgatatcaactagatcttgagacaaatggcagtattcatccacaattttaaaagaaaaggggggattggggggtacagtgcaggggaaagaatagtagacataatagcaacagacatacaaactaaag

SEQ ID NO: 12954 - DNA, 301 bp, Artificial Sequence
  Arid1a.3_Ercc5.1
  crRNA array
  misc_feature (148)..(157): n is a, c, g, or t
cttggctttatatatcttgtggaaaggacgaaacaccgtaatttctactaagtgtagatagtgagctggcagcactgcttaatttctactaagtgtagatacggcacgagcaagagacactaatttctactaagtgtagatttttttnnnnnnnnnnaagcttggcgtggatccgatatcaactagatcttgagacaaatggcagtattcatccacaattttaaaagaaaaggggggattggggggtacagtgcaggggaaagaatagtagacataatagcaacagacatacaaactaaag

SEQ ID NO: 12955 - DNA, 301 bp, Artificial Sequence
  Arid1a.3_Ercc5.2
  crRNA array
  misc_feature (148)..(157): n is a, c, g, or t
cttggctttatatatcttgtggaaaggacgaaacaccgtaatttctactaagtgtagatagtgagctggcagcactgcttaatttctactaagtgtagatgagtatcacatcggtgactctaatttctactaagtgtagatttttttnnnnnnnnnnaagcttggcgtggatccgatatcaactagatcttgagacaaatggcagtattcatccacaattttaaaagaaaaggggggattggggggtacagtgcaggggaaagaatagtagacataatagcaacagacatacaaactaaag

SEQ ID NO: 12956 - DNA, 301 bp, Artificial Sequence
  Arid1a.3_Ercc5.3
  crRNA array
  misc_feature (148)..(157): n is a, c, g, or t
cttggctttatatatcttgtggaaaggacgaaacaccgtaatttctactaagtgtagatagtgagctggcagcactgcttaatttctactaagtgtagatggagtgggtccaggcctcgttaatttctactaagtgtagatttttttnnnnnnnnnnaagcttggcgtggatccgatatcaactagatcttgagacaaatggcagtattcatccacaattttaaaagaaaaggggggattggggggtacagtgcaggggaaagaatagtagacataatagcaacagacatacaaactaaag

SEQ ID NO: 12957 - DNA, 301 bp, Artificial Sequence
  Arid1a.3_Ercc5.4
  crRNA array
  misc_feature (148)..(157): n is a, c, g, or t
cttggctttatatatcttgtggaaaggacgaaacaccgtaatttctactaagtgtagatagtgagctggcagcactgcttaatttctactaagtgtagatcagagccggtggaataatgttaatttctactaagtgtagatttttttnnnnnnnnnnaagcttggcgtggatccgatatcaactagatcttgagacaaatggcagtattcatccacaattttaaaagaaaaggggggattggggggtacagtgcaggggaaagaatagtagacataatagcaacagacatacaaactaaag

SEQ ID NO: 12958 - DNA, 301 bp, Artificial Sequence
  Arid1a.4_Ercc5.1
  crRNA array
  misc_feature (148)..(157): n is a, c, g, or t
cttggctttatatatcttgtggaaaggacgaaacaccgtaatttctactaagtgtagatgccgagaccgagtctctgcataatttctactaagtgtagatacggcacgagcaagagacactaatttctactaagtgtagatttttttnnnnnnnnnnaagcttggcgtggatccgatatcaactagatcttgagacaaatggcagtattcatccacaattttaaaagaaaaggggggattggggggtacagtgcaggggaaagaatagtagacataatagcaacagacatacaaactaaag

SEQ ID NO: 12959 - DNA, 301 bp, Artificial Sequence
  Arid1a.4_Ercc5.2
  crRNA array
  misc_feature (148)..(157): n is a, c, g, or t
cttggctttatatatcttgtggaaaggacgaaacaccgtaatttctactaagtgtagatgccgagaccgagtctctgcataatttctactaagtgtagatgagtatcacatcggtgactctaatttctactaagtgtagatttttttnnnnnnnnnnaagcttggcgtggatccgatatcaactagatcttgagacaaatggcagtattcatccacaattttaaaagaaaaggggggattggggggtacagtgcaggggaaagaatagtagacataatagcaacagacatacaaactaaag

SEQ ID NO: 12960 - DNA, 301 bp, Artificial Sequence
  Arid1a.4_Ercc5.3
  crRNA array
  misc_feature (148)..(157): n is a, c, g, or t
cttggctttatatatcttgtggaaaggacgaaacaccgtaatttctactaagtgtagatgccgagaccgagtctctgcataatttctactaagtgtagatggagtgggtccaggcctcgttaatttctactaagtgtagatttttttnnnnnnnnnnaagcttggcgtggatccgatatcaactagatcttgagacaaatggcagtattcatccacaattttaaaagaaaaggggggattggggggtacagtgcaggggaaagaatagtagacataatagcaacagacatacaaactaaag

SEQ ID NO: 12961 - DNA, 301 bp, Artificial Sequence
  Arid1a.4_Ercc5.4
  crRNA array
  misc_feature (148)..(157): n is a, c, g, or t
cttggctttatatatcttgtggaaaggacgaaacaccgtaatttctactaagtgtagatgccgagaccgagtctctgcataatttctactaagtgtagatcagagccggtggaataatgttaatttctactaagtgtagatttttttnnnnnnnnnnaagcttggcgtggatccgatatcaactagatcttgagacaaatggcagtattcatccacaattttaaaagaaaaggggggattggggggtacagtgcaggggaaagaatagtagacataatagcaacagacatacaaactaaag

SEQ ID NO: 12962 - DNA, 301 bp, Artificial Sequence
  Arid1a.1_Arid1b.1
  crRNA array
  misc_feature (148)..(157): n is a, c, g, or t
cttggctttatatatcttgtggaaaggacgaaacaccgtaatttctactaagtgtagatcccgcgctcggccgctgccgtaatttctactaagtgtagatgctgctgctgtagtgcgtggtaatttctactaagtgtagatttttttnnnnnnnnnnaagcttggcgtggatccgatatcaactagatcttgagacaaatggcagtattcatccacaattttaaaagaaaaggggggattggggggtacagtgcaggggaaagaatagtagacataatagcaacagacatacaaactaaag

SEQ ID NO: 12963 - DNA, 301 bp, Artificial Sequence
  Arid1a.1_Arid1b.2
  crRNA array
  misc_feature (148)..(157): n is a, c, g, or t
cttggctttatatatcttgtggaaaggacgaaacaccgtaatttctactaagtgtagatcccgcgctcggccgctgccgtaatttctactaagtgtagatagtgcaaaactgagcgcgggtaatttctactaagtgtagatttttttnnnnnnnnnnaagcttggcgtggatccgatatcaactagatcttgagacaaatggcagtattcatccacaattttaaaagaaaaggggggattggggggtacagtgcaggggaaagaatagtagacataatagcaacagacatacaaactaaag

SEQ ID NO: 12964 - DNA, 301 bp, Artificial Sequence
  Arid1a.1_Arid1b.3
  crRNA array
  misc_feature (148)..(157): n is a, c, g, or t
cttggctttatatatcttgtggaaaggacgaaacaccgtaatttctactaagtgtagatcccgcgctcggccgctgccgtaatttctactaagtgtagatcactcaaaggcgaacaggtataatttctactaagtgtagatttttttnnnnnnnnnnaagcttggcgtggatccgatatcaactagatcttgagacaaatggcagtattcatccacaattttaaaagaaaaggggggattggggggtacagtgcaggggaaagaatagtagacataatagcaacagacatacaaactaaag

SEQ ID NO: 12965 - DNA, 301 bp, Artificial Sequence
  Arid1a.1_Arid1b.4
  crRNA array
  misc_feature (148)..(157): n is a, c, g, or t
cttggctttatatatcttgtggaaaggacgaaacaccgtaatttctactaagtgtagatcccgcgctcggccgctgccgtaatttctactaagtgtagatctcctggctccgtagaagcataatttctactaagtgtagatttttttnnnnnnnnnnaagcttggcgtggatccgatatcaactagatcttgagacaaatggcagtattcatccacaattttaaaagaaaaggggggattggggggtacagtgcaggggaaagaatagtagacataatagcaacagacatacaaactaaag

SEQ ID NO: 12966 - DNA, 301 bp, Artificial Sequence
  Arid1a.2_Arid1b.1
  crRNA array
  misc_feature (148)..(157): n is a, c, g, or t
cttggctttatatatcttgtggaaaggacgaaacaccgtaatttctactaagtgtagatagtgcaagatcgagcgtggataatttctactaagtgtagatgctgctgctgtagtgcgtggtaatttctactaagtgtagatttttttnnnnnnnnnnaagcttggcgtggatccgatatcaactagatcttgagacaaatggcagtattcatccacaattttaaaagaaaaggggggattggggggtacagtgcaggggaaagaatagtagacataatagcaacagacatacaaactaaag

SEQ ID NO: 12967 - DNA, 301 bp, Artificial Sequence
  Arid1a.2_Arid1b.2
  crRNA array
  misc_feature (148)..(157): n is a, c, g, or t
cttggctttatatatcttgtggaaaggacgaaacaccgtaatttctactaagtgtagatagtgcaagatcgagcgtggataatttctactaagtgtagatagtgcaaaactgagcgcgggtaatttctactaagtgtagatttttttnnnnnnnnnnaagcttggcgtggatccgatatcaactagatcttgagacaaatggcagtattcatccacaattttaaaagaaaaggggggattggggggtacagtgcaggggaaagaatagtagacataatagcaacagacatacaaactaaag

SEQ ID NO: 12968 - DNA, 301 bp, Artificial Sequence
  Arid1a.2_Arid1b.3
  crRNA array
  misc_feature (148)..(157): n is a, c, g, or t
cttggctttatatatcttgtggaaaggacgaaacaccgtaatttctactaagtgtagatagtgcaagatcgagcgtggataatttctactaagtgtagatcactcaaaggcgaacaggtataatttctactaagtgtagatttttttnnnnnnnnnnaagcttggcgtggatccgatatcaactagatcttgagacaaatggcagtattcatccacaattttaaaagaaaaggggggattggggggtacagtgcaggggaaagaatagtagacataatagcaacagacatacaaactaaag

SEQ ID NO: 12969 - DNA, 301 bp, Artificial Sequence
  Arid1a.2_Arid1b.4
  crRNA array
  misc_feature (148)..(157): n is a, c, g, or t
cttggctttatatatcttgtggaaaggacgaaacaccgtaatttctactaagtgtagatagtgcaagatcgagcgtggataatttctactaagtgtagatctcctggctccgtagaagcataatttctactaagtgtagatttttttnnnnnnnnnnaagcttggcgtggatccgatatcaactagatcttgagacaaatggcagtattcatccacaattttaaaagaaaaggggggattggggggtacagtgcaggggaaagaatagtagacataatagcaacagacatacaaactaaag

SEQ ID NO: 12970 - DNA, 301 bp, Artificial Sequence
  Arid1a.3_Arid1b.1
  crRNA array
  misc_feature (148)..(157): n is a, c, g, or t
cttggctttatatatcttgtggaaaggacgaaacaccgtaatttctactaagtgtagatagtgagctggcagcactgcttaatttctactaagtgtagatgctgctgctgtagtgcgtggtaatttctactaagtgtagatttttttnnnnnnnnnnaagcttggcgtggatccgatatcaactagatcttgagacaaatggcagtattcatccacaattttaaaagaaaaggggggattggggggtacagtgcaggggaaagaatagtagacataatagcaacagacatacaaactaaag

SEQ ID NO: 12971 - DNA, 301 bp, Artificial Sequence
  Arid1a.3_Arid1b.2
  crRNA array
  misc_feature (148)..(157): n is a, c, g, or t
cttggctttatatatcttgtggaaaggacgaaacaccgtaatttctactaagtgtagatagtgagctggcagcactgcttaatttctactaagtgtagatagtgcaaaactgagcgcgggtaatttctactaagtgtagatttttttnnnnnnnnnnaagcttggcgtggatccgatatcaactagatcttgagacaaatggcagtattcatccacaattttaaaagaaaaggggggattggggggtacagtgcaggggaaagaatagtagacataatagcaacagacatacaaactaaag

SEQ ID NO: 12972 - DNA, 301 bp, Artificial Sequence
  Arid1a.3_Arid1b.3
  crRNA array
  misc_feature (148)..(157): n is a, c, g, or t
cttggctttatatatcttgtggaaaggacgaaacaccgtaatttctactaagtgtagatagtgagctggcagcactgcttaatttctactaagtgtagatcactcaaaggcgaacaggtataatttctactaagtgtagatttttttnnnnnnnnnnaagcttggcgtggatccgatatcaactagatcttgagacaaatggcagtattcatccacaattttaaaagaaaaggggggattggggggtacagtgcaggggaaagaatagtagacataatagcaacagacatacaaactaaag

SEQ ID NO: 12973 - DNA, 301 bp, Artificial Sequence
  Arid1a.3_Arid1b.4
  crRNA array
  misc_feature (148)..(157): n is a, c, g, or t
cttggctttatatatcttgtggaaaggacgaaacaccgtaatttctactaagtgtagatagtgagctggcagcactgcttaatttctactaagtgtagatctcctggctccgtagaagcataatttctactaagtgtagatttttttnnnnnnnnnnaagcttggcgtggatccgatatcaactagatcttgagacaaatggcagtattcatccacaattttaaaagaaaaggggggattggggggtacagtgcaggggaaagaatagtagacataatagcaacagacatacaaactaaag

SEQ ID NO: 12974 - DNA, 301 bp, Artificial Sequence
  Arid1a.4_Arid1b.1
  crRNA array
  misc_feature (148)..(157): n is a, c, g, or t
cttggctttatatatcttgtggaaaggacgaaacaccgtaatttctactaagtgtagatgccgagaccgagtctctgcataatttctactaagtgtagatgctgctgctgtagtgcgtggtaatttctactaagtgtagatttttttnnnnnnnnnnaagcttggcgtggatccgatatcaactagatcttgagacaaatggcagtattcatccacaattttaaaagaaaaggggggattggggggtacagtgcaggggaaagaatagtagacataatagcaacagacatacaaactaaag

SEQ ID NO: 12975 - DNA, 301 bp, Artificial Sequence
  Arid1a.4_Arid1b.2
  crRNA array
  misc_feature (148)..(157): n is a, c, g, or t
cttggctttatatatcttgtggaaaggacgaaacaccgtaatttctactaagtgtagatgccgagaccgagtctctgcataatttctactaagtgtagatagtgcaaaactgagcgcgggtaatttctactaagtgtagatttttttnnnnnnnnnnaagcttggcgtggatccgatatcaactagatcttgagacaaatggcagtattcatccacaattttaaaagaaaaggggggattggggggtacagtgcaggggaaagaatagtagacataatagcaacagacatacaaactaaag

SEQ ID NO: 12976 - DNA, 301 bp, Artificial Sequence
  Arid1a.4_Arid1b.3
  crRNA array
  misc_feature (148)..(157): n is a, c, g, or t
cttggctttatatatcttgtggaaaggacgaaacaccgtaatttctactaagtgtagatgccgagaccgagtctctgcataatttctactaagtgtagatcactcaaaggcgaacaggtataatttctactaagtgtagatttttttnnnnnnnnnnaagcttggcgtggatccgatatcaactagatcttgagacaaatggcagtattcatccacaattttaaaagaaaaggggggattggggggtacagtgcaggggaaagaatagtagacataatagcaacagacatacaaactaaag

SEQ ID NO: 12977 - DNA, 301 bp, Artificial Sequence
  Arid1a.4_Arid1b.4
  crRNA array
  misc_feature (148)..(157): n is a, c, g, or t
cttggctttatatatcttgtggaaaggacgaaacaccgtaatttctactaagtgtagatgccgagaccgagtctctgcataatttctactaagtgtagatctcctggctccgtagaagcataatttctactaagtgtagatttttttnnnnnnnnnnaagcttggcgtggatccgatatcaactagatcttgagacaaatggcagtattcatccacaattttaaaagaaaaggggggattggggggtacagtgcaggggaaagaatagtagacataatagcaacagacatacaaactaaag

SEQ ID NO: 12978 - DNA, 301 bp, Artificial Sequence
  Arid1a.1_Rb1.1
  crRNA array
  misc_feature (148)..(157): n is a, c, g, or t
cttggctttatatatcttgtggaaaggacgaaacaccgtaatttctactaagtgtagatcccgcgctcggccgctgccgtaatttctactaagtgtagattctgacatgatcgggtaccttaatttctactaagtgtagatttttttnnnnnnnnnnaagcttggcgtggatccgatatcaactagatcttgagacaaatggcagtattcatccacaattttaaaagaaaaggggggattggggggtacagtgcaggggaaagaatagtagacataatagcaacagacatacaaactaaag

SEQ ID NO: 12979 - DNA, 301 bp, Artificial Sequence
  Arid1a.1_Rb1.2
  crRNA array
  misc_feature (148)..(157): n is a, c, g, or t
cttggctttatatatcttgtggaaaggacgaaacaccgtaatttctactaagtgtagatcccgcgctcggccgctgccgtaatttctactaagtgtagatgtctctgcatgaaaacggagtaatttctactaagtgtagatttttttnnnnnnnnnnaagcttggcgtggatccgatatcaactagatcttgagacaaatggcagtattcatccacaattttaaaagaaaaggggggattggggggtacagtgcaggggaaagaatagtagacataatagcaacagacatacaaactaaag

SEQ ID NO: 12980 - DNA, 301 bp, Artificial Sequence
  Arid1a.1_Rb1.3
  crRNA array
  misc_feature (148)..(157): n is a, c, g, or t
cttggctttatatatcttgtggaaaggacgaaacaccgtaatttctactaagtgtagatcccgcgctcggccgctgccgtaatttctactaagtgtagatagccaatctggtctaataactaatttctactaagtgtagatttttttnnnnnnnnnnaagcttggcgtggatccgatatcaactagatcttgagacaaatggcagtattcatccacaattttaaaagaaaaggggggattggggggtacagtgcaggggaaagaatagtagacataatagcaacagacatacaaactaaag

SEQ ID NO: 12981 - DNA, 301 bp, Artificial Sequence
  Arid1a.1_Rb1.4
  crRNA array
  misc_feature (148)..(157): n is a, c, g, or t
cttggctttatatatcttgtggaaaggacgaaacaccgtaatttctactaagtgtagatcccgcgctcggccgctgccgtaatttctactaagtgtagattgtagctcagtaaaagtgaataatttctactaagtgtagatttttttnnnnnnnnnnaagcttggcgtggatccgatatcaactagatcttgagacaaatggcagtattcatccacaattttaaaagaaaaggggggattggggggtacagtgcaggggaaagaatagtagacataatagcaacagacatacaaactaaag

SEQ ID NO: 12982 - DNA, 301 bp, Artificial Sequence
  Arid1a.2_Rb1.1
  crRNA array
  misc_feature (148)..(157): n is a, c, g, or t
cttggctttatatatcttgtggaaaggacgaaacaccgtaatttctactaagtgtagatagtgcaagatcgagcgtggataatttctactaagtgtagattctgacatgatcgggtaccttaatttctactaagtgtagatttttttnnnnnnnnnnaagcttggcgtggatccgatatcaactagatcttgagacaaatggcagtattcatccacaattttaaaagaaaaggggggattggggggtacagtgcaggggaaagaatagtagacataatagcaacagacatacaaactaaag

SEQ ID NO: 12983 - DNA, 301 bp, Artificial Sequence
  Arid1a.2_Rb1.2
  crRNA array
  misc_feature (148)..(157): n is a, c, g, or t
cttggctttatatatcttgtggaaaggacgaaacaccgtaatttctactaagtgtagatagtgcaagatcgagcgtggataatttctactaagtgtagatgtctctgcatgaaaacggagtaatttctactaagtgtagatttttttnnnnnnnnnnaagcttggcgtggatccgatatcaactagatcttgagacaaatggcagtattcatccacaattttaaaagaaaaggggggattggggggtacagtgcaggggaaagaatagtagacataatagcaacagacatacaaactaaag

SEQ ID NO: 12984 - DNA, 301 bp, Artificial Sequence
  Arid1a.2_Rb1.3
  crRNA array
  misc_feature (148)..(157): n is a, c, g, or t
cttggctttatatatcttgtggaaaggacgaaacaccgtaatttctactaagtgtagatagtgcaagatcgagcgtggataatttctactaagtgtagatagccaatctggtctaataactaatttctactaagtgtagatttttttnnnnnnnnnnaagcttggcgtggatccgatatcaactagatcttgagacaaatggcagtattcatccacaattttaaaagaaaaggggggattggggggtacagtgcaggggaaagaatagtagacataatagcaacagacatacaaactaaag

SEQ ID NO: 12985 - DNA, 301 bp, Artificial Sequence
  Arid1a.2_Rb1.4
  crRNA array
  misc_feature (148)..(157): n is a, c, g, or t
cttggctttatatatcttgtggaaaggacgaaacaccgtaatttctactaagtgtagatagtgcaagatcgagcgtggataatttctactaagtgtagattgtagctcagtaaaagtgaataatttctactaagtgtagatttttttnnnnnnnnnnaagcttggcgtggatccgatatcaactagatcttgagacaaatggcagtattcatccacaattttaaaagaaaaggggggattggggggtacagtgcaggggaaagaatagtagacataatagcaacagacatacaaactaaag

SEQ ID NO: 12986 - DNA, 301 bp, Artificial Sequence
  Arid1a.3_Rb1.1
  crRNA array
  misc_feature (148)..(157): n is a, c, g, or t
cttggctttatatatcttgtggaaaggacgaaacaccgtaatttctactaagtgtagatagtgagctggcagcactgcttaatttctactaagtgtagattctgacatgatcgggtaccttaatttctactaagtgtagatttttttnnnnnnnnnnaagcttggcgtggatccgatatcaactagatcttgagacaaatggcagtattcatccacaattttaaaagaaaaggggggattggggggtacagtgcaggggaaagaatagtagacataatagcaacagacatacaaactaaag

SEQ ID NO: 12987 - DNA, 301 bp, Artificial Sequence
  Arid1a.3_Rb1.2
  crRNA array
  misc_feature (148)..(157): n is a, c, g, or t
cttggctttatatatcttgtggaaaggacgaaacaccgtaatttctactaagtgtagatagtgagctggcagcactgcttaatttctactaagtgtagatgtctctgcatgaaaacggagtaatttctactaagtgtagatttttttnnnnnnnnnnaagcttggcgtggatccgatatcaactagatcttgagacaaatggcagtattcatccacaattttaaaagaaaaggggggattggggggtacagtgcaggggaaagaatagtagacataatagcaacagacatacaaactaaag

SEQ ID NO: 12988 - DNA, 301 bp, Artificial Sequence
  Arid1a.3_Rb1.3
  crRNA array
  misc_feature (148)..(157): n is a, c, g, or t
cttggctttatatatcttgtggaaaggacgaaacaccgtaatttctactaagtgtagatagtgagctggcagcactgcttaatttctactaagtgtagatagccaatctggtctaataactaatttctactaagtgtagatttttttnnnnnnnnnnaagcttggcgtggatccgatatcaactagatcttgagacaaatggcagtattcatccacaattttaaaagaaaaggggggattggggggtacagtgcaggggaaagaatagtagacataatagcaacagacatacaaactaaag

SEQ ID NO: 12989 - DNA, 301 bp, Artificial Sequence
  Arid1a.3_Rb1.4
  crRNA array
  misc_feature (148)..(157): n is a, c, g, or t
cttggctttatatatcttgtggaaaggacgaaacaccgtaatttctactaagtgtagatagtgagctggcagcactgcttaatttctactaagtgtagattgtagctcagtaaaagtgaataatttctactaagtgtagatttttttnnnnnnnnnnaagcttggcgtggatccgatatcaactagatcttgagacaaatggcagtattcatccacaattttaaaagaaaaggggggattggggggtacagtgcaggggaaagaatagtagacataatagcaacagacatacaaactaaag

SEQ ID NO: 12990 - DNA, 301 bp, Artificial Sequence
  Arid1a.4_Rb1.1
  crRNA array
  misc_feature (148)..(157): n is a, c, g, or t
cttggctttatatatcttgtggaaaggacgaaacaccgtaatttctactaagtgtagatgccgagaccgagtctctgcataatttctactaagtgtagattctgacatgatcgggtaccttaatttctactaagtgtagatttttttnnnnnnnnnnaagcttggcgtggatccgatatcaactagatcttgagacaaatggcagtattcatccacaattttaaaagaaaaggggggattggggggtacagtgcaggggaaagaatagtagacataatagcaacagacatacaaactaaag

SEQ ID NO: 12991 - DNA, 301 bp, Artificial Sequence
  Arid1a.4_Rb1.2
  crRNA array
  misc_feature (148)..(157): n is a, c, g, or t
cttggctttatatatcttgtggaaaggacgaaacaccgtaatttctactaagtgtagatgccgagaccgagtctctgcataatttctactaagtgtagatgtctctgcatgaaaacggagtaatttctactaagtgtagatttttttnnnnnnnnnnaagcttggcgtggatccgatatcaactagatcttgagacaaatggcagtattcatccacaattttaaaagaaaaggggggattggggggtacagtgcaggggaaagaatagtagacataatagcaacagacatacaaactaaag

SEQ ID NO: 12992 - DNA, 301 bp, Artificial Sequence
  Arid1a.4_Rb1.3
  crRNA array
  misc_feature (148)..(157): n is a, c, g, or t
cttggctttatatatcttgtggaaaggacgaaacaccgtaatttctactaagtgtagatgccgagaccgagtctctgcataatttctactaagtgtagatagccaatctggtctaataactaatttctactaagtgtagatttttttnnnnnnnnnnaagcttggcgtggatccgatatcaactagatcttgagacaaatggcagtattcatccacaattttaaaagaaaaggggggattggggggtacagtgcaggggaaagaatagtagacataatagcaacagacatacaaactaaag

SEQ ID NO: 12993 - DNA, 301 bp, Artificial Sequence
  Arid1a.4_Rb1.4
  crRNA array
  misc_feature (148)..(157): n is a, c, g, or t
cttggctttatatatcttgtggaaaggacgaaacaccgtaatttctactaagtgtagatgccgagaccgagtctctgcataatttctactaagtgtagattgtagctcagtaaaagtgaataatttctactaagtgtagatttttttnnnnnnnnnnaagcttggcgtggatccgatatcaactagatcttgagacaaatggcagtattcatccacaattttaaaagaaaaggggggattggggggtacagtgcaggggaaagaatagtagacataatagcaacagacatacaaactaaag

SEQ ID NO: 12994 - DNA, 301 bp, Artificial Sequence
  Arid1a.1_Kmt2c.1
  crRNA array
  misc_feature (148)..(157): n is a, c, g, or t
cttggctttatatatcttgtggaaaggacgaaacaccgtaatttctactaagtgtagatcccgcgctcggccgctgccgtaatttctactaagtgtagatactcgacctccacctccctataatttctactaagtgtagatttttttnnnnnnnnnnaagcttggcgtggatccgatatcaactagatcttgagacaaatggcagtattcatccacaattttaaaagaaaaggggggattggggggtacagtgcaggggaaagaatagtagacataatagcaacagacatacaaactaaag

SEQ ID NO: 12995 - DNA, 301 bp, Artificial Sequence
  Arid1a.1_Kmt2c.2
  crRNA array
  misc_feature (148)..(157): n is a, c, g, or t
cttggctttatatatcttgtggaaaggacgaaacaccgtaatttctactaagtgtagatcccgcgctcggccgctgccgtaatttctactaagtgtagatcccaaagatcagcgtggacctaatttctactaagtgtagatttttttnnnnnnnnnnaagcttggcgtggatccgatatcaactagatcttgagacaaatggcagtattcatccacaattttaaaagaaaaggggggattggggggtacagtgcaggggaaagaatagtagacataatagcaacagacatacaaactaaag

SEQ ID NO: 12996 - DNA, 301 bp, Artificial Sequence
  Arid1a.1_Kmt2c.3
  crRNA array
  misc_feature (148)..(157): n is a, c, g, or t
cttggctttatatatcttgtggaaaggacgaaacaccgtaatttctactaagtgtagatcccgcgctcggccgctgccgtaatttctactaagtgtagataaaagatccgaatcgatgcgtaatttctactaagtgtagatttttttnnnnnnnnnnaagcttggcgtggatccgatatcaactagatcttgagacaaatggcagtattcatccacaattttaaaagaaaaggggggattggggggtacagtgcaggggaaagaatagtagacataatagcaacagacatacaaactaaag

SEQ ID NO: 12997 - DNA, 301 bp, Artificial Sequence
  Arid1a.1_Kmt2c.4
  crRNA array
  misc_feature (148)..(157): n is a, c, g, or t
cttggctttatatatcttgtggaaaggacgaaacaccgtaatttctactaagtgtagatcccgcgctcggccgctgccgtaatttctactaagtgtagatctgaggcacatggaagcgattaatttctactaagtgtagatttttttnnnnnnnnnnaagcttggcgtggatccgatatcaactagatcttgagacaaatggcagtattcatccacaattttaaaagaaaaggggggattggggggtacagtgcaggggaaagaatagtagacataatagcaacagacatacaaactaaag

SEQ ID NO: 12998 - DNA, 301 bp, Artificial Sequence
  Arid1a.2_Kmt2c.1
  crRNA array
  misc_feature (148)..(157): n is a, c, g, or t
cttggctttatatatcttgtggaaaggacgaaacaccgtaatttctactaagtgtagatagtgcaagatcgagcgtggataatttctactaagtgtagatactcgacctccacctccctataatttctactaagtgtagatttttttnnnnnnnnnnaagcttggcgtggatccgatatcaactagatcttgagacaaatggcagtattcatccacaattttaaaagaaaaggggggattggggggtacagtgcaggggaaagaatagtagacataatagcaacagacatacaaactaaag

SEQ ID NO: 12999 - DNA, 301 bp, Artificial Sequence
  Arid1a.2_Kmt2c.2
  crRNA array
  misc_feature (148)..(157): n is a, c, g, or t
cttggctttatatatcttgtggaaaggacgaaacaccgtaatttctactaagtgtagatagtgcaagatcgagcgtggataatttctactaagtgtagatcccaaagatcagcgtggacctaatttctactaagtgtagatttttttnnnnnnnnnnaagcttggcgtggatccgatatcaactagatcttgagacaaatggcagtattcatccacaattttaaaagaaaaggggggattggggggtacagtgcaggggaaagaatagtagacataatagcaacagacatacaaactaaag

SEQ ID NO: 13000 - DNA, 301 bp, Artificial Sequence
  Arid1a.2_Kmt2c.3
  crRNA array
  misc_feature (148)..(157): n is a, c, g, or t
cttggctttatatatcttgtggaaaggacgaaacaccgtaatttctactaagtgtagatagtgcaagatcgagcgtggataatttctactaagtgtagataaaagatccgaatcgatgcgtaatttctactaagtgtagatttttttnnnnnnnnnnaagcttggcgtggatccgatatcaactagatcttgagacaaatggcagtattcatccacaattttaaaagaaaaggggggattggggggtacagtgcaggggaaagaatagtagacataatagcaacagacatacaaactaaag

SEQ ID NO: 13001 - DNA, 301 bp, Artificial Sequence
  Arid1a.2_Kmt2c.4
  crRNA array
  misc_feature (148)..(157): n is a, c, g, or t
cttggctttatatatcttgtggaaaggacgaaacaccgtaatttctactaagtgtagatagtgcaagatcgagcgtggataatttctactaagtgtagatctgaggcacatggaagcgattaatttctactaagtgtagatttttttnnnnnnnnnnaagcttggcgtggatccgatatcaactagatcttgagacaaatggcagtattcatccacaattttaaaagaaaaggggggattggggggtacagtgcaggggaaagaatagtagacataatagcaacagacatacaaactaaag

SEQ ID NO: 13002 - DNA, 301 bp, Artificial Sequence
  Arid1a.3_Kmt2c.1
  crRNA array
  misc_feature (148)..(157): n is a, c, g, or t
cttggctttatatatcttgtggaaaggacgaaacaccgtaatttctactaagtgtagatagtgagctggcagcactgcttaatttctactaagtgtagatactcgacctccacctccctataatttctactaagtgtagatttttttnnnnnnnnnnaagcttggcgtggatccgatatcaactagatcttgagacaaatggcagtattcatccacaattttaaaagaaaaggggggattggggggtacagtgcaggggaaagaatagtagacataatagcaacagacatacaaactaaag

SEQ ID NO: 13003 - DNA, 301 bp, Artificial Sequence
  Arid1a.3_Kmt2c.2
  crRNA array
  misc_feature (148)..(157): n is a, c, g, or t
cttggctttatatatcttgtggaaaggacgaaacaccgtaatttctactaagtgtagatagtgagctggcagcactgcttaatttctactaagtgtagatcccaaagatcagcgtggacctaatttctactaagtgtagatttttttnnnnnnnnnnaagcttggcgtggatccgatatcaactagatcttgagacaaatggcagtattcatccacaattttaaaagaaaaggggggattggggggtacagtgcaggggaaagaatagtagacataatagcaacagacatacaaactaaag

SEQ ID NO: 13004 - DNA, 301 bp, Artificial Sequence
  Arid1a.3_Kmt2c.3
  crRNA array
  misc_feature (148)..(157): n is a, c, g, or t
cttggctttatatatcttgtggaaaggacgaaacaccgtaatttctactaagtgtagatagtgagctggcagcactgcttaatttctactaagtgtagataaaagatccgaatcgatgcgtaatttctactaagtgtagatttttttnnnnnnnnnnaagcttggcgtggatccgatatcaactagatcttgagacaaatggcagtattcatccacaattttaaaagaaaaggggggattggggggtacagtgcaggggaaagaatagtagacataatagcaacagacatacaaactaaag

SEQ ID NO: 13005 - DNA, 301 bp, Artificial Sequence
  Arid1a.3_Kmt2c.4
  crRNA array
  misc_feature (148)..(157): n is a, c, g, or t
cttggctttatatatcttgtggaaaggacgaaacaccgtaatttctactaagtgtagatagtgagctggcagcactgcttaatttctactaagtgtagatctgaggcacatggaagcgattaatttctactaagtgtagatttttttnnnnnnnnnnaagcttggcgtggatccgatatcaactagatcttgagacaaatggcagtattcatccacaattttaaaagaaaaggggggattggggggtacagtgcaggggaaagaatagtagacataatagcaacagacatacaaactaaag

SEQ ID NO: 13006 - DNA, 301 bp, Artificial Sequence
  Arid1a.4_Kmt2c.1
  crRNA array
  misc_feature (148)..(157): n is a, c, g, or t
cttggctttatatatcttgtggaaaggacgaaacaccgtaatttctactaagtgtagatgccgagaccgagtctctgcataatttctactaagtgtagatactcgacctccacctccctataatttctactaagtgtagatttttttnnnnnnnnnnaagcttggcgtggatccgatatcaactagatcttgagacaaatggcagtattcatccacaattttaaaagaaaaggggggattggggggtacagtgcaggggaaagaatagtagacataatagcaacagacatacaaactaaag

SEQ ID NO: 13007 - DNA, 301 bp, Artificial Sequence
  Arid1a.4_Kmt2c.2
  crRNA array
  misc_feature (148)..(157): n is a, c, g, or t
cttggctttatatatcttgtggaaaggacgaaacaccgtaatttctactaagtgtagatgccgagaccgagtctctgcataatttctactaagtgtagatcccaaagatcagcgtggacctaatttctactaagtgtagatttttttnnnnnnnnnnaagcttggcgtggatccgatatcaactagatcttgagacaaatggcagtattcatccacaattttaaaagaaaaggggggattggggggtacagtgcaggggaaagaatagtagacataatagcaacagacatacaaactaaag

SEQ ID NO: 13008 - DNA, 301 bp, Artificial Sequence
  Arid1a.4_Kmt2c.3
  crRNA array
  misc_feature (148)..(157): n is a, c, g, or t
cttggctttatatatcttgtggaaaggacgaaacaccgtaatttctactaagtgtagatgccgagaccgagtctctgcataatttctactaagtgtagataaaagatccgaatcgatgcgtaatttctactaagtgtagatttttttnnnnnnnnnnaagcttggcgtggatccgatatcaactagatcttgagacaaatggcagtattcatccacaattttaaaagaaaaggggggattggggggtacagtgcaggggaaagaatagtagacataatagcaacagacatacaaactaaag

SEQ ID NO: 13009 - DNA, 301 bp, Artificial Sequence
  Arid1a.4_Kmt2c.4
  crRNA array
  misc_feature (148)..(157): n is a, c, g, or t
cttggctttatatatcttgtggaaaggacgaaacaccgtaatttctactaagtgtagatgccgagaccgagtctctgcataatttctactaagtgtagatctgaggcacatggaagcgattaatttctactaagtgtagatttttttnnnnnnnnnnaagcttggcgtggatccgatatcaactagatcttgagacaaatggcagtattcatccacaattttaaaagaaaaggggggattggggggtacagtgcaggggaaagaatagtagacataatagcaacagacatacaaactaaag

SEQ ID NO: 13010 - DNA, 301 bp, Artificial Sequence
  Arid1a.1_Pten.1
  crRNA array
  misc_feature (148)..(157): n is a, c, g, or t
cttggctttatatatcttgtggaaaggacgaaacaccgtaatttctactaagtgtagatcccgcgctcggccgctgccgtaatttctactaagtgtagataagcgtggtgcgtgacgcactaatttctactaagtgtagatttttttnnnnnnnnnnaagcttggcgtggatccgatatcaactagatcttgagacaaatggcagtattcatccacaattttaaaagaaaaggggggattggggggtacagtgcaggggaaagaatagtagacataatagcaacagacatacaaactaaag

SEQ ID NO: 13011 - DNA, 301 bp, Artificial Sequence
  Arid1a.1_Pten.2
  crRNA array
  misc_feature (148)..(157): n is a, c, g, or t
cttggctttatatatcttgtggaaaggacgaaacaccgtaatttctactaagtgtagatcccgcgctcggccgctgccgtaatttctactaagtgtagattgtcaccagctgaagtggcttaatttctactaagtgtagatttttttnnnnnnnnnnaagcttggcgtggatccgatatcaactagatcttgagacaaatggcagtattcatccacaattttaaaagaaaaggggggattggggggtacagtgcaggggaaagaatagtagacataatagcaacagacatacaaactaaag

SEQ ID NO: 13012 - DNA, 301 bp, Artificial Sequence
  Arid1a.1_Pten.3
  crRNA array
  misc_feature (148)..(157): n is a, c, g, or t
cttggctttatatatcttgtggaaaggacgaaacaccgtaatttctactaagtgtagatcccgcgctcggccgctgccgtaatttctactaagtgtagatggagtcaagaggctgatttttaatttctactaagtgtagatttttttnnnnnnnnnnaagcttggcgtggatccgatatcaactagatcttgagacaaatggcagtattcatccacaattttaaaagaaaaggggggattggggggtacagtgcaggggaaagaatagtagacataatagcaacagacatacaaactaaag

SEQ ID NO: 13013 - DNA, 301 bp, Artificial Sequence
  Arid1a.1_Pten.4
  crRNA array
  misc_feature (148)..(157): n is a, c, g, or t
cttggctttatatatcttgtggaaaggacgaaacaccgtaatttctactaagtgtagatcccgcgctcggccgctgccgtaatttctactaagtgtagatctgtaagctaaaccactacataatttctactaagtgtagatttttttnnnnnnnnnnaagcttggcgtggatccgatatcaactagatcttgagacaaatggcagtattcatccacaattttaaaagaaaaggggggattggggggtacagtgcaggggaaagaatagtagacataatagcaacagacatacaaactaaag

SEQ ID NO: 13014 - DNA, 301 bp, Artificial Sequence
  Arid1a.2_Pten.1
  crRNA array
  misc_feature (148)..(157): n is a, c, g, or t
cttggctttatatatcttgtggaaaggacgaaacaccgtaatttctactaagtgtagatagtgcaagatcgagcgtggataatttctactaagtgtagataagcgtggtgcgtgacgcactaatttctactaagtgtagatttttttnnnnnnnnnnaagcttggcgtggatccgatatcaactagatcttgagacaaatggcagtattcatccacaattttaaaagaaaaggggggattggggggtacagtgcaggggaaagaatagtagacataatagcaacagacatacaaactaaag

SEQ ID NO: 13015 - DNA, 301 bp, Artificial Sequence
  Arid1a.2_Pten.2
  crRNA array
  misc_feature (148)..(157): n is a, c, g, or t
cttggctttatatatcttgtggaaaggacgaaacaccgtaatttctactaagtgtagatagtgcaagatcgagcgtggataatttctactaagtgtagattgtcaccagctgaagtggcttaatttctactaagtgtagatttttttnnnnnnnnnnaagcttggcgtggatccgatatcaactagatcttgagacaaatggcagtattcatccacaattttaaaagaaaaggggggattggggggtacagtgcaggggaaagaatagtagacataatagcaacagacatacaaactaaag

SEQ ID NO: 13016 - DNA, 301 bp, Artificial Sequence
  Arid1a.2_Pten.3
  crRNA array
  misc_feature (148)..(157): n is a, c, g, or t
cttggctttatatatcttgtggaaaggacgaaacaccgtaatttctactaagtgtagatagtgcaagatcgagcgtggataatttctactaagtgtagatggagtcaagaggctgatttttaatttctactaagtgtagatttttttnnnnnnnnnnaagcttggcgtggatccgatatcaactagatcttgagacaaatggcagtattcatccacaattttaaaagaaaaggggggattggggggtacagtgcaggggaaagaatagtagacataatagcaacagacatacaaactaaag

SEQ ID NO: 13017 - DNA, 301 bp, Artificial Sequence
  Arid1a.2_Pten.4
  crRNA array
  misc_feature (148)..(157): n is a, c, g, or t
cttggctttatatatcttgtggaaaggacgaaacaccgtaatttctactaagtgtagatagtgcaagatcgagcgtggataatttctactaagtgtagatctgtaagctaaaccactacataatttctactaagtgtagatttttttnnnnnnnnnnaagcttggcgtggatccgatatcaactagatcttgagacaaatggcagtattcatccacaattttaaaagaaaaggggggattggggggtacagtgcaggggaaagaatagtagacataatagcaacagacatacaaactaaag

SEQ ID NO: 13018 - DNA, 301 bp, Artificial Sequence
  Arid1a.3_Pten.1
  crRNA array
  misc_feature (148)..(157): n is a, c, g, or t
cttggctttatatatcttgtggaaaggacgaaacaccgtaatttctactaagtgtagatagtgagctggcagcactgcttaatttctactaagtgtagataagcgtggtgcgtgacgcactaatttctactaagtgtagatttttttnnnnnnnnnnaagcttggcgtggatccgatatcaactagatcttgagacaaatggcagtattcatccacaattttaaaagaaaaggggggattggggggtacagtgcaggggaaagaatagtagacataatagcaacagacatacaaactaaag

SEQ ID NO: 13019 - DNA, 301 bp, Artificial Sequence
  Arid1a.3_Pten.2
  crRNA array
  misc_feature (148)..(157): n is a, c, g, or t
cttggctttatatatcttgtggaaaggacgaaacaccgtaatttctactaagtgtagatagtgagctggcagcactgcttaatttctactaagtgtagattgtcaccagctgaagtggcttaatttctactaagtgtagatttttttnnnnnnnnnnaagcttggcgtggatccgatatcaactagatcttgagacaaatggcagtattcatccacaattttaaaagaaaaggggggattggggggtacagtgcaggggaaagaatagtagacataatagcaacagacatacaaactaaag

SEQ ID NO: 13020 - DNA, 301 bp, Artificial Sequence
  Arid1a.3_Pten.3
  crRNA array
  misc_feature (148)..(157): n is a, c, g, or t
cttggctttatatatcttgtggaaaggacgaaacaccgtaatttctactaagtgtagatagtgagctggcagcactgcttaatttctactaagtgtagatggagtcaagaggctgatttttaatttctactaagtgtagatttttttnnnnnnnnnnaagcttggcgtggatccgatatcaactagatcttgagacaaatggcagtattcatccacaattttaaaagaaaaggggggattggggggtacagtgcaggggaaagaatagtagacataatagcaacagacatacaaactaaag

SEQ ID NO: 13021 - DNA, 301 bp, Artificial Sequence
  Arid1a.3_Pten.4
  crRNA array
  misc_feature (148)..(157): n is a, c, g, or t
cttggctttatatatcttgtggaaaggacgaaacaccgtaatttctactaagtgtagatagtgagctggcagcactgcttaatttctactaagtgtagatctgtaagctaaaccactacataatttctactaagtgtagatttttttnnnnnnnnnnaagcttggcgtggatccgatatcaactagatcttgagacaaatggcagtattcatccacaattttaaaagaaaaggggggattggggggtacagtgcaggggaaagaatagtagacataatagcaacagacatacaaactaaag

SEQ ID NO: 13022 - DNA, 301 bp, Artificial Sequence
  Arid1a.4_Pten.1
  crRNA array
  misc_feature (148)..(157): n is a, c, g, or t
cttggctttatatatcttgtggaaaggacgaaacaccgtaatttctactaagtgtagatgccgagaccgagtctctgcataatttctactaagtgtagataagcgtggtgcgtgacgcactaatttctactaagtgtagatttttttnnnnnnnnnnaagcttggcgtggatccgatatcaactagatcttgagacaaatggcagtattcatccacaattttaaaagaaaaggggggattggggggtacagtgcaggggaaagaatagtagacataatagcaacagacatacaaactaaag

SEQ ID NO: 13023 - DNA, 301 bp, Artificial Sequence
  Arid1a.4_Pten.2
  crRNA array
  misc_feature (148)..(157): n is a, c, g, or t
cttggctttatatatcttgtggaaaggacgaaacaccgtaatttctactaagtgtagatgccgagaccgagtctctgcataatttctactaagtgtagattgtcaccagctgaagtggcttaatttctactaagtgtagatttttttnnnnnnnnnnaagcttggcgtggatccgatatcaactagatcttgagacaaatggcagtattcatccacaattttaaaagaaaaggggggattggggggtacagtgcaggggaaagaatagtagacataatagcaacagacatacaaactaaag

SEQ ID NO: 13024 - DNA, 301 bp, Artificial Sequence
  Arid1a.4_Pten.3
  crRNA array
  misc_feature (148)..(157): n is a, c, g, or t
cttggctttatatatcttgtggaaaggacgaaacaccgtaatttctactaagtgtagatgccgagaccgagtctctgcataatttctactaagtgtagatggagtcaagaggctgatttttaatttctactaagtgtagatttttttnnnnnnnnnnaagcttggcgtggatccgatatcaactagatcttgagacaaatggcagtattcatccacaattttaaaagaaaaggggggattggggggtacagtgcaggggaaagaatagtagacataatagcaacagacatacaaactaaag

SEQ ID NO: 13025 - DNA, 301 bp, Artificial Sequence
  Arid1a.4_Pten.4
  crRNA array
  misc_feature (148)..(157): n is a, c, g, or t
cttggctttatatatcttgtggaaaggacgaaacaccgtaatttctactaagtgtagatgccgagaccgagtctctgcataatttctactaagtgtagatctgtaagctaaaccactacataatttctactaagtgtagatttttttnnnnnnnnnnaagcttggcgtggatccgatatcaactagatcttgagacaaatggcagtattcatccacaattttaaaagaaaaggggggattggggggtacagtgcaggggaaagaatagtagacataatagcaacagacatacaaactaaag

SEQ ID NO: 13026 - DNA, 301 bp, Artificial Sequence
  Arid1a.1_Atm.1
  crRNA array
  misc_feature (148)..(157): n is a, c, g, or t
cttggctttatatatcttgtggaaaggacgaaacaccgtaatttctactaagtgtagatcccgcgctcggccgctgccgtaatttctactaagtgtagatgagaaagtctccgaatcgtttaatttctactaagtgtagatttttttnnnnnnnnnnaagcttggcgtggatccgatatcaactagatcttgagacaaatggcagtattcatccacaattttaaaagaaaaggggggattggggggtacagtgcaggggaaagaatagtagacataatagcaacagacatacaaactaaag

SEQ ID NO: 13027 - DNA, 301 bp, Artificial Sequence
  Arid1a.1_Atm.2
  crRNA array
  misc_feature (148)..(157): n is a, c, g, or t
cttggctttatatatcttgtggaaaggacgaaacaccgtaatttctactaagtgtagatcccgcgctcggccgctgccgtaatttctactaagtgtagatcctacgagggcacgagagactaatttctactaagtgtagatttttttnnnnnnnnnnaagcttggcgtggatccgatatcaactagatcttgagacaaatggcagtattcatccacaattttaaaagaaaaggggggattggggggtacagtgcaggggaaagaatagtagacataatagcaacagacatacaaactaaag

SEQ ID NO: 13028 - DNA, 301 bp, Artificial Sequence
  Arid1a.1_Atm.3
  crRNA array
  misc_feature (148)..(157): n is a, c, g, or t
cttggctttatatatcttgtggaaaggacgaaacaccgtaatttctactaagtgtagatcccgcgctcggccgctgccgtaatttctactaagtgtagattgaaagtctccgatatgccataatttctactaagtgtagatttttttnnnnnnnnnnaagcttggcgtggatccgatatcaactagatcttgagacaaatggcagtattcatccacaattttaaaagaaaaggggggattggggggtacagtgcaggggaaagaatagtagacataatagcaacagacatacaaactaaag

SEQ ID NO: 13029 - DNA, 301 bp, Artificial Sequence
  Arid1a.1_Atm.4
  crRNA array
  misc_feature (148)..(157): n is a, c, g, or t
cttggctttatatatcttgtggaaaggacgaaacaccgtaatttctactaagtgtagatcccgcgctcggccgctgccgtaatttctactaagtgtagatggtggtgatcagtcaagtagtaatttctactaagtgtagatttttttnnnnnnnnnnaagcttggcgtggatccgatatcaactagatcttgagacaaatggcagtattcatccacaattttaaaagaaaaggggggattggggggtacagtgcaggggaaagaatagtagacataatagcaacagacatacaaactaaag

SEQ ID NO: 13030 - DNA, 301 bp, Artificial Sequence
  Arid1a.2_Atm.1
  crRNA array
  misc_feature (148)..(157): n is a, c, g, or t
cttggctttatatatcttgtggaaaggacgaaacaccgtaatttctactaagtgtagatagtgcaagatcgagcgtggataatttctactaagtgtagatgagaaagtctccgaatcgtttaatttctactaagtgtagatttttttnnnnnnnnnnaagcttggcgtggatccgatatcaactagatcttgagacaaatggcagtattcatccacaattttaaaagaaaaggggggattggggggtacagtgcaggggaaagaatagtagacataatagcaacagacatacaaactaaag

SEQ ID NO: 13031 - DNA, 301 bp, Artificial Sequence
  Arid1a.2_Atm.2
  crRNA array
  misc_feature (148)..(157): n is a, c, g, or t
cttggctttatatatcttgtggaaaggacgaaacaccgtaatttctactaagtgtagatagtgcaagatcgagcgtggataatttctactaagtgtagatcctacgagggcacgagagactaatttctactaagtgtagatttttttnnnnnnnnnnaagcttggcgtggatccgatatcaactagatcttgagacaaatggcagtattcatccacaattttaaaagaaaaggggggattggggggtacagtgcaggggaaagaatagtagacataatagcaacagacatacaaactaaag

SEQ ID NO: 13032 - DNA, 301 bp, Artificial Sequence
  Arid1a.2_Atm.3
  crRNA array
  misc_feature (148)..(157): n is a, c, g, or t
cttggctttatatatcttgtggaaaggacgaaacaccgtaatttctactaagtgtagatagtgcaagatcgagcgtggataatttctactaagtgtagattgaaagtctccgatatgccataatttctactaagtgtagatttttttnnnnnnnnnnaagcttggcgtggatccgatatcaactagatcttgagacaaatggcagtattcatccacaattttaaaagaaaaggggggattggggggtacagtgcaggggaaagaatagtagacataatagcaacagacatacaaactaaag

SEQ ID NO: 13033 - DNA, 301 bp, Artificial Sequence
  Arid1a.2_Atm.4
  crRNA array
  misc_feature (148)..(157): n is a, c, g, or t
cttggctttatatatcttgtggaaaggacgaaacaccgtaatttctactaagtgtagatagtgcaagatcgagcgtggataatttctactaagtgtagatggtggtgatcagtcaagtagtaatttctactaagtgtagatttttttnnnnnnnnnnaagcttggcgtggatccgatatcaactagatcttgagacaaatggcagtattcatccacaattttaaaagaaaaggggggattggggggtacagtgcaggggaaagaatagtagacataatagcaacagacatacaaactaaag

SEQ ID NO: 13034 - DNA, 301 bp, Artificial Sequence
  Arid1a.3_Atm.1
  crRNA array
  misc_feature (148)..(157): n is a, c, g, or t
cttggctttatatatcttgtggaaaggacgaaacaccgtaatttctactaagtgtagatagtgagctggcagcactgcttaatttctactaagtgtagatgagaaagtctccgaatcgtttaatttctactaagtgtagatttttttnnnnnnnnnnaagcttggcgtggatccgatatcaactagatcttgagacaaatggcagtattcatccacaattttaaaagaaaaggggggattggggggtacagtgcaggggaaagaatagtagacataatagcaacagacatacaaactaaag

SEQ ID NO: 13035 - DNA, 301 bp, Artificial Sequence
  Arid1a.3_Atm.2
  crRNA array
  misc_feature (148)..(157): n is a, c, g, or t
cttggctttatatatcttgtggaaaggacgaaacaccgtaatttctactaagtgtagatagtgagctggcagcactgcttaatttctactaagtgtagatcctacgagggcacgagagactaatttctactaagtgtagatttttttnnnnnnnnnnaagcttggcgtggatccgatatcaactagatcttgagacaaatggcagtattcatccacaattttaaaagaaaaggggggattggggggtacagtgcaggggaaagaatagtagacataatagcaacagacatacaaactaaag

SEQ ID NO: 13036 - DNA, 301 bp, Artificial Sequence
  Arid1a.3_Atm.3
  crRNA array
  misc_feature (148)..(157): n is a, c, g, or t
cttggctttatatatcttgtggaaaggacgaaacaccgtaatttctactaagtgtagatagtgagctggcagcactgcttaatttctactaagtgtagattgaaagtctccgatatgccataatttctactaagtgtagatttttttnnnnnnnnnnaagcttggcgtggatccgatatcaactagatcttgagacaaatggcagtattcatccacaattttaaaagaaaaggggggattggggggtacagtgcaggggaaagaatagtagacataatagcaacagacatacaaactaaag

SEQ ID NO: 13037 - DNA, 301 bp, Artificial Sequence
  Arid1a.3_Atm.4
  crRNA array
  misc_feature (148)..(157): n is a, c, g, or t
cttggctttatatatcttgtggaaaggacgaaacaccgtaatttctactaagtgtagatagtgagctggcagcactgcttaatttctactaagtgtagatggtggtgatcagtcaagtagtaatttctactaagtgtagatttttttnnnnnnnnnnaagcttggcgtggatccgatatcaactagatcttgagacaaatggcagtattcatccacaattttaaaagaaaaggggggattggggggtacagtgcaggggaaagaatagtagacataatagcaacagacatacaaactaaag

SEQ ID NO: 13038 - DNA, 301 bp, Artificial Sequence
  Arid1a.4_Atm.1
  crRNA array
  misc_feature (148)..(157): n is a, c, g, or t
cttggctttatatatcttgtggaaaggacgaaacaccgtaatttctactaagtgtagatgccgagaccgagtctctgcataatttctactaagtgtagatgagaaagtctccgaatcgtttaatttctactaagtgtagatttttttnnnnnnnnnnaagcttggcgtggatccgatatcaactagatcttgagacaaatggcagtattcatccacaattttaaaagaaaaggggggattggggggtacagtgcaggggaaagaatagtagacataatagcaacagacatacaaactaaag

SEQ ID NO: 13039 - DNA, 301 bp, Artificial Sequence
  Arid1a.4_Atm.2
  crRNA array
  misc_feature (148)..(157): n is a, c, g, or t
cttggctttatatatcttgtggaaaggacgaaacaccgtaatttctactaagtgtagatgccgagaccgagtctctgcataatttctactaagtgtagatcctacgagggcacgagagactaatttctactaagtgtagatttttttnnnnnnnnnnaagcttggcgtggatccgatatcaactagatcttgagacaaatggcagtattcatccacaattttaaaagaaaaggggggattggggggtacagtgcaggggaaagaatagtagacataatagcaacagacatacaaactaaag

SEQ ID NO: 13040 - DNA, 301 bp, Artificial Sequence
  Arid1a.4_Atm.3
  crRNA array
  misc_feature (148)..(157): n is a, c, g, or t
cttggctttatatatcttgtggaaaggacgaaacaccgtaatttctactaagtgtagatgccgagaccgagtctctgcataatttctactaagtgtagattgaaagtctccgatatgccataatttctactaagtgtagatttttttnnnnnnnnnnaagcttggcgtggatccgatatcaactagatcttgagacaaatggcagtattcatccacaattttaaaagaaaaggggggattggggggtacagtgcaggggaaagaatagtagacataatagcaacagacatacaaactaaag

SEQ ID NO: 13041 - DNA, 301 bp, Artificial Sequence
  Arid1a.4_Atm.4
  crRNA array
  misc_feature (148)..(157): n is a, c, g, or t
cttggctttatatatcttgtggaaaggacgaaacaccgtaatttctactaagtgtagatgccgagaccgagtctctgcataatttctactaagtgtagatggtggtgatcagtcaagtagtaatttctactaagtgtagatttttttnnnnnnnnnnaagcttggcgtggatccgatatcaactagatcttgagacaaatggcagtattcatccacaattttaaaagaaaaggggggattggggggtacagtgcaggggaaagaatagtagacataatagcaacagacatacaaactaaag

SEQ ID NO: 13042 - DNA, 301 bp, Artificial Sequence
  Trim72.1_Zfhx3.1
  crRNA array
  misc_feature (148)..(157): n is a, c, g, or t
cttggctttatatatcttgtggaaaggacgaaacaccgtaatttctactaagtgtagataccccagctctgcgcacccgtaatttctactaagtgtagatcgctgcgaggtgtgtaactataatttctactaagtgtagatttttttnnnnnnnnnnaagcttggcgtggatccgatatcaactagatcttgagacaaatggcagtattcatccacaattttaaaagaaaaggggggattggggggtacagtgcaggggaaagaatagtagacataatagcaacagacatacaaactaaag

SEQ ID NO: 13043 - DNA, 301 bp, Artificial Sequence
  Trim72.1_Zfhx3.2
  crRNA array
  misc_feature (148)..(157): n is a, c, g, or t
cttggctttatatatcttgtggaaaggacgaaacaccgtaatttctactaagtgtagataccccagctctgcgcacccgtaatttctactaagtgtagatacgtgcgacacaaaagcaactaatttctactaagtgtagatttttttnnnnnnnnnnaagcttggcgtggatccgatatcaactagatcttgagacaaatggcagtattcatccacaattttaaaagaaaaggggggattggggggtacagtgcaggggaaagaatagtagacataatagcaacagacatacaaactaaag

SEQ ID NO: 13044 - DNA, 301 bp, Artificial Sequence
  Trim72.1_Zfhx3.3
  crRNA array
  misc_feature (148)..(157): n is a, c, g, or t
cttggctttatatatcttgtggaaaggacgaaacaccgtaatttctactaagtgtagataccccagctctgcgcacccgtaatttctactaagtgtagattgctctacggcaagaggaaataatttctactaagtgtagatttttttnnnnnnnnnnaagcttggcgtggatccgatatcaactagatcttgagacaaatggcagtattcatccacaattttaaaagaaaaggggggattggggggtacagtgcaggggaaagaatagtagacataatagcaacagacatacaaactaaag

SEQ ID NO: 13045 - DNA, 301 bp, Artificial Sequence
  Trim72.1_Zfhx3.4
  crRNA array
  misc_feature (148)..(157): n is a, c, g, or t
cttggctttatatatcttgtggaaaggacgaaacaccgtaatttctactaagtgtagataccccagctctgcgcacccgtaatttctactaagtgtagatagtgagcggcagactgcgagtaatttctactaagtgtagatttttttnnnnnnnnnnaagcttggcgtggatccgatatcaactagatcttgagacaaatggcagtattcatccacaattttaaaagaaaaggggggattggggggtacagtgcaggggaaagaatagtagacataatagcaacagacatacaaactaaag

SEQ ID NO: 13046 - DNA, 301 bp, Artificial Sequence
  Trim72.2_Zfhx3.1
  crRNA array
  misc_feature (148)..(157): n is a, c, g, or t
cttggctttatatatcttgtggaaaggacgaaacaccgtaatttctactaagtgtagatcacgagcgtctgcccgggcctaatttctactaagtgtagatcgctgcgaggtgtgtaactataatttctactaagtgtagatttttttnnnnnnnnnnaagcttggcgtggatccgatatcaactagatcttgagacaaatggcagtattcatccacaattttaaaagaaaaggggggattggggggtacagtgcaggggaaagaatagtagacataatagcaacagacatacaaactaaag

SEQ ID NO: 13047 - DNA, 301 bp, Artificial Sequence
  Trim72.2_Zfhx3.2
  crRNA array
  misc_feature (148)..(157): n is a, c, g, or t
cttggctttatatatcttgtggaaaggacgaaacaccgtaatttctactaagtgtagatcacgagcgtctgcccgggcctaatttctactaagtgtagatacgtgcgacacaaaagcaactaatttctactaagtgtagatttttttnnnnnnnnnnaagcttggcgtggatccgatatcaactagatcttgagacaaatggcagtattcatccacaattttaaaagaaaaggggggattggggggtacagtgcaggggaaagaatagtagacataatagcaacagacatacaaactaaag

SEQ ID NO: 13048 - DNA, 301 bp, Artificial Sequence
  Trim72.2_Zfhx3.3
  crRNA array
  misc_feature (148)..(157): n is a, c, g, or t
cttggctttatatatcttgtggaaaggacgaaacaccgtaatttctactaagtgtagatcacgagcgtctgcccgggcctaatttctactaagtgtagattgctctacggcaagaggaaataatttctactaagtgtagatttttttnnnnnnnnnnaagcttggcgtggatccgatatcaactagatcttgagacaaatggcagtattcatccacaattttaaaagaaaaggggggattggggggtacagtgcaggggaaagaatagtagacataatagcaacagacatacaaactaaag

SEQ ID NO: 13049 - DNA, 301 bp, Artificial Sequence
  Trim72.2_Zfhx3.4
  crRNA array
  misc_feature (148)..(157): n is a, c, g, or t
cttggctttatatatcttgtggaaaggacgaaacaccgtaatttctactaagtgtagatcacgagcgtctgcccgggcctaatttctactaagtgtagatagtgagcggcagactgcgagtaatttctactaagtgtagatttttttnnnnnnnnnnaagcttggcgtggatccgatatcaactagatcttgagacaaatggcagtattcatccacaattttaaaagaaaaggggggattggggggtacagtgcaggggaaagaatagtagacataatagcaacagacatacaaactaaag

SEQ ID NO: 13050 - DNA, 301 bp, Artificial Sequence
  Trim72.3_Zfhx3.1
  crRNA array
  misc_feature (148)..(157): n is a, c, g, or t
cttggctttatatatcttgtggaaaggacgaaacaccgtaatttctactaagtgtagatacgtgtgctggcacgacaagtaatttctactaagtgtagatcgctgcgaggtgtgtaactataatttctactaagtgtagatttttttnnnnnnnnnnaagcttggcgtggatccgatatcaactagatcttgagacaaatggcagtattcatccacaattttaaaagaaaaggggggattggggggtacagtgcaggggaaagaatagtagacataatagcaacagacatacaaactaaag

SEQ ID NO: 13051 - DNA, 301 bp, Artificial Sequence
  Trim72.3_Zfhx3.2
  crRNA array
  misc_feature (148)..(157): n is a, c, g, or t
cttggctttatatatcttgtggaaaggacgaaacaccgtaatttctactaagtgtagatacgtgtgctggcacgacaagtaatttctactaagtgtagatacgtgcgacacaaaagcaactaatttctactaagtgtagatttttttnnnnnnnnnnaagcttggcgtggatccgatatcaactagatcttgagacaaatggcagtattcatccacaattttaaaagaaaaggggggattggggggtacagtgcaggggaaagaatagtagacataatagcaacagacatacaaactaaag

SEQ ID NO: 13052 - DNA, 301 bp, Artificial Sequence
  Trim72.3_Zfhx3.3
  crRNA array
  misc_feature (148)..(157): n is a, c, g, or t
cttggctttatatatcttgtggaaaggacgaaacaccgtaatttctactaagtgtagatacgtgtgctggcacgacaagtaatttctactaagtgtagattgctctacggcaagaggaaataatttctactaagtgtagatttttttnnnnnnnnnnaagcttggcgtggatccgatatcaactagatcttgagacaaatggcagtattcatccacaattttaaaagaaaaggggggattggggggtacagtgcaggggaaagaatagtagacataatagcaacagacatacaaactaaag

SEQ ID NO: 13053 - DNA, 301 bp, Artificial Sequence
  Trim72.3_Zfhx3.4
  crRNA array
  misc_feature (148)..(157): n is a, c, g, or t
cttggctttatatatcttgtggaaaggacgaaacaccgtaatttctactaagtgtagatacgtgtgctggcacgacaagtaatttctactaagtgtagatagtgagcggcagactgcgagtaatttctactaagtgtagatttttttnnnnnnnnnnaagcttggcgtggatccgatatcaactagatcttgagacaaatggcagtattcatccacaattttaaaagaaaaggggggattggggggtacagtgcaggggaaagaatagtagacataatagcaacagacatacaaactaaag

SEQ ID NO: 13054 - DNA, 301 bp, Artificial Sequence
  Trim72.4_Zfhx3.1
  crRNA array
  misc_feature (148)..(157): n is a, c, g, or t
cttggctttatatatcttgtggaaaggacgaaacaccgtaatttctactaagtgtagattgccgtgcctgcctgatccgtaatttctactaagtgtagatcgctgcgaggtgtgtaactataatttctactaagtgtagatttttttnnnnnnnnnnaagcttggcgtggatccgatatcaactagatcttgagacaaatggcagtattcatccacaattttaaaagaaaaggggggattggggggtacagtgcaggggaaagaatagtagacataatagcaacagacatacaaactaaag

SEQ ID NO: 13055 - DNA, 301 bp, Artificial Sequence
  Trim72.4_Zfhx3.2
  crRNA array
  misc_feature (148)..(157): n is a, c, g, or t
cttggctttatatatcttgtggaaaggacgaaacaccgtaatttctactaagtgtagattgccgtgcctgcctgatccgtaatttctactaagtgtagatacgtgcgacacaaaagcaactaatttctactaagtgtagatttttttnnnnnnnnnnaagcttggcgtggatccgatatcaactagatcttgagacaaatggcagtattcatccacaattttaaaagaaaaggggggattggggggtacagtgcaggggaaagaatagtagacataatagcaacagacatacaaactaaag

SEQ ID NO: 13056 - DNA, 301 bp, Artificial Sequence
  Trim72.4_Zfhx3.3
  crRNA array
  misc_feature (148)..(157): n is a, c, g, or t
cttggctttatatatcttgtggaaaggacgaaacaccgtaatttctactaagtgtagattgccgtgcctgcctgatccgtaatttctactaagtgtagattgctctacggcaagaggaaataatttctactaagtgtagatttttttnnnnnnnnnnaagcttggcgtggatccgatatcaactagatcttgagacaaatggcagtattcatccacaattttaaaagaaaaggggggattggggggtacagtgcaggggaaagaatagtagacataatagcaacagacatacaaactaaag

SEQ ID NO: 13057 - DNA, 301 bp, Artificial Sequence
  Trim72.4_Zfhx3.4
  crRNA array
  misc_feature (148)..(157): n is a, c, g, or t
cttggctttatatatcttgtggaaaggacgaaacaccgtaatttctactaagtgtagattgccgtgcctgcctgatccgtaatttctactaagtgtagatagtgagcggcagactgcgagtaatttctactaagtgtagatttttttnnnnnnnnnnaagcttggcgtggatccgatatcaactagatcttgagacaaatggcagtattcatccacaattttaaaagaaaaggggggattggggggtacagtgcaggggaaagaatagtagacataatagcaacagacatacaaactaaag

SEQ ID NO: 13058 - DNA, 301 bp, Artificial Sequence
  Trim72.1_Crebbp.1
  crRNA array
  misc_feature (148)..(157): n is a, c, g, or t
cttggctttatatatcttgtggaaaggacgaaacaccgtaatttctactaagtgtagataccccagctctgcgcacccgtaatttctactaagtgtagatctcacggcggcggcgggccgtaatttctactaagtgtagatttttttnnnnnnnnnnaagcttggcgtggatccgatatcaactagatcttgagacaaatggcagtattcatccacaattttaaaagaaaaggggggattggggggtacagtgcaggggaaagaatagtagacataatagcaacagacatacaaactaaag

SEQ ID NO: 13059 - DNA, 301 bp, Artificial Sequence
  Trim72.1_Crebbp.2
  crRNA array
  misc_feature (148)..(157): n is a, c, g, or t
cttggctttatatatcttgtggaaaggacgaaacaccgtaatttctactaagtgtagataccccagctctgcgcacccgtaatttctactaagtgtagatcgcgagcaggtgaagatggctaatttctactaagtgtagatttttttnnnnnnnnnnaagcttggcgtggatccgatatcaactagatcttgagacaaatggcagtattcatccacaattttaaaagaaaaggggggattggggggtacagtgcaggggaaagaatagtagacataatagcaacagacatacaaactaaag

SEQ ID NO: 13060 - DNA, 301 bp, Artificial Sequence
  Trim72.1_Crebbp.3
  crRNA array
  misc_feature (148)..(157): n is a, c, g, or t
cttggctttatatatcttgtggaaaggacgaaacaccgtaatttctactaagtgtagataccccagctctgcgcacccgtaatttctactaagtgtagatggctccgccgcccgcccgcgtaatttctactaagtgtagatttttttnnnnnnnnnnaagcttggcgtggatccgatatcaactagatcttgagacaaatggcagtattcatccacaattttaaaagaaaaggggggattggggggtacagtgcaggggaaagaatagtagacataatagcaacagacatacaaactaaag

SEQ ID NO: 13061 - DNA, 301 bp, Artificial Sequence
  Trim72.1_Crebbp.4
  crRNA array
  misc_feature (148)..(157): n is a, c, g, or t
cttggctttatatatcttgtggaaaggacgaaacaccgtaatttctactaagtgtagataccccagctctgcgcacccgtaatttctactaagtgtagattggactagatgactccgtagtaatttctactaagtgtagatttttttnnnnnnnnnnaagcttggcgtggatccgatatcaactagatcttgagacaaatggcagtattcatccacaattttaaaagaaaaggggggattggggggtacagtgcaggggaaagaatagtagacataatagcaacagacatacaaactaaag

SEQ ID NO: 13062 - DNA, 301 bp, Artificial Sequence
  Trim72.2_Crebbp.1
  crRNA array
  misc_feature (148)..(157): n is a, c, g, or t
cttggctttatatatcttgtggaaaggacgaaacaccgtaatttctactaagtgtagatcacgagcgtctgcccgggcctaatttctactaagtgtagatctcacggcggcggcgggccgtaatttctactaagtgtagatttttttnnnnnnnnnnaagcttggcgtggatccgatatcaactagatcttgagacaaatggcagtattcatccacaattttaaaagaaaaggggggattggggggtacagtgcaggggaaagaatagtagacataatagcaacagacatacaaactaaag

SEQ ID NO: 13063 - DNA, 301 bp, Artificial Sequence
  Trim72.2_Crebbp.2
  crRNA array
  misc_feature (148)..(157): n is a, c, g, or t
cttggctttatatatcttgtggaaaggacgaaacaccgtaatttctactaagtgtagatcacgagcgtctgcccgggcctaatttctactaagtgtagatcgcgagcaggtgaagatggctaatttctactaagtgtagatttttttnnnnnnnnnnaagcttggcgtggatccgatatcaactagatcttgagacaaatggcagtattcatccacaattttaaaagaaaaggggggattggggggtacagtgcaggggaaagaatagtagacataatagcaacagacatacaaactaaag

SEQ ID NO: 13064 - DNA, 301 bp, Artificial Sequence
  Trim72.2_Crebbp.3
  crRNA array
  misc_feature (148)..(157): n is a, c, g, or t
cttggctttatatatcttgtggaaaggacgaaacaccgtaatttctactaagtgtagatcacgagcgtctgcccgggcctaatttctactaagtgtagatggctccgccgcccgcccgcgtaatttctactaagtgtagatttttttnnnnnnnnnnaagcttggcgtggatccgatatcaactagatcttgagacaaatggcagtattcatccacaattttaaaagaaaaggggggattggggggtacagtgcaggggaaagaatagtagacataatagcaacagacatacaaactaaag

SEQ ID NO: 13065 - DNA, 301 bp, Artificial Sequence
  Trim72.2_Crebbp.4
  crRNA array
  misc_feature (148)..(157): n is a, c, g, or t
cttggctttatatatcttgtggaaaggacgaaacaccgtaatttctactaagtgtagatcacgagcgtctgcccgggcctaatttctactaagtgtagattggactagatgactccgtagtaatttctactaagtgtagatttttttnnnnnnnnnnaagcttggcgtggatccgatatcaactagatcttgagacaaatggcagtattcatccacaattttaaaagaaaaggggggattggggggtacagtgcaggggaaagaatagtagacataatagcaacagacatacaaactaaag

SEQ ID NO: 13066 - DNA, 301 bp, Artificial Sequence
  Trim72.3_Crebbp.1
  crRNA array
  misc_feature (148)..(157): n is a, c, g, or t
cttggctttatatatcttgtggaaaggacgaaacaccgtaatttctactaagtgtagatacgtgtgctggcacgacaagtaatttctactaagtgtagatctcacggcggcggcgggccgtaatttctactaagtgtagatttttttnnnnnnnnnnaagcttggcgtggatccgatatcaactagatcttgagacaaatggcagtattcatccacaattttaaaagaaaaggggggattggggggtacagtgcaggggaaagaatagtagacataatagcaacagacatacaaactaaag

SEQ ID NO: 13067 - DNA, 301 bp, Artificial Sequence
  Trim72.3_Crebbp.2
  crRNA array
  misc_feature (148)..(157): n is a, c, g, or t
cttggctttatatatcttgtggaaaggacgaaacaccgtaatttctactaagtgtagatacgtgtgctggcacgacaagtaatttctactaagtgtagatcgcgagcaggtgaagatggctaatttctactaagtgtagatttttttnnnnnnnnnnaagcttggcgtggatccgatatcaactagatcttgagacaaatggcagtattcatccacaattttaaaagaaaaggggggattggggggtacagtgcaggggaaagaatagtagacataatagcaacagacatacaaactaaag

SEQ ID NO: 13068 - DNA, 301 bp, Artificial Sequence
  Trim72.3_Crebbp.3
  crRNA array
  misc_feature (148)..(157): n is a, c, g, or t
cttggctttatatatcttgtggaaaggacgaaacaccgtaatttctactaagtgtagatacgtgtgctggcacgacaagtaatttctactaagtgtagatggctccgccgcccgcccgcgtaatttctactaagtgtagatttttttnnnnnnnnnnaagcttggcgtggatccgatatcaactagatcttgagacaaatggcagtattcatccacaattttaaaagaaaaggggggattggggggtacagtgcaggggaaagaatagtagacataatagcaacagacatacaaactaaag

SEQ ID NO: 13069 - DNA, 301 bp, Artificial Sequence
  Trim72.3_Crebbp.4
  crRNA array
  misc_feature (148)..(157): n is a, c, g, or t
cttggctttatatatcttgtggaaaggacgaaacaccgtaatttctactaagtgtagatacgtgtgctggcacgacaagtaatttctactaagtgtagattggactagatgactccgtagtaatttctactaagtgtagatttttttnnnnnnnnnnaagcttggcgtggatccgatatcaactagatcttgagacaaatggcagtattcatccacaattttaaaagaaaaggggggattggggggtacagtgcaggggaaagaatagtagacataatagcaacagacatacaaactaaag

SEQ ID NO: 13070 - DNA, 301 bp, Artificial Sequence
  Trim72.4_Crebbp.1
  crRNA array
  misc_feature (148)..(157): n is a, c, g, or t
cttggctttatatatcttgtggaaaggacgaaacaccgtaatttctactaagtgtagattgccgtgcctgcctgatccgtaatttctactaagtgtagatctcacggcggcggcgggccgtaatttctactaagtgtagatttttttnnnnnnnnnnaagcttggcgtggatccgatatcaactagatcttgagacaaatggcagtattcatccacaattttaaaagaaaaggggggattggggggtacagtgcaggggaaagaatagtagacataatagcaacagacatacaaactaaag

SEQ ID NO: 13071 - DNA, 301 bp, Artificial Sequence
  Trim72.4_Crebbp.2
  crRNA array
  misc_feature (148)..(157): n is a, c, g, or t
cttggctttatatatcttgtggaaaggacgaaacaccgtaatttctactaagtgtagattgccgtgcctgcctgatccgtaatttctactaagtgtagatcgcgagcaggtgaagatggctaatttctactaagtgtagatttttttnnnnnnnnnnaagcttggcgtggatccgatatcaactagatcttgagacaaatggcagtattcatccacaattttaaaagaaaaggggggattggggggtacagtgcaggggaaagaatagtagacataatagcaacagacatacaaactaaag

SEQ ID NO: 13072 - DNA, 301 bp, Artificial Sequence
  Trim72.4_Crebbp.3
  crRNA array
  misc_feature (148)..(157): n is a, c, g, or t
cttggctttatatatcttgtggaaaggacgaaacaccgtaatttctactaagtgtagattgccgtgcctgcctgatccgtaatttctactaagtgtagatggctccgccgcccgcccgcgtaatttctactaagtgtagatttttttnnnnnnnnnnaagcttggcgtggatccgatatcaactagatcttgagacaaatggcagtattcatccacaattttaaaagaaaaggggggattggggggtacagtgcaggggaaagaatagtagacataatagcaacagacatacaaactaaag

SEQ ID NO: 13073 - DNA, 301 bp, Artificial Sequence
  Trim72.4_Crebbp.4
  crRNA array
  misc_feature (148)..(157): n is a, c, g, or t
cttggctttatatatcttgtggaaaggacgaaacaccgtaatttctactaagtgtagattgccgtgcctgcctgatccgtaatttctactaagtgtagattggactagatgactccgtagtaatttctactaagtgtagatttttttnnnnnnnnnnaagcttggcgtggatccgatatcaactagatcttgagacaaatggcagtattcatccacaattttaaaagaaaaggggggattggggggtacagtgcaggggaaagaatagtagacataatagcaacagacatacaaactaaag

SEQ ID NO: 13074 - DNA, 301 bp, Artificial Sequence
  Trim72.1_Cdkn2a.1
  crRNA array
  misc_feature (148)..(157): n is a, c, g, or t
cttggctttatatatcttgtggaaaggacgaaacaccgtaatttctactaagtgtagataccccagctctgcgcacccgtaatttctactaagtgtagatcaatcacgggagggagcagataatttctactaagtgtagatttttttnnnnnnnnnnaagcttggcgtggatccgatatcaactagatcttgagacaaatggcagtattcatccacaattttaaaagaaaaggggggattggggggtacagtgcaggggaaagaatagtagacataatagcaacagacatacaaactaaag

SEQ ID NO: 13075 - DNA, 301 bp, Artificial Sequence
  Trim72.1_Cdkn2a.2
  crRNA array
  misc_feature (148)..(157): n is a, c, g, or t
cttggctttatatatcttgtggaaaggacgaaacaccgtaatttctactaagtgtagataccccagctctgcgcacccgtaatttctactaagtgtagatgcccaacgccccgaactctttaatttctactaagtgtagatttttttnnnnnnnnnnaagcttggcgtggatccgatatcaactagatcttgagacaaatggcagtattcatccacaattttaaaagaaaaggggggattggggggtacagtgcaggggaaagaatagtagacataatagcaacagacatacaaactaaag

SEQ ID NO: 13076 - DNA, 301 bp, Artificial Sequence
  Trim72.1_Cdkn2a.3
  crRNA array
  misc_feature (148)..(157): n is a, c, g, or t
cttggctttatatatcttgtggaaaggacgaaacaccgtaatttctactaagtgtagataccccagctctgcgcacccgtaatttctactaagtgtagattgtaccgctgggaacgtcgctaatttctactaagtgtagatttttttnnnnnnnnnnaagcttggcgtggatccgatatcaactagatcttgagacaaatggcagtattcatccacaattttaaaagaaaaggggggattggggggtacagtgcaggggaaagaatagtagacataatagcaacagacatacaaactaaag

SEQ ID NO: 13077 - DNA, 301 bp, Artificial Sequence
  Trim72.1_Cdkn2a.4
  crRNA array
  misc_feature (148)..(157): n is a, c, g, or t
cttggctttatatatcttgtggaaaggacgaaacaccgtaatttctactaagtgtagataccccagctctgcgcacccgtaatttctactaagtgtagataagccacatgctagacacgctaatttctactaagtgtagatttttttnnnnnnnnnnaagcttggcgtggatccgatatcaactagatcttgagacaaatggcagtattcatccacaattttaaaagaaaaggggggattggggggtacagtgcaggggaaagaatagtagacataatagcaacagacatacaaactaaag

SEQ ID NO: 13078 - DNA, 301 bp, Artificial Sequence
  Trim72.2_Cdkn2a.1
  crRNA array
  misc_feature (148)..(157): n is a, c, g, or t
cttggctttatatatcttgtggaaaggacgaaacaccgtaatttctactaagtgtagatcacgagcgtctgcccgggcctaatttctactaagtgtagatcaatcacgggagggagcagataatttctactaagtgtagatttttttnnnnnnnnnnaagcttggcgtggatccgatatcaactagatcttgagacaaatggcagtattcatccacaattttaaaagaaaaggggggattggggggtacagtgcaggggaaagaatagtagacataatagcaacagacatacaaactaaag

SEQ ID NO: 13079 - DNA, 301 bp, Artificial Sequence
  Trim72.2_Cdkn2a.2
  crRNA array
  misc_feature (148)..(157): n is a, c, g, or t
cttggctttatatatcttgtggaaaggacgaaacaccgtaatttctactaagtgtagatcacgagcgtctgcccgggcctaatttctactaagtgtagatgcccaacgccccgaactctttaatttctactaagtgtagatttttttnnnnnnnnnnaagcttggcgtggatccgatatcaactagatcttgagacaaatggcagtattcatccacaattttaaaagaaaaggggggattggggggtacagtgcaggggaaagaatagtagacataatagcaacagacatacaaactaaag

SEQ ID NO: 13080 - DNA, 301 bp, Artificial Sequence
  Trim72.2_Cdkn2a.3
  crRNA array
  misc_feature (148)..(157): n is a, c, g, or t
cttggctttatatatcttgtggaaaggacgaaacaccgtaatttctactaagtgtagatcacgagcgtctgcccgggcctaatttctactaagtgtagattgtaccgctgggaacgtcgctaatttctactaagtgtagatttttttnnnnnnnnnnaagcttggcgtggatccgatatcaactagatcttgagacaaatggcagtattcatccacaattttaaaagaaaaggggggattggggggtacagtgcaggggaaagaatagtagacataatagcaacagacatacaaactaaag

SEQ ID NO: 13081 - DNA, 301 bp, Artificial Sequence
  Trim72.2_Cdkn2a.4
  crRNA array
  misc_feature (148)..(157): n is a, c, g, or t
cttggctttatatatcttgtggaaaggacgaaacaccgtaatttctactaagtgtagatcacgagcgtctgcccgggcctaatttctactaagtgtagataagccacatgctagacacgctaatttctactaagtgtagatttttttnnnnnnnnnnaagcttggcgtggatccgatatcaactagatcttgagacaaatggcagtattcatccacaattttaaaagaaaaggggggattggggggtacagtgcaggggaaagaatagtagacataatagcaacagacatacaaactaaag

SEQ ID NO: 13082 - DNA, 301 bp, Artificial Sequence
  Trim72.3_Cdkn2a.1
  crRNA array
  misc_feature (148)..(157): n is a, c, g, or t
cttggctttatatatcttgtggaaaggacgaaacaccgtaatttctactaagtgtagatacgtgtgctggcacgacaagtaatttctactaagtgtagatcaatcacgggagggagcagataatttctactaagtgtagatttttttnnnnnnnnnnaagcttggcgtggatccgatatcaactagatcttgagacaaatggcagtattcatccacaattttaaaagaaaaggggggattggggggtacagtgcaggggaaagaatagtagacataatagcaacagacatacaaactaaag

SEQ ID NO: 13083 - DNA, 301 bp, Artificial Sequence
  Trim72.3_Cdkn2a.2
  crRNA array
  misc_feature (148)..(157): n is a, c, g, or t
cttggctttatatatcttgtggaaaggacgaaacaccgtaatttctactaagtgtagatacgtgtgctggcacgacaagtaatttctactaagtgtagatgcccaacgccccgaactctttaatttctactaagtgtagatttttttnnnnnnnnnnaagcttggcgtggatccgatatcaactagatcttgagacaaatggcagtattcatccacaattttaaaagaaaaggggggattggggggtacagtgcaggggaaagaatagtagacataatagcaacagacatacaaactaaag

SEQ ID NO: 13084 - DNA, 301 bp, Artificial Sequence
  Trim72.3_Cdkn2a.3
  crRNA array
  misc_feature (148)..(157): n is a, c, g, or t
cttggctttatatatcttgtggaaaggacgaaacaccgtaatttctactaagtgtagatacgtgtgctggcacgacaagtaatttctactaagtgtagattgtaccgctgggaacgtcgctaatttctactaagtgtagatttttttnnnnnnnnnnaagcttggcgtggatccgatatcaactagatcttgagacaaatggcagtattcatccacaattttaaaagaaaaggggggattggggggtacagtgcaggggaaagaatagtagacataatagcaacagacatacaaactaaag

SEQ ID NO: 13085 - DNA, 301 bp, Artificial Sequence
  Trim72.3_Cdkn2a.4
  crRNA array
  misc_feature (148)..(157): n is a, c, g, or t
cttggctttatatatcttgtggaaaggacgaaacaccgtaatttctactaagtgtagatacgtgtgctggcacgacaagtaatttctactaagtgtagataagccacatgctagacacgctaatttctactaagtgtagatttttttnnnnnnnnnnaagcttggcgtggatccgatatcaactagatcttgagacaaatggcagtattcatccacaattttaaaagaaaaggggggattggggggtacagtgcaggggaaagaatagtagacataatagcaacagacatacaaactaaag

SEQ ID NO: 13086 - DNA, 301 bp, Artificial Sequence
  Trim72.4_Cdkn2a.1
  crRNA array
  misc_feature (148)..(157): n is a, c, g, or t
cttggctttatatatcttgtggaaaggacgaaacaccgtaatttctactaagtgtagattgccgtgcctgcctgatccgtaatttctactaagtgtagatcaatcacgggagggagcagataatttctactaagtgtagatttttttnnnnnnnnnnaagcttggcgtggatccgatatcaactagatcttgagacaaatggcagtattcatccacaattttaaaagaaaaggggggattggggggtacagtgcaggggaaagaatagtagacataatagcaacagacatacaaactaaag

SEQ ID NO: 13087 - DNA, 301 bp, Artificial Sequence
  Trim72.4_Cdkn2a.2
  crRNA array
  misc_feature (148)..(157): n is a, c, g, or t
cttggctttatatatcttgtggaaaggacgaaacaccgtaatttctactaagtgtagattgccgtgcctgcctgatccgtaatttctactaagtgtagatgcccaacgccccgaactctttaatttctactaagtgtagatttttttnnnnnnnnnnaagcttggcgtggatccgatatcaactagatcttgagacaaatggcagtattcatccacaattttaaaagaaaaggggggattggggggtacagtgcaggggaaagaatagtagacataatagcaacagacatacaaactaaag

SEQ ID NO: 13088 - DNA, 301 bp, Artificial Sequence
  Trim72.4_Cdkn2a.3
  crRNA array
  misc_feature (148)..(157): n is a, c, g, or t
cttggctttatatatcttgtggaaaggacgaaacaccgtaatttctactaagtgtagattgccgtgcctgcctgatccgtaatttctactaagtgtagattgtaccgctgggaacgtcgctaatttctactaagtgtagatttttttnnnnnnnnnnaagcttggcgtggatccgatatcaactagatcttgagacaaatggcagtattcatccacaattttaaaagaaaaggggggattggggggtacagtgcaggggaaagaatagtagacataatagcaacagacatacaaactaaag

SEQ ID NO: 13089 - DNA, 301 bp, Artificial Sequence
  Trim72.4_Cdkn2a.4
  crRNA array
  misc_feature (148)..(157): n is a, c, g, or t
cttggctttatatatcttgtggaaaggacgaaacaccgtaatttctactaagtgtagattgccgtgcctgcctgatccgtaatttctactaagtgtagataagccacatgctagacacgctaatttctactaagtgtagatttttttnnnnnnnnnnaagcttggcgtggatccgatatcaactagatcttgagacaaatggcagtattcatccacaattttaaaagaaaaggggggattggggggtacagtgcaggggaaagaatagtagacataatagcaacagacatacaaactaaag

SEQ ID NO: 13090 - DNA, 301 bp, Artificial Sequence
  Trim72.1_Wrn.1
  crRNA array
  misc_feature (148)..(157): n is a, c, g, or t
cttggctttatatatcttgtggaaaggacgaaacaccgtaatttctactaagtgtagataccccagctctgcgcacccgtaatttctactaagtgtagatgcaaaccactcgggtaattttaatttctactaagtgtagatttttttnnnnnnnnnnaagcttggcgtggatccgatatcaactagatcttgagacaaatggcagtattcatccacaattttaaaagaaaaggggggattggggggtacagtgcaggggaaagaatagtagacataatagcaacagacatacaaactaaag

SEQ ID NO: 13091 - DNA, 301 bp, Artificial Sequence
  Trim72.1_Wrn.2
  crRNA array
  misc_feature (148)..(157): n is a, c, g, or t
cttggctttatatatcttgtggaaaggacgaaacaccgtaatttctactaagtgtagataccccagctctgcgcacccgtaatttctactaagtgtagatgccatgtccagcagaacctttaatttctactaagtgtagatttttttnnnnnnnnnnaagcttggcgtggatccgatatcaactagatcttgagacaaatggcagtattcatccacaattttaaaagaaaaggggggattggggggtacagtgcaggggaaagaatagtagacataatagcaacagacatacaaactaaag

SEQ ID NO: 13092 - DNA, 301 bp, Artificial Sequence
  Trim72.1_Wrn.3
  crRNA array
  misc_feature (148)..(157): n is a, c, g, or t
cttggctttatatatcttgtggaaaggacgaaacaccgtaatttctactaagtgtagataccccagctctgcgcacccgtaatttctactaagtgtagatctgcagcaggccaccgcaattaatttctactaagtgtagatttttttnnnnnnnnnnaagcttggcgtggatccgatatcaactagatcttgagacaaatggcagtattcatccacaattttaaaagaaaaggggggattggggggtacagtgcaggggaaagaatagtagacataatagcaacagacatacaaactaaag

SEQ ID NO: 13093 - DNA, 301 bp, Artificial Sequence
  Trim72.1_Wrn.4
  crRNA array
  misc_feature (148)..(157): n is a, c, g, or t
cttggctttatatatcttgtggaaaggacgaaacaccgtaatttctactaagtgtagataccccagctctgcgcacccgtaatttctactaagtgtagattcgaaggacaatagatgatgtaatttctactaagtgtagatttttttnnnnnnnnnnaagcttggcgtggatccgatatcaactagatcttgagacaaatggcagtattcatccacaattttaaaagaaaaggggggattggggggtacagtgcaggggaaagaatagtagacataatagcaacagacatacaaactaaag

SEQ ID NO: 13094 - DNA, 301 bp, Artificial Sequence
  Trim72.2_Wrn.1
  crRNA array
  misc_feature (148)..(157): n is a, c, g, or t
cttggctttatatatcttgtggaaaggacgaaacaccgtaatttctactaagtgtagatcacgagcgtctgcccgggcctaatttctactaagtgtagatgcaaaccactcgggtaattttaatttctactaagtgtagatttttttnnnnnnnnnnaagcttggcgtggatccgatatcaactagatcttgagacaaatggcagtattcatccacaattttaaaagaaaaggggggattggggggtacagtgcaggggaaagaatagtagacataatagcaacagacatacaaactaaag

SEQ ID NO: 13095 - DNA, 301 bp, Artificial Sequence
  Trim72.2_Wrn.2
  crRNA array
  misc_feature (148)..(157): n is a, c, g, or t
cttggctttatatatcttgtggaaaggacgaaacaccgtaatttctactaagtgtagatcacgagcgtctgcccgggcctaatttctactaagtgtagatgccatgtccagcagaacctttaatttctactaagtgtagatttttttnnnnnnnnnnaagcttggcgtggatccgatatcaactagatcttgagacaaatggcagtattcatccacaattttaaaagaaaaggggggattggggggtacagtgcaggggaaagaatagtagacataatagcaacagacatacaaactaaag

SEQ ID NO: 13096 - DNA, 301 bp, Artificial Sequence
  Trim72.2_Wrn.3
  crRNA array
  misc_feature (148)..(157): n is a, c, g, or t
cttggctttatatatcttgtggaaaggacgaaacaccgtaatttctactaagtgtagatcacgagcgtctgcccgggcctaatttctactaagtgtagatctgcagcaggccaccgcaattaatttctactaagtgtagatttttttnnnnnnnnnnaagcttggcgtggatccgatatcaactagatcttgagacaaatggcagtattcatccacaattttaaaagaaaaggggggattggggggtacagtgcaggggaaagaatagtagacataatagcaacagacatacaaactaaag

SEQ ID NO: 13097 - DNA, 301 bp, Artificial Sequence
  Trim72.2_Wrn.4
  crRNA array
  misc_feature (148)..(157): n is a, c, g, or t
cttggctttatatatcttgtggaaaggacgaaacaccgtaatttctactaagtgtagatcacgagcgtctgcccgggcctaatttctactaagtgtagattcgaaggacaatagatgatgtaatttctactaagtgtagatttttttnnnnnnnnnnaagcttggcgtggatccgatatcaactagatcttgagacaaatggcagtattcatccacaattttaaaagaaaaggggggattggggggtacagtgcaggggaaagaatagtagacataatagcaacagacatacaaactaaag

SEQ ID NO: 13098 - DNA, 301 bp, Artificial Sequence
  Trim72.3_Wrn.1
  crRNA array
  misc_feature (148)..(157): n is a, c, g, or t
cttggctttatatatcttgtggaaaggacgaaacaccgtaatttctactaagtgtagatacgtgtgctggcacgacaagtaatttctactaagtgtagatgcaaaccactcgggtaattttaatttctactaagtgtagatttttttnnnnnnnnnnaagcttggcgtggatccgatatcaactagatcttgagacaaatggcagtattcatccacaattttaaaagaaaaggggggattggggggtacagtgcaggggaaagaatagtagacataatagcaacagacatacaaactaaag

SEQ ID NO: 13099 - DNA, 301 bp, Artificial Sequence
  Trim72.3_Wrn.2
  crRNA array
  misc_feature (148)..(157): n is a, c, g, or t
cttggctttatatatcttgtggaaaggacgaaacaccgtaatttctactaagtgtagatacgtgtgctggcacgacaagtaatttctactaagtgtagatgccatgtccagcagaacctttaatttctactaagtgtagatttttttnnnnnnnnnnaagcttggcgtggatccgatatcaactagatcttgagacaaatggcagtattcatccacaattttaaaagaaaaggggggattggggggtacagtgcaggggaaagaatagtagacataatagcaacagacatacaaactaaag

SEQ ID NO: 13100 - DNA, 301 bp, Artificial Sequence
  Trim72.3_Wrn.3
  crRNA array
  misc_feature (148)..(157): n is a, c, g, or t
cttggctttatatatcttgtggaaaggacgaaacaccgtaatttctactaagtgtagatacgtgtgctggcacgacaagtaatttctactaagtgtagatctgcagcaggccaccgcaattaatttctactaagtgtagatttttttnnnnnnnnnnaagcttggcgtggatccgatatcaactagatcttgagacaaatggcagtattcatccacaattttaaaagaaaaggggggattggggggtacagtgcaggggaaagaatagtagacataatagcaacagacatacaaactaaag

SEQ ID NO: 13101 - DNA, 301 bp, Artificial Sequence
  Trim72.3_Wrn.4
  crRNA array
  misc_feature (148)..(157): n is a, c, g, or t
cttggctttatatatcttgtggaaaggacgaaacaccgtaatttctactaagtgtagatacgtgtgctggcacgacaagtaatttctactaagtgtagattcgaaggacaatagatgatgtaatttctactaagtgtagatttttttnnnnnnnnnnaagcttggcgtggatccgatatcaactagatcttgagacaaatggcagtattcatccacaattttaaaagaaaaggggggattggggggtacagtgcaggggaaagaatagtagacataatagcaacagacatacaaactaaag

SEQ ID NO: 13102 - DNA, 301 bp, Artificial Sequence
  Trim72.4_Wrn.1
  crRNA array
  misc_feature (148)..(157): n is a, c, g, or t
cttggctttatatatcttgtggaaaggacgaaacaccgtaatttctactaagtgtagattgccgtgcctgcctgatccgtaatttctactaagtgtagatgcaaaccactcgggtaattttaatttctactaagtgtagatttttttnnnnnnnnnnaagcttggcgtggatccgatatcaactagatcttgagacaaatggcagtattcatccacaattttaaaagaaaaggggggattggggggtacagtgcaggggaaagaatagtagacataatagcaacagacatacaaactaaag

SEQ ID NO: 13103 - DNA, 301 bp, Artificial Sequence
  Trim72.4_Wrn.2
  crRNA array
  misc_feature (148)..(157): n is a, c, g, or t
cttggctttatatatcttgtggaaaggacgaaacaccgtaatttctactaagtgtagattgccgtgcctgcctgatccgtaatttctactaagtgtagatgccatgtccagcagaacctttaatttctactaagtgtagatttttttnnnnnnnnnnaagcttggcgtggatccgatatcaactagatcttgagacaaatggcagtattcatccacaattttaaaagaaaaggggggattggggggtacagtgcaggggaaagaatagtagacataatagcaacagacatacaaactaaag

SEQ ID NO: 13104 - DNA, 301 bp, Artificial Sequence
  Trim72.4_Wrn.3
  crRNA array
  misc_feature (148)..(157): n is a, c, g, or t
cttggctttatatatcttgtggaaaggacgaaacaccgtaatttctactaagtgtagattgccgtgcctgcctgatccgtaatttctactaagtgtagatctgcagcaggccaccgcaattaatttctactaagtgtagatttttttnnnnnnnnnnaagcttggcgtggatccgatatcaactagatcttgagacaaatggcagtattcatccacaattttaaaagaaaaggggggattggggggtacagtgcaggggaaagaatagtagacataatagcaacagacatacaaactaaag

SEQ ID NO: 13105 - DNA, 301 bp, Artificial Sequence
  Trim72.4_Wrn.4
  crRNA array
  misc_feature (148)..(157): n is a, c, g, or t
cttggctttatatatcttgtggaaaggacgaaacaccgtaatttctactaagtgtagattgccgtgcctgcctgatccgtaatttctactaagtgtagattcgaaggacaatagatgatgtaatttctactaagtgtagatttttttnnnnnnnnnnaagcttggcgtggatccgatatcaactagatcttgagacaaatggcagtattcatccacaattttaaaagaaaaggggggattggggggtacagtgcaggggaaagaatagtagacataatagcaacagacatacaaactaaag

SEQ ID NO: 13106 - DNA, 301 bp, Artificial Sequence
  Trim72.1_Brca2.1
  crRNA array
  misc_feature (148)..(157): n is a, c, g, or t
cttggctttatatatcttgtggaaaggacgaaacaccgtaatttctactaagtgtagataccccagctctgcgcacccgtaatttctactaagtgtagatctaagcgtagaaccagaaattaatttctactaagtgtagatttttttnnnnnnnnnnaagcttggcgtggatccgatatcaactagatcttgagacaaatggcagtattcatccacaattttaaaagaaaaggggggattggggggtacagtgcaggggaaagaatagtagacataatagcaacagacatacaaactaaag

SEQ ID NO: 13107 - DNA, 301 bp, Artificial Sequence
  Trim72.1_Brca2.2
  crRNA array
  misc_feature (148)..(157): n is a, c, g, or t
cttggctttatatatcttgtggaaaggacgaaacaccgtaatttctactaagtgtagataccccagctctgcgcacccgtaatttctactaagtgtagatgatccaggtgtaacaagccataatttctactaagtgtagatttttttnnnnnnnnnnaagcttggcgtggatccgatatcaactagatcttgagacaaatggcagtattcatccacaattttaaaagaaaaggggggattggggggtacagtgcaggggaaagaatagtagacataatagcaacagacatacaaactaaag

SEQ ID NO: 13108 - DNA, 301 bp, Artificial Sequence
  Trim72.1_Brca2.3
  crRNA array
  misc_feature (148)..(157): n is a, c, g, or t
cttggctttatatatcttgtggaaaggacgaaacaccgtaatttctactaagtgtagataccccagctctgcgcacccgtaatttctactaagtgtagattgaatataaactgggccacttaatttctactaagtgtagatttttttnnnnnnnnnnaagcttggcgtggatccgatatcaactagatcttgagacaaatggcagtattcatccacaattttaaaagaaaaggggggattggggggtacagtgcaggggaaagaatagtagacataatagcaacagacatacaaactaaag

SEQ ID NO: 13109 - DNA, 301 bp, Artificial Sequence
  Trim72.1_Brca2.4
  crRNA array
  misc_feature (148)..(157): n is a, c, g, or t
cttggctttatatatcttgtggaaaggacgaaacaccgtaatttctactaagtgtagataccccagctctgcgcacccgtaatttctactaagtgtagatgaaacgccgtatatatagagtaatttctactaagtgtagatttttttnnnnnnnnnnaagcttggcgtggatccgatatcaactagatcttgagacaaatggcagtattcatccacaattttaaaagaaaaggggggattggggggtacagtgcaggggaaagaatagtagacataatagcaacagacatacaaactaaag

SEQ ID NO: 13110 - DNA, 301 bp, Artificial Sequence
  Trim72.2_Brca2.1
  crRNA array
  misc_feature (148)..(157): n is a, c, g, or t
cttggctttatatatcttgtggaaaggacgaaacaccgtaatttctactaagtgtagatcacgagcgtctgcccgggcctaatttctactaagtgtagatctaagcgtagaaccagaaattaatttctactaagtgtagatttttttnnnnnnnnnnaagcttggcgtggatccgatatcaactagatcttgagacaaatggcagtattcatccacaattttaaaagaaaaggggggattggggggtacagtgcaggggaaagaatagtagacataatagcaacagacatacaaactaaag

SEQ ID NO: 13111 - DNA, 301 bp, Artificial Sequence
  Trim72.2_Brca2.2
  crRNA array
  misc_feature (148)..(157): n is a, c, g, or t
cttggctttatatatcttgtggaaaggacgaaacaccgtaatttctactaagtgtagatcacgagcgtctgcccgggcctaatttctactaagtgtagatgatccaggtgtaacaagccataatttctactaagtgtagatttttttnnnnnnnnnnaagcttggcgtggatccgatatcaactagatcttgagacaaatggcagtattcatccacaattttaaaagaaaaggggggattggggggtacagtgcaggggaaagaatagtagacataatagcaacagacatacaaactaaag

SEQ ID NO: 13112 - DNA, 301 bp, Artificial Sequence
  Trim72.2_Brca2.3
  crRNA array
  misc_feature (148)..(157): n is a, c, g, or t
cttggctttatatatcttgtggaaaggacgaaacaccgtaatttctactaagtgtagatcacgagcgtctgcccgggcctaatttctactaagtgtagattgaatataaactgggccacttaatttctactaagtgtagatttttttnnnnnnnnnnaagcttggcgtggatccgatatcaactagatcttgagacaaatggcagtattcatccacaattttaaaagaaaaggggggattggggggtacagtgcaggggaaagaatagtagacataatagcaacagacatacaaactaaag

SEQ ID NO: 13113 - DNA, 301 bp, Artificial Sequence
  Trim72.2_Brca2.4
  crRNA array
  misc_feature (148)..(157): n is a, c, g, or t
cttggctttatatatcttgtggaaaggacgaaacaccgtaatttctactaagtgtagatcacgagcgtctgcccgggcctaatttctactaagtgtagatgaaacgccgtatatatagagtaatttctactaagtgtagatttttttnnnnnnnnnnaagcttggcgtggatccgatatcaactagatcttgagacaaatggcagtattcatccacaattttaaaagaaaaggggggattggggggtacagtgcaggggaaagaatagtagacataatagcaacagacatacaaactaaag

SEQ ID NO: 13114 - DNA, 301 bp, Artificial Sequence
  Trim72.3_Brca2.1
  crRNA array
  misc_feature (148)..(157): n is a, c, g, or t
cttggctttatatatcttgtggaaaggacgaaacaccgtaatttctactaagtgtagatacgtgtgctggcacgacaagtaatttctactaagtgtagatctaagcgtagaaccagaaattaatttctactaagtgtagatttttttnnnnnnnnnnaagcttggcgtggatccgatatcaactagatcttgagacaaatggcagtattcatccacaattttaaaagaaaaggggggattggggggtacagtgcaggggaaagaatagtagacataatagcaacagacatacaaactaaag

SEQ ID NO: 13115 - DNA, 301 bp, Artificial Sequence
  Trim72.3_Brca2.2
  crRNA array
  misc_feature (148)..(157): n is a, c, g, or t
cttggctttatatatcttgtggaaaggacgaaacaccgtaatttctactaagtgtagatacgtgtgctggcacgacaagtaatttctactaagtgtagatgatccaggtgtaacaagccataatttctactaagtgtagatttttttnnnnnnnnnnaagcttggcgtggatccgatatcaactagatcttgagacaaatggcagtattcatccacaattttaaaagaaaaggggggattggggggtacagtgcaggggaaagaatagtagacataatagcaacagacatacaaactaaag

SEQ ID NO: 13116 - DNA, 301 bp, Artificial Sequence
  Trim72.3_Brca2.3
  crRNA array
  misc_feature (148)..(157): n is a, c, g, or t
cttggctttatatatcttgtggaaaggacgaaacaccgtaatttctactaagtgtagatacgtgtgctggcacgacaagtaatttctactaagtgtagattgaatataaactgggccacttaatttctactaagtgtagatttttttnnnnnnnnnnaagcttggcgtggatccgatatcaactagatcttgagacaaatggcagtattcatccacaattttaaaagaaaaggggggattggggggtacagtgcaggggaaagaatagtagacataatagcaacagacatacaaactaaag

SEQ ID NO: 13117 - DNA, 301 bp, Artificial Sequence
  Trim72.3_Brca2.4
  crRNA array
  misc_feature (148)..(157): n is a, c, g, or t
cttggctttatatatcttgtggaaaggacgaaacaccgtaatttctactaagtgtagatacgtgtgctggcacgacaagtaatttctactaagtgtagatgaaacgccgtatatatagagtaatttctactaagtgtagatttttttnnnnnnnnnnaagcttggcgtggatccgatatcaactagatcttgagacaaatggcagtattcatccacaattttaaaagaaaaggggggattggggggtacagtgcaggggaaagaatagtagacataatagcaacagacatacaaactaaag

SEQ ID NO: 13118 - DNA, 301 bp, Artificial Sequence
  Trim72.4_Brca2.1
  crRNA array
  misc_feature (148)..(157): n is a, c, g, or t
cttggctttatatatcttgtggaaaggacgaaacaccgtaatttctactaagtgtagattgccgtgcctgcctgatccgtaatttctactaagtgtagatctaagcgtagaaccagaaattaatttctactaagtgtagatttttttnnnnnnnnnnaagcttggcgtggatccgatatcaactagatcttgagacaaatggcagtattcatccacaattttaaaagaaaaggggggattggggggtacagtgcaggggaaagaatagtagacataatagcaacagacatacaaactaaag

SEQ ID NO: 13119 - DNA, 301 bp, Artificial Sequence
  Trim72.4_Brca2.2
  crRNA array
  misc_feature (148)..(157): n is a, c, g, or t
cttggctttatatatcttgtggaaaggacgaaacaccgtaatttctactaagtgtagattgccgtgcctgcctgatccgtaatttctactaagtgtagatgatccaggtgtaacaagccataatttctactaagtgtagatttttttnnnnnnnnnnaagcttggcgtggatccgatatcaactagatcttgagacaaatggcagtattcatccacaattttaaaagaaaaggggggattggggggtacagtgcaggggaaagaatagtagacataatagcaacagacatacaaactaaag

SEQ ID NO: 13120 - DNA, 301 bp, Artificial Sequence
  Trim72.4_Brca2.3
  crRNA array
  misc_feature (148)..(157): n is a, c, g, or t
cttggctttatatatcttgtggaaaggacgaaacaccgtaatttctactaagtgtagattgccgtgcctgcctgatccgtaatttctactaagtgtagattgaatataaactgggccacttaatttctactaagtgtagatttttttnnnnnnnnnnaagcttggcgtggatccgatatcaactagatcttgagacaaatggcagtattcatccacaattttaaaagaaaaggggggattggggggtacagtgcaggggaaagaatagtagacataatagcaacagacatacaaactaaag

SEQ ID NO: 13121 - DNA, 301 bp, Artificial Sequence
  Trim72.4_Brca2.4
  crRNA array
  misc_feature (148)..(157): n is a, c, g, or t
cttggctttatatatcttgtggaaaggacgaaacaccgtaatttctactaagtgtagattgccgtgcctgcctgatccgtaatttctactaagtgtagatgaaacgccgtatatatagagtaatttctactaagtgtagatttttttnnnnnnnnnnaagcttggcgtggatccgatatcaactagatcttgagacaaatggcagtattcatccacaattttaaaagaaaaggggggattggggggtacagtgcaggggaaagaatagtagacataatagcaacagacatacaaactaaag

SEQ ID NO: 13122 - DNA, 301 bp, Artificial Sequence
  Trim72.1_Apc.1
  crRNA array
  misc_feature (148)..(157): n is a, c, g, or t
cttggctttatatatcttgtggaaaggacgaaacaccgtaatttctactaagtgtagataccccagctctgcgcacccgtaatttctactaagtgtagatgtgatccacacgtgtagctgtaatttctactaagtgtagatttttttnnnnnnnnnnaagcttggcgtggatccgatatcaactagatcttgagacaaatggcagtattcatccacaattttaaaagaaaaggggggattggggggtacagtgcaggggaaagaatagtagacataatagcaacagacatacaaactaaag

SEQ ID NO: 13123 - DNA, 301 bp, Artificial Sequence
  Trim72.1_Apc.2
  crRNA array
  misc_feature (148)..(157): n is a, c, g, or t
cttggctttatatatcttgtggaaaggacgaaacaccgtaatttctactaagtgtagataccccagctctgcgcacccgtaatttctactaagtgtagatcatctgctcgccaagacaaataatttctactaagtgtagatttttttnnnnnnnnnnaagcttggcgtggatccgatatcaactagatcttgagacaaatggcagtattcatccacaattttaaaagaaaaggggggattggggggtacagtgcaggggaaagaatagtagacataatagcaacagacatacaaactaaag

SEQ ID NO: 13124 - DNA, 301 bp, Artificial Sequence
  Trim72.1_Apc.3
  crRNA array
  misc_feature (148)..(157): n is a, c, g, or t
cttggctttatatatcttgtggaaaggacgaaacaccgtaatttctactaagtgtagataccccagctctgcgcacccgtaatttctactaagtgtagatacgccaatcgacatgatgattaatttctactaagtgtagatttttttnnnnnnnnnnaagcttggcgtggatccgatatcaactagatcttgagacaaatggcagtattcatccacaattttaaaagaaaaggggggattggggggtacagtgcaggggaaagaatagtagacataatagcaacagacatacaaactaaag

SEQ ID NO: 13125 - DNA, 301 bp, Artificial Sequence
  Trim72.1_Apc.4
  crRNA array
  misc_feature (148)..(157): n is a, c, g, or t
cttggctttatatatcttgtggaaaggacgaaacaccgtaatttctactaagtgtagataccccagctctgcgcacccgtaatttctactaagtgtagatcaccaggggatgatgtgccctaatttctactaagtgtagatttttttnnnnnnnnnnaagcttggcgtggatccgatatcaactagatcttgagacaaatggcagtattcatccacaattttaaaagaaaaggggggattggggggtacagtgcaggggaaagaatagtagacataatagcaacagacatacaaactaaag

SEQ ID NO: 13126 - DNA, 301 bp, Artificial Sequence
  Trim72.2_Apc.1
  crRNA array
  misc_feature (148)..(157): n is a, c, g, or t
cttggctttatatatcttgtggaaaggacgaaacaccgtaatttctactaagtgtagatcacgagcgtctgcccgggcctaatttctactaagtgtagatgtgatccacacgtgtagctgtaatttctactaagtgtagatttttttnnnnnnnnnnaagcttggcgtggatccgatatcaactagatcttgagacaaatggcagtattcatccacaattttaaaagaaaaggggggattggggggtacagtgcaggggaaagaatagtagacataatagcaacagacatacaaactaaag

SEQ ID NO: 13127 - DNA, 301 bp, Artificial Sequence
  Trim72.2_Apc.2
  crRNA array
  misc_feature (148)..(157): n is a, c, g, or t
cttggctttatatatcttgtggaaaggacgaaacaccgtaatttctactaagtgtagatcacgagcgtctgcccgggcctaatttctactaagtgtagatcatctgctcgccaagacaaataatttctactaagtgtagatttttttnnnnnnnnnnaagcttggcgtggatccgatatcaactagatcttgagacaaatggcagtattcatccacaattttaaaagaaaaggggggattggggggtacagtgcaggggaaagaatagtagacataatagcaacagacatacaaactaaag

SEQ ID NO: 13128 - DNA, 301 bp, Artificial Sequence
  Trim72.2_Apc.3
  crRNA array
  misc_feature (148)..(157): n is a, c, g, or t
cttggctttatatatcttgtggaaaggacgaaacaccgtaatttctactaagtgtagatcacgagcgtctgcccgggcctaatttctactaagtgtagatacgccaatcgacatgatgattaatttctactaagtgtagatttttttnnnnnnnnnnaagcttggcgtggatccgatatcaactagatcttgagacaaatggcagtattcatccacaattttaaaagaaaaggggggattggggggtacagtgcaggggaaagaatagtagacataatagcaacagacatacaaactaaag

SEQ ID NO: 13129 - DNA, 301 bp, Artificial Sequence
  Trim72.2_Apc.4
  crRNA array
  misc_feature (148)..(157): n is a, c, g, or t
cttggctttatatatcttgtggaaaggacgaaacaccgtaatttctactaagtgtagatcacgagcgtctgcccgggcctaatttctactaagtgtagatcaccaggggatgatgtgccctaatttctactaagtgtagatttttttnnnnnnnnnnaagcttggcgtggatccgatatcaactagatcttgagacaaatggcagtattcatccacaattttaaaagaaaaggggggattggggggtacagtgcaggggaaagaatagtagacataatagcaacagacatacaaactaaag

SEQ ID NO: 13130 - DNA, 301 bp, Artificial Sequence
  Trim72.3_Apc.1
  crRNA array
  misc_feature (148)..(157): n is a, c, g, or t
cttggctttatatatcttgtggaaaggacgaaacaccgtaatttctactaagtgtagatacgtgtgctggcacgacaagtaatttctactaagtgtagatgtgatccacacgtgtagctgtaatttctactaagtgtagatttttttnnnnnnnnnnaagcttggcgtggatccgatatcaactagatcttgagacaaatggcagtattcatccacaattttaaaagaaaaggggggattggggggtacagtgcaggggaaagaatagtagacataatagcaacagacatacaaactaaag

SEQ ID NO: 13131 - DNA, 301 bp, Artificial Sequence
  Trim72.3_Apc.2
  crRNA array
  misc_feature (148)..(157): n is a, c, g, or t
cttggctttatatatcttgtggaaaggacgaaacaccgtaatttctactaagtgtagatacgtgtgctggcacgacaagtaatttctactaagtgtagatcatctgctcgccaagacaaataatttctactaagtgtagatttttttnnnnnnnnnnaagcttggcgtggatccgatatcaactagatcttgagacaaatggcagtattcatccacaattttaaaagaaaaggggggattggggggtacagtgcaggggaaagaatagtagacataatagcaacagacatacaaactaaag

SEQ ID NO: 13132 - DNA, 301 bp, Artificial Sequence
  Trim72.3_Apc.3
  crRNA array
  misc_feature (148)..(157): n is a, c, g, or t
cttggctttatatatcttgtggaaaggacgaaacaccgtaatttctactaagtgtagatacgtgtgctggcacgacaagtaatttctactaagtgtagatacgccaatcgacatgatgattaatttctactaagtgtagatttttttnnnnnnnnnnaagcttggcgtggatccgatatcaactagatcttgagacaaatggcagtattcatccacaattttaaaagaaaaggggggattggggggtacagtgcaggggaaagaatagtagacataatagcaacagacatacaaactaaag

SEQ ID NO: 13133 - DNA, 301 bp, Artificial Sequence
  Trim72.3_Apc.4
  crRNA array
  misc_feature (148)..(157): n is a, c, g, or t
cttggctttatatatcttgtggaaaggacgaaacaccgtaatttctactaagtgtagatacgtgtgctggcacgacaagtaatttctactaagtgtagatcaccaggggatgatgtgccctaatttctactaagtgtagatttttttnnnnnnnnnnaagcttggcgtggatccgatatcaactagatcttgagacaaatggcagtattcatccacaattttaaaagaaaaggggggattggggggtacagtgcaggggaaagaatagtagacataatagcaacagacatacaaactaaag

SEQ ID NO: 13134 - DNA, 301 bp, Artificial Sequence
  Trim72.4_Apc.1
  crRNA array
  misc_feature (148)..(157): n is a, c, g, or t
cttggctttatatatcttgtggaaaggacgaaacaccgtaatttctactaagtgtagattgccgtgcctgcctgatccgtaatttctactaagtgtagatgtgatccacacgtgtagctgtaatttctactaagtgtagatttttttnnnnnnnnnnaagcttggcgtggatccgatatcaactagatcttgagacaaatggcagtattcatccacaattttaaaagaaaaggggggattggggggtacagtgcaggggaaagaatagtagacataatagcaacagacatacaaactaaag

SEQ ID NO: 13135 - DNA, 301 bp, Artificial Sequence
  Trim72.4_Apc.2
  crRNA array
  misc_feature (148)..(157): n is a, c, g, or t
cttggctttatatatcttgtggaaaggacgaaacaccgtaatttctactaagtgtagattgccgtgcctgcctgatccgtaatttctactaagtgtagatcatctgctcgccaagacaaataatttctactaagtgtagatttttttnnnnnnnnnnaagcttggcgtggatccgatatcaactagatcttgagacaaatggcagtattcatccacaattttaaaagaaaaggggggattggggggtacagtgcaggggaaagaatagtagacataatagcaacagacatacaaactaaag

SEQ ID NO: 13136 - DNA, 301 bp, Artificial Sequence
  Trim72.4_Apc.3
  crRNA array
  misc_feature (148)..(157): n is a, c, g, or t
cttggctttatatatcttgtggaaaggacgaaacaccgtaatttctactaagtgtagattgccgtgcctgcctgatccgtaatttctactaagtgtagatacgccaatcgacatgatgattaatttctactaagtgtagatttttttnnnnnnnnnnaagcttggcgtggatccgatatcaactagatcttgagacaaatggcagtattcatccacaattttaaaagaaaaggggggattggggggtacagtgcaggggaaagaatagtagacataatagcaacagacatacaaactaaag

SEQ ID NO: 13137 - DNA, 301 bp, Artificial Sequence
  Trim72.4_Apc.4
  crRNA array
  misc_feature (148)..(157): n is a, c, g, or t
cttggctttatatatcttgtggaaaggacgaaacaccgtaatttctactaagtgtagattgccgtgcctgcctgatccgtaatttctactaagtgtagatcaccaggggatgatgtgccctaatttctactaagtgtagatttttttnnnnnnnnnnaagcttggcgtggatccgatatcaactagatcttgagacaaatggcagtattcatccacaattttaaaagaaaaggggggattggggggtacagtgcaggggaaagaatagtagacataatagcaacagacatacaaactaaag

SEQ ID NO: 13138 - DNA, 301 bp, Artificial Sequence
  Trim72.1_Fanca.1
  crRNA array
  misc_feature (148)..(157): n is a, c, g, or t
cttggctttatatatcttgtggaaaggacgaaacaccgtaatttctactaagtgtagataccccagctctgcgcacccgtaatttctactaagtgtagatggaggccccggggcccaccataatttctactaagtgtagatttttttnnnnnnnnnnaagcttggcgtggatccgatatcaactagatcttgagacaaatggcagtattcatccacaattttaaaagaaaaggggggattggggggtacagtgcaggggaaagaatagtagacataatagcaacagacatacaaactaaag

SEQ ID NO: 13139 - DNA, 301 bp, Artificial Sequence
  Trim72.1_Fanca.2
  crRNA array
  misc_feature (148)..(157): n is a, c, g, or t
cttggctttatatatcttgtggaaaggacgaaacaccgtaatttctactaagtgtagataccccagctctgcgcacccgtaatttctactaagtgtagatagagctaccacctagacagctaatttctactaagtgtagatttttttnnnnnnnnnnaagcttggcgtggatccgatatcaactagatcttgagacaaatggcagtattcatccacaattttaaaagaaaaggggggattggggggtacagtgcaggggaaagaatagtagacataatagcaacagacatacaaactaaag

SEQ ID NO: 13140 - DNA, 301 bp, Artificial Sequence
  Trim72.1_Fanca.3
  crRNA array
  misc_feature (148)..(157): n is a, c, g, or t
cttggctttatatatcttgtggaaaggacgaaacaccgtaatttctactaagtgtagataccccagctctgcgcacccgtaatttctactaagtgtagataccaactgctgtgcctcgggtaatttctactaagtgtagatttttttnnnnnnnnnnaagcttggcgtggatccgatatcaactagatcttgagacaaatggcagtattcatccacaattttaaaagaaaaggggggattggggggtacagtgcaggggaaagaatagtagacataatagcaacagacatacaaactaaag

SEQ ID NO: 13141 - DNA, 301 bp, Artificial Sequence
  Trim72.1_Fanca.4
  crRNA array
  misc_feature (148)..(157): n is a, c, g, or t
cttggctttatatatcttgtggaaaggacgaaacaccgtaatttctactaagtgtagataccccagctctgcgcacccgtaatttctactaagtgtagatcacccacccctggtgccaagtaatttctactaagtgtagatttttttnnnnnnnnnnaagcttggcgtggatccgatatcaactagatcttgagacaaatggcagtattcatccacaattttaaaagaaaaggggggattggggggtacagtgcaggggaaagaatagtagacataatagcaacagacatacaaactaaag

SEQ ID NO: 13142 - DNA, 301 bp, Artificial Sequence
  Trim72.2_Fanca.1
  crRNA array
  misc_feature (148)..(157): n is a, c, g, or t
cttggctttatatatcttgtggaaaggacgaaacaccgtaatttctactaagtgtagatcacgagcgtctgcccgggcctaatttctactaagtgtagatggaggccccggggcccaccataatttctactaagtgtagatttttttnnnnnnnnnnaagcttggcgtggatccgatatcaactagatcttgagacaaatggcagtattcatccacaattttaaaagaaaaggggggattggggggtacagtgcaggggaaagaatagtagacataatagcaacagacatacaaactaaag

SEQ ID NO: 13143 - DNA, 301 bp, Artificial Sequence
  Trim72.2_Fanca.2
  crRNA array
  misc_feature (148)..(157): n is a, c, g, or t
cttggctttatatatcttgtggaaaggacgaaacaccgtaatttctactaagtgtagatcacgagcgtctgcccgggcctaatttctactaagtgtagatagagctaccacctagacagctaatttctactaagtgtagatttttttnnnnnnnnnnaagcttggcgtggatccgatatcaactagatcttgagacaaatggcagtattcatccacaattttaaaagaaaaggggggattggggggtacagtgcaggggaaagaatagtagacataatagcaacagacatacaaactaaag

SEQ ID NO: 13144 - DNA, 301 bp, Artificial Sequence
  Trim72.2_Fanca.3
  crRNA array
  misc_feature (148)..(157): n is a, c, g, or t
cttggctttatatatcttgtggaaaggacgaaacaccgtaatttctactaagtgtagatcacgagcgtctgcccgggcctaatttctactaagtgtagataccaactgctgtgcctcgggtaatttctactaagtgtagatttttttnnnnnnnnnnaagcttggcgtggatccgatatcaactagatcttgagacaaatggcagtattcatccacaattttaaaagaaaaggggggattggggggtacagtgcaggggaaagaatagtagacataatagcaacagacatacaaactaaag

SEQ ID NO: 13145 - DNA, 301 bp, Artificial Sequence
  Trim72.2_Fanca.4
  crRNA array
  misc_feature (148)..(157): n is a, c, g, or t
cttggctttatatatcttgtggaaaggacgaaacaccgtaatttctactaagtgtagatcacgagcgtctgcccgggcctaatttctactaagtgtagatcacccacccctggtgccaagtaatttctactaagtgtagatttttttnnnnnnnnnnaagcttggcgtggatccgatatcaactagatcttgagacaaatggcagtattcatccacaattttaaaagaaaaggggggattggggggtacagtgcaggggaaagaatagtagacataatagcaacagacatacaaactaaag

SEQ ID NO: 13146 - DNA, 301 bp, Artificial Sequence
  Trim72.3_Fanca.1
  crRNA array
  misc_feature (148)..(157): n is a, c, g, or t
cttggctttatatatcttgtggaaaggacgaaacaccgtaatttctactaagtgtagatacgtgtgctggcacgacaagtaatttctactaagtgtagatggaggccccggggcccaccataatttctactaagtgtagatttttttnnnnnnnnnnaagcttggcgtggatccgatatcaactagatcttgagacaaatggcagtattcatccacaattttaaaagaaaaggggggattggggggtacagtgcaggggaaagaatagtagacataatagcaacagacatacaaactaaag

SEQ ID NO: 13147 - DNA, 301 bp, Artificial Sequence
  Trim72.3_Fanca.2
  crRNA array
  misc_feature (148)..(157): n is a, c, g, or t
cttggctttatatatcttgtggaaaggacgaaacaccgtaatttctactaagtgtagatacgtgtgctggcacgacaagtaatttctactaagtgtagatagagctaccacctagacagctaatttctactaagtgtagatttttttnnnnnnnnnnaagcttggcgtggatccgatatcaactagatcttgagacaaatggcagtattcatccacaattttaaaagaaaaggggggattggggggtacagtgcaggggaaagaatagtagacataatagcaacagacatacaaactaaag

SEQ ID NO: 13148 - DNA, 301 bp, Artificial Sequence
  Trim72.3_Fanca.3
  crRNA array
  misc_feature (148)..(157): n is a, c, g, or t
cttggctttatatatcttgtggaaaggacgaaacaccgtaatttctactaagtgtagatacgtgtgctggcacgacaagtaatttctactaagtgtagataccaactgctgtgcctcgggtaatttctactaagtgtagatttttttnnnnnnnnnnaagcttggcgtggatccgatatcaactagatcttgagacaaatggcagtattcatccacaattttaaaagaaaaggggggattggggggtacagtgcaggggaaagaatagtagacataatagcaacagacatacaaactaaag

SEQ ID NO: 13149 - DNA, 301 bp, Artificial Sequence
  Trim72.3_Fanca.4
  crRNA array
  misc_feature (148)..(157): n is a, c, g, or t
cttggctttatatatcttgtggaaaggacgaaacaccgtaatttctactaagtgtagatacgtgtgctggcacgacaagtaatttctactaagtgtagatcacccacccctggtgccaagtaatttctactaagtgtagatttttttnnnnnnnnnnaagcttggcgtggatccgatatcaactagatcttgagacaaatggcagtattcatccacaattttaaaagaaaaggggggattggggggtacagtgcaggggaaagaatagtagacataatagcaacagacatacaaactaaag

SEQ ID NO: 13150 - DNA, 301 bp, Artificial Sequence
  Trim72.4_Fanca.1
  crRNA array
  misc_feature (148)..(157): n is a, c, g, or t
cttggctttatatatcttgtggaaaggacgaaacaccgtaatttctactaagtgtagattgccgtgcctgcctgatccgtaatttctactaagtgtagatggaggccccggggcccaccataatttctactaagtgtagatttttttnnnnnnnnnnaagcttggcgtggatccgatatcaactagatcttgagacaaatggcagtattcatccacaattttaaaagaaaaggggggattggggggtacagtgcaggggaaagaatagtagacataatagcaacagacatacaaactaaag

SEQ ID NO: 13151 - DNA, 301 bp, Artificial Sequence
  Trim72.4_Fanca.2
  crRNA array
  misc_feature (148)..(157): n is a, c, g, or t
cttggctttatatatcttgtggaaaggacgaaacaccgtaatttctactaagtgtagattgccgtgcctgcctgatccgtaatttctactaagtgtagatagagctaccacctagacagctaatttctactaagtgtagatttttttnnnnnnnnnnaagcttggcgtggatccgatatcaactagatcttgagacaaatggcagtattcatccacaattttaaaagaaaaggggggattggggggtacagtgcaggggaaagaatagtagacataatagcaacagacatacaaactaaag

SEQ ID NO: 13152 - DNA, 301 bp, Artificial Sequence
  Trim72.4_Fanca.3
  crRNA array
  misc_feature (148)..(157): n is a, c, g, or t
cttggctttatatatcttgtggaaaggacgaaacaccgtaatttctactaagtgtagattgccgtgcctgcctgatccgtaatttctactaagtgtagataccaactgctgtgcctcgggtaatttctactaagtgtagatttttttnnnnnnnnnnaagcttggcgtggatccgatatcaactagatcttgagacaaatggcagtattcatccacaattttaaaagaaaaggggggattggggggtacagtgcaggggaaagaatagtagacataatagcaacagacatacaaactaaag

SEQ ID NO: 13153 - DNA, 301 bp, Artificial Sequence
  Trim72.4_Fanca.4
  crRNA array
  misc_feature (148)..(157): n is a, c, g, or t
cttggctttatatatcttgtggaaaggacgaaacaccgtaatttctactaagtgtagattgccgtgcctgcctgatccgtaatttctactaagtgtagatcacccacccctggtgccaagtaatttctactaagtgtagatttttttnnnnnnnnnnaagcttggcgtggatccgatatcaactagatcttgagacaaatggcagtattcatccacaattttaaaagaaaaggggggattggggggtacagtgcaggggaaagaatagtagacataatagcaacagacatacaaactaaag

SEQ ID NO: 13154 - DNA, 301 bp, Artificial Sequence
  Trim72.1_Nf1.1
  crRNA array
  misc_feature (148)..(157): n is a, c, g, or t
cttggctttatatatcttgtggaaaggacgaaacaccgtaatttctactaagtgtagataccccagctctgcgcacccgtaatttctactaagtgtagattggcgatccggaatcctctgtaatttctactaagtgtagatttttttnnnnnnnnnnaagcttggcgtggatccgatatcaactagatcttgagacaaatggcagtattcatccacaattttaaaagaaaaggggggattggggggtacagtgcaggggaaagaatagtagacataatagcaacagacatacaaactaaag

SEQ ID NO: 13155 - DNA, 301 bp, Artificial Sequence
  Trim72.1_Nf1.2
  crRNA array
  misc_feature (148)..(157): n is a, c, g, or t
cttggctttatatatcttgtggaaaggacgaaacaccgtaatttctactaagtgtagataccccagctctgcgcacccgtaatttctactaagtgtagatggaaacacaacgctggcctctaatttctactaagtgtagatttttttnnnnnnnnnnaagcttggcgtggatccgatatcaactagatcttgagacaaatggcagtattcatccacaattttaaaagaaaaggggggattggggggtacagtgcaggggaaagaatagtagacataatagcaacagacatacaaactaaag

SEQ ID NO: 13156 - DNA, 301 bp, Artificial Sequence
  Trim72.1_Nf1.3
  crRNA array
  misc_feature (148)..(157): n is a, c, g, or t
cttggctttatatatcttgtggaaaggacgaaacaccgtaatttctactaagtgtagataccccagctctgcgcacccgtaatttctactaagtgtagataatgatggaacgcagtcgcataatttctactaagtgtagatttttttnnnnnnnnnnaagcttggcgtggatccgatatcaactagatcttgagacaaatggcagtattcatccacaattttaaaagaaaaggggggattggggggtacagtgcaggggaaagaatagtagacataatagcaacagacatacaaactaaag

SEQ ID NO: 13157 - DNA, 301 bp, Artificial Sequence
  Trim72.1_Nf1.4
  crRNA array
  misc_feature (148)..(157): n is a, c, g, or t
cttggctttatatatcttgtggaaaggacgaaacaccgtaatttctactaagtgtagataccccagctctgcgcacccgtaatttctactaagtgtagattgcaaaaccatccaccaagttaatttctactaagtgtagatttttttnnnnnnnnnnaagcttggcgtggatccgatatcaactagatcttgagacaaatggcagtattcatccacaattttaaaagaaaaggggggattggggggtacagtgcaggggaaagaatagtagacataatagcaacagacatacaaactaaag

SEQ ID NO: 13158 - DNA, 301 bp, Artificial Sequence
  Trim72.2_Nf1.1
  crRNA array
  misc_feature (148)..(157): n is a, c, g, or t
cttggctttatatatcttgtggaaaggacgaaacaccgtaatttctactaagtgtagatcacgagcgtctgcccgggcctaatttctactaagtgtagattggcgatccggaatcctctgtaatttctactaagtgtagatttttttnnnnnnnnnnaagcttggcgtggatccgatatcaactagatcttgagacaaatggcagtattcatccacaattttaaaagaaaaggggggattggggggtacagtgcaggggaaagaatagtagacataatagcaacagacatacaaactaaag

SEQ ID NO: 13159 - DNA, 301 bp, Artificial Sequence
  Trim72.2_Nf1.2
  crRNA array
  misc_feature (148)..(157): n is a, c, g, or t
cttggctttatatatcttgtggaaaggacgaaacaccgtaatttctactaagtgtagatcacgagcgtctgcccgggcctaatttctactaagtgtagatggaaacacaacgctggcctctaatttctactaagtgtagatttttttnnnnnnnnnnaagcttggcgtggatccgatatcaactagatcttgagacaaatggcagtattcatccacaattttaaaagaaaaggggggattggggggtacagtgcaggggaaagaatagtagacataatagcaacagacatacaaactaaag

SEQ ID NO: 13160 - DNA, 301 bp, Artificial Sequence
  Trim72.2_Nf1.3
  crRNA array
  misc_feature (148)..(157): n is a, c, g, or t
cttggctttatatatcttgtggaaaggacgaaacaccgtaatttctactaagtgtagatcacgagcgtctgcccgggcctaatttctactaagtgtagataatgatggaacgcagtcgcataatttctactaagtgtagatttttttnnnnnnnnnnaagcttggcgtggatccgatatcaactagatcttgagacaaatggcagtattcatccacaattttaaaagaaaaggggggattggggggtacagtgcaggggaaagaatagtagacataatagcaacagacatacaaactaaag

SEQ ID NO: 13161 - DNA, 301 bp, Artificial Sequence
  Trim72.2_Nf1.4
  crRNA array
  misc_feature (148)..(157): n is a, c, g, or t
cttggctttatatatcttgtggaaaggacgaaacaccgtaatttctactaagtgtagatcacgagcgtctgcccgggcctaatttctactaagtgtagattgcaaaaccatccaccaagttaatttctactaagtgtagatttttttnnnnnnnnnnaagcttggcgtggatccgatatcaactagatcttgagacaaatggcagtattcatccacaattttaaaagaaaaggggggattggggggtacagtgcaggggaaagaatagtagacataatagcaacagacatacaaactaaag

SEQ ID NO: 13162 - DNA, 301 bp, Artificial Sequence
  Trim72.3_Nf1.1
  crRNA array
  misc_feature (148)..(157): n is a, c, g, or t
cttggctttatatatcttgtggaaaggacgaaacaccgtaatttctactaagtgtagatacgtgtgctggcacgacaagtaatttctactaagtgtagattggcgatccggaatcctctgtaatttctactaagtgtagatttttttnnnnnnnnnnaagcttggcgtggatccgatatcaactagatcttgagacaaatggcagtattcatccacaattttaaaagaaaaggggggattggggggtacagtgcaggggaaagaatagtagacataatagcaacagacatacaaactaaag

SEQ ID NO: 13163 - DNA, 301 bp, Artificial Sequence
  Trim72.3_Nf1.2
  crRNA array
  misc_feature (148)..(157): n is a, c, g, or t
cttggctttatatatcttgtggaaaggacgaaacaccgtaatttctactaagtgtagatacgtgtgctggcacgacaagtaatttctactaagtgtagatggaaacacaacgctggcctctaatttctactaagtgtagatttttttnnnnnnnnnnaagcttggcgtggatccgatatcaactagatcttgagacaaatggcagtattcatccacaattttaaaagaaaaggggggattggggggtacagtgcaggggaaagaatagtagacataatagcaacagacatacaaactaaag

SEQ ID NO: 13164 - DNA, 301 bp, Artificial Sequence
  Trim72.3_Nf1.3
  crRNA array
  misc_feature (148)..(157): n is a, c, g, or t
cttggctttatatatcttgtggaaaggacgaaacaccgtaatttctactaagtgtagatacgtgtgctggcacgacaagtaatttctactaagtgtagataatgatggaacgcagtcgcataatttctactaagtgtagatttttttnnnnnnnnnnaagcttggcgtggatccgatatcaactagatcttgagacaaatggcagtattcatccacaattttaaaagaaaaggggggattggggggtacagtgcaggggaaagaatagtagacataatagcaacagacatacaaactaaag

SEQ ID NO: 13165 - DNA, 301 bp, Artificial Sequence
  Trim72.3_Nf1.4
  crRNA array
  misc_feature (148)..(157): n is a, c, g, or t
cttggctttatatatcttgtggaaaggacgaaacaccgtaatttctactaagtgtagatacgtgtgctggcacgacaagtaatttctactaagtgtagattgcaaaaccatccaccaagttaatttctactaagtgtagatttttttnnnnnnnnnnaagcttggcgtggatccgatatcaactagatcttgagacaaatggcagtattcatccacaattttaaaagaaaaggggggattggggggtacagtgcaggggaaagaatagtagacataatagcaacagacatacaaactaaag

SEQ ID NO: 13166 - DNA, 301 bp, Artificial Sequence
  Trim72.4_Nf1.1
  crRNA array
  misc_feature (148)..(157): n is a, c, g, or t
cttggctttatatatcttgtggaaaggacgaaacaccgtaatttctactaagtgtagattgccgtgcctgcctgatccgtaatttctactaagtgtagattggcgatccggaatcctctgtaatttctactaagtgtagatttttttnnnnnnnnnnaagcttggcgtggatccgatatcaactagatcttgagacaaatggcagtattcatccacaattttaaaagaaaaggggggattggggggtacagtgcaggggaaagaatagtagacataatagcaacagacatacaaactaaag

SEQ ID NO: 13167 - DNA, 301 bp, Artificial Sequence
  Trim72.4_Nf1.2
  crRNA array
  misc_feature (148)..(157): n is a, c, g, or t
cttggctttatatatcttgtggaaaggacgaaacaccgtaatttctactaagtgtagattgccgtgcctgcctgatccgtaatttctactaagtgtagatggaaacacaacgctggcctctaatttctactaagtgtagatttttttnnnnnnnnnnaagcttggcgtggatccgatatcaactagatcttgagacaaatggcagtattcatccacaattttaaaagaaaaggggggattggggggtacagtgcaggggaaagaatagtagacataatagcaacagacatacaaactaaag

SEQ ID NO: 13168 - DNA, 301 bp, Artificial Sequence
  Trim72.4_Nf1.3
  crRNA array
  misc_feature (148)..(157): n is a, c, g, or t
cttggctttatatatcttgtggaaaggacgaaacaccgtaatttctactaagtgtagattgccgtgcctgcctgatccgtaatttctactaagtgtagataatgatggaacgcagtcgcataatttctactaagtgtagatttttttnnnnnnnnnnaagcttggcgtggatccgatatcaactagatcttgagacaaatggcagtattcatccacaattttaaaagaaaaggggggattggggggtacagtgcaggggaaagaatagtagacataatagcaacagacatacaaactaaag

SEQ ID NO: 13169 - DNA, 301 bp, Artificial Sequence
  Trim72.4_Nf1.4
  crRNA array
  misc_feature (148)..(157): n is a, c, g, or t
cttggctttatatatcttgtggaaaggacgaaacaccgtaatttctactaagtgtagattgccgtgcctgcctgatccgtaatttctactaagtgtagattgcaaaaccatccaccaagttaatttctactaagtgtagatttttttnnnnnnnnnnaagcttggcgtggatccgatatcaactagatcttgagacaaatggcagtattcatccacaattttaaaagaaaaggggggattggggggtacagtgcaggggaaagaatagtagacataatagcaacagacatacaaactaaag

SEQ ID NO: 13170 - DNA, 301 bp, Artificial Sequence
  Trim72.1_Kdm6a.1
  crRNA array
  misc_feature (148)..(157): n is a, c, g, or t
cttggctttatatatcttgtggaaaggacgaaacaccgtaatttctactaagtgtagataccccagctctgcgcacccgtaatttctactaagtgtagatgctgccgcctctcgcggcagtaatttctactaagtgtagatttttttnnnnnnnnnnaagcttggcgtggatccgatatcaactagatcttgagacaaatggcagtattcatccacaattttaaaagaaaaggggggattggggggtacagtgcaggggaaagaatagtagacataatagcaacagacatacaaactaaag

SEQ ID NO: 13171 - DNA, 301 bp, Artificial Sequence
  Trim72.1_Kdm6a.2
  crRNA array
  misc_feature (148)..(157): n is a, c, g, or t
cttggctttatatatcttgtggaaaggacgaaacaccgtaatttctactaagtgtagataccccagctctgcgcacccgtaatttctactaagtgtagatgctgcaggtaaggcacgttttaatttctactaagtgtagatttttttnnnnnnnnnnaagcttggcgtggatccgatatcaactagatcttgagacaaatggcagtattcatccacaattttaaaagaaaaggggggattggggggtacagtgcaggggaaagaatagtagacataatagcaacagacatacaaactaaag

SEQ ID NO: 13172 - DNA, 301 bp, Artificial Sequence
  Trim72.1_Kdm6a.3
  crRNA array
  misc_feature (148)..(157): n is a, c, g, or t
cttggctttatatatcttgtggaaaggacgaaacaccgtaatttctactaagtgtagataccccagctctgcgcacccgtaatttctactaagtgtagattgctggtgccggggaagttttaatttctactaagtgtagatttttttnnnnnnnnnnaagcttggcgtggatccgatatcaactagatcttgagacaaatggcagtattcatccacaattttaaaagaaaaggggggattggggggtacagtgcaggggaaagaatagtagacataatagcaacagacatacaaactaaag

SEQ ID NO: 13173 - DNA, 301 bp, Artificial Sequence
  Trim72.1_Kdm6a.4
  crRNA array
  misc_feature (148)..(157): n is a, c, g, or t
cttggctttatatatcttgtggaaaggacgaaacaccgtaatttctactaagtgtagataccccagctctgcgcacccgtaatttctactaagtgtagattgtctcctacgaatcccccctaatttctactaagtgtagatttttttnnnnnnnnnnaagcttggcgtggatccgatatcaactagatcttgagacaaatggcagtattcatccacaattttaaaagaaaaggggggattggggggtacagtgcaggggaaagaatagtagacataatagcaacagacatacaaactaaag

SEQ ID NO: 13174 - DNA, 301 bp, Artificial Sequence
  Trim72.2_Kdm6a.1
  crRNA array
  misc_feature (148)..(157): n is a, c, g, or t
cttggctttatatatcttgtggaaaggacgaaacaccgtaatttctactaagtgtagatcacgagcgtctgcccgggcctaatttctactaagtgtagatgctgccgcctctcgcggcagtaatttctactaagtgtagatttttttnnnnnnnnnnaagcttggcgtggatccgatatcaactagatcttgagacaaatggcagtattcatccacaattttaaaagaaaaggggggattggggggtacagtgcaggggaaagaatagtagacataatagcaacagacatacaaactaaag

SEQ ID NO: 13175 - DNA, 301 bp, Artificial Sequence
  Trim72.2_Kdm6a.2
  crRNA array
  misc_feature (148)..(157): n is a, c, g, or t
cttggctttatatatcttgtggaaaggacgaaacaccgtaatttctactaagtgtagatcacgagcgtctgcccgggcctaatttctactaagtgtagatgctgcaggtaaggcacgttttaatttctactaagtgtagatttttttnnnnnnnnnnaagcttggcgtggatccgatatcaactagatcttgagacaaatggcagtattcatccacaattttaaaagaaaaggggggattggggggtacagtgcaggggaaagaatagtagacataatagcaacagacatacaaactaaag

SEQ ID NO: 13176 - DNA, 301 bp, Artificial Sequence
  Trim72.2_Kdm6a.3
  crRNA array
  misc_feature (148)..(157): n is a, c, g, or t
cttggctttatatatcttgtggaaaggacgaaacaccgtaatttctactaagtgtagatcacgagcgtctgcccgggcctaatttctactaagtgtagattgctggtgccggggaagttttaatttctactaagtgtagatttttttnnnnnnnnnnaagcttggcgtggatccgatatcaactagatcttgagacaaatggcagtattcatccacaattttaaaagaaaaggggggattggggggtacagtgcaggggaaagaatagtagacataatagcaacagacatacaaactaaag

SEQ ID NO: 13177 - DNA, 301 bp, Artificial Sequence
  Trim72.2_Kdm6a.4
  crRNA array
  misc_feature (148)..(157): n is a, c, g, or t
cttggctttatatatcttgtggaaaggacgaaacaccgtaatttctactaagtgtagatcacgagcgtctgcccgggcctaatttctactaagtgtagattgtctcctacgaatcccccctaatttctactaagtgtagatttttttnnnnnnnnnnaagcttggcgtggatccgatatcaactagatcttgagacaaatggcagtattcatccacaattttaaaagaaaaggggggattggggggtacagtgcaggggaaagaatagtagacataatagcaacagacatacaaactaaag

SEQ ID NO: 13178 - DNA, 301 bp, Artificial Sequence
  Trim72.3_Kdm6a.1
  crRNA array
  misc_feature (148)..(157): n is a, c, g, or t
cttggctttatatatcttgtggaaaggacgaaacaccgtaatttctactaagtgtagatacgtgtgctggcacgacaagtaatttctactaagtgtagatgctgccgcctctcgcggcagtaatttctactaagtgtagatttttttnnnnnnnnnnaagcttggcgtggatccgatatcaactagatcttgagacaaatggcagtattcatccacaattttaaaagaaaaggggggattggggggtacagtgcaggggaaagaatagtagacataatagcaacagacatacaaactaaag

SEQ ID NO: 13179 - DNA, 301 bp, Artificial Sequence
  Trim72.3_Kdm6a.2
  crRNA array
  misc_feature (148)..(157): n is a, c, g, or t
cttggctttatatatcttgtggaaaggacgaaacaccgtaatttctactaagtgtagatacgtgtgctggcacgacaagtaatttctactaagtgtagatgctgcaggtaaggcacgttttaatttctactaagtgtagatttttttnnnnnnnnnnaagcttggcgtggatccgatatcaactagatcttgagacaaatggcagtattcatccacaattttaaaagaaaaggggggattggggggtacagtgcaggggaaagaatagtagacataatagcaacagacatacaaactaaag

SEQ ID NO: 13180 - DNA, 301 bp, Artificial Sequence
  Trim72.3_Kdm6a.3
  crRNA array
  misc_feature (148)..(157): n is a, c, g, or t
cttggctttatatatcttgtggaaaggacgaaacaccgtaatttctactaagtgtagatacgtgtgctggcacgacaagtaatttctactaagtgtagattgctggtgccggggaagttttaatttctactaagtgtagatttttttnnnnnnnnnnaagcttggcgtggatccgatatcaactagatcttgagacaaatggcagtattcatccacaattttaaaagaaaaggggggattggggggtacagtgcaggggaaagaatagtagacataatagcaacagacatacaaactaaag

SEQ ID NO: 13181 - DNA, 301 bp, Artificial Sequence
  Trim72.3_Kdm6a.4
  crRNA array
  misc_feature (148)..(157): n is a, c, g, or t
cttggctttatatatcttgtggaaaggacgaaacaccgtaatttctactaagtgtagatacgtgtgctggcacgacaagtaatttctactaagtgtagattgtctcctacgaatcccccctaatttctactaagtgtagatttttttnnnnnnnnnnaagcttggcgtggatccgatatcaactagatcttgagacaaatggcagtattcatccacaattttaaaagaaaaggggggattggggggtacagtgcaggggaaagaatagtagacataatagcaacagacatacaaactaaag

SEQ ID NO: 13182 - DNA, 301 bp, Artificial Sequence
  Trim72.4_Kdm6a.1
  crRNA array
  misc_feature (148)..(157): n is a, c, g, or t
cttggctttatatatcttgtggaaaggacgaaacaccgtaatttctactaagtgtagattgccgtgcctgcctgatccgtaatttctactaagtgtagatgctgccgcctctcgcggcagtaatttctactaagtgtagatttttttnnnnnnnnnnaagcttggcgtggatccgatatcaactagatcttgagacaaatggcagtattcatccacaattttaaaagaaaaggggggattggggggtacagtgcaggggaaagaatagtagacataatagcaacagacatacaaactaaag

SEQ ID NO: 13183 - DNA, 301 bp, Artificial Sequence
  Trim72.4_Kdm6a.2
  crRNA array
  misc_feature (148)..(157): n is a, c, g, or t
cttggctttatatatcttgtggaaaggacgaaacaccgtaatttctactaagtgtagattgccgtgcctgcctgatccgtaatttctactaagtgtagatgctgcaggtaaggcacgttttaatttctactaagtgtagatttttttnnnnnnnnnnaagcttggcgtggatccgatatcaactagatcttgagacaaatggcagtattcatccacaattttaaaagaaaaggggggattggggggtacagtgcaggggaaagaatagtagacataatagcaacagacatacaaactaaag

SEQ ID NO: 13184 - DNA, 301 bp, Artificial Sequence
  Trim72.4_Kdm6a.3
  crRNA array
  misc_feature (148)..(157): n is a, c, g, or t
cttggctttatatatcttgtggaaaggacgaaacaccgtaatttctactaagtgtagattgccgtgcctgcctgatccgtaatttctactaagtgtagattgctggtgccggggaagttttaatttctactaagtgtagatttttttnnnnnnnnnnaagcttggcgtggatccgatatcaactagatcttgagacaaatggcagtattcatccacaattttaaaagaaaaggggggattggggggtacagtgcaggggaaagaatagtagacataatagcaacagacatacaaactaaag

SEQ ID NO: 13185 - DNA, 301 bp, Artificial Sequence
  Trim72.4_Kdm6a.4
  crRNA array
  misc_feature (148)..(157): n is a, c, g, or t
cttggctttatatatcttgtggaaaggacgaaacaccgtaatttctactaagtgtagattgccgtgcctgcctgatccgtaatttctactaagtgtagattgtctcctacgaatcccccctaatttctactaagtgtagatttttttnnnnnnnnnnaagcttggcgtggatccgatatcaactagatcttgagacaaatggcagtattcatccacaattttaaaagaaaaggggggattggggggtacagtgcaggggaaagaatagtagacataatagcaacagacatacaaactaaag

SEQ ID NO: 13186 - DNA, 301 bp, Artificial Sequence
  Trim72.1_Ercc5.1
  crRNA array
  misc_feature (148)..(157): n is a, c, g, or t
cttggctttatatatcttgtggaaaggacgaaacaccgtaatttctactaagtgtagataccccagctctgcgcacccgtaatttctactaagtgtagatacggcacgagcaagagacactaatttctactaagtgtagatttttttnnnnnnnnnnaagcttggcgtggatccgatatcaactagatcttgagacaaatggcagtattcatccacaattttaaaagaaaaggggggattggggggtacagtgcaggggaaagaatagtagacataatagcaacagacatacaaactaaag

SEQ ID NO: 13187 - DNA, 301 bp, Artificial Sequence
  Trim72.1_Ercc5.2
  crRNA array
  misc_feature (148)..(157): n is a, c, g, or t
cttggctttatatatcttgtggaaaggacgaaacaccgtaatttctactaagtgtagataccccagctctgcgcacccgtaatttctactaagtgtagatgagtatcacatcggtgactctaatttctactaagtgtagatttttttnnnnnnnnnnaagcttggcgtggatccgatatcaactagatcttgagacaaatggcagtattcatccacaattttaaaagaaaaggggggattggggggtacagtgcaggggaaagaatagtagacataatagcaacagacatacaaactaaag

SEQ ID NO: 13188 - DNA, 301 bp, Artificial Sequence
  Trim72.1_Ercc5.3
  crRNA array
  misc_feature (148)..(157): n is a, c, g, or t
cttggctttatatatcttgtggaaaggacgaaacaccgtaatttctactaagtgtagataccccagctctgcgcacccgtaatttctactaagtgtagatggagtgggtccaggcctcgttaatttctactaagtgtagatttttttnnnnnnnnnnaagcttggcgtggatccgatatcaactagatcttgagacaaatggcagtattcatccacaattttaaaagaaaaggggggattggggggtacagtgcaggggaaagaatagtagacataatagcaacagacatacaaactaaag

SEQ ID NO: 13189 - DNA, 301 bp, Artificial Sequence
  Trim72.1_Ercc5.4
  crRNA array
  misc_feature (148)..(157): n is a, c, g, or t
cttggctttatatatcttgtggaaaggacgaaacaccgtaatttctactaagtgtagataccccagctctgcgcacccgtaatttctactaagtgtagatcagagccggtggaataatgttaatttctactaagtgtagatttttttnnnnnnnnnnaagcttggcgtggatccgatatcaactagatcttgagacaaatggcagtattcatccacaattttaaaagaaaaggggggattggggggtacagtgcaggggaaagaatagtagacataatagcaacagacatacaaactaaag

SEQ ID NO: 13190 - DNA, 301 bp, Artificial Sequence
  Trim72.2_Ercc5.1
  crRNA array
  misc_feature (148)..(157): n is a, c, g, or t
cttggctttatatatcttgtggaaaggacgaaacaccgtaatttctactaagtgtagatcacgagcgtctgcccgggcctaatttctactaagtgtagatacggcacgagcaagagacactaatttctactaagtgtagatttttttnnnnnnnnnnaagcttggcgtggatccgatatcaactagatcttgagacaaatggcagtattcatccacaattttaaaagaaaaggggggattggggggtacagtgcaggggaaagaatagtagacataatagcaacagacatacaaactaaag

SEQ ID NO: 13191 - DNA, 301 bp, Artificial Sequence
  Trim72.2_Ercc5.2
  crRNA array
  misc_feature (148)..(157): n is a, c, g, or t
cttggctttatatatcttgtggaaaggacgaaacaccgtaatttctactaagtgtagatcacgagcgtctgcccgggcctaatttctactaagtgtagatgagtatcacatcggtgactctaatttctactaagtgtagatttttttnnnnnnnnnnaagcttggcgtggatccgatatcaactagatcttgagacaaatggcagtattcatccacaattttaaaagaaaaggggggattggggggtacagtgcaggggaaagaatagtagacataatagcaacagacatacaaactaaag

SEQ ID NO: 13192 - DNA, 301 bp, Artificial Sequence
  Trim72.2_Ercc5.3
  crRNA array
  misc_feature (148)..(157): n is a, c, g, or t
cttggctttatatatcttgtggaaaggacgaaacaccgtaatttctactaagtgtagatcacgagcgtctgcccgggcctaatttctactaagtgtagatggagtgggtccaggcctcgttaatttctactaagtgtagatttttttnnnnnnnnnnaagcttggcgtggatccgatatcaactagatcttgagacaaatggcagtattcatccacaattttaaaagaaaaggggggattggggggtacagtgcaggggaaagaatagtagacataatagcaacagacatacaaactaaag

SEQ ID NO: 13193 - DNA, 301 bp, Artificial Sequence
  Trim72.2_Ercc5.4
  crRNA array
  misc_feature (148)..(157): n is a, c, g, or t
cttggctttatatatcttgtggaaaggacgaaacaccgtaatttctactaagtgtagatcacgagcgtctgcccgggcctaatttctactaagtgtagatcagagccggtggaataatgttaatttctactaagtgtagatttttttnnnnnnnnnnaagcttggcgtggatccgatatcaactagatcttgagacaaatggcagtattcatccacaattttaaaagaaaaggggggattggggggtacagtgcaggggaaagaatagtagacataatagcaacagacatacaaactaaag

SEQ ID NO: 13194 - DNA, 301 bp, Artificial Sequence
  Trim72.3_Ercc5.1
  crRNA array
  misc_feature (148)..(157): n is a, c, g, or t
cttggctttatatatcttgtggaaaggacgaaacaccgtaatttctactaagtgtagatacgtgtgctggcacgacaagtaatttctactaagtgtagatacggcacgagcaagagacactaatttctactaagtgtagatttttttnnnnnnnnnnaagcttggcgtggatccgatatcaactagatcttgagacaaatggcagtattcatccacaattttaaaagaaaaggggggattggggggtacagtgcaggggaaagaatagtagacataatagcaacagacatacaaactaaag

SEQ ID NO: 13195 - DNA, 301 bp, Artificial Sequence
  Trim72.3_Ercc5.2
  crRNA array
  misc_feature (148)..(157): n is a, c, g, or t
cttggctttatatatcttgtggaaaggacgaaacaccgtaatttctactaagtgtagatacgtgtgctggcacgacaagtaatttctactaagtgtagatgagtatcacatcggtgactctaatttctactaagtgtagatttttttnnnnnnnnnnaagcttggcgtggatccgatatcaactagatcttgagacaaatggcagtattcatccacaattttaaaagaaaaggggggattggggggtacagtgcaggggaaagaatagtagacataatagcaacagacatacaaactaaag

SEQ ID NO: 13196 - DNA, 301 bp, Artificial Sequence
  Trim72.3_Ercc5.3
  crRNA array
  misc_feature (148)..(157): n is a, c, g, or t
cttggctttatatatcttgtggaaaggacgaaacaccgtaatttctactaagtgtagatacgtgtgctggcacgacaagtaatttctactaagtgtagatggagtgggtccaggcctcgttaatttctactaagtgtagatttttttnnnnnnnnnnaagcttggcgtggatccgatatcaactagatcttgagacaaatggcagtattcatccacaattttaaaagaaaaggggggattggggggtacagtgcaggggaaagaatagtagacataatagcaacagacatacaaactaaag

SEQ ID NO: 13197 - DNA, 301 bp, Artificial Sequence
  Trim72.3_Ercc5.4
  crRNA array
  misc_feature (148)..(157): n is a, c, g, or t
cttggctttatatatcttgtggaaaggacgaaacaccgtaatttctactaagtgtagatacgtgtgctggcacgacaagtaatttctactaagtgtagatcagagccggtggaataatgttaatttctactaagtgtagatttttttnnnnnnnnnnaagcttggcgtggatccgatatcaactagatcttgagacaaatggcagtattcatccacaattttaaaagaaaaggggggattggggggtacagtgcaggggaaagaatagtagacataatagcaacagacatacaaactaaag

SEQ ID NO: 13198 - DNA, 301 bp, Artificial Sequence
  Trim72.4_Ercc5.1
  crRNA array
  misc_feature (148)..(157): n is a, c, g, or t
cttggctttatatatcttgtggaaaggacgaaacaccgtaatttctactaagtgtagattgccgtgcctgcctgatccgtaatttctactaagtgtagatacggcacgagcaagagacactaatttctactaagtgtagatttttttnnnnnnnnnnaagcttggcgtggatccgatatcaactagatcttgagacaaatggcagtattcatccacaattttaaaagaaaaggggggattggggggtacagtgcaggggaaagaatagtagacataatagcaacagacatacaaactaaag

SEQ ID NO: 13199 - DNA, 301 bp, Artificial Sequence
  Trim72.4_Ercc5.2
  crRNA array
  misc_feature (148)..(157): n is a, c, g, or t
cttggctttatatatcttgtggaaaggacgaaacaccgtaatttctactaagtgtagattgccgtgcctgcctgatccgtaatttctactaagtgtagatgagtatcacatcggtgactctaatttctactaagtgtagatttttttnnnnnnnnnnaagcttggcgtggatccgatatcaactagatcttgagacaaatggcagtattcatccacaattttaaaagaaaaggggggattggggggtacagtgcaggggaaagaatagtagacataatagcaacagacatacaaactaaag

SEQ ID NO: 13200 - DNA, 301 bp, Artificial Sequence
  Trim72.4_Ercc5.3
  crRNA array
  misc_feature (148)..(157): n is a, c, g, or t
cttggctttatatatcttgtggaaaggacgaaacaccgtaatttctactaagtgtagattgccgtgcctgcctgatccgtaatttctactaagtgtagatggagtgggtccaggcctcgttaatttctactaagtgtagatttttttnnnnnnnnnnaagcttggcgtggatccgatatcaactagatcttgagacaaatggcagtattcatccacaattttaaaagaaaaggggggattggggggtacagtgcaggggaaagaatagtagacataatagcaacagacatacaaactaaag

SEQ ID NO: 13201 - DNA, 301 bp, Artificial Sequence
  Trim72.4_Ercc5.4
  crRNA array
  misc_feature (148)..(157): n is a, c, g, or t
cttggctttatatatcttgtggaaaggacgaaacaccgtaatttctactaagtgtagattgccgtgcctgcctgatccgtaatttctactaagtgtagatcagagccggtggaataatgttaatttctactaagtgtagatttttttnnnnnnnnnnaagcttggcgtggatccgatatcaactagatcttgagacaaatggcagtattcatccacaattttaaaagaaaaggggggattggggggtacagtgcaggggaaagaatagtagacataatagcaacagacatacaaactaaag

SEQ ID NO: 13202 - DNA, 301 bp, Artificial Sequence
  Trim72.1_Arid1b.1
  crRNA array
  misc_feature (148)..(157): n is a, c, g, or t
cttggctttatatatcttgtggaaaggacgaaacaccgtaatttctactaagtgtagataccccagctctgcgcacccgtaatttctactaagtgtagatgctgctgctgtagtgcgtggtaatttctactaagtgtagatttttttnnnnnnnnnnaagcttggcgtggatccgatatcaactagatcttgagacaaatggcagtattcatccacaattttaaaagaaaaggggggattggggggtacagtgcaggggaaagaatagtagacataatagcaacagacatacaaactaaag

SEQ ID NO: 13203 - DNA, 301 bp, Artificial Sequence
  Trim72.1_Arid1b.2
  crRNA array
  misc_feature (148)..(157): n is a, c, g, or t
cttggctttatatatcttgtggaaaggacgaaacaccgtaatttctactaagtgtagataccccagctctgcgcacccgtaatttctactaagtgtagatagtgcaaaactgagcgcgggtaatttctactaagtgtagatttttttnnnnnnnnnnaagcttggcgtggatccgatatcaactagatcttgagacaaatggcagtattcatccacaattttaaaagaaaaggggggattggggggtacagtgcaggggaaagaatagtagacataatagcaacagacatacaaactaaag

SEQ ID NO: 13204 - DNA, 301 bp, Artificial Sequence
  Trim72.1_Arid1b.3
  crRNA array
  misc_feature (148)..(157): n is a, c, g, or t
cttggctttatatatcttgtggaaaggacgaaacaccgtaatttctactaagtgtagataccccagctctgcgcacccgtaatttctactaagtgtagatcactcaaaggcgaacaggtataatttctactaagtgtagatttttttnnnnnnnnnnaagcttggcgtggatccgatatcaactagatcttgagacaaatggcagtattcatccacaattttaaaagaaaaggggggattggggggtacagtgcaggggaaagaatagtagacataatagcaacagacatacaaactaaag

SEQ ID NO: 13205 - DNA, 301 bp, Artificial Sequence
  Trim72.1_Arid1b.4
  crRNA array
  misc_feature (148)..(157): n is a, c, g, or t
cttggctttatatatcttgtggaaaggacgaaacaccgtaatttctactaagtgtagataccccagctctgcgcacccgtaatttctactaagtgtagatctcctggctccgtagaagcataatttctactaagtgtagatttttttnnnnnnnnnnaagcttggcgtggatccgatatcaactagatcttgagacaaatggcagtattcatccacaattttaaaagaaaaggggggattggggggtacagtgcaggggaaagaatagtagacataatagcaacagacatacaaactaaag

SEQ ID NO: 13206 - DNA, 301 bp, Artificial Sequence
  Trim72.2_Arid1b.1
  crRNA array
  misc_feature (148)..(157): n is a, c, g, or t
cttggctttatatatcttgtggaaaggacgaaacaccgtaatttctactaagtgtagatcacgagcgtctgcccgggcctaatttctactaagtgtagatgctgctgctgtagtgcgtggtaatttctactaagtgtagatttttttnnnnnnnnnnaagcttggcgtggatccgatatcaactagatcttgagacaaatggcagtattcatccacaattttaaaagaaaaggggggattggggggtacagtgcaggggaaagaatagtagacataatagcaacagacatacaaactaaag

SEQ ID NO: 13207 - DNA, 301 bp, Artificial Sequence
  Trim72.2_Arid1b.2
  crRNA array
  misc_feature (148)..(157): n is a, c, g, or t
cttggctttatatatcttgtggaaaggacgaaacaccgtaatttctactaagtgtagatcacgagcgtctgcccgggcctaatttctactaagtgtagatagtgcaaaactgagcgcgggtaatttctactaagtgtagatttttttnnnnnnnnnnaagcttggcgtggatccgatatcaactagatcttgagacaaatggcagtattcatccacaattttaaaagaaaaggggggattggggggtacagtgcaggggaaagaatagtagacataatagcaacagacatacaaactaaag

SEQ ID NO: 13208 - DNA, 301 bp, Artificial Sequence
  Trim72.2_Arid1b.3
  crRNA array
  misc_feature (148)..(157): n is a, c, g, or t
cttggctttatatatcttgtggaaaggacgaaacaccgtaatttctactaagtgtagatcacgagcgtctgcccgggcctaatttctactaagtgtagatcactcaaaggcgaacaggtataatttctactaagtgtagatttttttnnnnnnnnnnaagcttggcgtggatccgatatcaactagatcttgagacaaatggcagtattcatccacaattttaaaagaaaaggggggattggggggtacagtgcaggggaaagaatagtagacataatagcaacagacatacaaactaaag

SEQ ID NO: 13209 - DNA, 301 bp, Artificial Sequence
  Trim72.2_Arid1b.4
  crRNA array
  misc_feature (148)..(157): n is a, c, g, or t
cttggctttatatatcttgtggaaaggacgaaacaccgtaatttctactaagtgtagatcacgagcgtctgcccgggcctaatttctactaagtgtagatctcctggctccgtagaagcataatttctactaagtgtagatttttttnnnnnnnnnnaagcttggcgtggatccgatatcaactagatcttgagacaaatggcagtattcatccacaattttaaaagaaaaggggggattggggggtacagtgcaggggaaagaatagtagacataatagcaacagacatacaaactaaag

SEQ ID NO: 13210 - DNA, 301 bp, Artificial Sequence
  Trim72.3_Arid1b.1
  crRNA array
  misc_feature (148)..(157): n is a, c, g, or t
cttggctttatatatcttgtggaaaggacgaaacaccgtaatttctactaagtgtagatacgtgtgctggcacgacaagtaatttctactaagtgtagatgctgctgctgtagtgcgtggtaatttctactaagtgtagatttttttnnnnnnnnnnaagcttggcgtggatccgatatcaactagatcttgagacaaatggcagtattcatccacaattttaaaagaaaaggggggattggggggtacagtgcaggggaaagaatagtagacataatagcaacagacatacaaactaaag

SEQ ID NO: 13211 - DNA, 301 bp, Artificial Sequence
  Trim72.3_Arid1b.2
  crRNA array
  misc_feature (148)..(157): n is a, c, g, or t
cttggctttatatatcttgtggaaaggacgaaacaccgtaatttctactaagtgtagatacgtgtgctggcacgacaagtaatttctactaagtgtagatagtgcaaaactgagcgcgggtaatttctactaagtgtagatttttttnnnnnnnnnnaagcttggcgtggatccgatatcaactagatcttgagacaaatggcagtattcatccacaattttaaaagaaaaggggggattggggggtacagtgcaggggaaagaatagtagacataatagcaacagacatacaaactaaag

SEQ ID NO: 13212 - DNA, 301 bp, Artificial Sequence
  Trim72.3_Arid1b.3
  crRNA array
  misc_feature (148)..(157): n is a, c, g, or t
cttggctttatatatcttgtggaaaggacgaaacaccgtaatttctactaagtgtagatacgtgtgctggcacgacaagtaatttctactaagtgtagatcactcaaaggcgaacaggtataatttctactaagtgtagatttttttnnnnnnnnnnaagcttggcgtggatccgatatcaactagatcttgagacaaatggcagtattcatccacaattttaaaagaaaaggggggattggggggtacagtgcaggggaaagaatagtagacataatagcaacagacatacaaactaaag

SEQ ID NO: 13213 - DNA, 301 bp, Artificial Sequence
  Trim72.3_Arid1b.4
  crRNA array
  misc_feature (148)..(157): n is a, c, g, or t
cttggctttatatatcttgtggaaaggacgaaacaccgtaatttctactaagtgtagatacgtgtgctggcacgacaagtaatttctactaagtgtagatctcctggctccgtagaagcataatttctactaagtgtagatttttttnnnnnnnnnnaagcttggcgtggatccgatatcaactagatcttgagacaaatggcagtattcatccacaattttaaaagaaaaggggggattggggggtacagtgcaggggaaagaatagtagacataatagcaacagacatacaaactaaag

SEQ ID NO: 13214 - DNA, 301 bp, Artificial Sequence
  Trim72.4_Arid1b.1
  crRNA array
  misc_feature (148)..(157): n is a, c, g, or t
cttggctttatatatcttgtggaaaggacgaaacaccgtaatttctactaagtgtagattgccgtgcctgcctgatccgtaatttctactaagtgtagatgctgctgctgtagtgcgtggtaatttctactaagtgtagatttttttnnnnnnnnnnaagcttggcgtggatccgatatcaactagatcttgagacaaatggcagtattcatccacaattttaaaagaaaaggggggattggggggtacagtgcaggggaaagaatagtagacataatagcaacagacatacaaactaaag

SEQ ID NO: 13215 - DNA, 301 bp, Artificial Sequence
  Trim72.4_Arid1b.2
  crRNA array
  misc_feature (148)..(157): n is a, c, g, or t
cttggctttatatatcttgtggaaaggacgaaacaccgtaatttctactaagtgtagattgccgtgcctgcctgatccgtaatttctactaagtgtagatagtgcaaaactgagcgcgggtaatttctactaagtgtagatttttttnnnnnnnnnnaagcttggcgtggatccgatatcaactagatcttgagacaaatggcagtattcatccacaattttaaaagaaaaggggggattggggggtacagtgcaggggaaagaatagtagacataatagcaacagacatacaaactaaag

SEQ ID NO: 13216 - DNA, 301 bp, Artificial Sequence
  Trim72.4_Arid1b.3
  crRNA array
  misc_feature (148)..(157): n is a, c, g, or t
cttggctttatatatcttgtggaaaggacgaaacaccgtaatttctactaagtgtagattgccgtgcctgcctgatccgtaatttctactaagtgtagatcactcaaaggcgaacaggtataatttctactaagtgtagatttttttnnnnnnnnnnaagcttggcgtggatccgatatcaactagatcttgagacaaatggcagtattcatccacaattttaaaagaaaaggggggattggggggtacagtgcaggggaaagaatagtagacataatagcaacagacatacaaactaaag

SEQ ID NO: 13217 - DNA, 301 bp, Artificial Sequence
  Trim72.4_Arid1b.4
  crRNA array
  misc_feature (148)..(157): n is a, c, g, or t
cttggctttatatatcttgtggaaaggacgaaacaccgtaatttctactaagtgtagattgccgtgcctgcctgatccgtaatttctactaagtgtagatctcctggctccgtagaagcataatttctactaagtgtagatttttttnnnnnnnnnnaagcttggcgtggatccgatatcaactagatcttgagacaaatggcagtattcatccacaattttaaaagaaaaggggggattggggggtacagtgcaggggaaagaatagtagacataatagcaacagacatacaaactaaag

SEQ ID NO: 13218 - DNA, 301 bp, Artificial Sequence
  Trim72.1_Rb1.1
  crRNA array
  misc_feature (148)..(157): n is a, c, g, or t
cttggctttatatatcttgtggaaaggacgaaacaccgtaatttctactaagtgtagataccccagctctgcgcacccgtaatttctactaagtgtagattctgacatgatcgggtaccttaatttctactaagtgtagatttttttnnnnnnnnnnaagcttggcgtggatccgatatcaactagatcttgagacaaatggcagtattcatccacaattttaaaagaaaaggggggattggggggtacagtgcaggggaaagaatagtagacataatagcaacagacatacaaactaaag

SEQ ID NO: 13219 - DNA, 301 bp, Artificial Sequence
  Trim72.1_Rb1.2
  crRNA array
  misc_feature (148)..(157): n is a, c, g, or t
cttggctttatatatcttgtggaaaggacgaaacaccgtaatttctactaagtgtagataccccagctctgcgcacccgtaatttctactaagtgtagatgtctctgcatgaaaacggagtaatttctactaagtgtagatttttttnnnnnnnnnnaagcttggcgtggatccgatatcaactagatcttgagacaaatggcagtattcatccacaattttaaaagaaaaggggggattggggggtacagtgcaggggaaagaatagtagacataatagcaacagacatacaaactaaag

SEQ ID NO: 13220 - DNA, 301 bp, Artificial Sequence
  Trim72.1_Rb1.3
  crRNA array
  misc_feature (148)..(157): n is a, c, g, or t
cttggctttatatatcttgtggaaaggacgaaacaccgtaatttctactaagtgtagataccccagctctgcgcacccgtaatttctactaagtgtagatagccaatctggtctaataactaatttctactaagtgtagatttttttnnnnnnnnnnaagcttggcgtggatccgatatcaactagatcttgagacaaatggcagtattcatccacaattttaaaagaaaaggggggattggggggtacagtgcaggggaaagaatagtagacataatagcaacagacatacaaactaaag

SEQ ID NO: 13221 - DNA, 301 bp, Artificial Sequence
  Trim72.1_Rb1.4
  crRNA array
  misc_feature (148)..(157): n is a, c, g, or t
cttggctttatatatcttgtggaaaggacgaaacaccgtaatttctactaagtgtagataccccagctctgcgcacccgtaatttctactaagtgtagattgtagctcagtaaaagtgaataatttctactaagtgtagatttttttnnnnnnnnnnaagcttggcgtggatccgatatcaactagatcttgagacaaatggcagtattcatccacaattttaaaagaaaaggggggattggggggtacagtgcaggggaaagaatagtagacataatagcaacagacatacaaactaaag

SEQ ID NO: 13222 - DNA, 301 bp, Artificial Sequence
  Trim72.2_Rb1.1
  crRNA array
  misc_feature (148)..(157): n is a, c, g, or t
cttggctttatatatcttgtggaaaggacgaaacaccgtaatttctactaagtgtagatcacgagcgtctgcccgggcctaatttctactaagtgtagattctgacatgatcgggtaccttaatttctactaagtgtagatttttttnnnnnnnnnnaagcttggcgtggatccgatatcaactagatcttgagacaaatggcagtattcatccacaattttaaaagaaaaggggggattggggggtacagtgcaggggaaagaatagtagacataatagcaacagacatacaaactaaag

SEQ ID NO: 13223 - DNA, 301 bp, Artificial Sequence
  Trim72.2_Rb1.2
  crRNA array
  misc_feature (148)..(157): n is a, c, g, or t
cttggctttatatatcttgtggaaaggacgaaacaccgtaatttctactaagtgtagatcacgagcgtctgcccgggcctaatttctactaagtgtagatgtctctgcatgaaaacggagtaatttctactaagtgtagatttttttnnnnnnnnnnaagcttggcgtggatccgatatcaactagatcttgagacaaatggcagtattcatccacaattttaaaagaaaaggggggattggggggtacagtgcaggggaaagaatagtagacataatagcaacagacatacaaactaaag

SEQ ID NO: 13224 - DNA, 301 bp, Artificial Sequence
  Trim72.2_Rb1.3
  crRNA array
  misc_feature (148)..(157): n is a, c, g, or t
cttggctttatatatcttgtggaaaggacgaaacaccgtaatttctactaagtgtagatcacgagcgtctgcccgggcctaatttctactaagtgtagatagccaatctggtctaataactaatttctactaagtgtagatttttttnnnnnnnnnnaagcttggcgtggatccgatatcaactagatcttgagacaaatggcagtattcatccacaattttaaaagaaaaggggggattggggggtacagtgcaggggaaagaatagtagacataatagcaacagacatacaaactaaag

SEQ ID NO: 13225 - DNA, 301 bp, Artificial Sequence
  Trim72.2_Rb1.4
  crRNA array
  misc_feature (148)..(157): n is a, c, g, or t
cttggctttatatatcttgtggaaaggacgaaacaccgtaatttctactaagtgtagatcacgagcgtctgcccgggcctaatttctactaagtgtagattgtagctcagtaaaagtgaataatttctactaagtgtagatttttttnnnnnnnnnnaagcttggcgtggatccgatatcaactagatcttgagacaaatggcagtattcatccacaattttaaaagaaaaggggggattggggggtacagtgcaggggaaagaatagtagacataatagcaacagacatacaaactaaag

SEQ ID NO: 13226 - DNA, 301 bp, Artificial Sequence
  Trim72.3_Rb1.1
  crRNA array
  misc_feature (148)..(157): n is a, c, g, or t
cttggctttatatatcttgtggaaaggacgaaacaccgtaatttctactaagtgtagatacgtgtgctggcacgacaagtaatttctactaagtgtagattctgacatgatcgggtaccttaatttctactaagtgtagatttttttnnnnnnnnnnaagcttggcgtggatccgatatcaactagatcttgagacaaatggcagtattcatccacaattttaaaagaaaaggggggattggggggtacagtgcaggggaaagaatagtagacataatagcaacagacatacaaactaaag

SEQ ID NO: 13227 - DNA, 301 bp, Artificial Sequence
  Trim72.3_Rb1.2
  crRNA array
  misc_feature (148)..(157): n is a, c, g, or t
cttggctttatatatcttgtggaaaggacgaaacaccgtaatttctactaagtgtagatacgtgtgctggcacgacaagtaatttctactaagtgtagatgtctctgcatgaaaacggagtaatttctactaagtgtagatttttttnnnnnnnnnnaagcttggcgtggatccgatatcaactagatcttgagacaaatggcagtattcatccacaattttaaaagaaaaggggggattggggggtacagtgcaggggaaagaatagtagacataatagcaacagacatacaaactaaag

SEQ ID NO: 13228 - DNA, 301 bp, Artificial Sequence
  Trim72.3_Rb1.3
  crRNA array
  misc_feature (148)..(157): n is a, c, g, or t
cttggctttatatatcttgtggaaaggacgaaacaccgtaatttctactaagtgtagatacgtgtgctggcacgacaagtaatttctactaagtgtagatagccaatctggtctaataactaatttctactaagtgtagatttttttnnnnnnnnnnaagcttggcgtggatccgatatcaactagatcttgagacaaatggcagtattcatccacaattttaaaagaaaaggggggattggggggtacagtgcaggggaaagaatagtagacataatagcaacagacatacaaactaaag

SEQ ID NO: 13229 - DNA, 301 bp, Artificial Sequence
  Trim72.3_Rb1.4
  crRNA array
  misc_feature (148)..(157): n is a, c, g, or t
cttggctttatatatcttgtggaaaggacgaaacaccgtaatttctactaagtgtagatacgtgtgctggcacgacaagtaatttctactaagtgtagattgtagctcagtaaaagtgaataatttctactaagtgtagatttttttnnnnnnnnnnaagcttggcgtggatccgatatcaactagatcttgagacaaatggcagtattcatccacaattttaaaagaaaaggggggattggggggtacagtgcaggggaaagaatagtagacataatagcaacagacatacaaactaaag

SEQ ID NO: 13230 - DNA, 301 bp, Artificial Sequence
  Trim72.4_Rb1.1
  crRNA array
  misc_feature (148)..(157): n is a, c, g, or t
cttggctttatatatcttgtggaaaggacgaaacaccgtaatttctactaagtgtagattgccgtgcctgcctgatccgtaatttctactaagtgtagattctgacatgatcgggtaccttaatttctactaagtgtagatttttttnnnnnnnnnnaagcttggcgtggatccgatatcaactagatcttgagacaaatggcagtattcatccacaattttaaaagaaaaggggggattggggggtacagtgcaggggaaagaatagtagacataatagcaacagacatacaaactaaag

SEQ ID NO: 13231 - DNA, 301 bp, Artificial Sequence
  Trim72.4_Rb1.2
  crRNA array
  misc_feature (148)..(157): n is a, c, g, or t
cttggctttatatatcttgtggaaaggacgaaacaccgtaatttctactaagtgtagattgccgtgcctgcctgatccgtaatttctactaagtgtagatgtctctgcatgaaaacggagtaatttctactaagtgtagatttttttnnnnnnnnnnaagcttggcgtggatccgatatcaactagatcttgagacaaatggcagtattcatccacaattttaaaagaaaaggggggattggggggtacagtgcaggggaaagaatagtagacataatagcaacagacatacaaactaaag

SEQ ID NO: 13232 - DNA, 301 bp, Artificial Sequence
  Trim72.4_Rb1.3
  crRNA array
  misc_feature (148)..(157): n is a, c, g, or t
cttggctttatatatcttgtggaaaggacgaaacaccgtaatttctactaagtgtagattgccgtgcctgcctgatccgtaatttctactaagtgtagatagccaatctggtctaataactaatttctactaagtgtagatttttttnnnnnnnnnnaagcttggcgtggatccgatatcaactagatcttgagacaaatggcagtattcatccacaattttaaaagaaaaggggggattggggggtacagtgcaggggaaagaatagtagacataatagcaacagacatacaaactaaag

SEQ ID NO: 13233 - DNA, 301 bp, Artificial Sequence
  Trim72.4_Rb1.4
  crRNA array
  misc_feature (148)..(157): n is a, c, g, or t
cttggctttatatatcttgtggaaaggacgaaacaccgtaatttctactaagtgtagattgccgtgcctgcctgatccgtaatttctactaagtgtagattgtagctcagtaaaagtgaataatttctactaagtgtagatttttttnnnnnnnnnnaagcttggcgtggatccgatatcaactagatcttgagacaaatggcagtattcatccacaattttaaaagaaaaggggggattggggggtacagtgcaggggaaagaatagtagacataatagcaacagacatacaaactaaag

SEQ ID NO: 13234 - DNA, 301 bp, Artificial Sequence
  Trim72.1_Kmt2c.1
  crRNA array
  misc_feature (148)..(157): n is a, c, g, or t
cttggctttatatatcttgtggaaaggacgaaacaccgtaatttctactaagtgtagataccccagctctgcgcacccgtaatttctactaagtgtagatactcgacctccacctccctataatttctactaagtgtagatttttttnnnnnnnnnnaagcttggcgtggatccgatatcaactagatcttgagacaaatggcagtattcatccacaattttaaaagaaaaggggggattggggggtacagtgcaggggaaagaatagtagacataatagcaacagacatacaaactaaag

SEQ ID NO: 13235 - DNA, 301 bp, Artificial Sequence
  Trim72.1_Kmt2c.2
  crRNA array
  misc_feature (148)..(157): n is a, c, g, or t
cttggctttatatatcttgtggaaaggacgaaacaccgtaatttctactaagtgtagataccccagctctgcgcacccgtaatttctactaagtgtagatcccaaagatcagcgtggacctaatttctactaagtgtagatttttttnnnnnnnnnnaagcttggcgtggatccgatatcaactagatcttgagacaaatggcagtattcatccacaattttaaaagaaaaggggggattggggggtacagtgcaggggaaagaatagtagacataatagcaacagacatacaaactaaag

SEQ ID NO: 13236 - DNA, 301 bp, Artificial Sequence
  Trim72.1_Kmt2c.3
  crRNA array
  misc_feature (148)..(157): n is a, c, g, or t
cttggctttatatatcttgtggaaaggacgaaacaccgtaatttctactaagtgtagataccccagctctgcgcacccgtaatttctactaagtgtagataaaagatccgaatcgatgcgtaatttctactaagtgtagatttttttnnnnnnnnnnaagcttggcgtggatccgatatcaactagatcttgagacaaatggcagtattcatccacaattttaaaagaaaaggggggattggggggtacagtgcaggggaaagaatagtagacataatagcaacagacatacaaactaaag

SEQ ID NO: 13237 - DNA, 301 bp, Artificial Sequence
  Trim72.1_Kmt2c.4
  crRNA array
  misc_feature (148)..(157): n is a, c, g, or t
cttggctttatatatcttgtggaaaggacgaaacaccgtaatttctactaagtgtagataccccagctctgcgcacccgtaatttctactaagtgtagatctgaggcacatggaagcgattaatttctactaagtgtagatttttttnnnnnnnnnnaagcttggcgtggatccgatatcaactagatcttgagacaaatggcagtattcatccacaattttaaaagaaaaggggggattggggggtacagtgcaggggaaagaatagtagacataatagcaacagacatacaaactaaag

SEQ ID NO: 13238 - DNA, 301 bp, Artificial Sequence
  Trim72.2_Kmt2c.1
  crRNA array
  misc_feature (148)..(157): n is a, c, g, or t
cttggctttatatatcttgtggaaaggacgaaacaccgtaatttctactaagtgtagatcacgagcgtctgcccgggcctaatttctactaagtgtagatactcgacctccacctccctataatttctactaagtgtagatttttttnnnnnnnnnnaagcttggcgtggatccgatatcaactagatcttgagacaaatggcagtattcatccacaattttaaaagaaaaggggggattggggggtacagtgcaggggaaagaatagtagacataatagcaacagacatacaaactaaag

SEQ ID NO: 13239 - DNA, 301 bp, Artificial Sequence
  Trim72.2_Kmt2c.2
  crRNA array
  misc_feature (148)..(157): n is a, c, g, or t
cttggctttatatatcttgtggaaaggacgaaacaccgtaatttctactaagtgtagatcacgagcgtctgcccgggcctaatttctactaagtgtagatcccaaagatcagcgtggacctaatttctactaagtgtagatttttttnnnnnnnnnnaagcttggcgtggatccgatatcaactagatcttgagacaaatggcagtattcatccacaattttaaaagaaaaggggggattggggggtacagtgcaggggaaagaatagtagacataatagcaacagacatacaaactaaag

SEQ ID NO: 13240 - DNA, 301 bp, Artificial Sequence
  Trim72.2_Kmt2c.3
  crRNA array
  misc_feature (148)..(157): n is a, c, g, or t
cttggctttatatatcttgtggaaaggacgaaacaccgtaatttctactaagtgtagatcacgagcgtctgcccgggcctaatttctactaagtgtagataaaagatccgaatcgatgcgtaatttctactaagtgtagatttttttnnnnnnnnnnaagcttggcgtggatccgatatcaactagatcttgagacaaatggcagtattcatccacaattttaaaagaaaaggggggattggggggtacagtgcaggggaaagaatagtagacataatagcaacagacatacaaactaaag

SEQ ID NO: 13241 - DNA, 301 bp, Artificial Sequence
  Trim72.2_Kmt2c.4
  crRNA array
  misc_feature (148)..(157): n is a, c, g, or t
cttggctttatatatcttgtggaaaggacgaaacaccgtaatttctactaagtgtagatcacgagcgtctgcccgggcctaatttctactaagtgtagatctgaggcacatggaagcgattaatttctactaagtgtagatttttttnnnnnnnnnnaagcttggcgtggatccgatatcaactagatcttgagacaaatggcagtattcatccacaattttaaaagaaaaggggggattggggggtacagtgcaggggaaagaatagtagacataatagcaacagacatacaaactaaag

SEQ ID NO: 13242 - DNA, 301 bp, Artificial Sequence
  Trim72.3_Kmt2c.1
  crRNA array
  misc_feature (148)..(157): n is a, c, g, or t
cttggctttatatatcttgtggaaaggacgaaacaccgtaatttctactaagtgtagatacgtgtgctggcacgacaagtaatttctactaagtgtagatactcgacctccacctccctataatttctactaagtgtagatttttttnnnnnnnnnnaagcttggcgtggatccgatatcaactagatcttgagacaaatggcagtattcatccacaattttaaaagaaaaggggggattggggggtacagtgcaggggaaagaatagtagacataatagcaacagacatacaaactaaag

SEQ ID NO: 13243 - DNA, 301 bp, Artificial Sequence
  Trim72.3_Kmt2c.2
  crRNA array
  misc_feature (148)..(157): n is a, c, g, or t
cttggctttatatatcttgtggaaaggacgaaacaccgtaatttctactaagtgtagatacgtgtgctggcacgacaagtaatttctactaagtgtagatcccaaagatcagcgtggacctaatttctactaagtgtagatttttttnnnnnnnnnnaagcttggcgtggatccgatatcaactagatcttgagacaaatggcagtattcatccacaattttaaaagaaaaggggggattggggggtacagtgcaggggaaagaatagtagacataatagcaacagacatacaaactaaag

SEQ ID NO: 13244 - DNA, 301 bp, Artificial Sequence
  Trim72.3_Kmt2c.3
  crRNA array
  misc_feature (148)..(157): n is a, c, g, or t
cttggctttatatatcttgtggaaaggacgaaacaccgtaatttctactaagtgtagatacgtgtgctggcacgacaagtaatttctactaagtgtagataaaagatccgaatcgatgcgtaatttctactaagtgtagatttttttnnnnnnnnnnaagcttggcgtggatccgatatcaactagatcttgagacaaatggcagtattcatccacaattttaaaagaaaaggggggattggggggtacagtgcaggggaaagaatagtagacataatagcaacagacatacaaactaaag

SEQ ID NO: 13245 - DNA, 301 bp, Artificial Sequence
  Trim72.3_Kmt2c.4
  crRNA array
  misc_feature (148)..(157): n is a, c, g, or t
cttggctttatatatcttgtggaaaggacgaaacaccgtaatttctactaagtgtagatacgtgtgctggcacgacaagtaatttctactaagtgtagatctgaggcacatggaagcgattaatttctactaagtgtagatttttttnnnnnnnnnnaagcttggcgtggatccgatatcaactagatcttgagacaaatggcagtattcatccacaattttaaaagaaaaggggggattggggggtacagtgcaggggaaagaatagtagacataatagcaacagacatacaaactaaag

SEQ ID NO: 13246 - DNA, 301 bp, Artificial Sequence
  Trim72.4_Kmt2c.1
  crRNA array
  misc_feature (148)..(157): n is a, c, g, or t
cttggctttatatatcttgtggaaaggacgaaacaccgtaatttctactaagtgtagattgccgtgcctgcctgatccgtaatttctactaagtgtagatactcgacctccacctccctataatttctactaagtgtagatttttttnnnnnnnnnnaagcttggcgtggatccgatatcaactagatcttgagacaaatggcagtattcatccacaattttaaaagaaaaggggggattggggggtacagtgcaggggaaagaatagtagacataatagcaacagacatacaaactaaag

SEQ ID NO: 13247 - DNA, 301 bp, Artificial Sequence
  Trim72.4_Kmt2c.2
  crRNA array
  misc_feature (148)..(157): n is a, c, g, or t
cttggctttatatatcttgtggaaaggacgaaacaccgtaatttctactaagtgtagattgccgtgcctgcctgatccgtaatttctactaagtgtagatcccaaagatcagcgtggacctaatttctactaagtgtagatttttttnnnnnnnnnnaagcttggcgtggatccgatatcaactagatcttgagacaaatggcagtattcatccacaattttaaaagaaaaggggggattggggggtacagtgcaggggaaagaatagtagacataatagcaacagacatacaaactaaag

SEQ ID NO: 13248 - DNA, 301 bp, Artificial Sequence
  Trim72.4_Kmt2c.3
  crRNA array
  misc_feature (148)..(157): n is a, c, g, or t
cttggctttatatatcttgtggaaaggacgaaacaccgtaatttctactaagtgtagattgccgtgcctgcctgatccgtaatttctactaagtgtagataaaagatccgaatcgatgcgtaatttctactaagtgtagatttttttnnnnnnnnnnaagcttggcgtggatccgatatcaactagatcttgagacaaatggcagtattcatccacaattttaaaagaaaaggggggattggggggtacagtgcaggggaaagaatagtagacataatagcaacagacatacaaactaaag

SEQ ID NO: 13249 - DNA, 301 bp, Artificial Sequence
  Trim72.4_Kmt2c.4
  crRNA array
  misc_feature (148)..(157): n is a, c, g, or t
cttggctttatatatcttgtggaaaggacgaaacaccgtaatttctactaagtgtagattgccgtgcctgcctgatccgtaatttctactaagtgtagatctgaggcacatggaagcgattaatttctactaagtgtagatttttttnnnnnnnnnnaagcttggcgtggatccgatatcaactagatcttgagacaaatggcagtattcatccacaattttaaaagaaaaggggggattggggggtacagtgcaggggaaagaatagtagacataatagcaacagacatacaaactaaag

SEQ ID NO: 13250 - DNA, 301 bp, Artificial Sequence
  Trim72.1_Pten.1
  crRNA array
  misc_feature (148)..(157): n is a, c, g, or t
cttggctttatatatcttgtggaaaggacgaaacaccgtaatttctactaagtgtagataccccagctctgcgcacccgtaatttctactaagtgtagataagcgtggtgcgtgacgcactaatttctactaagtgtagatttttttnnnnnnnnnnaagcttggcgtggatccgatatcaactagatcttgagacaaatggcagtattcatccacaattttaaaagaaaaggggggattggggggtacagtgcaggggaaagaatagtagacataatagcaacagacatacaaactaaag

SEQ ID NO: 13251 - DNA, 301 bp, Artificial Sequence
  Trim72.1_Pten.2
  crRNA array
  misc_feature (148)..(157): n is a, c, g, or t
cttggctttatatatcttgtggaaaggacgaaacaccgtaatttctactaagtgtagataccccagctctgcgcacccgtaatttctactaagtgtagattgtcaccagctgaagtggcttaatttctactaagtgtagatttttttnnnnnnnnnnaagcttggcgtggatccgatatcaactagatcttgagacaaatggcagtattcatccacaattttaaaagaaaaggggggattggggggtacagtgcaggggaaagaatagtagacataatagcaacagacatacaaactaaag

SEQ ID NO: 13252 - DNA, 301 bp, Artificial Sequence
  Trim72.1_Pten.3
  crRNA array
  misc_feature (148)..(157): n is a, c, g, or t
cttggctttatatatcttgtggaaaggacgaaacaccgtaatttctactaagtgtagataccccagctctgcgcacccgtaatttctactaagtgtagatggagtcaagaggctgatttttaatttctactaagtgtagatttttttnnnnnnnnnnaagcttggcgtggatccgatatcaactagatcttgagacaaatggcagtattcatccacaattttaaaagaaaaggggggattggggggtacagtgcaggggaaagaatagtagacataatagcaacagacatacaaactaaag

SEQ ID NO: 13253 - DNA, 301 bp, Artificial Sequence
  Trim72.1_Pten.4
  crRNA array
  misc_feature (148)..(157): n is a, c, g, or t
cttggctttatatatcttgtggaaaggacgaaacaccgtaatttctactaagtgtagataccccagctctgcgcacccgtaatttctactaagtgtagatctgtaagctaaaccactacataatttctactaagtgtagatttttttnnnnnnnnnnaagcttggcgtggatccgatatcaactagatcttgagacaaatggcagtattcatccacaattttaaaagaaaaggggggattggggggtacagtgcaggggaaagaatagtagacataatagcaacagacatacaaactaaag

SEQ ID NO: 13254 - DNA, 301 bp, Artificial Sequence
  Trim72.2_Pten.1
  crRNA array
  misc_feature (148)..(157): n is a, c, g, or t
cttggctttatatatcttgtggaaaggacgaaacaccgtaatttctactaagtgtagatcacgagcgtctgcccgggcctaatttctactaagtgtagataagcgtggtgcgtgacgcactaatttctactaagtgtagatttttttnnnnnnnnnnaagcttggcgtggatccgatatcaactagatcttgagacaaatggcagtattcatccacaattttaaaagaaaaggggggattggggggtacagtgcaggggaaagaatagtagacataatagcaacagacatacaaactaaag

SEQ ID NO: 13255 - DNA, 301 bp, Artificial Sequence
  Trim72.2_Pten.2
  crRNA array
  misc_feature (148)..(157): n is a, c, g, or t
cttggctttatatatcttgtggaaaggacgaaacaccgtaatttctactaagtgtagatcacgagcgtctgcccgggcctaatttctactaagtgtagattgtcaccagctgaagtggcttaatttctactaagtgtagatttttttnnnnnnnnnnaagcttggcgtggatccgatatcaactagatcttgagacaaatggcagtattcatccacaattttaaaagaaaaggggggattggggggtacagtgcaggggaaagaatagtagacataatagcaacagacatacaaactaaag

SEQ ID NO: 13256 - DNA, 301 bp, Artificial Sequence
  Trim72.2_Pten.3
  crRNA array
  misc_feature (148)..(157): n is a, c, g, or t
cttggctttatatatcttgtggaaaggacgaaacaccgtaatttctactaagtgtagatcacgagcgtctgcccgggcctaatttctactaagtgtagatggagtcaagaggctgatttttaatttctactaagtgtagatttttttnnnnnnnnnnaagcttggcgtggatccgatatcaactagatcttgagacaaatggcagtattcatccacaattttaaaagaaaaggggggattggggggtacagtgcaggggaaagaatagtagacataatagcaacagacatacaaactaaag

SEQ ID NO: 13257 - DNA, 301 bp, Artificial Sequence
  Trim72.2_Pten.4
  crRNA array
  misc_feature (148)..(157): n is a, c, g, or t
cttggctttatatatcttgtggaaaggacgaaacaccgtaatttctactaagtgtagatcacgagcgtctgcccgggcctaatttctactaagtgtagatctgtaagctaaaccactacataatttctactaagtgtagatttttttnnnnnnnnnnaagcttggcgtggatccgatatcaactagatcttgagacaaatggcagtattcatccacaattttaaaagaaaaggggggattggggggtacagtgcaggggaaagaatagtagacataatagcaacagacatacaaactaaag

SEQ ID NO: 13258 - DNA, 301 bp, Artificial Sequence
  Trim72.3_Pten.1
  crRNA array
  misc_feature (148)..(157): n is a, c, g, or t
cttggctttatatatcttgtggaaaggacgaaacaccgtaatttctactaagtgtagatacgtgtgctggcacgacaagtaatttctactaagtgtagataagcgtggtgcgtgacgcactaatttctactaagtgtagatttttttnnnnnnnnnnaagcttggcgtggatccgatatcaactagatcttgagacaaatggcagtattcatccacaattttaaaagaaaaggggggattggggggtacagtgcaggggaaagaatagtagacataatagcaacagacatacaaactaaag

SEQ ID NO: 13259 - DNA, 301 bp, Artificial Sequence
  Trim72.3_Pten.2
  crRNA array
  misc_feature (148)..(157): n is a, c, g, or t
cttggctttatatatcttgtggaaaggacgaaacaccgtaatttctactaagtgtagatacgtgtgctggcacgacaagtaatttctactaagtgtagattgtcaccagctgaagtggcttaatttctactaagtgtagatttttttnnnnnnnnnnaagcttggcgtggatccgatatcaactagatcttgagacaaatggcagtattcatccacaattttaaaagaaaaggggggattggggggtacagtgcaggggaaagaatagtagacataatagcaacagacatacaaactaaag

SEQ ID NO: 13260 - DNA, 301 bp, Artificial Sequence
  Trim72.3_Pten.3
  crRNA array
  misc_feature (148)..(157): n is a, c, g, or t
cttggctttatatatcttgtggaaaggacgaaacaccgtaatttctactaagtgtagatacgtgtgctggcacgacaagtaatttctactaagtgtagatggagtcaagaggctgatttttaatttctactaagtgtagatttttttnnnnnnnnnnaagcttggcgtggatccgatatcaactagatcttgagacaaatggcagtattcatccacaattttaaaagaaaaggggggattggggggtacagtgcaggggaaagaatagtagacataatagcaacagacatacaaactaaag

SEQ ID NO: 13261 - DNA, 301 bp, Artificial Sequence
  Trim72.3_Pten.4
  crRNA array
  misc_feature (148)..(157): n is a, c, g, or t
cttggctttatatatcttgtggaaaggacgaaacaccgtaatttctactaagtgtagatacgtgtgctggcacgacaagtaatttctactaagtgtagatctgtaagctaaaccactacataatttctactaagtgtagatttttttnnnnnnnnnnaagcttggcgtggatccgatatcaactagatcttgagacaaatggcagtattcatccacaattttaaaagaaaaggggggattggggggtacagtgcaggggaaagaatagtagacataatagcaacagacatacaaactaaag

SEQ ID NO: 13262 - DNA, 301 bp, Artificial Sequence
  Trim72.4_Pten.1
  crRNA array
  misc_feature (148)..(157): n is a, c, g, or t
cttggctttatatatcttgtggaaaggacgaaacaccgtaatttctactaagtgtagattgccgtgcctgcctgatccgtaatttctactaagtgtagataagcgtggtgcgtgacgcactaatttctactaagtgtagatttttttnnnnnnnnnnaagcttggcgtggatccgatatcaactagatcttgagacaaatggcagtattcatccacaattttaaaagaaaaggggggattggggggtacagtgcaggggaaagaatagtagacataatagcaacagacatacaaactaaag

SEQ ID NO: 13263 - DNA, 301 bp, Artificial Sequence
  Trim72.4_Pten.2
  crRNA array
  misc_feature (148)..(157): n is a, c, g, or t
cttggctttatatatcttgtggaaaggacgaaacaccgtaatttctactaagtgtagattgccgtgcctgcctgatccgtaatttctactaagtgtagattgtcaccagctgaagtggcttaatttctactaagtgtagatttttttnnnnnnnnnnaagcttggcgtggatccgatatcaactagatcttgagacaaatggcagtattcatccacaattttaaaagaaaaggggggattggggggtacagtgcaggggaaagaatagtagacataatagcaacagacatacaaactaaag

SEQ ID NO: 13264 - DNA, 301 bp, Artificial Sequence
  Trim72.4_Pten.3
  crRNA array
  misc_feature (148)..(157): n is a, c, g, or t
cttggctttatatatcttgtggaaaggacgaaacaccgtaatttctactaagtgtagattgccgtgcctgcctgatccgtaatttctactaagtgtagatggagtcaagaggctgatttttaatttctactaagtgtagatttttttnnnnnnnnnnaagcttggcgtggatccgatatcaactagatcttgagacaaatggcagtattcatccacaattttaaaagaaaaggggggattggggggtacagtgcaggggaaagaatagtagacataatagcaacagacatacaaactaaag

SEQ ID NO: 13265 - DNA, 301 bp, Artificial Sequence
  Trim72.4_Pten.4
  crRNA array
  misc_feature (148)..(157): n is a, c, g, or t
cttggctttatatatcttgtggaaaggacgaaacaccgtaatttctactaagtgtagattgccgtgcctgcctgatccgtaatttctactaagtgtagatctgtaagctaaaccactacataatttctactaagtgtagatttttttnnnnnnnnnnaagcttggcgtggatccgatatcaactagatcttgagacaaatggcagtattcatccacaattttaaaagaaaaggggggattggggggtacagtgcaggggaaagaatagtagacataatagcaacagacatacaaactaaag

SEQ ID NO: 13266 - DNA, 301 bp, Artificial Sequence
  Trim72.1_Atm.1
  crRNA array
  misc_feature (148)..(157): n is a, c, g, or t
cttggctttatatatcttgtggaaaggacgaaacaccgtaatttctactaagtgtagataccccagctctgcgcacccgtaatttctactaagtgtagatgagaaagtctccgaatcgtttaatttctactaagtgtagatttttttnnnnnnnnnnaagcttggcgtggatccgatatcaactagatcttgagacaaatggcagtattcatccacaattttaaaagaaaaggggggattggggggtacagtgcaggggaaagaatagtagacataatagcaacagacatacaaactaaag

SEQ ID NO: 13267 - DNA, 301 bp, Artificial Sequence
  Trim72.1_Atm.2
  crRNA array
  misc_feature (148)..(157): n is a, c, g, or t
cttggctttatatatcttgtggaaaggacgaaacaccgtaatttctactaagtgtagataccccagctctgcgcacccgtaatttctactaagtgtagatcctacgagggcacgagagactaatttctactaagtgtagatttttttnnnnnnnnnnaagcttggcgtggatccgatatcaactagatcttgagacaaatggcagtattcatccacaattttaaaagaaaaggggggattggggggtacagtgcaggggaaagaatagtagacataatagcaacagacatacaaactaaag

SEQ ID NO: 13268 - DNA, 301 bp, Artificial Sequence
  Trim72.1_Atm.3
  crRNA array
  misc_feature (148)..(157): n is a, c, g, or t
cttggctttatatatcttgtggaaaggacgaaacaccgtaatttctactaagtgtagataccccagctctgcgcacccgtaatttctactaagtgtagattgaaagtctccgatatgccataatttctactaagtgtagatttttttnnnnnnnnnnaagcttggcgtggatccgatatcaactagatcttgagacaaatggcagtattcatccacaattttaaaagaaaaggggggattggggggtacagtgcaggggaaagaatagtagacataatagcaacagacatacaaactaaag

SEQ ID NO: 13269 - DNA, 301 bp, Artificial Sequence
  Trim72.1_Atm.4
  crRNA array
  misc_feature (148)..(157): n is a, c, g, or t
cttggctttatatatcttgtggaaaggacgaaacaccgtaatttctactaagtgtagataccccagctctgcgcacccgtaatttctactaagtgtagatggtggtgatcagtcaagtagtaatttctactaagtgtagatttttttnnnnnnnnnnaagcttggcgtggatccgatatcaactagatcttgagacaaatggcagtattcatccacaattttaaaagaaaaggggggattggggggtacagtgcaggggaaagaatagtagacataatagcaacagacatacaaactaaag

SEQ ID NO: 13270 - DNA, 301 bp, Artificial Sequence
  Trim72.2_Atm.1
  crRNA array
  misc_feature (148)..(157): n is a, c, g, or t
cttggctttatatatcttgtggaaaggacgaaacaccgtaatttctactaagtgtagatcacgagcgtctgcccgggcctaatttctactaagtgtagatgagaaagtctccgaatcgtttaatttctactaagtgtagatttttttnnnnnnnnnnaagcttggcgtggatccgatatcaactagatcttgagacaaatggcagtattcatccacaattttaaaagaaaaggggggattggggggtacagtgcaggggaaagaatagtagacataatagcaacagacatacaaactaaag

SEQ ID NO: 13271 - DNA, 301 bp, Artificial Sequence
  Trim72.2_Atm.2
  crRNA array
  misc_feature (148)..(157): n is a, c, g, or t
cttggctttatatatcttgtggaaaggacgaaacaccgtaatttctactaagtgtagatcacgagcgtctgcccgggcctaatttctactaagtgtagatcctacgagggcacgagagactaatttctactaagtgtagatttttttnnnnnnnnnnaagcttggcgtggatccgatatcaactagatcttgagacaaatggcagtattcatccacaattttaaaagaaaaggggggattggggggtacagtgcaggggaaagaatagtagacataatagcaacagacatacaaactaaag

SEQ ID NO: 13272 - DNA, 301 bp, Artificial Sequence
  Trim72.2_Atm.3
  crRNA array
  misc_feature (148)..(157): n is a, c, g, or t
cttggctttatatatcttgtggaaaggacgaaacaccgtaatttctactaagtgtagatcacgagcgtctgcccgggcctaatttctactaagtgtagattgaaagtctccgatatgccataatttctactaagtgtagatttttttnnnnnnnnnnaagcttggcgtggatccgatatcaactagatcttgagacaaatggcagtattcatccacaattttaaaagaaaaggggggattggggggtacagtgcaggggaaagaatagtagacataatagcaacagacatacaaactaaag

SEQ ID NO: 13273 - DNA, 301 bp, Artificial Sequence
  Trim72.2_Atm.4
  crRNA array
  misc_feature (148)..(157): n is a, c, g, or t
cttggctttatatatcttgtggaaaggacgaaacaccgtaatttctactaagtgtagatcacgagcgtctgcccgggcctaatttctactaagtgtagatggtggtgatcagtcaagtagtaatttctactaagtgtagatttttttnnnnnnnnnnaagcttggcgtggatccgatatcaactagatcttgagacaaatggcagtattcatccacaattttaaaagaaaaggggggattggggggtacagtgcaggggaaagaatagtagacataatagcaacagacatacaaactaaag

SEQ ID NO: 13274 - DNA, 301 bp, Artificial Sequence
  Trim72.3_Atm.1
  crRNA array
  misc_feature (148)..(157): n is a, c, g, or t
cttggctttatatatcttgtggaaaggacgaaacaccgtaatttctactaagtgtagatacgtgtgctggcacgacaagtaatttctactaagtgtagatgagaaagtctccgaatcgtttaatttctactaagtgtagatttttttnnnnnnnnnnaagcttggcgtggatccgatatcaactagatcttgagacaaatggcagtattcatccacaattttaaaagaaaaggggggattggggggtacagtgcaggggaaagaatagtagacataatagcaacagacatacaaactaaag

SEQ ID NO: 13275 - DNA, 301 bp, Artificial Sequence
  Trim72.3_Atm.2
  crRNA array
  misc_feature (148)..(157): n is a, c, g, or t
cttggctttatatatcttgtggaaaggacgaaacaccgtaatttctactaagtgtagatacgtgtgctggcacgacaagtaatttctactaagtgtagatcctacgagggcacgagagactaatttctactaagtgtagatttttttnnnnnnnnnnaagcttggcgtggatccgatatcaactagatcttgagacaaatggcagtattcatccacaattttaaaagaaaaggggggattggggggtacagtgcaggggaaagaatagtagacataatagcaacagacatacaaactaaag

SEQ ID NO: 13276 - DNA, 301 bp, Artificial Sequence
  Trim72.3_Atm.3
  crRNA array
  misc_feature (148)..(157): n is a, c, g, or t
cttggctttatatatcttgtggaaaggacgaaacaccgtaatttctactaagtgtagatacgtgtgctggcacgacaagtaatttctactaagtgtagattgaaagtctccgatatgccataatttctactaagtgtagatttttttnnnnnnnnnnaagcttggcgtggatccgatatcaactagatcttgagacaaatggcagtattcatccacaattttaaaagaaaaggggggattggggggtacagtgcaggggaaagaatagtagacataatagcaacagacatacaaactaaag

SEQ ID NO: 13277 - DNA, 301 bp, Artificial Sequence
  Trim72.3_Atm.4
  crRNA array
  misc_feature (148)..(157): n is a, c, g, or t
cttggctttatatatcttgtggaaaggacgaaacaccgtaatttctactaagtgtagatacgtgtgctggcacgacaagtaatttctactaagtgtagatggtggtgatcagtcaagtagtaatttctactaagtgtagatttttttnnnnnnnnnnaagcttggcgtggatccgatatcaactagatcttgagacaaatggcagtattcatccacaattttaaaagaaaaggggggattggggggtacagtgcaggggaaagaatagtagacataatagcaacagacatacaaactaaag

SEQ ID NO: 13278 - DNA, 301 bp, Artificial Sequence
  Trim72.4_Atm.1
  crRNA array
  misc_feature (148)..(157): n is a, c, g, or t
cttggctttatatatcttgtggaaaggacgaaacaccgtaatttctactaagtgtagattgccgtgcctgcctgatccgtaatttctactaagtgtagatgagaaagtctccgaatcgtttaatttctactaagtgtagatttttttnnnnnnnnnnaagcttggcgtggatccgatatcaactagatcttgagacaaatggcagtattcatccacaattttaaaagaaaaggggggattggggggtacagtgcaggggaaagaatagtagacataatagcaacagacatacaaactaaag

SEQ ID NO: 13279 - DNA, 301 bp, Artificial Sequence
  Trim72.4_Atm.2
  crRNA array
  misc_feature (148)..(157): n is a, c, g, or t
cttggctttatatatcttgtggaaaggacgaaacaccgtaatttctactaagtgtagattgccgtgcctgcctgatccgtaatttctactaagtgtagatcctacgagggcacgagagactaatttctactaagtgtagatttttttnnnnnnnnnnaagcttggcgtggatccgatatcaactagatcttgagacaaatggcagtattcatccacaattttaaaagaaaaggggggattggggggtacagtgcaggggaaagaatagtagacataatagcaacagacatacaaactaaag

SEQ ID NO: 13280 - DNA, 301 bp, Artificial Sequence
  Trim72.4_Atm.3
  crRNA array
  misc_feature (148)..(157): n is a, c, g, or t
cttggctttatatatcttgtggaaaggacgaaacaccgtaatttctactaagtgtagattgccgtgcctgcctgatccgtaatttctactaagtgtagattgaaagtctccgatatgccataatttctactaagtgtagatttttttnnnnnnnnnnaagcttggcgtggatccgatatcaactagatcttgagacaaatggcagtattcatccacaattttaaaagaaaaggggggattggggggtacagtgcaggggaaagaatagtagacataatagcaacagacatacaaactaaag

SEQ ID NO: 13281 - DNA, 301 bp, Artificial Sequence
  Trim72.4_Atm.4
  crRNA array
  misc_feature (148)..(157): n is a, c, g, or t
cttggctttatatatcttgtggaaaggacgaaacaccgtaatttctactaagtgtagattgccgtgcctgcctgatccgtaatttctactaagtgtagatggtggtgatcagtcaagtagtaatttctactaagtgtagatttttttnnnnnnnnnnaagcttggcgtggatccgatatcaactagatcttgagacaaatggcagtattcatccacaattttaaaagaaaaggggggattggggggtacagtgcaggggaaagaatagtagacataatagcaacagacatacaaactaaag

SEQ ID NO: 13282 - DNA, 301 bp, Artificial Sequence
  Zfhx3.1_Crebbp.1
  crRNA array
  misc_feature (148)..(157): n is a, c, g, or t
cttggctttatatatcttgtggaaaggacgaaacaccgtaatttctactaagtgtagatcgctgcgaggtgtgtaactataatttctactaagtgtagatctcacggcggcggcgggccgtaatttctactaagtgtagatttttttnnnnnnnnnnaagcttggcgtggatccgatatcaactagatcttgagacaaatggcagtattcatccacaattttaaaagaaaaggggggattggggggtacagtgcaggggaaagaatagtagacataatagcaacagacatacaaactaaag

SEQ ID NO: 13283 - DNA, 301 bp, Artificial Sequence
  Zfhx3.1_Crebbp.2
  crRNA array
  misc_feature (148)..(157): n is a, c, g, or t
cttggctttatatatcttgtggaaaggacgaaacaccgtaatttctactaagtgtagatcgctgcgaggtgtgtaactataatttctactaagtgtagatcgcgagcaggtgaagatggctaatttctactaagtgtagatttttttnnnnnnnnnnaagcttggcgtggatccgatatcaactagatcttgagacaaatggcagtattcatccacaattttaaaagaaaaggggggattggggggtacagtgcaggggaaagaatagtagacataatagcaacagacatacaaactaaag

SEQ ID NO: 13284 - DNA, 301 bp, Artificial Sequence
  Zfhx3.1_Crebbp.3
  crRNA array
  misc_feature (148)..(157): n is a, c, g, or t
cttggctttatatatcttgtggaaaggacgaaacaccgtaatttctactaagtgtagatcgctgcgaggtgtgtaactataatttctactaagtgtagatggctccgccgcccgcccgcgtaatttctactaagtgtagatttttttnnnnnnnnnnaagcttggcgtggatccgatatcaactagatcttgagacaaatggcagtattcatccacaattttaaaagaaaaggggggattggggggtacagtgcaggggaaagaatagtagacataatagcaacagacatacaaactaaag

SEQ ID NO: 13285 - DNA, 301 bp, Artificial Sequence
  Zfhx3.1_Crebbp.4
  crRNA array
  misc_feature (148)..(157): n is a, c, g, or t
cttggctttatatatcttgtggaaaggacgaaacaccgtaatttctactaagtgtagatcgctgcgaggtgtgtaactataatttctactaagtgtagattggactagatgactccgtagtaatttctactaagtgtagatttttttnnnnnnnnnnaagcttggcgtggatccgatatcaactagatcttgagacaaatggcagtattcatccacaattttaaaagaaaaggggggattggggggtacagtgcaggggaaagaatagtagacataatagcaacagacatacaaactaaag

SEQ ID NO: 13286 - DNA, 301 bp, Artificial Sequence
  Zfhx3.2_Crebbp.1
  crRNA array
  misc_feature (148)..(157): n is a, c, g, or t
cttggctttatatatcttgtggaaaggacgaaacaccgtaatttctactaagtgtagatacgtgcgacacaaaagcaactaatttctactaagtgtagatctcacggcggcggcgggccgtaatttctactaagtgtagatttttttnnnnnnnnnnaagcttggcgtggatccgatatcaactagatcttgagacaaatggcagtattcatccacaattttaaaagaaaaggggggattggggggtacagtgcaggggaaagaatagtagacataatagcaacagacatacaaactaaag

SEQ ID NO: 13287 - DNA, 301 bp, Artificial Sequence
  Zfhx3.2_Crebbp.2
  crRNA array
  misc_feature (148)..(157): n is a, c, g, or t
cttggctttatatatcttgtggaaaggacgaaacaccgtaatttctactaagtgtagatacgtgcgacacaaaagcaactaatttctactaagtgtagatcgcgagcaggtgaagatggctaatttctactaagtgtagatttttttnnnnnnnnnnaagcttggcgtggatccgatatcaactagatcttgagacaaatggcagtattcatccacaattttaaaagaaaaggggggattggggggtacagtgcaggggaaagaatagtagacataatagcaacagacatacaaactaaag

SEQ ID NO: 13288 - DNA, 301 bp, Artificial Sequence
  Zfhx3.2_Crebbp.3
  crRNA array
  misc_feature (148)..(157): n is a, c, g, or t
cttggctttatatatcttgtggaaaggacgaaacaccgtaatttctactaagtgtagatacgtgcgacacaaaagcaactaatttctactaagtgtagatggctccgccgcccgcccgcgtaatttctactaagtgtagatttttttnnnnnnnnnnaagcttggcgtggatccgatatcaactagatcttgagacaaatggcagtattcatccacaattttaaaagaaaaggggggattggggggtacagtgcaggggaaagaatagtagacataatagcaacagacatacaaactaaag

SEQ ID NO: 13289 - DNA, 301 bp, Artificial Sequence
  Zfhx3.2_Crebbp.4
  crRNA array
  misc_feature (148)..(157): n is a, c, g, or t
cttggctttatatatcttgtggaaaggacgaaacaccgtaatttctactaagtgtagatacgtgcgacacaaaagcaactaatttctactaagtgtagattggactagatgactccgtagtaatttctactaagtgtagatttttttnnnnnnnnnnaagcttggcgtggatccgatatcaactagatcttgagacaaatggcagtattcatccacaattttaaaagaaaaggggggattggggggtacagtgcaggggaaagaatagtagacataatagcaacagacatacaaactaaag

SEQ ID NO: 13290 - DNA, 301 bp, Artificial Sequence
  Zfhx3.3_Crebbp.1
  crRNA array
  misc_feature (148)..(157): n is a, c, g, or t
cttggctttatatatcttgtggaaaggacgaaacaccgtaatttctactaagtgtagattgctctacggcaagaggaaataatttctactaagtgtagatctcacggcggcggcgggccgtaatttctactaagtgtagatttttttnnnnnnnnnnaagcttggcgtggatccgatatcaactagatcttgagacaaatggcagtattcatccacaattttaaaagaaaaggggggattggggggtacagtgcaggggaaagaatagtagacataatagcaacagacatacaaactaaag

SEQ ID NO: 13291 - DNA, 301 bp, Artificial Sequence
  Zfhx3.3_Crebbp.2
  crRNA array
  misc_feature (148)..(157): n is a, c, g, or t
cttggctttatatatcttgtggaaaggacgaaacaccgtaatttctactaagtgtagattgctctacggcaagaggaaataatttctactaagtgtagatcgcgagcaggtgaagatggctaatttctactaagtgtagatttttttnnnnnnnnnnaagcttggcgtggatccgatatcaactagatcttgagacaaatggcagtattcatccacaattttaaaagaaaaggggggattggggggtacagtgcaggggaaagaatagtagacataatagcaacagacatacaaactaaag

SEQ ID NO: 13292 - DNA, 301 bp, Artificial Sequence
  Zfhx3.3_Crebbp.3
  crRNA array
  misc_feature (148)..(157): n is a, c, g, or t
cttggctttatatatcttgtggaaaggacgaaacaccgtaatttctactaagtgtagattgctctacggcaagaggaaataatttctactaagtgtagatggctccgccgcccgcccgcgtaatttctactaagtgtagatttttttnnnnnnnnnnaagcttggcgtggatccgatatcaactagatcttgagacaaatggcagtattcatccacaattttaaaagaaaaggggggattggggggtacagtgcaggggaaagaatagtagacataatagcaacagacatacaaactaaag

SEQ ID NO: 13293 - DNA, 301 bp, Artificial Sequence
  Zfhx3.3_Crebbp.4
  crRNA array
  misc_feature (148)..(157): n is a, c, g, or t
cttggctttatatatcttgtggaaaggacgaaacaccgtaatttctactaagtgtagattgctctacggcaagaggaaataatttctactaagtgtagattggactagatgactccgtagtaatttctactaagtgtagatttttttnnnnnnnnnnaagcttggcgtggatccgatatcaactagatcttgagacaaatggcagtattcatccacaattttaaaagaaaaggggggattggggggtacagtgcaggggaaagaatagtagacataatagcaacagacatacaaactaaag

SEQ ID NO: 13294 - DNA, 301 bp, Artificial Sequence
  Zfhx3.4_Crebbp.1
  crRNA array
  misc_feature (148)..(157): n is a, c, g, or t
cttggctttatatatcttgtggaaaggacgaaacaccgtaatttctactaagtgtagatagtgagcggcagactgcgagtaatttctactaagtgtagatctcacggcggcggcgggccgtaatttctactaagtgtagatttttttnnnnnnnnnnaagcttggcgtggatccgatatcaactagatcttgagacaaatggcagtattcatccacaattttaaaagaaaaggggggattggggggtacagtgcaggggaaagaatagtagacataatagcaacagacatacaaactaaag

SEQ ID NO: 13295 - DNA, 301 bp, Artificial Sequence
  Zfhx3.4_Crebbp.2
  crRNA array
  misc_feature (148)..(157): n is a, c, g, or t
cttggctttatatatcttgtggaaaggacgaaacaccgtaatttctactaagtgtagatagtgagcggcagactgcgagtaatttctactaagtgtagatcgcgagcaggtgaagatggctaatttctactaagtgtagatttttttnnnnnnnnnnaagcttggcgtggatccgatatcaactagatcttgagacaaatggcagtattcatccacaattttaaaagaaaaggggggattggggggtacagtgcaggggaaagaatagtagacataatagcaacagacatacaaactaaag

SEQ ID NO: 13296 - DNA, 301 bp, Artificial Sequence
  Zfhx3.4_Crebbp.3
  crRNA array
  misc_feature (148)..(157): n is a, c, g, or t
cttggctttatatatcttgtggaaaggacgaaacaccgtaatttctactaagtgtagatagtgagcggcagactgcgagtaatttctactaagtgtagatggctccgccgcccgcccgcgtaatttctactaagtgtagatttttttnnnnnnnnnnaagcttggcgtggatccgatatcaactagatcttgagacaaatggcagtattcatccacaattttaaaagaaaaggggggattggggggtacagtgcaggggaaagaatagtagacataatagcaacagacatacaaactaaag

SEQ ID NO: 13297 - DNA, 301 bp, Artificial Sequence
  Zfhx3.4_Crebbp.4
  crRNA array
  misc_feature (148)..(157): n is a, c, g, or t
cttggctttatatatcttgtggaaaggacgaaacaccgtaatttctactaagtgtagatagtgagcggcagactgcgagtaatttctactaagtgtagattggactagatgactccgtagtaatttctactaagtgtagatttttttnnnnnnnnnnaagcttggcgtggatccgatatcaactagatcttgagacaaatggcagtattcatccacaattttaaaagaaaaggggggattggggggtacagtgcaggggaaagaatagtagacataatagcaacagacatacaaactaaag

SEQ ID NO: 13298 - DNA, 301 bp, Artificial Sequence
  Zfhx3.1_Cdkn2a.1
  crRNA array
  misc_feature (148)..(157): n is a, c, g, or t
cttggctttatatatcttgtggaaaggacgaaacaccgtaatttctactaagtgtagatcgctgcgaggtgtgtaactataatttctactaagtgtagatcaatcacgggagggagcagataatttctactaagtgtagatttttttnnnnnnnnnnaagcttggcgtggatccgatatcaactagatcttgagacaaatggcagtattcatccacaattttaaaagaaaaggggggattggggggtacagtgcaggggaaagaatagtagacataatagcaacagacatacaaactaaag

SEQ ID NO: 13299 - DNA, 301 bp, Artificial Sequence
  Zfhx3.1_Cdkn2a.2
  crRNA array
  misc_feature (148)..(157): n is a, c, g, or t
cttggctttatatatcttgtggaaaggacgaaacaccgtaatttctactaagtgtagatcgctgcgaggtgtgtaactataatttctactaagtgtagatgcccaacgccccgaactctttaatttctactaagtgtagatttttttnnnnnnnnnnaagcttggcgtggatccgatatcaactagatcttgagacaaatggcagtattcatccacaattttaaaagaaaaggggggattggggggtacagtgcaggggaaagaatagtagacataatagcaacagacatacaaactaaag

SEQ ID NO: 13300 - DNA, 301 bp, Artificial Sequence
  Zfhx3.1_Cdkn2a.3
  crRNA array
  misc_feature (148)..(157): n is a, c, g, or t
cttggctttatatatcttgtggaaaggacgaaacaccgtaatttctactaagtgtagatcgctgcgaggtgtgtaactataatttctactaagtgtagattgtaccgctgggaacgtcgctaatttctactaagtgtagatttttttnnnnnnnnnnaagcttggcgtggatccgatatcaactagatcttgagacaaatggcagtattcatccacaattttaaaagaaaaggggggattggggggtacagtgcaggggaaagaatagtagacataatagcaacagacatacaaactaaag

SEQ ID NO: 13301 - DNA, 301 bp, Artificial Sequence
  Zfhx3.1_Cdkn2a.4
  crRNA array
  misc_feature (148)..(157): n is a, c, g, or t
cttggctttatatatcttgtggaaaggacgaaacaccgtaatttctactaagtgtagatcgctgcgaggtgtgtaactataatttctactaagtgtagataagccacatgctagacacgctaatttctactaagtgtagatttttttnnnnnnnnnnaagcttggcgtggatccgatatcaactagatcttgagacaaatggcagtattcatccacaattttaaaagaaaaggggggattggggggtacagtgcaggggaaagaatagtagacataatagcaacagacatacaaactaaag

SEQ ID NO: 13302 - DNA, 301 bp, Artificial Sequence
  Zfhx3.2_Cdkn2a.1
  crRNA array
  misc_feature (148)..(157): n is a, c, g, or t
cttggctttatatatcttgtggaaaggacgaaacaccgtaatttctactaagtgtagatacgtgcgacacaaaagcaactaatttctactaagtgtagatcaatcacgggagggagcagataatttctactaagtgtagatttttttnnnnnnnnnnaagcttggcgtggatccgatatcaactagatcttgagacaaatggcagtattcatccacaattttaaaagaaaaggggggattggggggtacagtgcaggggaaagaatagtagacataatagcaacagacatacaaactaaag

SEQ ID NO: 13303 - DNA, 301 bp, Artificial Sequence
  Zfhx3.2_Cdkn2a.2
  crRNA array
  misc_feature (148)..(157): n is a, c, g, or t
cttggctttatatatcttgtggaaaggacgaaacaccgtaatttctactaagtgtagatacgtgcgacacaaaagcaactaatttctactaagtgtagatgcccaacgccccgaactctttaatttctactaagtgtagatttttttnnnnnnnnnnaagcttggcgtggatccgatatcaactagatcttgagacaaatggcagtattcatccacaattttaaaagaaaaggggggattggggggtacagtgcaggggaaagaatagtagacataatagcaacagacatacaaactaaag

SEQ ID NO: 13304 - DNA, 301 bp, Artificial Sequence
  Zfhx3.2_Cdkn2a.3
  crRNA array
  misc_feature (148)..(157): n is a, c, g, or t
cttggctttatatatcttgtggaaaggacgaaacaccgtaatttctactaagtgtagatacgtgcgacacaaaagcaactaatttctactaagtgtagattgtaccgctgggaacgtcgctaatttctactaagtgtagatttttttnnnnnnnnnnaagcttggcgtggatccgatatcaactagatcttgagacaaatggcagtattcatccacaattttaaaagaaaaggggggattggggggtacagtgcaggggaaagaatagtagacataatagcaacagacatacaaactaaag

SEQ ID NO: 13305 - DNA, 301 bp, Artificial Sequence
  Zfhx3.2_Cdkn2a.4
  crRNA array
  misc_feature (148)..(157): n is a, c, g, or t
cttggctttatatatcttgtggaaaggacgaaacaccgtaatttctactaagtgtagatacgtgcgacacaaaagcaactaatttctactaagtgtagataagccacatgctagacacgctaatttctactaagtgtagatttttttnnnnnnnnnnaagcttggcgtggatccgatatcaactagatcttgagacaaatggcagtattcatccacaattttaaaagaaaaggggggattggggggtacagtgcaggggaaagaatagtagacataatagcaacagacatacaaactaaag

SEQ ID NO: 13306 - DNA, 301 bp, Artificial Sequence
  Zfhx3.3_Cdkn2a.1
  crRNA array
  misc_feature (148)..(157): n is a, c, g, or t
cttggctttatatatcttgtggaaaggacgaaacaccgtaatttctactaagtgtagattgctctacggcaagaggaaataatttctactaagtgtagatcaatcacgggagggagcagataatttctactaagtgtagatttttttnnnnnnnnnnaagcttggcgtggatccgatatcaactagatcttgagacaaatggcagtattcatccacaattttaaaagaaaaggggggattggggggtacagtgcaggggaaagaatagtagacataatagcaacagacatacaaactaaag

SEQ ID NO: 13307 - DNA, 301 bp, Artificial Sequence
  Zfhx3.3_Cdkn2a.2
  crRNA array
  misc_feature (148)..(157): n is a, c, g, or t
cttggctttatatatcttgtggaaaggacgaaacaccgtaatttctactaagtgtagattgctctacggcaagaggaaataatttctactaagtgtagatgcccaacgccccgaactctttaatttctactaagtgtagatttttttnnnnnnnnnnaagcttggcgtggatccgatatcaactagatcttgagacaaatggcagtattcatccacaattttaaaagaaaaggggggattggggggtacagtgcaggggaaagaatagtagacataatagcaacagacatacaaactaaag

SEQ ID NO: 13308 - DNA, 301 bp, Artificial Sequence
  Zfhx3.3_Cdkn2a.3
  crRNA array
  misc_feature (148)..(157): n is a, c, g, or t
cttggctttatatatcttgtggaaaggacgaaacaccgtaatttctactaagtgtagattgctctacggcaagaggaaataatttctactaagtgtagattgtaccgctgggaacgtcgctaatttctactaagtgtagatttttttnnnnnnnnnnaagcttggcgtggatccgatatcaactagatcttgagacaaatggcagtattcatccacaattttaaaagaaaaggggggattggggggtacagtgcaggggaaagaatagtagacataatagcaacagacatacaaactaaag

SEQ ID NO: 13309 - DNA, 301 bp, Artificial Sequence
  Zfhx3.3_Cdkn2a.4
  crRNA array
  misc_feature (148)..(157): n is a, c, g, or t
cttggctttatatatcttgtggaaaggacgaaacaccgtaatttctactaagtgtagattgctctacggcaagaggaaataatttctactaagtgtagataagccacatgctagacacgctaatttctactaagtgtagatttttttnnnnnnnnnnaagcttggcgtggatccgatatcaactagatcttgagacaaatggcagtattcatccacaattttaaaagaaaaggggggattggggggtacagtgcaggggaaagaatagtagacataatagcaacagacatacaaactaaag

SEQ ID NO: 13310 - DNA, 301 bp, Artificial Sequence
  Zfhx3.4_Cdkn2a.1
  crRNA array
  misc_feature (148)..(157): n is a, c, g, or t
cttggctttatatatcttgtggaaaggacgaaacaccgtaatttctactaagtgtagatagtgagcggcagactgcgagtaatttctactaagtgtagatcaatcacgggagggagcagataatttctactaagtgtagatttttttnnnnnnnnnnaagcttggcgtggatccgatatcaactagatcttgagacaaatggcagtattcatccacaattttaaaagaaaaggggggattggggggtacagtgcaggggaaagaatagtagacataatagcaacagacatacaaactaaag

SEQ ID NO: 13311 - DNA, 301 bp, Artificial Sequence
  Zfhx3.4_Cdkn2a.2
  crRNA array
  misc_feature (148)..(157): n is a, c, g, or t
cttggctttatatatcttgtggaaaggacgaaacaccgtaatttctactaagtgtagatagtgagcggcagactgcgagtaatttctactaagtgtagatgcccaacgccccgaactctttaatttctactaagtgtagatttttttnnnnnnnnnnaagcttggcgtggatccgatatcaactagatcttgagacaaatggcagtattcatccacaattttaaaagaaaaggggggattggggggtacagtgcaggggaaagaatagtagacataatagcaacagacatacaaactaaag

SEQ ID NO: 13312 - DNA, 301 bp, Artificial Sequence
  Zfhx3.4_Cdkn2a.3
  crRNA array
  misc_feature (148)..(157): n is a, c, g, or t
cttggctttatatatcttgtggaaaggacgaaacaccgtaatttctactaagtgtagatagtgagcggcagactgcgagtaatttctactaagtgtagattgtaccgctgggaacgtcgctaatttctactaagtgtagatttttttnnnnnnnnnnaagcttggcgtggatccgatatcaactagatcttgagacaaatggcagtattcatccacaattttaaaagaaaaggggggattggggggtacagtgcaggggaaagaatagtagacataatagcaacagacatacaaactaaag

SEQ ID NO: 13313 - DNA, 301 bp, Artificial Sequence
  Zfhx3.4_Cdkn2a.4
  crRNA array
  misc_feature (148)..(157): n is a, c, g, or t
cttggctttatatatcttgtggaaaggacgaaacaccgtaatttctactaagtgtagatagtgagcggcagactgcgagtaatttctactaagtgtagataagccacatgctagacacgctaatttctactaagtgtagatttttttnnnnnnnnnnaagcttggcgtggatccgatatcaactagatcttgagacaaatggcagtattcatccacaattttaaaagaaaaggggggattggggggtacagtgcaggggaaagaatagtagacataatagcaacagacatacaaactaaag

SEQ ID NO: 13314 - DNA, 301 bp, Artificial Sequence
  Zfhx3.1_Wrn.1
  crRNA array
  misc_feature (148)..(157): n is a, c, g, or t
cttggctttatatatcttgtggaaaggacgaaacaccgtaatttctactaagtgtagatcgctgcgaggtgtgtaactataatttctactaagtgtagatgcaaaccactcgggtaattttaatttctactaagtgtagatttttttnnnnnnnnnnaagcttggcgtggatccgatatcaactagatcttgagacaaatggcagtattcatccacaattttaaaagaaaaggggggattggggggtacagtgcaggggaaagaatagtagacataatagcaacagacatacaaactaaag

SEQ ID NO: 13315 - DNA, 301 bp, Artificial Sequence
  Zfhx3.1_Wrn.2
  crRNA array
  misc_feature (148)..(157): n is a, c, g, or t
cttggctttatatatcttgtggaaaggacgaaacaccgtaatttctactaagtgtagatcgctgcgaggtgtgtaactataatttctactaagtgtagatgccatgtccagcagaacctttaatttctactaagtgtagatttttttnnnnnnnnnnaagcttggcgtggatccgatatcaactagatcttgagacaaatggcagtattcatccacaattttaaaagaaaaggggggattggggggtacagtgcaggggaaagaatagtagacataatagcaacagacatacaaactaaag

SEQ ID NO: 13316 - DNA, 301 bp, Artificial Sequence
  Zfhx3.1_Wrn.3
  crRNA array
  misc_feature (148)..(157): n is a, c, g, or t
cttggctttatatatcttgtggaaaggacgaaacaccgtaatttctactaagtgtagatcgctgcgaggtgtgtaactataatttctactaagtgtagatctgcagcaggccaccgcaattaatttctactaagtgtagatttttttnnnnnnnnnnaagcttggcgtggatccgatatcaactagatcttgagacaaatggcagtattcatccacaattttaaaagaaaaggggggattggggggtacagtgcaggggaaagaatagtagacataatagcaacagacatacaaactaaag

SEQ ID NO: 13317 - DNA, 301 bp, Artificial Sequence
  Zfhx3.1_Wrn.4
  crRNA array
  misc_feature (148)..(157): n is a, c, g, or t
cttggctttatatatcttgtggaaaggacgaaacaccgtaatttctactaagtgtagatcgctgcgaggtgtgtaactataatttctactaagtgtagattcgaaggacaatagatgatgtaatttctactaagtgtagatttttttnnnnnnnnnnaagcttggcgtggatccgatatcaactagatcttgagacaaatggcagtattcatccacaattttaaaagaaaaggggggattggggggtacagtgcaggggaaagaatagtagacataatagcaacagacatacaaactaaag

SEQ ID NO: 13318 - DNA, 301 bp, Artificial Sequence
  Zfhx3.2_Wrn.1
  crRNA array
  misc_feature (148)..(157): n is a, c, g, or t
cttggctttatatatcttgtggaaaggacgaaacaccgtaatttctactaagtgtagatacgtgcgacacaaaagcaactaatttctactaagtgtagatgcaaaccactcgggtaattttaatttctactaagtgtagatttttttnnnnnnnnnnaagcttggcgtggatccgatatcaactagatcttgagacaaatggcagtattcatccacaattttaaaagaaaaggggggattggggggtacagtgcaggggaaagaatagtagacataatagcaacagacatacaaactaaag

SEQ ID NO: 13319 - DNA, 301 bp, Artificial Sequence
  Zfhx3.2_Wrn.2
  crRNA array
  misc_feature (148)..(157): n is a, c, g, or t
cttggctttatatatcttgtggaaaggacgaaacaccgtaatttctactaagtgtagatacgtgcgacacaaaagcaactaatttctactaagtgtagatgccatgtccagcagaacctttaatttctactaagtgtagatttttttnnnnnnnnnnaagcttggcgtggatccgatatcaactagatcttgagacaaatggcagtattcatccacaattttaaaagaaaaggggggattggggggtacagtgcaggggaaagaatagtagacataatagcaacagacatacaaactaaag

SEQ ID NO: 13320 - DNA, 301 bp, Artificial Sequence
  Zfhx3.2_Wrn.3
  crRNA array
  misc_feature (148)..(157): n is a, c, g, or t
cttggctttatatatcttgtggaaaggacgaaacaccgtaatttctactaagtgtagatacgtgcgacacaaaagcaactaatttctactaagtgtagatctgcagcaggccaccgcaattaatttctactaagtgtagatttttttnnnnnnnnnnaagcttggcgtggatccgatatcaactagatcttgagacaaatggcagtattcatccacaattttaaaagaaaaggggggattggggggtacagtgcaggggaaagaatagtagacataatagcaacagacatacaaactaaag

SEQ ID NO: 13321 - DNA, 301 bp, Artificial Sequence
  Zfhx3.2_Wrn.4
  crRNA array
  misc_feature (148)..(157): n is a, c, g, or t
cttggctttatatatcttgtggaaaggacgaaacaccgtaatttctactaagtgtagatacgtgcgacacaaaagcaactaatttctactaagtgtagattcgaaggacaatagatgatgtaatttctactaagtgtagatttttttnnnnnnnnnnaagcttggcgtggatccgatatcaactagatcttgagacaaatggcagtattcatccacaattttaaaagaaaaggggggattggggggtacagtgcaggggaaagaatagtagacataatagcaacagacatacaaactaaag

SEQ ID NO: 13322 - DNA, 301 bp, Artificial Sequence
  Zfhx3.3_Wrn.1
  crRNA array
  misc_feature (148)..(157): n is a, c, g, or t
cttggctttatatatcttgtggaaaggacgaaacaccgtaatttctactaagtgtagattgctctacggcaagaggaaataatttctactaagtgtagatgcaaaccactcgggtaattttaatttctactaagtgtagatttttttnnnnnnnnnnaagcttggcgtggatccgatatcaactagatcttgagacaaatggcagtattcatccacaattttaaaagaaaaggggggattggggggtacagtgcaggggaaagaatagtagacataatagcaacagacatacaaactaaag

SEQ ID NO: 13323 - DNA, 301 bp, Artificial Sequence
  Zfhx3.3_Wrn.2
  crRNA array
  misc_feature (148)..(157): n is a, c, g, or t
cttggctttatatatcttgtggaaaggacgaaacaccgtaatttctactaagtgtagattgctctacggcaagaggaaataatttctactaagtgtagatgccatgtccagcagaacctttaatttctactaagtgtagatttttttnnnnnnnnnnaagcttggcgtggatccgatatcaactagatcttgagacaaatggcagtattcatccacaattttaaaagaaaaggggggattggggggtacagtgcaggggaaagaatagtagacataatagcaacagacatacaaactaaag

SEQ ID NO: 13324 - DNA, 301 bp, Artificial Sequence
  Zfhx3.3_Wrn.3
  crRNA array
  misc_feature (148)..(157): n is a, c, g, or t
cttggctttatatatcttgtggaaaggacgaaacaccgtaatttctactaagtgtagattgctctacggcaagaggaaataatttctactaagtgtagatctgcagcaggccaccgcaattaatttctactaagtgtagatttttttnnnnnnnnnnaagcttggcgtggatccgatatcaactagatcttgagacaaatggcagtattcatccacaattttaaaagaaaaggggggattggggggtacagtgcaggggaaagaatagtagacataatagcaacagacatacaaactaaag

SEQ ID NO: 13325 - DNA, 301 bp, Artificial Sequence
  Zfhx3.3_Wrn.4
  crRNA array
  misc_feature (148)..(157): n is a, c, g, or t
cttggctttatatatcttgtggaaaggacgaaacaccgtaatttctactaagtgtagattgctctacggcaagaggaaataatttctactaagtgtagattcgaaggacaatagatgatgtaatttctactaagtgtagatttttttnnnnnnnnnnaagcttggcgtggatccgatatcaactagatcttgagacaaatggcagtattcatccacaattttaaaagaaaaggggggattggggggtacagtgcaggggaaagaatagtagacataatagcaacagacatacaaactaaag

SEQ ID NO: 13326 - DNA, 301 bp, Artificial Sequence
  Zfhx3.4_Wrn.1
  crRNA array
  misc_feature (148)..(157): n is a, c, g, or t
cttggctttatatatcttgtggaaaggacgaaacaccgtaatttctactaagtgtagatagtgagcggcagactgcgagtaatttctactaagtgtagatgcaaaccactcgggtaattttaatttctactaagtgtagatttttttnnnnnnnnnnaagcttggcgtggatccgatatcaactagatcttgagacaaatggcagtattcatccacaattttaaaagaaaaggggggattggggggtacagtgcaggggaaagaatagtagacataatagcaacagacatacaaactaaag

SEQ ID NO: 13327 - DNA, 301 bp, Artificial Sequence
  Zfhx3.4_Wrn.2
  crRNA array
  misc_feature (148)..(157): n is a, c, g, or t
cttggctttatatatcttgtggaaaggacgaaacaccgtaatttctactaagtgtagatagtgagcggcagactgcgagtaatttctactaagtgtagatgccatgtccagcagaacctttaatttctactaagtgtagatttttttnnnnnnnnnnaagcttggcgtggatccgatatcaactagatcttgagacaaatggcagtattcatccacaattttaaaagaaaaggggggattggggggtacagtgcaggggaaagaatagtagacataatagcaacagacatacaaactaaag

SEQ ID NO: 13328 - DNA, 301 bp, Artificial Sequence
  Zfhx3.4_Wrn.3
  crRNA array
  misc_feature (148)..(157): n is a, c, g, or t
cttggctttatatatcttgtggaaaggacgaaacaccgtaatttctactaagtgtagatagtgagcggcagactgcgagtaatttctactaagtgtagatctgcagcaggccaccgcaattaatttctactaagtgtagatttttttnnnnnnnnnnaagcttggcgtggatccgatatcaactagatcttgagacaaatggcagtattcatccacaattttaaaagaaaaggggggattggggggtacagtgcaggggaaagaatagtagacataatagcaacagacatacaaactaaag

SEQ ID NO: 13329 - DNA, 301 bp, Artificial Sequence
  Zfhx3.4_Wrn.4
  crRNA array
  misc_feature (148)..(157): n is a, c, g, or t
cttggctttatatatcttgtggaaaggacgaaacaccgtaatttctactaagtgtagatagtgagcggcagactgcgagtaatttctactaagtgtagattcgaaggacaatagatgatgtaatttctactaagtgtagatttttttnnnnnnnnnnaagcttggcgtggatccgatatcaactagatcttgagacaaatggcagtattcatccacaattttaaaagaaaaggggggattggggggtacagtgcaggggaaagaatagtagacataatagcaacagacatacaaactaaag

SEQ ID NO: 13330 - DNA, 301 bp, Artificial Sequence
  Zfhx3.1_Brca2.1
  crRNA array
  misc_feature (148)..(157): n is a, c, g, or t
cttggctttatatatcttgtggaaaggacgaaacaccgtaatttctactaagtgtagatcgctgcgaggtgtgtaactataatttctactaagtgtagatctaagcgtagaaccagaaattaatttctactaagtgtagatttttttnnnnnnnnnnaagcttggcgtggatccgatatcaactagatcttgagacaaatggcagtattcatccacaattttaaaagaaaaggggggattggggggtacagtgcaggggaaagaatagtagacataatagcaacagacatacaaactaaag

SEQ ID NO: 13331 - DNA, 301 bp, Artificial Sequence
  Zfhx3.1_Brca2.2
  crRNA array
  misc_feature (148)..(157): n is a, c, g, or t
cttggctttatatatcttgtggaaaggacgaaacaccgtaatttctactaagtgtagatcgctgcgaggtgtgtaactataatttctactaagtgtagatgatccaggtgtaacaagccataatttctactaagtgtagatttttttnnnnnnnnnnaagcttggcgtggatccgatatcaactagatcttgagacaaatggcagtattcatccacaattttaaaagaaaaggggggattggggggtacagtgcaggggaaagaatagtagacataatagcaacagacatacaaactaaag

SEQ ID NO: 13332 - DNA, 301 bp, Artificial Sequence
  Zfhx3.1_Brca2.3
  crRNA array
  misc_feature (148)..(157): n is a, c, g, or t
cttggctttatatatcttgtggaaaggacgaaacaccgtaatttctactaagtgtagatcgctgcgaggtgtgtaactataatttctactaagtgtagattgaatataaactgggccacttaatttctactaagtgtagatttttttnnnnnnnnnnaagcttggcgtggatccgatatcaactagatcttgagacaaatggcagtattcatccacaattttaaaagaaaaggggggattggggggtacagtgcaggggaaagaatagtagacataatagcaacagacatacaaactaaag

SEQ ID NO: 13333 - DNA, 301 bp, Artificial Sequence
  Zfhx3.1_Brca2.4
  crRNA array
  misc_feature (148)..(157): n is a, c, g, or t
cttggctttatatatcttgtggaaaggacgaaacaccgtaatttctactaagtgtagatcgctgcgaggtgtgtaactataatttctactaagtgtagatgaaacgccgtatatatagagtaatttctactaagtgtagatttttttnnnnnnnnnnaagcttggcgtggatccgatatcaactagatcttgagacaaatggcagtattcatccacaattttaaaagaaaaggggggattggggggtacagtgcaggggaaagaatagtagacataatagcaacagacatacaaactaaag

SEQ ID NO: 13334 - DNA, 301 bp, Artificial Sequence
  Zfhx3.2_Brca2.1
  crRNA array
  misc_feature (148)..(157): n is a, c, g, or t
cttggctttatatatcttgtggaaaggacgaaacaccgtaatttctactaagtgtagatacgtgcgacacaaaagcaactaatttctactaagtgtagatctaagcgtagaaccagaaattaatttctactaagtgtagatttttttnnnnnnnnnnaagcttggcgtggatccgatatcaactagatcttgagacaaatggcagtattcatccacaattttaaaagaaaaggggggattggggggtacagtgcaggggaaagaatagtagacataatagcaacagacatacaaactaaag

SEQ ID NO: 13335 - DNA, 301 bp, Artificial Sequence
  Zfhx3.2_Brca2.2
  crRNA array
  misc_feature (148)..(157): n is a, c, g, or t
cttggctttatatatcttgtggaaaggacgaaacaccgtaatttctactaagtgtagatacgtgcgacacaaaagcaactaatttctactaagtgtagatgatccaggtgtaacaagccataatttctactaagtgtagatttttttnnnnnnnnnnaagcttggcgtggatccgatatcaactagatcttgagacaaatggcagtattcatccacaattttaaaagaaaaggggggattggggggtacagtgcaggggaaagaatagtagacataatagcaacagacatacaaactaaag

SEQ ID NO: 13336 - DNA, 301 bp, Artificial Sequence
  Zfhx3.2_Brca2.3
  crRNA array
  misc_feature (148)..(157): n is a, c, g, or t
cttggctttatatatcttgtggaaaggacgaaacaccgtaatttctactaagtgtagatacgtgcgacacaaaagcaactaatttctactaagtgtagattgaatataaactgggccacttaatttctactaagtgtagatttttttnnnnnnnnnnaagcttggcgtggatccgatatcaactagatcttgagacaaatggcagtattcatccacaattttaaaagaaaaggggggattggggggtacagtgcaggggaaagaatagtagacataatagcaacagacatacaaactaaag

SEQ ID NO: 13337 - DNA, 301 bp, Artificial Sequence
  Zfhx3.2_Brca2.4
  crRNA array
  misc_feature (148)..(157): n is a, c, g, or t
cttggctttatatatcttgtggaaaggacgaaacaccgtaatttctactaagtgtagatacgtgcgacacaaaagcaactaatttctactaagtgtagatgaaacgccgtatatatagagtaatttctactaagtgtagatttttttnnnnnnnnnnaagcttggcgtggatccgatatcaactagatcttgagacaaatggcagtattcatccacaattttaaaagaaaaggggggattggggggtacagtgcaggggaaagaatagtagacataatagcaacagacatacaaactaaag

SEQ ID NO: 13338 - DNA, 301 bp, Artificial Sequence
  Zfhx3.3_Brca2.1
  crRNA array
  misc_feature (148)..(157): n is a, c, g, or t
cttggctttatatatcttgtggaaaggacgaaacaccgtaatttctactaagtgtagattgctctacggcaagaggaaataatttctactaagtgtagatctaagcgtagaaccagaaattaatttctactaagtgtagatttttttnnnnnnnnnnaagcttggcgtggatccgatatcaactagatcttgagacaaatggcagtattcatccacaattttaaaagaaaaggggggattggggggtacagtgcaggggaaagaatagtagacataatagcaacagacatacaaactaaag

SEQ ID NO: 13339 - DNA, 301 bp, Artificial Sequence
  Zfhx3.3_Brca2.2
  crRNA array
  misc_feature (148)..(157): n is a, c, g, or t
cttggctttatatatcttgtggaaaggacgaaacaccgtaatttctactaagtgtagattgctctacggcaagaggaaataatttctactaagtgtagatgatccaggtgtaacaagccataatttctactaagtgtagatttttttnnnnnnnnnnaagcttggcgtggatccgatatcaactagatcttgagacaaatggcagtattcatccacaattttaaaagaaaaggggggattggggggtacagtgcaggggaaagaatagtagacataatagcaacagacatacaaactaaag

SEQ ID NO: 13340 - DNA, 301 bp, Artificial Sequence
  Zfhx3.3_Brca2.3
  crRNA array
  misc_feature (148)..(157): n is a, c, g, or t
cttggctttatatatcttgtggaaaggacgaaacaccgtaatttctactaagtgtagattgctctacggcaagaggaaataatttctactaagtgtagattgaatataaactgggccacttaatttctactaagtgtagatttttttnnnnnnnnnnaagcttggcgtggatccgatatcaactagatcttgagacaaatggcagtattcatccacaattttaaaagaaaaggggggattggggggtacagtgcaggggaaagaatagtagacataatagcaacagacatacaaactaaag

SEQ ID NO: 13341 - DNA, 301 bp, Artificial Sequence
  Zfhx3.3_Brca2.4
  crRNA array
  misc_feature (148)..(157): n is a, c, g, or t
cttggctttatatatcttgtggaaaggacgaaacaccgtaatttctactaagtgtagattgctctacggcaagaggaaataatttctactaagtgtagatgaaacgccgtatatatagagtaatttctactaagtgtagatttttttnnnnnnnnnnaagcttggcgtggatccgatatcaactagatcttgagacaaatggcagtattcatccacaattttaaaagaaaaggggggattggggggtacagtgcaggggaaagaatagtagacataatagcaacagacatacaaactaaag

SEQ ID NO: 13342 - DNA, 301 bp, Artificial Sequence
  Zfhx3.4_Brca2.1
  crRNA array
  misc_feature (148)..(157): n is a, c, g, or t
cttggctttatatatcttgtggaaaggacgaaacaccgtaatttctactaagtgtagatagtgagcggcagactgcgagtaatttctactaagtgtagatctaagcgtagaaccagaaattaatttctactaagtgtagatttttttnnnnnnnnnnaagcttggcgtggatccgatatcaactagatcttgagacaaatggcagtattcatccacaattttaaaagaaaaggggggattggggggtacagtgcaggggaaagaatagtagacataatagcaacagacatacaaactaaag

SEQ ID NO: 13343 - DNA, 301 bp, Artificial Sequence
  Zfhx3.4_Brca2.2
  crRNA array
  misc_feature (148)..(157): n is a, c, g, or t
cttggctttatatatcttgtggaaaggacgaaacaccgtaatttctactaagtgtagatagtgagcggcagactgcgagtaatttctactaagtgtagatgatccaggtgtaacaagccataatttctactaagtgtagatttttttnnnnnnnnnnaagcttggcgtggatccgatatcaactagatcttgagacaaatggcagtattcatccacaattttaaaagaaaaggggggattggggggtacagtgcaggggaaagaatagtagacataatagcaacagacatacaaactaaag

SEQ ID NO: 13344 - DNA, 301 bp, Artificial Sequence
  Zfhx3.4_Brca2.3
  crRNA array
  misc_feature (148)..(157): n is a, c, g, or t
cttggctttatatatcttgtggaaaggacgaaacaccgtaatttctactaagtgtagatagtgagcggcagactgcgagtaatttctactaagtgtagattgaatataaactgggccacttaatttctactaagtgtagatttttttnnnnnnnnnnaagcttggcgtggatccgatatcaactagatcttgagacaaatggcagtattcatccacaattttaaaagaaaaggggggattggggggtacagtgcaggggaaagaatagtagacataatagcaacagacatacaaactaaag

SEQ ID NO: 13345 - DNA, 301 bp, Artificial Sequence
  Zfhx3.4_Brca2.4
  crRNA array
  misc_feature (148)..(157): n is a, c, g, or t
cttggctttatatatcttgtggaaaggacgaaacaccgtaatttctactaagtgtagatagtgagcggcagactgcgagtaatttctactaagtgtagatgaaacgccgtatatatagagtaatttctactaagtgtagatttttttnnnnnnnnnnaagcttggcgtggatccgatatcaactagatcttgagacaaatggcagtattcatccacaattttaaaagaaaaggggggattggggggtacagtgcaggggaaagaatagtagacataatagcaacagacatacaaactaaag

SEQ ID NO: 13346 - DNA, 301 bp, Artificial Sequence
  Zfhx3.1_Apc.1
  crRNA array
  misc_feature (148)..(157): n is a, c, g, or t
cttggctttatatatcttgtggaaaggacgaaacaccgtaatttctactaagtgtagatcgctgcgaggtgtgtaactataatttctactaagtgtagatgtgatccacacgtgtagctgtaatttctactaagtgtagatttttttnnnnnnnnnnaagcttggcgtggatccgatatcaactagatcttgagacaaatggcagtattcatccacaattttaaaagaaaaggggggattggggggtacagtgcaggggaaagaatagtagacataatagcaacagacatacaaactaaag

SEQ ID NO: 13347 - DNA, 301 bp, Artificial Sequence
  Zfhx3.1_Apc.2
  crRNA array
  misc_feature (148)..(157): n is a, c, g, or t
cttggctttatatatcttgtggaaaggacgaaacaccgtaatttctactaagtgtagatcgctgcgaggtgtgtaactataatttctactaagtgtagatcatctgctcgccaagacaaataatttctactaagtgtagatttttttnnnnnnnnnnaagcttggcgtggatccgatatcaactagatcttgagacaaatggcagtattcatccacaattttaaaagaaaaggggggattggggggtacagtgcaggggaaagaatagtagacataatagcaacagacatacaaactaaag

SEQ ID NO: 13348 - DNA, 301 bp, Artificial Sequence
  Zfhx3.1_Apc.3
  crRNA array
  misc_feature (148)..(157): n is a, c, g, or t
cttggctttatatatcttgtggaaaggacgaaacaccgtaatttctactaagtgtagatcgctgcgaggtgtgtaactataatttctactaagtgtagatacgccaatcgacatgatgattaatttctactaagtgtagatttttttnnnnnnnnnnaagcttggcgtggatccgatatcaactagatcttgagacaaatggcagtattcatccacaattttaaaagaaaaggggggattggggggtacagtgcaggggaaagaatagtagacataatagcaacagacatacaaactaaag

SEQ ID NO: 13349 - DNA, 301 bp, Artificial Sequence
  Zfhx3.1_Apc.4
  crRNA array
  misc_feature (148)..(157): n is a, c, g, or t
cttggctttatatatcttgtggaaaggacgaaacaccgtaatttctactaagtgtagatcgctgcgaggtgtgtaactataatttctactaagtgtagatcaccaggggatgatgtgccctaatttctactaagtgtagatttttttnnnnnnnnnnaagcttggcgtggatccgatatcaactagatcttgagacaaatggcagtattcatccacaattttaaaagaaaaggggggattggggggtacagtgcaggggaaagaatagtagacataatagcaacagacatacaaactaaag

SEQ ID NO: 13350 - DNA, 301 bp, Artificial Sequence
  Zfhx3.2_Apc.1
  crRNA array
  misc_feature (148)..(157): n is a, c, g, or t
cttggctttatatatcttgtggaaaggacgaaacaccgtaatttctactaagtgtagatacgtgcgacacaaaagcaactaatttctactaagtgtagatgtgatccacacgtgtagctgtaatttctactaagtgtagatttttttnnnnnnnnnnaagcttggcgtggatccgatatcaactagatcttgagacaaatggcagtattcatccacaattttaaaagaaaaggggggattggggggtacagtgcaggggaaagaatagtagacataatagcaacagacatacaaactaaag

SEQ ID NO: 13351 - DNA, 301 bp, Artificial Sequence
  Zfhx3.2_Apc.2
  crRNA array
  misc_feature (148)..(157): n is a, c, g, or t
cttggctttatatatcttgtggaaaggacgaaacaccgtaatttctactaagtgtagatacgtgcgacacaaaagcaactaatttctactaagtgtagatcatctgctcgccaagacaaataatttctactaagtgtagatttttttnnnnnnnnnnaagcttggcgtggatccgatatcaactagatcttgagacaaatggcagtattcatccacaattttaaaagaaaaggggggattggggggtacagtgcaggggaaagaatagtagacataatagcaacagacatacaaactaaag

SEQ ID NO: 13352 - DNA, 301 bp, Artificial Sequence
  Zfhx3.2_Apc.3
  crRNA array
  misc_feature (148)..(157): n is a, c, g, or t
cttggctttatatatcttgtggaaaggacgaaacaccgtaatttctactaagtgtagatacgtgcgacacaaaagcaactaatttctactaagtgtagatacgccaatcgacatgatgattaatttctactaagtgtagatttttttnnnnnnnnnnaagcttggcgtggatccgatatcaactagatcttgagacaaatggcagtattcatccacaattttaaaagaaaaggggggattggggggtacagtgcaggggaaagaatagtagacataatagcaacagacatacaaactaaag

SEQ ID NO: 13353 - DNA, 301 bp, Artificial Sequence
  Zfhx3.2_Apc.4
  crRNA array
  misc_feature (148)..(157): n is a, c, g, or t
cttggctttatatatcttgtggaaaggacgaaacaccgtaatttctactaagtgtagatacgtgcgacacaaaagcaactaatttctactaagtgtagatcaccaggggatgatgtgccctaatttctactaagtgtagatttttttnnnnnnnnnnaagcttggcgtggatccgatatcaactagatcttgagacaaatggcagtattcatccacaattttaaaagaaaaggggggattggggggtacagtgcaggggaaagaatagtagacataatagcaacagacatacaaactaaag

SEQ ID NO: 13354 - DNA, 301 bp, Artificial Sequence
  Zfhx3.3_Apc.1
  crRNA array
  misc_feature (148)..(157): n is a, c, g, or t
cttggctttatatatcttgtggaaaggacgaaacaccgtaatttctactaagtgtagattgctctacggcaagaggaaataatttctactaagtgtagatgtgatccacacgtgtagctgtaatttctactaagtgtagatttttttnnnnnnnnnnaagcttggcgtggatccgatatcaactagatcttgagacaaatggcagtattcatccacaattttaaaagaaaaggggggattggggggtacagtgcaggggaaagaatagtagacataatagcaacagacatacaaactaaag

SEQ ID NO: 13355 - DNA, 301 bp, Artificial Sequence
  Zfhx3.3_Apc.2
  crRNA array
  misc_feature (148)..(157): n is a, c, g, or t
cttggctttatatatcttgtggaaaggacgaaacaccgtaatttctactaagtgtagattgctctacggcaagaggaaataatttctactaagtgtagatcatctgctcgccaagacaaataatttctactaagtgtagatttttttnnnnnnnnnnaagcttggcgtggatccgatatcaactagatcttgagacaaatggcagtattcatccacaattttaaaagaaaaggggggattggggggtacagtgcaggggaaagaatagtagacataatagcaacagacatacaaactaaag

SEQ ID NO: 13356 - DNA, 301 bp, Artificial Sequence
  Zfhx3.3_Apc.3
  crRNA array
  misc_feature (148)..(157): n is a, c, g, or t
cttggctttatatatcttgtggaaaggacgaaacaccgtaatttctactaagtgtagattgctctacggcaagaggaaataatttctactaagtgtagatacgccaatcgacatgatgattaatttctactaagtgtagatttttttnnnnnnnnnnaagcttggcgtggatccgatatcaactagatcttgagacaaatggcagtattcatccacaattttaaaagaaaaggggggattggggggtacagtgcaggggaaagaatagtagacataatagcaacagacatacaaactaaag

SEQ ID NO: 13357 - DNA, 301 bp, Artificial Sequence
  Zfhx3.3_Apc.4
  crRNA array
  misc_feature (148)..(157): n is a, c, g, or t
cttggctttatatatcttgtggaaaggacgaaacaccgtaatttctactaagtgtagattgctctacggcaagaggaaataatttctactaagtgtagatcaccaggggatgatgtgccctaatttctactaagtgtagatttttttnnnnnnnnnnaagcttggcgtggatccgatatcaactagatcttgagacaaatggcagtattcatccacaattttaaaagaaaaggggggattggggggtacagtgcaggggaaagaatagtagacataatagcaacagacatacaaactaaag

SEQ ID NO: 13358 - DNA, 301 bp, Artificial Sequence
  Zfhx3.4_Apc.1
  crRNA array
  misc_feature (148)..(157): n is a, c, g, or t
cttggctttatatatcttgtggaaaggacgaaacaccgtaatttctactaagtgtagatagtgagcggcagactgcgagtaatttctactaagtgtagatgtgatccacacgtgtagctgtaatttctactaagtgtagatttttttnnnnnnnnnnaagcttggcgtggatccgatatcaactagatcttgagacaaatggcagtattcatccacaattttaaaagaaaaggggggattggggggtacagtgcaggggaaagaatagtagacataatagcaacagacatacaaactaaag

SEQ ID NO: 13359 - DNA, 301 bp, Artificial Sequence
  Zfhx3.4_Apc.2
  crRNA array
  misc_feature (148)..(157): n is a, c, g, or t
cttggctttatatatcttgtggaaaggacgaaacaccgtaatttctactaagtgtagatagtgagcggcagactgcgagtaatttctactaagtgtagatcatctgctcgccaagacaaataatttctactaagtgtagatttttttnnnnnnnnnnaagcttggcgtggatccgatatcaactagatcttgagacaaatggcagtattcatccacaattttaaaagaaaaggggggattggggggtacagtgcaggggaaagaatagtagacataatagcaacagacatacaaactaaag

SEQ ID NO: 13360 - DNA, 301 bp, Artificial Sequence
  Zfhx3.4_Apc.3
  crRNA array
  misc_feature (148)..(157): n is a, c, g, or t
cttggctttatatatcttgtggaaaggacgaaacaccgtaatttctactaagtgtagatagtgagcggcagactgcgagtaatttctactaagtgtagatacgccaatcgacatgatgattaatttctactaagtgtagatttttttnnnnnnnnnnaagcttggcgtggatccgatatcaactagatcttgagacaaatggcagtattcatccacaattttaaaagaaaaggggggattggggggtacagtgcaggggaaagaatagtagacataatagcaacagacatacaaactaaag

SEQ ID NO: 13361 - DNA, 301 bp, Artificial Sequence
  Zfhx3.4_Apc.4
  crRNA array
  misc_feature (148)..(157): n is a, c, g, or t
cttggctttatatatcttgtggaaaggacgaaacaccgtaatttctactaagtgtagatagtgagcggcagactgcgagtaatttctactaagtgtagatcaccaggggatgatgtgccctaatttctactaagtgtagatttttttnnnnnnnnnnaagcttggcgtggatccgatatcaactagatcttgagacaaatggcagtattcatccacaattttaaaagaaaaggggggattggggggtacagtgcaggggaaagaatagtagacataatagcaacagacatacaaactaaag

SEQ ID NO: 13362 - DNA, 301 bp, Artificial Sequence
  Zfhx3.1_Fanca.1
  crRNA array
  misc_feature (148)..(157): n is a, c, g, or t
cttggctttatatatcttgtggaaaggacgaaacaccgtaatttctactaagtgtagatcgctgcgaggtgtgtaactataatttctactaagtgtagatggaggccccggggcccaccataatttctactaagtgtagatttttttnnnnnnnnnnaagcttggcgtggatccgatatcaactagatcttgagacaaatggcagtattcatccacaattttaaaagaaaaggggggattggggggtacagtgcaggggaaagaatagtagacataatagcaacagacatacaaactaaag

SEQ ID NO: 13363 - DNA, 301 bp, Artificial Sequence
  Zfhx3.1_Fanca.2
  crRNA array
  misc_feature (148)..(157): n is a, c, g, or t
cttggctttatatatcttgtggaaaggacgaaacaccgtaatttctactaagtgtagatcgctgcgaggtgtgtaactataatttctactaagtgtagatagagctaccacctagacagctaatttctactaagtgtagatttttttnnnnnnnnnnaagcttggcgtggatccgatatcaactagatcttgagacaaatggcagtattcatccacaattttaaaagaaaaggggggattggggggtacagtgcaggggaaagaatagtagacataatagcaacagacatacaaactaaag

SEQ ID NO: 13364 - DNA, 301 bp, Artificial Sequence
  Zfhx3.1_Fanca.3
  crRNA array
  misc_feature (148)..(157): n is a, c, g, or t
cttggctttatatatcttgtggaaaggacgaaacaccgtaatttctactaagtgtagatcgctgcgaggtgtgtaactataatttctactaagtgtagataccaactgctgtgcctcgggtaatttctactaagtgtagatttttttnnnnnnnnnnaagcttggcgtggatccgatatcaactagatcttgagacaaatggcagtattcatccacaattttaaaagaaaaggggggattggggggtacagtgcaggggaaagaatagtagacataatagcaacagacatacaaactaaag

SEQ ID NO: 13365 - DNA, 301 bp, Artificial Sequence
  Zfhx3.1_Fanca.4
  crRNA array
  misc_feature (148)..(157): n is a, c, g, or t
cttggctttatatatcttgtggaaaggacgaaacaccgtaatttctactaagtgtagatcgctgcgaggtgtgtaactataatttctactaagtgtagatcacccacccctggtgccaagtaatttctactaagtgtagatttttttnnnnnnnnnnaagcttggcgtggatccgatatcaactagatcttgagacaaatggcagtattcatccacaattttaaaagaaaaggggggattggggggtacagtgcaggggaaagaatagtagacataatagcaacagacatacaaactaaag

SEQ ID NO: 13366 - DNA, 301 bp, Artificial Sequence
  Zfhx3.2_Fanca.1
  crRNA array
  misc_feature (148)..(157): n is a, c, g, or t
cttggctttatatatcttgtggaaaggacgaaacaccgtaatttctactaagtgtagatacgtgcgacacaaaagcaactaatttctactaagtgtagatggaggccccggggcccaccataatttctactaagtgtagatttttttnnnnnnnnnnaagcttggcgtggatccgatatcaactagatcttgagacaaatggcagtattcatccacaattttaaaagaaaaggggggattggggggtacagtgcaggggaaagaatagtagacataatagcaacagacatacaaactaaag

SEQ ID NO: 13367 - DNA, 301 bp, Artificial Sequence
  Zfhx3.2_Fanca.2
  crRNA array
  misc_feature (148)..(157): n is a, c, g, or t
cttggctttatatatcttgtggaaaggacgaaacaccgtaatttctactaagtgtagatacgtgcgacacaaaagcaactaatttctactaagtgtagatagagctaccacctagacagctaatttctactaagtgtagatttttttnnnnnnnnnnaagcttggcgtggatccgatatcaactagatcttgagacaaatggcagtattcatccacaattttaaaagaaaaggggggattggggggtacagtgcaggggaaagaatagtagacataatagcaacagacatacaaactaaag

SEQ ID NO: 13368 - DNA, 301 bp, Artificial Sequence
  Zfhx3.2_Fanca.3
  crRNA array
  misc_feature (148)..(157): n is a, c, g, or t
cttggctttatatatcttgtggaaaggacgaaacaccgtaatttctactaagtgtagatacgtgcgacacaaaagcaactaatttctactaagtgtagataccaactgctgtgcctcgggtaatttctactaagtgtagatttttttnnnnnnnnnnaagcttggcgtggatccgatatcaactagatcttgagacaaatggcagtattcatccacaattttaaaagaaaaggggggattggggggtacagtgcaggggaaagaatagtagacataatagcaacagacatacaaactaaag

SEQ ID NO: 13369 - DNA, 301 bp, Artificial Sequence
  Zfhx3.2_Fanca.4
  crRNA array
  misc_feature (148)..(157): n is a, c, g, or t
cttggctttatatatcttgtggaaaggacgaaacaccgtaatttctactaagtgtagatacgtgcgacacaaaagcaactaatttctactaagtgtagatcacccacccctggtgccaagtaatttctactaagtgtagatttttttnnnnnnnnnnaagcttggcgtggatccgatatcaactagatcttgagacaaatggcagtattcatccacaattttaaaagaaaaggggggattggggggtacagtgcaggggaaagaatagtagacataatagcaacagacatacaaactaaag

SEQ ID NO: 13370 - DNA, 301 bp, Artificial Sequence
  Zfhx3.3_Fanca.1
  crRNA array
  misc_feature (148)..(157): n is a, c, g, or t
cttggctttatatatcttgtggaaaggacgaaacaccgtaatttctactaagtgtagattgctctacggcaagaggaaataatttctactaagtgtagatggaggccccggggcccaccataatttctactaagtgtagatttttttnnnnnnnnnnaagcttggcgtggatccgatatcaactagatcttgagacaaatggcagtattcatccacaattttaaaagaaaaggggggattggggggtacagtgcaggggaaagaatagtagacataatagcaacagacatacaaactaaag

SEQ ID NO: 13371 - DNA, 301 bp, Artificial Sequence
  Zfhx3.3_Fanca.2
  crRNA array
  misc_feature (148)..(157): n is a, c, g, or t
cttggctttatatatcttgtggaaaggacgaaacaccgtaatttctactaagtgtagattgctctacggcaagaggaaataatttctactaagtgtagatagagctaccacctagacagctaatttctactaagtgtagatttttttnnnnnnnnnnaagcttggcgtggatccgatatcaactagatcttgagacaaatggcagtattcatccacaattttaaaagaaaaggggggattggggggtacagtgcaggggaaagaatagtagacataatagcaacagacatacaaactaaag

SEQ ID NO: 13372 - DNA, 301 bp, Artificial Sequence
  Zfhx3.3_Fanca.3
  crRNA array
  misc_feature (148)..(157): n is a, c, g, or t
cttggctttatatatcttgtggaaaggacgaaacaccgtaatttctactaagtgtagattgctctacggcaagaggaaataatttctactaagtgtagataccaactgctgtgcctcgggtaatttctactaagtgtagatttttttnnnnnnnnnnaagcttggcgtggatccgatatcaactagatcttgagacaaatggcagtattcatccacaattttaaaagaaaaggggggattggggggtacagtgcaggggaaagaatagtagacataatagcaacagacatacaaactaaag

SEQ ID NO: 13373 - DNA, 301 bp, Artificial Sequence
  Zfhx3.3_Fanca.4
  crRNA array
  misc_feature (148)..(157): n is a, c, g, or t
cttggctttatatatcttgtggaaaggacgaaacaccgtaatttctactaagtgtagattgctctacggcaagaggaaataatttctactaagtgtagatcacccacccctggtgccaagtaatttctactaagtgtagatttttttnnnnnnnnnnaagcttggcgtggatccgatatcaactagatcttgagacaaatggcagtattcatccacaattttaaaagaaaaggggggattggggggtacagtgcaggggaaagaatagtagacataatagcaacagacatacaaactaaag

SEQ ID NO: 13374 - DNA, 301 bp, Artificial Sequence
  Zfhx3.4_Fanca.1
  crRNA array
  misc_feature (148)..(157): n is a, c, g, or t
cttggctttatatatcttgtggaaaggacgaaacaccgtaatttctactaagtgtagatagtgagcggcagactgcgagtaatttctactaagtgtagatggaggccccggggcccaccataatttctactaagtgtagatttttttnnnnnnnnnnaagcttggcgtggatccgatatcaactagatcttgagacaaatggcagtattcatccacaattttaaaagaaaaggggggattggggggtacagtgcaggggaaagaatagtagacataatagcaacagacatacaaactaaag

SEQ ID NO: 13375 - DNA, 301 bp, Artificial Sequence
  Zfhx3.4_Fanca.2
  crRNA array
  misc_feature (148)..(157): n is a, c, g, or t
cttggctttatatatcttgtggaaaggacgaaacaccgtaatttctactaagtgtagatagtgagcggcagactgcgagtaatttctactaagtgtagatagagctaccacctagacagctaatttctactaagtgtagatttttttnnnnnnnnnnaagcttggcgtggatccgatatcaactagatcttgagacaaatggcagtattcatccacaattttaaaagaaaaggggggattggggggtacagtgcaggggaaagaatagtagacataatagcaacagacatacaaactaaag

SEQ ID NO: 13376 - DNA, 301 bp, Artificial Sequence
  Zfhx3.4_Fanca.3
  crRNA array
  misc_feature (148)..(157): n is a, c, g, or t
cttggctttatatatcttgtggaaaggacgaaacaccgtaatttctactaagtgtagatagtgagcggcagactgcgagtaatttctactaagtgtagataccaactgctgtgcctcgggtaatttctactaagtgtagatttttttnnnnnnnnnnaagcttggcgtggatccgatatcaactagatcttgagacaaatggcagtattcatccacaattttaaaagaaaaggggggattggggggtacagtgcaggggaaagaatagtagacataatagcaacagacatacaaactaaag

SEQ ID NO: 13377 - DNA, 301 bp, Artificial Sequence
  Zfhx3.4_Fanca.4
  crRNA array
  misc_feature (148)..(157): n is a, c, g, or t
cttggctttatatatcttgtggaaaggacgaaacaccgtaatttctactaagtgtagatagtgagcggcagactgcgagtaatttctactaagtgtagatcacccacccctggtgccaagtaatttctactaagtgtagatttttttnnnnnnnnnnaagcttggcgtggatccgatatcaactagatcttgagacaaatggcagtattcatccacaattttaaaagaaaaggggggattggggggtacagtgcaggggaaagaatagtagacataatagcaacagacatacaaactaaag

SEQ ID NO: 13378 - DNA, 301 bp, Artificial Sequence
  Zfhx3.1_Nf1.1
  crRNA array
  misc_feature (148)..(157): n is a, c, g, or t
cttggctttatatatcttgtggaaaggacgaaacaccgtaatttctactaagtgtagatcgctgcgaggtgtgtaactataatttctactaagtgtagattggcgatccggaatcctctgtaatttctactaagtgtagatttttttnnnnnnnnnnaagcttggcgtggatccgatatcaactagatcttgagacaaatggcagtattcatccacaattttaaaagaaaaggggggattggggggtacagtgcaggggaaagaatagtagacataatagcaacagacatacaaactaaag

SEQ ID NO: 13379 - DNA, 301 bp, Artificial Sequence
  Zfhx3.1_Nf1.2
  crRNA array
  misc_feature (148)..(157): n is a, c, g, or t
cttggctttatatatcttgtggaaaggacgaaacaccgtaatttctactaagtgtagatcgctgcgaggtgtgtaactataatttctactaagtgtagatggaaacacaacgctggcctctaatttctactaagtgtagatttttttnnnnnnnnnnaagcttggcgtggatccgatatcaactagatcttgagacaaatggcagtattcatccacaattttaaaagaaaaggggggattggggggtacagtgcaggggaaagaatagtagacataatagcaacagacatacaaactaaag

SEQ ID NO: 13380 - DNA, 301 bp, Artificial Sequence
  Zfhx3.1_Nf1.3
  crRNA array
  misc_feature (148)..(157): n is a, c, g, or t
cttggctttatatatcttgtggaaaggacgaaacaccgtaatttctactaagtgtagatcgctgcgaggtgtgtaactataatttctactaagtgtagataatgatggaacgcagtcgcataatttctactaagtgtagatttttttnnnnnnnnnnaagcttggcgtggatccgatatcaactagatcttgagacaaatggcagtattcatccacaattttaaaagaaaaggggggattggggggtacagtgcaggggaaagaatagtagacataatagcaacagacatacaaactaaag

SEQ ID NO: 13381 - DNA, 301 bp, Artificial Sequence
  Zfhx3.1_Nf1.4
  crRNA array
  misc_feature (148)..(157): n is a, c, g, or t
cttggctttatatatcttgtggaaaggacgaaacaccgtaatttctactaagtgtagatcgctgcgaggtgtgtaactataatttctactaagtgtagattgcaaaaccatccaccaagttaatttctactaagtgtagatttttttnnnnnnnnnnaagcttggcgtggatccgatatcaactagatcttgagacaaatggcagtattcatccacaattttaaaagaaaaggggggattggggggtacagtgcaggggaaagaatagtagacataatagcaacagacatacaaactaaag

SEQ ID NO: 13382 - DNA, 301 bp, Artificial Sequence
  Zfhx3.2_Nf1.1
  crRNA array
  misc_feature (148)..(157): n is a, c, g, or t
cttggctttatatatcttgtggaaaggacgaaacaccgtaatttctactaagtgtagatacgtgcgacacaaaagcaactaatttctactaagtgtagattggcgatccggaatcctctgtaatttctactaagtgtagatttttttnnnnnnnnnnaagcttggcgtggatccgatatcaactagatcttgagacaaatggcagtattcatccacaattttaaaagaaaaggggggattggggggtacagtgcaggggaaagaatagtagacataatagcaacagacatacaaactaaag

SEQ ID NO: 13383 - DNA, 301 bp, Artificial Sequence
  Zfhx3.2_Nf1.2
  crRNA array
  misc_feature (148)..(157): n is a, c, g, or t
cttggctttatatatcttgtggaaaggacgaaacaccgtaatttctactaagtgtagatacgtgcgacacaaaagcaactaatttctactaagtgtagatggaaacacaacgctggcctctaatttctactaagtgtagatttttttnnnnnnnnnnaagcttggcgtggatccgatatcaactagatcttgagacaaatggcagtattcatccacaattttaaaagaaaaggggggattggggggtacagtgcaggggaaagaatagtagacataatagcaacagacatacaaactaaag

SEQ ID NO: 13384 - DNA, 301 bp, Artificial Sequence
  Zfhx3.2_Nf1.3
  crRNA array
  misc_feature (148)..(157): n is a, c, g, or t
cttggctttatatatcttgtggaaaggacgaaacaccgtaatttctactaagtgtagatacgtgcgacacaaaagcaactaatttctactaagtgtagataatgatggaacgcagtcgcataatttctactaagtgtagatttttttnnnnnnnnnnaagcttggcgtggatccgatatcaactagatcttgagacaaatggcagtattcatccacaattttaaaagaaaaggggggattggggggtacagtgcaggggaaagaatagtagacataatagcaacagacatacaaactaaag

SEQ ID NO: 13385 - DNA, 301 bp, Artificial Sequence
  Zfhx3.2_Nf1.4
  crRNA array
  misc_feature (148)..(157): n is a, c, g, or t
cttggctttatatatcttgtggaaaggacgaaacaccgtaatttctactaagtgtagatacgtgcgacacaaaagcaactaatttctactaagtgtagattgcaaaaccatccaccaagttaatttctactaagtgtagatttttttnnnnnnnnnnaagcttggcgtggatccgatatcaactagatcttgagacaaatggcagtattcatccacaattttaaaagaaaaggggggattggggggtacagtgcaggggaaagaatagtagacataatagcaacagacatacaaactaaag

SEQ ID NO: 13386 - DNA, 301 bp, Artificial Sequence
  Zfhx3.3_Nf1.1
  crRNA array
  misc_feature (148)..(157): n is a, c, g, or t
cttggctttatatatcttgtggaaaggacgaaacaccgtaatttctactaagtgtagattgctctacggcaagaggaaataatttctactaagtgtagattggcgatccggaatcctctgtaatttctactaagtgtagatttttttnnnnnnnnnnaagcttggcgtggatccgatatcaactagatcttgagacaaatggcagtattcatccacaattttaaaagaaaaggggggattggggggtacagtgcaggggaaagaatagtagacataatagcaacagacatacaaactaaag

SEQ ID NO: 13387 - DNA, 301 bp, Artificial Sequence
  Zfhx3.3_Nf1.2
  crRNA array
  misc_feature (148)..(157): n is a, c, g, or t
cttggctttatatatcttgtggaaaggacgaaacaccgtaatttctactaagtgtagattgctctacggcaagaggaaataatttctactaagtgtagatggaaacacaacgctggcctctaatttctactaagtgtagatttttttnnnnnnnnnnaagcttggcgtggatccgatatcaactagatcttgagacaaatggcagtattcatccacaattttaaaagaaaaggggggattggggggtacagtgcaggggaaagaatagtagacataatagcaacagacatacaaactaaag

SEQ ID NO: 13388 - DNA, 301 bp, Artificial Sequence
  Zfhx3.3_Nf1.3
  crRNA array
  misc_feature (148)..(157): n is a, c, g, or t
cttggctttatatatcttgtggaaaggacgaaacaccgtaatttctactaagtgtagattgctctacggcaagaggaaataatttctactaagtgtagataatgatggaacgcagtcgcataatttctactaagtgtagatttttttnnnnnnnnnnaagcttggcgtggatccgatatcaactagatcttgagacaaatggcagtattcatccacaattttaaaagaaaaggggggattggggggtacagtgcaggggaaagaatagtagacataatagcaacagacatacaaactaaag

SEQ ID NO: 13389 - DNA, 301 bp, Artificial Sequence
  Zfhx3.3_Nf1.4
  crRNA array
  misc_feature (148)..(157): n is a, c, g, or t
cttggctttatatatcttgtggaaaggacgaaacaccgtaatttctactaagtgtagattgctctacggcaagaggaaataatttctactaagtgtagattgcaaaaccatccaccaagttaatttctactaagtgtagatttttttnnnnnnnnnnaagcttggcgtggatccgatatcaactagatcttgagacaaatggcagtattcatccacaattttaaaagaaaaggggggattggggggtacagtgcaggggaaagaatagtagacataatagcaacagacatacaaactaaag

SEQ ID NO: 13390 - DNA, 301 bp, Artificial Sequence
  Zfhx3.4_Nf1.1
  crRNA array
  misc_feature (148)..(157): n is a, c, g, or t
cttggctttatatatcttgtggaaaggacgaaacaccgtaatttctactaagtgtagatagtgagcggcagactgcgagtaatttctactaagtgtagattggcgatccggaatcctctgtaatttctactaagtgtagatttttttnnnnnnnnnnaagcttggcgtggatccgatatcaactagatcttgagacaaatggcagtattcatccacaattttaaaagaaaaggggggattggggggtacagtgcaggggaaagaatagtagacataatagcaacagacatacaaactaaag

SEQ ID NO: 13391 - DNA, 301 bp, Artificial Sequence
  Zfhx3.4_Nf1.2
  crRNA array
  misc_feature (148)..(157): n is a, c, g, or t
cttggctttatatatcttgtggaaaggacgaaacaccgtaatttctactaagtgtagatagtgagcggcagactgcgagtaatttctactaagtgtagatggaaacacaacgctggcctctaatttctactaagtgtagatttttttnnnnnnnnnnaagcttggcgtggatccgatatcaactagatcttgagacaaatggcagtattcatccacaattttaaaagaaaaggggggattggggggtacagtgcaggggaaagaatagtagacataatagcaacagacatacaaactaaag

SEQ ID NO: 13392 - DNA, 301 bp, Artificial Sequence
  Zfhx3.4_Nf1.3
  crRNA array
  misc_feature (148)..(157): n is a, c, g, or t
cttggctttatatatcttgtggaaaggacgaaacaccgtaatttctactaagtgtagatagtgagcggcagactgcgagtaatttctactaagtgtagataatgatggaacgcagtcgcataatttctactaagtgtagatttttttnnnnnnnnnnaagcttggcgtggatccgatatcaactagatcttgagacaaatggcagtattcatccacaattttaaaagaaaaggggggattggggggtacagtgcaggggaaagaatagtagacataatagcaacagacatacaaactaaag

SEQ ID NO: 13393 - DNA, 301 bp, Artificial Sequence
  Zfhx3.4_Nf1.4
  crRNA array
  misc_feature (148)..(157): n is a, c, g, or t
cttggctttatatatcttgtggaaaggacgaaacaccgtaatttctactaagtgtagatagtgagcggcagactgcgagtaatttctactaagtgtagattgcaaaaccatccaccaagttaatttctactaagtgtagatttttttnnnnnnnnnnaagcttggcgtggatccgatatcaactagatcttgagacaaatggcagtattcatccacaattttaaaagaaaaggggggattggggggtacagtgcaggggaaagaatagtagacataatagcaacagacatacaaactaaag

SEQ ID NO: 13394 - DNA, 301 bp, Artificial Sequence
  Zfhx3.1_Kdm6a.1
  crRNA array
  misc_feature (148)..(157): n is a, c, g, or t
cttggctttatatatcttgtggaaaggacgaaacaccgtaatttctactaagtgtagatcgctgcgaggtgtgtaactataatttctactaagtgtagatgctgccgcctctcgcggcagtaatttctactaagtgtagatttttttnnnnnnnnnnaagcttggcgtggatccgatatcaactagatcttgagacaaatggcagtattcatccacaattttaaaagaaaaggggggattggggggtacagtgcaggggaaagaatagtagacataatagcaacagacatacaaactaaag

SEQ ID NO: 13395 - DNA, 301 bp, Artificial Sequence
  Zfhx3.1_Kdm6a.2
  crRNA array
  misc_feature (148)..(157): n is a, c, g, or t
cttggctttatatatcttgtggaaaggacgaaacaccgtaatttctactaagtgtagatcgctgcgaggtgtgtaactataatttctactaagtgtagatgctgcaggtaaggcacgttttaatttctactaagtgtagatttttttnnnnnnnnnnaagcttggcgtggatccgatatcaactagatcttgagacaaatggcagtattcatccacaattttaaaagaaaaggggggattggggggtacagtgcaggggaaagaatagtagacataatagcaacagacatacaaactaaag

SEQ ID NO: 13396 - DNA, 301 bp, Artificial Sequence
  Zfhx3.1_Kdm6a.3
  crRNA array
  misc_feature (148)..(157): n is a, c, g, or t
cttggctttatatatcttgtggaaaggacgaaacaccgtaatttctactaagtgtagatcgctgcgaggtgtgtaactataatttctactaagtgtagattgctggtgccggggaagttttaatttctactaagtgtagatttttttnnnnnnnnnnaagcttggcgtggatccgatatcaactagatcttgagacaaatggcagtattcatccacaattttaaaagaaaaggggggattggggggtacagtgcaggggaaagaatagtagacataatagcaacagacatacaaactaaag

SEQ ID NO: 13397 - DNA, 301 bp, Artificial Sequence
  Zfhx3.1_Kdm6a.4
  crRNA array
  misc_feature (148)..(157): n is a, c, g, or t
cttggctttatatatcttgtggaaaggacgaaacaccgtaatttctactaagtgtagatcgctgcgaggtgtgtaactataatttctactaagtgtagattgtctcctacgaatcccccctaatttctactaagtgtagatttttttnnnnnnnnnnaagcttggcgtggatccgatatcaactagatcttgagacaaatggcagtattcatccacaattttaaaagaaaaggggggattggggggtacagtgcaggggaaagaatagtagacataatagcaacagacatacaaactaaag

SEQ ID NO: 13398 - DNA, 301 bp, Artificial Sequence
  Zfhx3.2_Kdm6a.1
  crRNA array
  misc_feature (148)..(157): n is a, c, g, or t
cttggctttatatatcttgtggaaaggacgaaacaccgtaatttctactaagtgtagatacgtgcgacacaaaagcaactaatttctactaagtgtagatgctgccgcctctcgcggcagtaatttctactaagtgtagatttttttnnnnnnnnnnaagcttggcgtggatccgatatcaactagatcttgagacaaatggcagtattcatccacaattttaaaagaaaaggggggattggggggtacagtgcaggggaaagaatagtagacataatagcaacagacatacaaactaaag

SEQ ID NO: 13399 - DNA, 301 bp, Artificial Sequence
  Zfhx3.2_Kdm6a.2
  crRNA array
  misc_feature (148)..(157): n is a, c, g, or t
cttggctttatatatcttgtggaaaggacgaaacaccgtaatttctactaagtgtagatacgtgcgacacaaaagcaactaatttctactaagtgtagatgctgcaggtaaggcacgttttaatttctactaagtgtagatttttttnnnnnnnnnnaagcttggcgtggatccgatatcaactagatcttgagacaaatggcagtattcatccacaattttaaaagaaaaggggggattggggggtacagtgcaggggaaagaatagtagacataatagcaacagacatacaaactaaag

SEQ ID NO: 13400 - DNA, 301 bp, Artificial Sequence
  Zfhx3.2_Kdm6a.3
  crRNA array
  misc_feature (148)..(157): n is a, c, g, or t
cttggctttatatatcttgtggaaaggacgaaacaccgtaatttctactaagtgtagatacgtgcgacacaaaagcaactaatttctactaagtgtagattgctggtgccggggaagttttaatttctactaagtgtagatttttttnnnnnnnnnnaagcttggcgtggatccgatatcaactagatcttgagacaaatggcagtattcatccacaattttaaaagaaaaggggggattggggggtacagtgcaggggaaagaatagtagacataatagcaacagacatacaaactaaag

SEQ ID NO: 13401 - DNA, 301 bp, Artificial Sequence
  Zfhx3.2_Kdm6a.4
  crRNA array
  misc_feature (148)..(157): n is a, c, g, or t
cttggctttatatatcttgtggaaaggacgaaacaccgtaatttctactaagtgtagatacgtgcgacacaaaagcaactaatttctactaagtgtagattgtctcctacgaatcccccctaatttctactaagtgtagatttttttnnnnnnnnnnaagcttggcgtggatccgatatcaactagatcttgagacaaatggcagtattcatccacaattttaaaagaaaaggggggattggggggtacagtgcaggggaaagaatagtagacataatagcaacagacatacaaactaaag

SEQ ID NO: 13402 - DNA, 301 bp, Artificial Sequence
  Zfhx3.3_Kdm6a.1
  crRNA array
  misc_feature (148)..(157): n is a, c, g, or t
cttggctttatatatcttgtggaaaggacgaaacaccgtaatttctactaagtgtagattgctctacggcaagaggaaataatttctactaagtgtagatgctgccgcctctcgcggcagtaatttctactaagtgtagatttttttnnnnnnnnnnaagcttggcgtggatccgatatcaactagatcttgagacaaatggcagtattcatccacaattttaaaagaaaaggggggattggggggtacagtgcaggggaaagaatagtagacataatagcaacagacatacaaactaaag

SEQ ID NO: 13403 - DNA, 301 bp, Artificial Sequence
  Zfhx3.3_Kdm6a.2
  crRNA array
  misc_feature (148)..(157): n is a, c, g, or t
cttggctttatatatcttgtggaaaggacgaaacaccgtaatttctactaagtgtagattgctctacggcaagaggaaataatttctactaagtgtagatgctgcaggtaaggcacgttttaatttctactaagtgtagatttttttnnnnnnnnnnaagcttggcgtggatccgatatcaactagatcttgagacaaatggcagtattcatccacaattttaaaagaaaaggggggattggggggtacagtgcaggggaaagaatagtagacataatagcaacagacatacaaactaaag

SEQ ID NO: 13404 - DNA, 301 bp, Artificial Sequence
  Zfhx3.3_Kdm6a.3
  crRNA array
  misc_feature (148)..(157): n is a, c, g, or t
cttggctttatatatcttgtggaaaggacgaaacaccgtaatttctactaagtgtagattgctctacggcaagaggaaataatttctactaagtgtagattgctggtgccggggaagttttaatttctactaagtgtagatttttttnnnnnnnnnnaagcttggcgtggatccgatatcaactagatcttgagacaaatggcagtattcatccacaattttaaaagaaaaggggggattggggggtacagtgcaggggaaagaatagtagacataatagcaacagacatacaaactaaag

SEQ ID NO: 13405 - DNA, 301 bp, Artificial Sequence
  Zfhx3.3_Kdm6a.4
  crRNA array
  misc_feature (148)..(157): n is a, c, g, or t
cttggctttatatatcttgtggaaaggacgaaacaccgtaatttctactaagtgtagattgctctacggcaagaggaaataatttctactaagtgtagattgtctcctacgaatcccccctaatttctactaagtgtagatttttttnnnnnnnnnnaagcttggcgtggatccgatatcaactagatcttgagacaaatggcagtattcatccacaattttaaaagaaaaggggggattggggggtacagtgcaggggaaagaatagtagacataatagcaacagacatacaaactaaag

SEQ ID NO: 13406 - DNA, 301 bp, Artificial Sequence
  Zfhx3.4_Kdm6a.1
  crRNA array
  misc_feature (148)..(157): n is a, c, g, or t
cttggctttatatatcttgtggaaaggacgaaacaccgtaatttctactaagtgtagatagtgagcggcagactgcgagtaatttctactaagtgtagatgctgccgcctctcgcggcagtaatttctactaagtgtagatttttttnnnnnnnnnnaagcttggcgtggatccgatatcaactagatcttgagacaaatggcagtattcatccacaattttaaaagaaaaggggggattggggggtacagtgcaggggaaagaatagtagacataatagcaacagacatacaaactaaag

SEQ ID NO: 13407 - DNA, 301 bp, Artificial Sequence
  Zfhx3.4_Kdm6a.2
  crRNA array
  misc_feature (148)..(157): n is a, c, g, or t
cttggctttatatatcttgtggaaaggacgaaacaccgtaatttctactaagtgtagatagtgagcggcagactgcgagtaatttctactaagtgtagatgctgcaggtaaggcacgttttaatttctactaagtgtagatttttttnnnnnnnnnnaagcttggcgtggatccgatatcaactagatcttgagacaaatggcagtattcatccacaattttaaaagaaaaggggggattggggggtacagtgcaggggaaagaatagtagacataatagcaacagacatacaaactaaag

SEQ ID NO: 13408 - DNA, 301 bp, Artificial Sequence
  Zfhx3.4_Kdm6a.3
  crRNA array
  misc_feature (148)..(157): n is a, c, g, or t
cttggctttatatatcttgtggaaaggacgaaacaccgtaatttctactaagtgtagatagtgagcggcagactgcgagtaatttctactaagtgtagattgctggtgccggggaagttttaatttctactaagtgtagatttttttnnnnnnnnnnaagcttggcgtggatccgatatcaactagatcttgagacaaatggcagtattcatccacaattttaaaagaaaaggggggattggggggtacagtgcaggggaaagaatagtagacataatagcaacagacatacaaactaaag

SEQ ID NO: 13409 - DNA, 301 bp, Artificial Sequence
  Zfhx3.4_Kdm6a.4
  crRNA array
  misc_feature (148)..(157): n is a, c, g, or t
cttggctttatatatcttgtggaaaggacgaaacaccgtaatttctactaagtgtagatagtgagcggcagactgcgagtaatttctactaagtgtagattgtctcctacgaatcccccctaatttctactaagtgtagatttttttnnnnnnnnnnaagcttggcgtggatccgatatcaactagatcttgagacaaatggcagtattcatccacaattttaaaagaaaaggggggattggggggtacagtgcaggggaaagaatagtagacataatagcaacagacatacaaactaaag

SEQ ID NO: 13410 - DNA, 301 bp, Artificial Sequence
  Zfhx3.1_Ercc5.1
  crRNA array
  misc_feature (148)..(157): n is a, c, g, or t
cttggctttatatatcttgtggaaaggacgaaacaccgtaatttctactaagtgtagatcgctgcgaggtgtgtaactataatttctactaagtgtagatacggcacgagcaagagacactaatttctactaagtgtagatttttttnnnnnnnnnnaagcttggcgtggatccgatatcaactagatcttgagacaaatggcagtattcatccacaattttaaaagaaaaggggggattggggggtacagtgcaggggaaagaatagtagacataatagcaacagacatacaaactaaag

SEQ ID NO: 13411 - DNA, 301 bp, Artificial Sequence
  Zfhx3.1_Ercc5.2
  crRNA array
  misc_feature (148)..(157): n is a, c, g, or t
cttggctttatatatcttgtggaaaggacgaaacaccgtaatttctactaagtgtagatcgctgcgaggtgtgtaactataatttctactaagtgtagatgagtatcacatcggtgactctaatttctactaagtgtagatttttttnnnnnnnnnnaagcttggcgtggatccgatatcaactagatcttgagacaaatggcagtattcatccacaattttaaaagaaaaggggggattggggggtacagtgcaggggaaagaatagtagacataatagcaacagacatacaaactaaag

SEQ ID NO: 13412 - DNA, 301 bp, Artificial Sequence
  Zfhx3.1_Ercc5.3
  crRNA array
  misc_feature (148)..(157): n is a, c, g, or t
cttggctttatatatcttgtggaaaggacgaaacaccgtaatttctactaagtgtagatcgctgcgaggtgtgtaactataatttctactaagtgtagatggagtgggtccaggcctcgttaatttctactaagtgtagatttttttnnnnnnnnnnaagcttggcgtggatccgatatcaactagatcttgagacaaatggcagtattcatccacaattttaaaagaaaaggggggattggggggtacagtgcaggggaaagaatagtagacataatagcaacagacatacaaactaaag

SEQ ID NO: 13413 - DNA, 301 bp, Artificial Sequence
  Zfhx3.1_Ercc5.4
  crRNA array
  misc_feature (148)..(157): n is a, c, g, or t
cttggctttatatatcttgtggaaaggacgaaacaccgtaatttctactaagtgtagatcgctgcgaggtgtgtaactataatttctactaagtgtagatcagagccggtggaataatgttaatttctactaagtgtagatttttttnnnnnnnnnnaagcttggcgtggatccgatatcaactagatcttgagacaaatggcagtattcatccacaattttaaaagaaaaggggggattggggggtacagtgcaggggaaagaatagtagacataatagcaacagacatacaaactaaag

SEQ ID NO: 13414 - DNA, 301 bp, Artificial Sequence
  Zfhx3.2_Ercc5.1
  crRNA array
  misc_feature (148)..(157): n is a, c, g, or t
cttggctttatatatcttgtggaaaggacgaaacaccgtaatttctactaagtgtagatacgtgcgacacaaaagcaactaatttctactaagtgtagatacggcacgagcaagagacactaatttctactaagtgtagatttttttnnnnnnnnnnaagcttggcgtggatccgatatcaactagatcttgagacaaatggcagtattcatccacaattttaaaagaaaaggggggattggggggtacagtgcaggggaaagaatagtagacataatagcaacagacatacaaactaaag

SEQ ID NO: 13415 - DNA, 301 bp, Artificial Sequence
  Zfhx3.2_Ercc5.2
  crRNA array
  misc_feature (148)..(157): n is a, c, g, or t
cttggctttatatatcttgtggaaaggacgaaacaccgtaatttctactaagtgtagatacgtgcgacacaaaagcaactaatttctactaagtgtagatgagtatcacatcggtgactctaatttctactaagtgtagatttttttnnnnnnnnnnaagcttggcgtggatccgatatcaactagatcttgagacaaatggcagtattcatccacaattttaaaagaaaaggggggattggggggtacagtgcaggggaaagaatagtagacataatagcaacagacatacaaactaaag

SEQ ID NO: 13416 - DNA, 301 bp, Artificial Sequence
  Zfhx3.2_Ercc5.3
  crRNA array
  misc_feature (148)..(157): n is a, c, g, or t
cttggctttatatatcttgtggaaaggacgaaacaccgtaatttctactaagtgtagatacgtgcgacacaaaagcaactaatttctactaagtgtagatggagtgggtccaggcctcgttaatttctactaagtgtagatttttttnnnnnnnnnnaagcttggcgtggatccgatatcaactagatcttgagacaaatggcagtattcatccacaattttaaaagaaaaggggggattggggggtacagtgcaggggaaagaatagtagacataatagcaacagacatacaaactaaag

SEQ ID NO: 13417 - DNA, 301 bp, Artificial Sequence
  Zfhx3.2_Ercc5.4
  crRNA array
  misc_feature (148)..(157): n is a, c, g, or t
cttggctttatatatcttgtggaaaggacgaaacaccgtaatttctactaagtgtagatacgtgcgacacaaaagcaactaatttctactaagtgtagatcagagccggtggaataatgttaatttctactaagtgtagatttttttnnnnnnnnnnaagcttggcgtggatccgatatcaactagatcttgagacaaatggcagtattcatccacaattttaaaagaaaaggggggattggggggtacagtgcaggggaaagaatagtagacataatagcaacagacatacaaactaaag

SEQ ID NO: 13418 - DNA, 301 bp, Artificial Sequence
  Zfhx3.3_Ercc5.1
  crRNA array
  misc_feature (148)..(157): n is a, c, g, or t
cttggctttatatatcttgtggaaaggacgaaacaccgtaatttctactaagtgtagattgctctacggcaagaggaaataatttctactaagtgtagatacggcacgagcaagagacactaatttctactaagtgtagatttttttnnnnnnnnnnaagcttggcgtggatccgatatcaactagatcttgagacaaatggcagtattcatccacaattttaaaagaaaaggggggattggggggtacagtgcaggggaaagaatagtagacataatagcaacagacatacaaactaaag

SEQ ID NO: 13419 - DNA, 301 bp, Artificial Sequence
  Zfhx3.3_Ercc5.2
  crRNA array
  misc_feature (148)..(157): n is a, c, g, or t
cttggctttatatatcttgtggaaaggacgaaacaccgtaatttctactaagtgtagattgctctacggcaagaggaaataatttctactaagtgtagatgagtatcacatcggtgactctaatttctactaagtgtagatttttttnnnnnnnnnnaagcttggcgtggatccgatatcaactagatcttgagacaaatggcagtattcatccacaattttaaaagaaaaggggggattggggggtacagtgcaggggaaagaatagtagacataatagcaacagacatacaaactaaag

SEQ ID NO: 13420 - DNA, 301 bp, Artificial Sequence
  Zfhx3.3_Ercc5.3
  crRNA array
  misc_feature (148)..(157): n is a, c, g, or t
cttggctttatatatcttgtggaaaggacgaaacaccgtaatttctactaagtgtagattgctctacggcaagaggaaataatttctactaagtgtagatggagtgggtccaggcctcgttaatttctactaagtgtagatttttttnnnnnnnnnnaagcttggcgtggatccgatatcaactagatcttgagacaaatggcagtattcatccacaattttaaaagaaaaggggggattggggggtacagtgcaggggaaagaatagtagacataatagcaacagacatacaaactaaag

SEQ ID NO: 13421 - DNA, 301 bp, Artificial Sequence
  Zfhx3.3_Ercc5.4
  crRNA array
  misc_feature (148)..(157): n is a, c, g, or t
cttggctttatatatcttgtggaaaggacgaaacaccgtaatttctactaagtgtagattgctctacggcaagaggaaataatttctactaagtgtagatcagagccggtggaataatgttaatttctactaagtgtagatttttttnnnnnnnnnnaagcttggcgtggatccgatatcaactagatcttgagacaaatggcagtattcatccacaattttaaaagaaaaggggggattggggggtacagtgcaggggaaagaatagtagacataatagcaacagacatacaaactaaag

SEQ ID NO: 13422 - DNA, 301 bp, Artificial Sequence
  Zfhx3.4_Ercc5.1
  crRNA array
  misc_feature (148)..(157): n is a, c, g, or t
cttggctttatatatcttgtggaaaggacgaaacaccgtaatttctactaagtgtagatagtgagcggcagactgcgagtaatttctactaagtgtagatacggcacgagcaagagacactaatttctactaagtgtagatttttttnnnnnnnnnnaagcttggcgtggatccgatatcaactagatcttgagacaaatggcagtattcatccacaattttaaaagaaaaggggggattggggggtacagtgcaggggaaagaatagtagacataatagcaacagacatacaaactaaag

SEQ ID NO: 13423 - DNA, 301 bp, Artificial Sequence
  Zfhx3.4_Ercc5.2
  crRNA array
  misc_feature (148)..(157): n is a, c, g, or t
cttggctttatatatcttgtggaaaggacgaaacaccgtaatttctactaagtgtagatagtgagcggcagactgcgagtaatttctactaagtgtagatgagtatcacatcggtgactctaatttctactaagtgtagatttttttnnnnnnnnnnaagcttggcgtggatccgatatcaactagatcttgagacaaatggcagtattcatccacaattttaaaagaaaaggggggattggggggtacagtgcaggggaaagaatagtagacataatagcaacagacatacaaactaaag

SEQ ID NO: 13424 - DNA, 301 bp, Artificial Sequence
  Zfhx3.4_Ercc5.3
  crRNA array
  misc_feature (148)..(157): n is a, c, g, or t
cttggctttatatatcttgtggaaaggacgaaacaccgtaatttctactaagtgtagatagtgagcggcagactgcgagtaatttctactaagtgtagatggagtgggtccaggcctcgttaatttctactaagtgtagatttttttnnnnnnnnnnaagcttggcgtggatccgatatcaactagatcttgagacaaatggcagtattcatccacaattttaaaagaaaaggggggattggggggtacagtgcaggggaaagaatagtagacataatagcaacagacatacaaactaaag

SEQ ID NO: 13425 - DNA, 301 bp, Artificial Sequence
  Zfhx3.4_Ercc5.4
  crRNA array
  misc_feature (148)..(157): n is a, c, g, or t
cttggctttatatatcttgtggaaaggacgaaacaccgtaatttctactaagtgtagatagtgagcggcagactgcgagtaatttctactaagtgtagatcagagccggtggaataatgttaatttctactaagtgtagatttttttnnnnnnnnnnaagcttggcgtggatccgatatcaactagatcttgagacaaatggcagtattcatccacaattttaaaagaaaaggggggattggggggtacagtgcaggggaaagaatagtagacataatagcaacagacatacaaactaaag

SEQ ID NO: 13426 - DNA, 301 bp, Artificial Sequence
  Zfhx3.1_Arid1b.1
  crRNA array
  misc_feature (148)..(157): n is a, c, g, or t
cttggctttatatatcttgtggaaaggacgaaacaccgtaatttctactaagtgtagatcgctgcgaggtgtgtaactataatttctactaagtgtagatgctgctgctgtagtgcgtggtaatttctactaagtgtagatttttttnnnnnnnnnnaagcttggcgtggatccgatatcaactagatcttgagacaaatggcagtattcatccacaattttaaaagaaaaggggggattggggggtacagtgcaggggaaagaatagtagacataatagcaacagacatacaaactaaag

SEQ ID NO: 13427 - DNA, 301 bp, Artificial Sequence
  Zfhx3.1_Arid1b.2
  crRNA array
  misc_feature (148)..(157): n is a, c, g, or t
cttggctttatatatcttgtggaaaggacgaaacaccgtaatttctactaagtgtagatcgctgcgaggtgtgtaactataatttctactaagtgtagatagtgcaaaactgagcgcgggtaatttctactaagtgtagatttttttnnnnnnnnnnaagcttggcgtggatccgatatcaactagatcttgagacaaatggcagtattcatccacaattttaaaagaaaaggggggattggggggtacagtgcaggggaaagaatagtagacataatagcaacagacatacaaactaaag

SEQ ID NO: 13428 - DNA, 301 bp, Artificial Sequence
  Zfhx3.1_Arid1b.3
  crRNA array
  misc_feature (148)..(157): n is a, c, g, or t
cttggctttatatatcttgtggaaaggacgaaacaccgtaatttctactaagtgtagatcgctgcgaggtgtgtaactataatttctactaagtgtagatcactcaaaggcgaacaggtataatttctactaagtgtagatttttttnnnnnnnnnnaagcttggcgtggatccgatatcaactagatcttgagacaaatggcagtattcatccacaattttaaaagaaaaggggggattggggggtacagtgcaggggaaagaatagtagacataatagcaacagacatacaaactaaag

SEQ ID NO: 13429 - DNA, 301 bp, Artificial Sequence
  Zfhx3.1_Arid1b.4
  crRNA array
  misc_feature (148)..(157): n is a, c, g, or t
cttggctttatatatcttgtggaaaggacgaaacaccgtaatttctactaagtgtagatcgctgcgaggtgtgtaactataatttctactaagtgtagatctcctggctccgtagaagcataatttctactaagtgtagatttttttnnnnnnnnnnaagcttggcgtggatccgatatcaactagatcttgagacaaatggcagtattcatccacaattttaaaagaaaaggggggattggggggtacagtgcaggggaaagaatagtagacataatagcaacagacatacaaactaaag

SEQ ID NO: 13430 - DNA, 301 bp, Artificial Sequence
  Zfhx3.2_Arid1b.1
  crRNA array
  misc_feature (148)..(157): n is a, c, g, or t
cttggctttatatatcttgtggaaaggacgaaacaccgtaatttctactaagtgtagatacgtgcgacacaaaagcaactaatttctactaagtgtagatgctgctgctgtagtgcgtggtaatttctactaagtgtagatttttttnnnnnnnnnnaagcttggcgtggatccgatatcaactagatcttgagacaaatggcagtattcatccacaattttaaaagaaaaggggggattggggggtacagtgcaggggaaagaatagtagacataatagcaacagacatacaaactaaag

SEQ ID NO: 13431 - DNA, 301 bp, Artificial Sequence
  Zfhx3.2_Arid1b.2
  crRNA array
  misc_feature (148)..(157): n is a, c, g, or t
cttggctttatatatcttgtggaaaggacgaaacaccgtaatttctactaagtgtagatacgtgcgacacaaaagcaactaatttctactaagtgtagatagtgcaaaactgagcgcgggtaatttctactaagtgtagatttttttnnnnnnnnnnaagcttggcgtggatccgatatcaactagatcttgagacaaatggcagtattcatccacaattttaaaagaaaaggggggattggggggtacagtgcaggggaaagaatagtagacataatagcaacagacatacaaactaaag

SEQ ID NO: 13432 - DNA, 301 bp, Artificial Sequence
  Zfhx3.2_Arid1b.3
  crRNA array
  misc_feature (148)..(157): n is a, c, g, or t
cttggctttatatatcttgtggaaaggacgaaacaccgtaatttctactaagtgtagatacgtgcgacacaaaagcaactaatttctactaagtgtagatcactcaaaggcgaacaggtataatttctactaagtgtagatttttttnnnnnnnnnnaagcttggcgtggatccgatatcaactagatcttgagacaaatggcagtattcatccacaattttaaaagaaaaggggggattggggggtacagtgcaggggaaagaatagtagacataatagcaacagacatacaaactaaag

SEQ ID NO: 13433 - DNA, 301 bp, Artificial Sequence
  Zfhx3.2_Arid1b.4
  crRNA array
  misc_feature (148)..(157): n is a, c, g, or t
cttggctttatatatcttgtggaaaggacgaaacaccgtaatttctactaagtgtagatacgtgcgacacaaaagcaactaatttctactaagtgtagatctcctggctccgtagaagcataatttctactaagtgtagatttttttnnnnnnnnnnaagcttggcgtggatccgatatcaactagatcttgagacaaatggcagtattcatccacaattttaaaagaaaaggggggattggggggtacagtgcaggggaaagaatagtagacataatagcaacagacatacaaactaaag

SEQ ID NO: 13434 - DNA, 301 bp, Artificial Sequence
  Zfhx3.3_Arid1b.1
  crRNA array
  misc_feature (148)..(157): n is a, c, g, or t
cttggctttatatatcttgtggaaaggacgaaacaccgtaatttctactaagtgtagattgctctacggcaagaggaaataatttctactaagtgtagatgctgctgctgtagtgcgtggtaatttctactaagtgtagatttttttnnnnnnnnnnaagcttggcgtggatccgatatcaactagatcttgagacaaatggcagtattcatccacaattttaaaagaaaaggggggattggggggtacagtgcaggggaaagaatagtagacataatagcaacagacatacaaactaaag

SEQ ID NO: 13435 - DNA, 301 bp, Artificial Sequence
  Zfhx3.3_Arid1b.2
  crRNA array
  misc_feature (148)..(157): n is a, c, g, or t
cttggctttatatatcttgtggaaaggacgaaacaccgtaatttctactaagtgtagattgctctacggcaagaggaaataatttctactaagtgtagatagtgcaaaactgagcgcgggtaatttctactaagtgtagatttttttnnnnnnnnnnaagcttggcgtggatccgatatcaactagatcttgagacaaatggcagtattcatccacaattttaaaagaaaaggggggattggggggtacagtgcaggggaaagaatagtagacataatagcaacagacatacaaactaaag

SEQ ID NO: 13436 - DNA, 301 bp, Artificial Sequence
  Zfhx3.3_Arid1b.3
  crRNA array
  misc_feature (148)..(157): n is a, c, g, or t
cttggctttatatatcttgtggaaaggacgaaacaccgtaatttctactaagtgtagattgctctacggcaagaggaaataatttctactaagtgtagatcactcaaaggcgaacaggtataatttctactaagtgtagatttttttnnnnnnnnnnaagcttggcgtggatccgatatcaactagatcttgagacaaatggcagtattcatccacaattttaaaagaaaaggggggattggggggtacagtgcaggggaaagaatagtagacataatagcaacagacatacaaactaaag

SEQ ID NO: 13437 - DNA, 301 bp, Artificial Sequence
  Zfhx3.3_Arid1b.4
  crRNA array
  misc_feature (148)..(157): n is a, c, g, or t
cttggctttatatatcttgtggaaaggacgaaacaccgtaatttctactaagtgtagattgctctacggcaagaggaaataatttctactaagtgtagatctcctggctccgtagaagcataatttctactaagtgtagatttttttnnnnnnnnnnaagcttggcgtggatccgatatcaactagatcttgagacaaatggcagtattcatccacaattttaaaagaaaaggggggattggggggtacagtgcaggggaaagaatagtagacataatagcaacagacatacaaactaaag

SEQ ID NO: 13438 - DNA, 301 bp, Artificial Sequence
  Zfhx3.4_Arid1b.1
  crRNA array
  misc_feature (148)..(157): n is a, c, g, or t
cttggctttatatatcttgtggaaaggacgaaacaccgtaatttctactaagtgtagatagtgagcggcagactgcgagtaatttctactaagtgtagatgctgctgctgtagtgcgtggtaatttctactaagtgtagatttttttnnnnnnnnnnaagcttggcgtggatccgatatcaactagatcttgagacaaatggcagtattcatccacaattttaaaagaaaaggggggattggggggtacagtgcaggggaaagaatagtagacataatagcaacagacatacaaactaaag

SEQ ID NO: 13439 - DNA, 301 bp, Artificial Sequence
  Zfhx3.4_Arid1b.2
  crRNA array
  misc_feature (148)..(157): n is a, c, g, or t
cttggctttatatatcttgtggaaaggacgaaacaccgtaatttctactaagtgtagatagtgagcggcagactgcgagtaatttctactaagtgtagatagtgcaaaactgagcgcgggtaatttctactaagtgtagatttttttnnnnnnnnnnaagcttggcgtggatccgatatcaactagatcttgagacaaatggcagtattcatccacaattttaaaagaaaaggggggattggggggtacagtgcaggggaaagaatagtagacataatagcaacagacatacaaactaaag

SEQ ID NO: 13440 - DNA, 301 bp, Artificial Sequence
  Zfhx3.4_Arid1b.3
  crRNA array
  misc_feature (148)..(157): n is a, c, g, or t
cttggctttatatatcttgtggaaaggacgaaacaccgtaatttctactaagtgtagatagtgagcggcagactgcgagtaatttctactaagtgtagatcactcaaaggcgaacaggtataatttctactaagtgtagatttttttnnnnnnnnnnaagcttggcgtggatccgatatcaactagatcttgagacaaatggcagtattcatccacaattttaaaagaaaaggggggattggggggtacagtgcaggggaaagaatagtagacataatagcaacagacatacaaactaaag

SEQ ID NO: 13441 - DNA, 301 bp, Artificial Sequence
  Zfhx3.4_Arid1b.4
  crRNA array
  misc_feature (148)..(157): n is a, c, g, or t
cttggctttatatatcttgtggaaaggacgaaacaccgtaatttctactaagtgtagatagtgagcggcagactgcgagtaatttctactaagtgtagatctcctggctccgtagaagcataatttctactaagtgtagatttttttnnnnnnnnnnaagcttggcgtggatccgatatcaactagatcttgagacaaatggcagtattcatccacaattttaaaagaaaaggggggattggggggtacagtgcaggggaaagaatagtagacataatagcaacagacatacaaactaaag

SEQ ID NO: 13442 - DNA, 301 bp, Artificial Sequence
  Zfhx3.1_Rb1.1
  crRNA array
  misc_feature (148)..(157): n is a, c, g, or t
cttggctttatatatcttgtggaaaggacgaaacaccgtaatttctactaagtgtagatcgctgcgaggtgtgtaactataatttctactaagtgtagattctgacatgatcgggtaccttaatttctactaagtgtagatttttttnnnnnnnnnnaagcttggcgtggatccgatatcaactagatcttgagacaaatggcagtattcatccacaattttaaaagaaaaggggggattggggggtacagtgcaggggaaagaatagtagacataatagcaacagacatacaaactaaag

SEQ ID NO: 13443 - DNA, 301 bp, Artificial Sequence
  Zfhx3.1_Rb1.2
  crRNA array
  misc_feature (148)..(157): n is a, c, g, or t
cttggctttatatatcttgtggaaaggacgaaacaccgtaatttctactaagtgtagatcgctgcgaggtgtgtaactataatttctactaagtgtagatgtctctgcatgaaaacggagtaatttctactaagtgtagatttttttnnnnnnnnnnaagcttggcgtggatccgatatcaactagatcttgagacaaatggcagtattcatccacaattttaaaagaaaaggggggattggggggtacagtgcaggggaaagaatagtagacataatagcaacagacatacaaactaaag

SEQ ID NO: 13444 - DNA, 301 bp, Artificial Sequence
  Zfhx3.1_Rb1.3
  crRNA array
  misc_feature (148)..(157): n is a, c, g, or t
cttggctttatatatcttgtggaaaggacgaaacaccgtaatttctactaagtgtagatcgctgcgaggtgtgtaactataatttctactaagtgtagatagccaatctggtctaataactaatttctactaagtgtagatttttttnnnnnnnnnnaagcttggcgtggatccgatatcaactagatcttgagacaaatggcagtattcatccacaattttaaaagaaaaggggggattggggggtacagtgcaggggaaagaatagtagacataatagcaacagacatacaaactaaag

SEQ ID NO: 13445 - DNA, 301 bp, Artificial Sequence
  Zfhx3.1_Rb1.4
  crRNA array
  misc_feature (148)..(157): n is a, c, g, or t
cttggctttatatatcttgtggaaaggacgaaacaccgtaatttctactaagtgtagatcgctgcgaggtgtgtaactataatttctactaagtgtagattgtagctcagtaaaagtgaataatttctactaagtgtagatttttttnnnnnnnnnnaagcttggcgtggatccgatatcaactagatcttgagacaaatggcagtattcatccacaattttaaaagaaaaggggggattggggggtacagtgcaggggaaagaatagtagacataatagcaacagacatacaaactaaag

SEQ ID NO: 13446 - DNA, 301 bp, Artificial Sequence
  Zfhx3.2_Rb1.1
  crRNA array
  misc_feature (148)..(157): n is a, c, g, or t
cttggctttatatatcttgtggaaaggacgaaacaccgtaatttctactaagtgtagatacgtgcgacacaaaagcaactaatttctactaagtgtagattctgacatgatcgggtaccttaatttctactaagtgtagatttttttnnnnnnnnnnaagcttggcgtggatccgatatcaactagatcttgagacaaatggcagtattcatccacaattttaaaagaaaaggggggattggggggtacagtgcaggggaaagaatagtagacataatagcaacagacatacaaactaaag

SEQ ID NO: 13447 - DNA, 301 bp, Artificial Sequence
  Zfhx3.2_Rb1.2
  crRNA array
  misc_feature (148)..(157): n is a, c, g, or t
cttggctttatatatcttgtggaaaggacgaaacaccgtaatttctactaagtgtagatacgtgcgacacaaaagcaactaatttctactaagtgtagatgtctctgcatgaaaacggagtaatttctactaagtgtagatttttttnnnnnnnnnnaagcttggcgtggatccgatatcaactagatcttgagacaaatggcagtattcatccacaattttaaaagaaaaggggggattggggggtacagtgcaggggaaagaatagtagacataatagcaacagacatacaaactaaag

SEQ ID NO: 13448 - DNA, 301 bp, Artificial Sequence
  Zfhx3.2_Rb1.3
  crRNA array
  misc_feature (148)..(157): n is a, c, g, or t
cttggctttatatatcttgtggaaaggacgaaacaccgtaatttctactaagtgtagatacgtgcgacacaaaagcaactaatttctactaagtgtagatagccaatctggtctaataactaatttctactaagtgtagatttttttnnnnnnnnnnaagcttggcgtggatccgatatcaactagatcttgagacaaatggcagtattcatccacaattttaaaagaaaaggggggattggggggtacagtgcaggggaaagaatagtagacataatagcaacagacatacaaactaaag

SEQ ID NO: 13449 - DNA, 301 bp, Artificial Sequence
  Zfhx3.2_Rb1.4
  crRNA array
  misc_feature (148)..(157): n is a, c, g, or t
cttggctttatatatcttgtggaaaggacgaaacaccgtaatttctactaagtgtagatacgtgcgacacaaaagcaactaatttctactaagtgtagattgtagctcagtaaaagtgaataatttctactaagtgtagatttttttnnnnnnnnnnaagcttggcgtggatccgatatcaactagatcttgagacaaatggcagtattcatccacaattttaaaagaaaaggggggattggggggtacagtgcaggggaaagaatagtagacataatagcaacagacatacaaactaaag

SEQ ID NO: 13450 - DNA, 301 bp, Artificial Sequence
  Zfhx3.3_Rb1.1
  crRNA array
  misc_feature (148)..(157): n is a, c, g, or t
cttggctttatatatcttgtggaaaggacgaaacaccgtaatttctactaagtgtagattgctctacggcaagaggaaataatttctactaagtgtagattctgacatgatcgggtaccttaatttctactaagtgtagatttttttnnnnnnnnnnaagcttggcgtggatccgatatcaactagatcttgagacaaatggcagtattcatccacaattttaaaagaaaaggggggattggggggtacagtgcaggggaaagaatagtagacataatagcaacagacatacaaactaaag

SEQ ID NO: 13451 - DNA, 301 bp, Artificial Sequence
  Zfhx3.3_Rb1.2
  crRNA array
  misc_feature (148)..(157): n is a, c, g, or t
cttggctttatatatcttgtggaaaggacgaaacaccgtaatttctactaagtgtagattgctctacggcaagaggaaataatttctactaagtgtagatgtctctgcatgaaaacggagtaatttctactaagtgtagatttttttnnnnnnnnnnaagcttggcgtggatccgatatcaactagatcttgagacaaatggcagtattcatccacaattttaaaagaaaaggggggattggggggtacagtgcaggggaaagaatagtagacataatagcaacagacatacaaactaaag

SEQ ID NO: 13452 - DNA, 301 bp, Artificial Sequence
  Zfhx3.3_Rb1.3
  crRNA array
  misc_feature (148)..(157): n is a, c, g, or t
cttggctttatatatcttgtggaaaggacgaaacaccgtaatttctactaagtgtagattgctctacggcaagaggaaataatttctactaagtgtagatagccaatctggtctaataactaatttctactaagtgtagatttttttnnnnnnnnnnaagcttggcgtggatccgatatcaactagatcttgagacaaatggcagtattcatccacaattttaaaagaaaaggggggattggggggtacagtgcaggggaaagaatagtagacataatagcaacagacatacaaactaaag

SEQ ID NO: 13453 - DNA, 301 bp, Artificial Sequence
  Zfhx3.3_Rb1.4
  crRNA array
  misc_feature (148)..(157): n is a, c, g, or t
cttggctttatatatcttgtggaaaggacgaaacaccgtaatttctactaagtgtagattgctctacggcaagaggaaataatttctactaagtgtagattgtagctcagtaaaagtgaataatttctactaagtgtagatttttttnnnnnnnnnnaagcttggcgtggatccgatatcaactagatcttgagacaaatggcagtattcatccacaattttaaaagaaaaggggggattggggggtacagtgcaggggaaagaatagtagacataatagcaacagacatacaaactaaag

SEQ ID NO: 13454 - DNA, 301 bp, Artificial Sequence
  Zfhx3.4_Rb1.1
  crRNA array
  misc_feature (148)..(157): n is a, c, g, or t
cttggctttatatatcttgtggaaaggacgaaacaccgtaatttctactaagtgtagatagtgagcggcagactgcgagtaatttctactaagtgtagattctgacatgatcgggtaccttaatttctactaagtgtagatttttttnnnnnnnnnnaagcttggcgtggatccgatatcaactagatcttgagacaaatggcagtattcatccacaattttaaaagaaaaggggggattggggggtacagtgcaggggaaagaatagtagacataatagcaacagacatacaaactaaag

SEQ ID NO: 13455 - DNA, 301 bp, Artificial Sequence
  Zfhx3.4_Rb1.2
  crRNA array
  misc_feature (148)..(157): n is a, c, g, or t
cttggctttatatatcttgtggaaaggacgaaacaccgtaatttctactaagtgtagatagtgagcggcagactgcgagtaatttctactaagtgtagatgtctctgcatgaaaacggagtaatttctactaagtgtagatttttttnnnnnnnnnnaagcttggcgtggatccgatatcaactagatcttgagacaaatggcagtattcatccacaattttaaaagaaaaggggggattggggggtacagtgcaggggaaagaatagtagacataatagcaacagacatacaaactaaag

SEQ ID NO: 13456 - DNA, 301 bp, Artificial Sequence
  Zfhx3.4_Rb1.3
  crRNA array
  misc_feature (148)..(157): n is a, c, g, or t
cttggctttatatatcttgtggaaaggacgaaacaccgtaatttctactaagtgtagatagtgagcggcagactgcgagtaatttctactaagtgtagatagccaatctggtctaataactaatttctactaagtgtagatttttttnnnnnnnnnnaagcttggcgtggatccgatatcaactagatcttgagacaaatggcagtattcatccacaattttaaaagaaaaggggggattggggggtacagtgcaggggaaagaatagtagacataatagcaacagacatacaaactaaag

SEQ ID NO: 13457 - DNA, 301 bp, Artificial Sequence
  Zfhx3.4_Rb1.4
  crRNA array
  misc_feature (148)..(157): n is a, c, g, or t
cttggctttatatatcttgtggaaaggacgaaacaccgtaatttctactaagtgtagatagtgagcggcagactgcgagtaatttctactaagtgtagattgtagctcagtaaaagtgaataatttctactaagtgtagatttttttnnnnnnnnnnaagcttggcgtggatccgatatcaactagatcttgagacaaatggcagtattcatccacaattttaaaagaaaaggggggattggggggtacagtgcaggggaaagaatagtagacataatagcaacagacatacaaactaaag

SEQ ID NO: 13458 - DNA, 301 bp, Artificial Sequence
  Zfhx3.1_Kmt2c.1
  crRNA array
  misc_feature (148)..(157): n is a, c, g, or t
cttggctttatatatcttgtggaaaggacgaaacaccgtaatttctactaagtgtagatcgctgcgaggtgtgtaactataatttctactaagtgtagatactcgacctccacctccctataatttctactaagtgtagatttttttnnnnnnnnnnaagcttggcgtggatccgatatcaactagatcttgagacaaatggcagtattcatccacaattttaaaagaaaaggggggattggggggtacagtgcaggggaaagaatagtagacataatagcaacagacatacaaactaaag

SEQ ID NO: 13459 - DNA, 301 bp, Artificial Sequence
  Zfhx3.1_Kmt2c.2
  crRNA array
  misc_feature (148)..(157): n is a, c, g, or t
cttggctttatatatcttgtggaaaggacgaaacaccgtaatttctactaagtgtagatcgctgcgaggtgtgtaactataatttctactaagtgtagatcccaaagatcagcgtggacctaatttctactaagtgtagatttttttnnnnnnnnnnaagcttggcgtggatccgatatcaactagatcttgagacaaatggcagtattcatccacaattttaaaagaaaaggggggattggggggtacagtgcaggggaaagaatagtagacataatagcaacagacatacaaactaaag

SEQ ID NO: 13460 - DNA, 301 bp, Artificial Sequence
  Zfhx3.1_Kmt2c.3
  crRNA array
  misc_feature (148)..(157): n is a, c, g, or t
cttggctttatatatcttgtggaaaggacgaaacaccgtaatttctactaagtgtagatcgctgcgaggtgtgtaactataatttctactaagtgtagataaaagatccgaatcgatgcgtaatttctactaagtgtagatttttttnnnnnnnnnnaagcttggcgtggatccgatatcaactagatcttgagacaaatggcagtattcatccacaattttaaaagaaaaggggggattggggggtacagtgcaggggaaagaatagtagacataatagcaacagacatacaaactaaag

SEQ ID NO: 13461 - DNA, 301 bp, Artificial Sequence
  Zfhx3.1_Kmt2c.4
  crRNA array
  misc_feature (148)..(157): n is a, c, g, or t
cttggctttatatatcttgtggaaaggacgaaacaccgtaatttctactaagtgtagatcgctgcgaggtgtgtaactataatttctactaagtgtagatctgaggcacatggaagcgattaatttctactaagtgtagatttttttnnnnnnnnnnaagcttggcgtggatccgatatcaactagatcttgagacaaatggcagtattcatccacaattttaaaagaaaaggggggattggggggtacagtgcaggggaaagaatagtagacataatagcaacagacatacaaactaaag

SEQ ID NO: 13462 - DNA, 301 bp, Artificial Sequence
  Zfhx3.2_Kmt2c.1
  crRNA array
  misc_feature (148)..(157): n is a, c, g, or t
cttggctttatatatcttgtggaaaggacgaaacaccgtaatttctactaagtgtagatacgtgcgacacaaaagcaactaatttctactaagtgtagatactcgacctccacctccctataatttctactaagtgtagatttttttnnnnnnnnnnaagcttggcgtggatccgatatcaactagatcttgagacaaatggcagtattcatccacaattttaaaagaaaaggggggattggggggtacagtgcaggggaaagaatagtagacataatagcaacagacatacaaactaaag

SEQ ID NO: 13463 - DNA, 301 bp, Artificial Sequence
  Zfhx3.2_Kmt2c.2
  crRNA array
  misc_feature (148)..(157): n is a, c, g, or t
cttggctttatatatcttgtggaaaggacgaaacaccgtaatttctactaagtgtagatacgtgcgacacaaaagcaactaatttctactaagtgtagatcccaaagatcagcgtggacctaatttctactaagtgtagatttttttnnnnnnnnnnaagcttggcgtggatccgatatcaactagatcttgagacaaatggcagtattcatccacaattttaaaagaaaaggggggattggggggtacagtgcaggggaaagaatagtagacataatagcaacagacatacaaactaaag

SEQ ID NO: 13464 - DNA, 301 bp, Artificial Sequence
  Zfhx3.2_Kmt2c.3
  crRNA array
  misc_feature (148)..(157): n is a, c, g, or t
cttggctttatatatcttgtggaaaggacgaaacaccgtaatttctactaagtgtagatacgtgcgacacaaaagcaactaatttctactaagtgtagataaaagatccgaatcgatgcgtaatttctactaagtgtagatttttttnnnnnnnnnnaagcttggcgtggatccgatatcaactagatcttgagacaaatggcagtattcatccacaattttaaaagaaaaggggggattggggggtacagtgcaggggaaagaatagtagacataatagcaacagacatacaaactaaag

SEQ ID NO: 13465 - DNA, 301 bp, Artificial Sequence
  Zfhx3.2_Kmt2c.4
  crRNA array
  misc_feature (148)..(157): n is a, c, g, or t
cttggctttatatatcttgtggaaaggacgaaacaccgtaatttctactaagtgtagatacgtgcgacacaaaagcaactaatttctactaagtgtagatctgaggcacatggaagcgattaatttctactaagtgtagatttttttnnnnnnnnnnaagcttggcgtggatccgatatcaactagatcttgagacaaatggcagtattcatccacaattttaaaagaaaaggggggattggggggtacagtgcaggggaaagaatagtagacataatagcaacagacatacaaactaaag

SEQ ID NO: 13466 - DNA, 301 bp, Artificial Sequence
  Zfhx3.3_Kmt2c.1
  crRNA array
  misc_feature (148)..(157): n is a, c, g, or t
cttggctttatatatcttgtggaaaggacgaaacaccgtaatttctactaagtgtagattgctctacggcaagaggaaataatttctactaagtgtagatactcgacctccacctccctataatttctactaagtgtagatttttttnnnnnnnnnnaagcttggcgtggatccgatatcaactagatcttgagacaaatggcagtattcatccacaattttaaaagaaaaggggggattggggggtacagtgcaggggaaagaatagtagacataatagcaacagacatacaaactaaag

SEQ ID NO: 13467 - DNA, 301 bp, Artificial Sequence
  Zfhx3.3_Kmt2c.2
  crRNA array
  misc_feature (148)..(157): n is a, c, g, or t
cttggctttatatatcttgtggaaaggacgaaacaccgtaatttctactaagtgtagattgctctacggcaagaggaaataatttctactaagtgtagatcccaaagatcagcgtggacctaatttctactaagtgtagatttttttnnnnnnnnnnaagcttggcgtggatccgatatcaactagatcttgagacaaatggcagtattcatccacaattttaaaagaaaaggggggattggggggtacagtgcaggggaaagaatagtagacataatagcaacagacatacaaactaaag

SEQ ID NO: 13468 - DNA, 301 bp, Artificial Sequence
  Zfhx3.3_Kmt2c.3
  crRNA array
  misc_feature (148)..(157): n is a, c, g, or t
cttggctttatatatcttgtggaaaggacgaaacaccgtaatttctactaagtgtagattgctctacggcaagaggaaataatttctactaagtgtagataaaagatccgaatcgatgcgtaatttctactaagtgtagatttttttnnnnnnnnnnaagcttggcgtggatccgatatcaactagatcttgagacaaatggcagtattcatccacaattttaaaagaaaaggggggattggggggtacagtgcaggggaaagaatagtagacataatagcaacagacatacaaactaaag

SEQ ID NO: 13469 - DNA, 301 bp, Artificial Sequence
  Zfhx3.3_Kmt2c.4
  crRNA array
  misc_feature (148)..(157): n is a, c, g, or t
cttggctttatatatcttgtggaaaggacgaaacaccgtaatttctactaagtgtagattgctctacggcaagaggaaataatttctactaagtgtagatctgaggcacatggaagcgattaatttctactaagtgtagatttttttnnnnnnnnnnaagcttggcgtggatccgatatcaactagatcttgagacaaatggcagtattcatccacaattttaaaagaaaaggggggattggggggtacagtgcaggggaaagaatagtagacataatagcaacagacatacaaactaaag

SEQ ID NO: 13470 - DNA, 301 bp, Artificial Sequence
  Zfhx3.4_Kmt2c.1
  crRNA array
  misc_feature (148)..(157): n is a, c, g, or t
cttggctttatatatcttgtggaaaggacgaaacaccgtaatttctactaagtgtagatagtgagcggcagactgcgagtaatttctactaagtgtagatactcgacctccacctccctataatttctactaagtgtagatttttttnnnnnnnnnnaagcttggcgtggatccgatatcaactagatcttgagacaaatggcagtattcatccacaattttaaaagaaaaggggggattggggggtacagtgcaggggaaagaatagtagacataatagcaacagacatacaaactaaag

SEQ ID NO: 13471 - DNA, 301 bp, Artificial Sequence
  Zfhx3.4_Kmt2c.2
  crRNA array
  misc_feature (148)..(157): n is a, c, g, or t
cttggctttatatatcttgtggaaaggacgaaacaccgtaatttctactaagtgtagatagtgagcggcagactgcgagtaatttctactaagtgtagatcccaaagatcagcgtggacctaatttctactaagtgtagatttttttnnnnnnnnnnaagcttggcgtggatccgatatcaactagatcttgagacaaatggcagtattcatccacaattttaaaagaaaaggggggattggggggtacagtgcaggggaaagaatagtagacataatagcaacagacatacaaactaaag

SEQ ID NO: 13472 - DNA, 301 bp, Artificial Sequence
  Zfhx3.4_Kmt2c.3
  crRNA array
  misc_feature (148)..(157): n is a, c, g, or t
cttggctttatatatcttgtggaaaggacgaaacaccgtaatttctactaagtgtagatagtgagcggcagactgcgagtaatttctactaagtgtagataaaagatccgaatcgatgcgtaatttctactaagtgtagatttttttnnnnnnnnnnaagcttggcgtggatccgatatcaactagatcttgagacaaatggcagtattcatccacaattttaaaagaaaaggggggattggggggtacagtgcaggggaaagaatagtagacataatagcaacagacatacaaactaaag

SEQ ID NO: 13473 - DNA, 301 bp, Artificial Sequence
  Zfhx3.4_Kmt2c.4
  crRNA array
  misc_feature (148)..(157): n is a, c, g, or t
cttggctttatatatcttgtggaaaggacgaaacaccgtaatttctactaagtgtagatagtgagcggcagactgcgagtaatttctactaagtgtagatctgaggcacatggaagcgattaatttctactaagtgtagatttttttnnnnnnnnnnaagcttggcgtggatccgatatcaactagatcttgagacaaatggcagtattcatccacaattttaaaagaaaaggggggattggggggtacagtgcaggggaaagaatagtagacataatagcaacagacatacaaactaaag

SEQ ID NO: 13474 - DNA, 301 bp, Artificial Sequence
  Zfhx3.1_Pten.1
  crRNA array
  misc_feature (148)..(157): n is a, c, g, or t
cttggctttatatatcttgtggaaaggacgaaacaccgtaatttctactaagtgtagatcgctgcgaggtgtgtaactataatttctactaagtgtagataagcgtggtgcgtgacgcactaatttctactaagtgtagatttttttnnnnnnnnnnaagcttggcgtggatccgatatcaactagatcttgagacaaatggcagtattcatccacaattttaaaagaaaaggggggattggggggtacagtgcaggggaaagaatagtagacataatagcaacagacatacaaactaaag

SEQ ID NO: 13475 - DNA, 301 bp, Artificial Sequence
  Zfhx3.1_Pten.2
  crRNA array
  misc_feature (148)..(157): n is a, c, g, or t
cttggctttatatatcttgtggaaaggacgaaacaccgtaatttctactaagtgtagatcgctgcgaggtgtgtaactataatttctactaagtgtagattgtcaccagctgaagtggcttaatttctactaagtgtagatttttttnnnnnnnnnnaagcttggcgtggatccgatatcaactagatcttgagacaaatggcagtattcatccacaattttaaaagaaaaggggggattggggggtacagtgcaggggaaagaatagtagacataatagcaacagacatacaaactaaag

SEQ ID NO: 13476 - DNA, 301 bp, Artificial Sequence
  Zfhx3.1_Pten.3
  crRNA array
  misc_feature (148)..(157): n is a, c, g, or t
cttggctttatatatcttgtggaaaggacgaaacaccgtaatttctactaagtgtagatcgctgcgaggtgtgtaactataatttctactaagtgtagatggagtcaagaggctgatttttaatttctactaagtgtagatttttttnnnnnnnnnnaagcttggcgtggatccgatatcaactagatcttgagacaaatggcagtattcatccacaattttaaaagaaaaggggggattggggggtacagtgcaggggaaagaatagtagacataatagcaacagacatacaaactaaag

SEQ ID NO: 13477 - DNA, 301 bp, Artificial Sequence
  Zfhx3.1_Pten.4
  crRNA array
  misc_feature (148)..(157): n is a, c, g, or t
cttggctttatatatcttgtggaaaggacgaaacaccgtaatttctactaagtgtagatcgctgcgaggtgtgtaactataatttctactaagtgtagatctgtaagctaaaccactacataatttctactaagtgtagatttttttnnnnnnnnnnaagcttggcgtggatccgatatcaactagatcttgagacaaatggcagtattcatccacaattttaaaagaaaaggggggattggggggtacagtgcaggggaaagaatagtagacataatagcaacagacatacaaactaaag

SEQ ID NO: 13478 - DNA, 301 bp, Artificial Sequence
  Zfhx3.2_Pten.1
  crRNA array
  misc_feature (148)..(157): n is a, c, g, or t
cttggctttatatatcttgtggaaaggacgaaacaccgtaatttctactaagtgtagatacgtgcgacacaaaagcaactaatttctactaagtgtagataagcgtggtgcgtgacgcactaatttctactaagtgtagatttttttnnnnnnnnnnaagcttggcgtggatccgatatcaactagatcttgagacaaatggcagtattcatccacaattttaaaagaaaaggggggattggggggtacagtgcaggggaaagaatagtagacataatagcaacagacatacaaactaaag

SEQ ID NO: 13479 - DNA, 301 bp, Artificial Sequence
  Zfhx3.2_Pten.2
  crRNA array
  misc_feature (148)..(157): n is a, c, g, or t
cttggctttatatatcttgtggaaaggacgaaacaccgtaatttctactaagtgtagatacgtgcgacacaaaagcaactaatttctactaagtgtagattgtcaccagctgaagtggcttaatttctactaagtgtagatttttttnnnnnnnnnnaagcttggcgtggatccgatatcaactagatcttgagacaaatggcagtattcatccacaattttaaaagaaaaggggggattggggggtacagtgcaggggaaagaatagtagacataatagcaacagacatacaaactaaag

SEQ ID NO: 13480 - DNA, 301 bp, Artificial Sequence
  Zfhx3.2_Pten.3
  crRNA array
  misc_feature (148)..(157): n is a, c, g, or t
cttggctttatatatcttgtggaaaggacgaaacaccgtaatttctactaagtgtagatacgtgcgacacaaaagcaactaatttctactaagtgtagatggagtcaagaggctgatttttaatttctactaagtgtagatttttttnnnnnnnnnnaagcttggcgtggatccgatatcaactagatcttgagacaaatggcagtattcatccacaattttaaaagaaaaggggggattggggggtacagtgcaggggaaagaatagtagacataatagcaacagacatacaaactaaag

SEQ ID NO: 13481 - DNA, 301 bp, Artificial Sequence
  Zfhx3.2_Pten.4
  crRNA array
  misc_feature (148)..(157): n is a, c, g, or t
cttggctttatatatcttgtggaaaggacgaaacaccgtaatttctactaagtgtagatacgtgcgacacaaaagcaactaatttctactaagtgtagatctgtaagctaaaccactacataatttctactaagtgtagatttttttnnnnnnnnnnaagcttggcgtggatccgatatcaactagatcttgagacaaatggcagtattcatccacaattttaaaagaaaaggggggattggggggtacagtgcaggggaaagaatagtagacataatagcaacagacatacaaactaaag

SEQ ID NO: 13482 - DNA, 301 bp, Artificial Sequence
  Zfhx3.3_Pten.1
  crRNA array
  misc_feature (148)..(157): n is a, c, g, or t
cttggctttatatatcttgtggaaaggacgaaacaccgtaatttctactaagtgtagattgctctacggcaagaggaaataatttctactaagtgtagataagcgtggtgcgtgacgcactaatttctactaagtgtagatttttttnnnnnnnnnnaagcttggcgtggatccgatatcaactagatcttgagacaaatggcagtattcatccacaattttaaaagaaaaggggggattggggggtacagtgcaggggaaagaatagtagacataatagcaacagacatacaaactaaag

SEQ ID NO: 13483 - DNA, 301 bp, Artificial Sequence
  Zfhx3.3_Pten.2
  crRNA array
  misc_feature (148)..(157): n is a, c, g, or t
cttggctttatatatcttgtggaaaggacgaaacaccgtaatttctactaagtgtagattgctctacggcaagaggaaataatttctactaagtgtagattgtcaccagctgaagtggcttaatttctactaagtgtagatttttttnnnnnnnnnnaagcttggcgtggatccgatatcaactagatcttgagacaaatggcagtattcatccacaattttaaaagaaaaggggggattggggggtacagtgcaggggaaagaatagtagacataatagcaacagacatacaaactaaag

SEQ ID NO: 13484 - DNA, 301 bp, Artificial Sequence
  Zfhx3.3_Pten.3
  crRNA array
  misc_feature (148)..(157): n is a, c, g, or t
cttggctttatatatcttgtggaaaggacgaaacaccgtaatttctactaagtgtagattgctctacggcaagaggaaataatttctactaagtgtagatggagtcaagaggctgatttttaatttctactaagtgtagatttttttnnnnnnnnnnaagcttggcgtggatccgatatcaactagatcttgagacaaatggcagtattcatccacaattttaaaagaaaaggggggattggggggtacagtgcaggggaaagaatagtagacataatagcaacagacatacaaactaaag

SEQ ID NO: 13485 - DNA, 301 bp, Artificial Sequence
  Zfhx3.3_Pten.4
  crRNA array
  misc_feature (148)..(157): n is a, c, g, or t
cttggctttatatatcttgtggaaaggacgaaacaccgtaatttctactaagtgtagattgctctacggcaagaggaaataatttctactaagtgtagatctgtaagctaaaccactacataatttctactaagtgtagatttttttnnnnnnnnnnaagcttggcgtggatccgatatcaactagatcttgagacaaatggcagtattcatccacaattttaaaagaaaaggggggattggggggtacagtgcaggggaaagaatagtagacataatagcaacagacatacaaactaaag

SEQ ID NO: 13486 - DNA, 301 bp, Artificial Sequence
  Zfhx3.4_Pten.1
  crRNA array
  misc_feature (148)..(157): n is a, c, g, or t
cttggctttatatatcttgtggaaaggacgaaacaccgtaatttctactaagtgtagatagtgagcggcagactgcgagtaatttctactaagtgtagataagcgtggtgcgtgacgcactaatttctactaagtgtagatttttttnnnnnnnnnnaagcttggcgtggatccgatatcaactagatcttgagacaaatggcagtattcatccacaattttaaaagaaaaggggggattggggggtacagtgcaggggaaagaatagtagacataatagcaacagacatacaaactaaag

SEQ ID NO: 13487 - DNA, 301 bp, Artificial Sequence
  Zfhx3.4_Pten.2
  crRNA array
  misc_feature (148)..(157): n is a, c, g, or t
cttggctttatatatcttgtggaaaggacgaaacaccgtaatttctactaagtgtagatagtgagcggcagactgcgagtaatttctactaagtgtagattgtcaccagctgaagtggcttaatttctactaagtgtagatttttttnnnnnnnnnnaagcttggcgtggatccgatatcaactagatcttgagacaaatggcagtattcatccacaattttaaaagaaaaggggggattggggggtacagtgcaggggaaagaatagtagacataatagcaacagacatacaaactaaag

SEQ ID NO: 13488 - DNA, 301 bp, Artificial Sequence
  Zfhx3.4_Pten.3
  crRNA array
  misc_feature (148)..(157): n is a, c, g, or t
cttggctttatatatcttgtggaaaggacgaaacaccgtaatttctactaagtgtagatagtgagcggcagactgcgagtaatttctactaagtgtagatggagtcaagaggctgatttttaatttctactaagtgtagatttttttnnnnnnnnnnaagcttggcgtggatccgatatcaactagatcttgagacaaatggcagtattcatccacaattttaaaagaaaaggggggattggggggtacagtgcaggggaaagaatagtagacataatagcaacagacatacaaactaaag

SEQ ID NO: 13489 - DNA, 301 bp, Artificial Sequence
  Zfhx3.4_Pten.4
  crRNA array
  misc_feature (148)..(157): n is a, c, g, or t
cttggctttatatatcttgtggaaaggacgaaacaccgtaatttctactaagtgtagatagtgagcggcagactgcgagtaatttctactaagtgtagatctgtaagctaaaccactacataatttctactaagtgtagatttttttnnnnnnnnnnaagcttggcgtggatccgatatcaactagatcttgagacaaatggcagtattcatccacaattttaaaagaaaaggggggattggggggtacagtgcaggggaaagaatagtagacataatagcaacagacatacaaactaaag

SEQ ID NO: 13490 - DNA, 301 bp, Artificial Sequence
  Zfhx3.1_Atm.1
  crRNA array
  misc_feature (148)..(157): n is a, c, g, or t
cttggctttatatatcttgtggaaaggacgaaacaccgtaatttctactaagtgtagatcgctgcgaggtgtgtaactataatttctactaagtgtagatgagaaagtctccgaatcgtttaatttctactaagtgtagatttttttnnnnnnnnnnaagcttggcgtggatccgatatcaactagatcttgagacaaatggcagtattcatccacaattttaaaagaaaaggggggattggggggtacagtgcaggggaaagaatagtagacataatagcaacagacatacaaactaaag

SEQ ID NO: 13491 - DNA, 301 bp, Artificial Sequence
  Zfhx3.1_Atm.2
  crRNA array
  misc_feature (148)..(157): n is a, c, g, or t
cttggctttatatatcttgtggaaaggacgaaacaccgtaatttctactaagtgtagatcgctgcgaggtgtgtaactataatttctactaagtgtagatcctacgagggcacgagagactaatttctactaagtgtagatttttttnnnnnnnnnnaagcttggcgtggatccgatatcaactagatcttgagacaaatggcagtattcatccacaattttaaaagaaaaggggggattggggggtacagtgcaggggaaagaatagtagacataatagcaacagacatacaaactaaag

SEQ ID NO: 13492 - DNA, 301 bp, Artificial Sequence
  Zfhx3.1_Atm.3
  crRNA array
  misc_feature (148)..(157): n is a, c, g, or t
cttggctttatatatcttgtggaaaggacgaaacaccgtaatttctactaagtgtagatcgctgcgaggtgtgtaactataatttctactaagtgtagattgaaagtctccgatatgccataatttctactaagtgtagatttttttnnnnnnnnnnaagcttggcgtggatccgatatcaactagatcttgagacaaatggcagtattcatccacaattttaaaagaaaaggggggattggggggtacagtgcaggggaaagaatagtagacataatagcaacagacatacaaactaaag

SEQ ID NO: 13493 - DNA, 301 bp, Artificial Sequence
  Zfhx3.1_Atm.4
  crRNA array
  misc_feature (148)..(157): n is a, c, g, or t
cttggctttatatatcttgtggaaaggacgaaacaccgtaatttctactaagtgtagatcgctgcgaggtgtgtaactataatttctactaagtgtagatggtggtgatcagtcaagtagtaatttctactaagtgtagatttttttnnnnnnnnnnaagcttggcgtggatccgatatcaactagatcttgagacaaatggcagtattcatccacaattttaaaagaaaaggggggattggggggtacagtgcaggggaaagaatagtagacataatagcaacagacatacaaactaaag

SEQ ID NO: 13494 - DNA, 301 bp, Artificial Sequence
  Zfhx3.2_Atm.1
  crRNA array
  misc_feature (148)..(157): n is a, c, g, or t
cttggctttatatatcttgtggaaaggacgaaacaccgtaatttctactaagtgtagatacgtgcgacacaaaagcaactaatttctactaagtgtagatgagaaagtctccgaatcgtttaatttctactaagtgtagatttttttnnnnnnnnnnaagcttggcgtggatccgatatcaactagatcttgagacaaatggcagtattcatccacaattttaaaagaaaaggggggattggggggtacagtgcaggggaaagaatagtagacataatagcaacagacatacaaactaaag

SEQ ID NO: 13495 - DNA, 301 bp, Artificial Sequence
  Zfhx3.2_Atm.2
  crRNA array
  misc_feature (148)..(157): n is a, c, g, or t
cttggctttatatatcttgtggaaaggacgaaacaccgtaatttctactaagtgtagatacgtgcgacacaaaagcaactaatttctactaagtgtagatcctacgagggcacgagagactaatttctactaagtgtagatttttttnnnnnnnnnnaagcttggcgtggatccgatatcaactagatcttgagacaaatggcagtattcatccacaattttaaaagaaaaggggggattggggggtacagtgcaggggaaagaatagtagacataatagcaacagacatacaaactaaag

SEQ ID NO: 13496 - DNA, 301 bp, Artificial Sequence
  Zfhx3.2_Atm.3
  crRNA array
  misc_feature (148)..(157): n is a, c, g, or t
cttggctttatatatcttgtggaaaggacgaaacaccgtaatttctactaagtgtagatacgtgcgacacaaaagcaactaatttctactaagtgtagattgaaagtctccgatatgccataatttctactaagtgtagatttttttnnnnnnnnnnaagcttggcgtggatccgatatcaactagatcttgagacaaatggcagtattcatccacaattttaaaagaaaaggggggattggggggtacagtgcaggggaaagaatagtagacataatagcaacagacatacaaactaaag

SEQ ID NO: 13497 - DNA, 301 bp, Artificial Sequence
  Zfhx3.2_Atm.4
  crRNA array
  misc_feature (148)..(157): n is a, c, g, or t
cttggctttatatatcttgtggaaaggacgaaacaccgtaatttctactaagtgtagatacgtgcgacacaaaagcaactaatttctactaagtgtagatggtggtgatcagtcaagtagtaatttctactaagtgtagatttttttnnnnnnnnnnaagcttggcgtggatccgatatcaactagatcttgagacaaatggcagtattcatccacaattttaaaagaaaaggggggattggggggtacagtgcaggggaaagaatagtagacataatagcaacagacatacaaactaaag

SEQ ID NO: 13498 - DNA, 301 bp, Artificial Sequence
  Zfhx3.3_Atm.1
  crRNA array
  misc_feature (148)..(157): n is a, c, g, or t
cttggctttatatatcttgtggaaaggacgaaacaccgtaatttctactaagtgtagattgctctacggcaagaggaaataatttctactaagtgtagatgagaaagtctccgaatcgtttaatttctactaagtgtagatttttttnnnnnnnnnnaagcttggcgtggatccgatatcaactagatcttgagacaaatggcagtattcatccacaattttaaaagaaaaggggggattggggggtacagtgcaggggaaagaatagtagacataatagcaacagacatacaaactaaag

SEQ ID NO: 13499 - DNA, 301 bp, Artificial Sequence
  Zfhx3.3_Atm.2
  crRNA array
  misc_feature (148)..(157): n is a, c, g, or t
cttggctttatatatcttgtggaaaggacgaaacaccgtaatttctactaagtgtagattgctctacggcaagaggaaataatttctactaagtgtagatcctacgagggcacgagagactaatttctactaagtgtagatttttttnnnnnnnnnnaagcttggcgtggatccgatatcaactagatcttgagacaaatggcagtattcatccacaattttaaaagaaaaggggggattggggggtacagtgcaggggaaagaatagtagacataatagcaacagacatacaaactaaag

SEQ ID NO: 13500 - DNA, 301 bp, Artificial Sequence
  Zfhx3.3_Atm.3
  crRNA array
  misc_feature (148)..(157): n is a, c, g, or t
cttggctttatatatcttgtggaaaggacgaaacaccgtaatttctactaagtgtagattgctctacggcaagaggaaataatttctactaagtgtagattgaaagtctccgatatgccataatttctactaagtgtagatttttttnnnnnnnnnnaagcttggcgtggatccgatatcaactagatcttgagacaaatggcagtattcatccacaattttaaaagaaaaggggggattggggggtacagtgcaggggaaagaatagtagacataatagcaacagacatacaaactaaag

SEQ ID NO: 13501 - DNA, 301 bp, Artificial Sequence
  Zfhx3.3_Atm.4
  crRNA array
  misc_feature (148)..(157): n is a, c, g, or t
cttggctttatatatcttgtggaaaggacgaaacaccgtaatttctactaagtgtagattgctctacggcaagaggaaataatttctactaagtgtagatggtggtgatcagtcaagtagtaatttctactaagtgtagatttttttnnnnnnnnnnaagcttggcgtggatccgatatcaactagatcttgagacaaatggcagtattcatccacaattttaaaagaaaaggggggattggggggtacagtgcaggggaaagaatagtagacataatagcaacagacatacaaactaaag

SEQ ID NO: 13502 - DNA, 301 bp, Artificial Sequence
  Zfhx3.4_Atm.1
  crRNA array
  misc_feature (148)..(157): n is a, c, g, or t
cttggctttatatatcttgtggaaaggacgaaacaccgtaatttctactaagtgtagatagtgagcggcagactgcgagtaatttctactaagtgtagatgagaaagtctccgaatcgtttaatttctactaagtgtagatttttttnnnnnnnnnnaagcttggcgtggatccgatatcaactagatcttgagacaaatggcagtattcatccacaattttaaaagaaaaggggggattggggggtacagtgcaggggaaagaatagtagacataatagcaacagacatacaaactaaag

SEQ ID NO: 13503 - DNA, 301 bp, Artificial Sequence
  Zfhx3.4_Atm.2
  crRNA array
  misc_feature (148)..(157): n is a, c, g, or t
cttggctttatatatcttgtggaaaggacgaaacaccgtaatttctactaagtgtagatagtgagcggcagactgcgagtaatttctactaagtgtagatcctacgagggcacgagagactaatttctactaagtgtagatttttttnnnnnnnnnnaagcttggcgtggatccgatatcaactagatcttgagacaaatggcagtattcatccacaattttaaaagaaaaggggggattggggggtacagtgcaggggaaagaatagtagacataatagcaacagacatacaaactaaag

SEQ ID NO: 13504 - DNA, 301 bp, Artificial Sequence
  Zfhx3.4_Atm.3
  crRNA array
  misc_feature (148)..(157): n is a, c, g, or t
cttggctttatatatcttgtggaaaggacgaaacaccgtaatttctactaagtgtagatagtgagcggcagactgcgagtaatttctactaagtgtagattgaaagtctccgatatgccataatttctactaagtgtagatttttttnnnnnnnnnnaagcttggcgtggatccgatatcaactagatcttgagacaaatggcagtattcatccacaattttaaaagaaaaggggggattggggggtacagtgcaggggaaagaatagtagacataatagcaacagacatacaaactaaag

SEQ ID NO: 13505 - DNA, 301 bp, Artificial Sequence
  Zfhx3.4_Atm.4
  crRNA array
  misc_feature (148)..(157): n is a, c, g, or t
cttggctttatatatcttgtggaaaggacgaaacaccgtaatttctactaagtgtagatagtgagcggcagactgcgagtaatttctactaagtgtagatggtggtgatcagtcaagtagtaatttctactaagtgtagatttttttnnnnnnnnnnaagcttggcgtggatccgatatcaactagatcttgagacaaatggcagtattcatccacaattttaaaagaaaaggggggattggggggtacagtgcaggggaaagaatagtagacataatagcaacagacatacaaactaaag

SEQ ID NO: 13506 - DNA, 301 bp, Artificial Sequence
  Crebbp.1_Cdkn2a.1
  crRNA array
  misc_feature (148)..(157): n is a, c, g, or t
cttggctttatatatcttgtggaaaggacgaaacaccgtaatttctactaagtgtagatctcacggcggcggcgggccgtaatttctactaagtgtagatcaatcacgggagggagcagataatttctactaagtgtagatttttttnnnnnnnnnnaagcttggcgtggatccgatatcaactagatcttgagacaaatggcagtattcatccacaattttaaaagaaaaggggggattggggggtacagtgcaggggaaagaatagtagacataatagcaacagacatacaaactaaag

SEQ ID NO: 13507 - DNA, 301 bp, Artificial Sequence
  Crebbp.1_Cdkn2a.2
  crRNA array
  misc_feature (148)..(157): n is a, c, g, or t
cttggctttatatatcttgtggaaaggacgaaacaccgtaatttctactaagtgtagatctcacggcggcggcgggccgtaatttctactaagtgtagatgcccaacgccccgaactctttaatttctactaagtgtagatttttttnnnnnnnnnnaagcttggcgtggatccgatatcaactagatcttgagacaaatggcagtattcatccacaattttaaaagaaaaggggggattggggggtacagtgcaggggaaagaatagtagacataatagcaacagacatacaaactaaag

SEQ ID NO: 13508 - DNA, 301 bp, Artificial Sequence
  Crebbp.1_Cdkn2a.3
  crRNA array
  misc_feature (148)..(157): n is a, c, g, or t
cttggctttatatatcttgtggaaaggacgaaacaccgtaatttctactaagtgtagatctcacggcggcggcgggccgtaatttctactaagtgtagattgtaccgctgggaacgtcgctaatttctactaagtgtagatttttttnnnnnnnnnnaagcttggcgtggatccgatatcaactagatcttgagacaaatggcagtattcatccacaattttaaaagaaaaggggggattggggggtacagtgcaggggaaagaatagtagacataatagcaacagacatacaaactaaag

SEQ ID NO: 13509 - DNA, 301 bp, Artificial Sequence
  Crebbp.1_Cdkn2a.4
  crRNA array
  misc_feature (148)..(157): n is a, c, g, or t
cttggctttatatatcttgtggaaaggacgaaacaccgtaatttctactaagtgtagatctcacggcggcggcgggccgtaatttctactaagtgtagataagccacatgctagacacgctaatttctactaagtgtagatttttttnnnnnnnnnnaagcttggcgtggatccgatatcaactagatcttgagacaaatggcagtattcatccacaattttaaaagaaaaggggggattggggggtacagtgcaggggaaagaatagtagacataatagcaacagacatacaaactaaag

SEQ ID NO: 13510 - DNA, 301 bp, Artificial Sequence
  Crebbp.2_Cdkn2a.1
  crRNA array
  misc_feature (148)..(157): n is a, c, g, or t
cttggctttatatatcttgtggaaaggacgaaacaccgtaatttctactaagtgtagatcgcgagcaggtgaagatggctaatttctactaagtgtagatcaatcacgggagggagcagataatttctactaagtgtagatttttttnnnnnnnnnnaagcttggcgtggatccgatatcaactagatcttgagacaaatggcagtattcatccacaattttaaaagaaaaggggggattggggggtacagtgcaggggaaagaatagtagacataatagcaacagacatacaaactaaag

SEQ ID NO: 13511 - DNA, 301 bp, Artificial Sequence
  Crebbp.2_Cdkn2a.2
  crRNA array
  misc_feature (148)..(157): n is a, c, g, or t
cttggctttatatatcttgtggaaaggacgaaacaccgtaatttctactaagtgtagatcgcgagcaggtgaagatggctaatttctactaagtgtagatgcccaacgccccgaactctttaatttctactaagtgtagatttttttnnnnnnnnnnaagcttggcgtggatccgatatcaactagatcttgagacaaatggcagtattcatccacaattttaaaagaaaaggggggattggggggtacagtgcaggggaaagaatagtagacataatagcaacagacatacaaactaaag

SEQ ID NO: 13512 - DNA, 301 bp, Artificial Sequence
  Crebbp.2_Cdkn2a.3
  crRNA array
  misc_feature (148)..(157): n is a, c, g, or t
cttggctttatatatcttgtggaaaggacgaaacaccgtaatttctactaagtgtagatcgcgagcaggtgaagatggctaatttctactaagtgtagattgtaccgctgggaacgtcgctaatttctactaagtgtagatttttttnnnnnnnnnnaagcttggcgtggatccgatatcaactagatcttgagacaaatggcagtattcatccacaattttaaaagaaaaggggggattggggggtacagtgcaggggaaagaatagtagacataatagcaacagacatacaaactaaag

SEQ ID NO: 13513 - DNA, 301 bp, Artificial Sequence
  Crebbp.2_Cdkn2a.4
  crRNA array
  misc_feature (148)..(157): n is a, c, g, or t
cttggctttatatatcttgtggaaaggacgaaacaccgtaatttctactaagtgtagatcgcgagcaggtgaagatggctaatttctactaagtgtagataagccacatgctagacacgctaatttctactaagtgtagatttttttnnnnnnnnnnaagcttggcgtggatccgatatcaactagatcttgagacaaatggcagtattcatccacaattttaaaagaaaaggggggattggggggtacagtgcaggggaaagaatagtagacataatagcaacagacatacaaactaaag

SEQ ID NO: 13514 - DNA, 301 bp, Artificial Sequence
  Crebbp.3_Cdkn2a.1
  crRNA array
  misc_feature (148)..(157): n is a, c, g, or t
cttggctttatatatcttgtggaaaggacgaaacaccgtaatttctactaagtgtagatggctccgccgcccgcccgcgtaatttctactaagtgtagatcaatcacgggagggagcagataatttctactaagtgtagatttttttnnnnnnnnnnaagcttggcgtggatccgatatcaactagatcttgagacaaatggcagtattcatccacaattttaaaagaaaaggggggattggggggtacagtgcaggggaaagaatagtagacataatagcaacagacatacaaactaaag

SEQ ID NO: 13515 - DNA, 301 bp, Artificial Sequence
  Crebbp.3_Cdkn2a.2
  crRNA array
  misc_feature (148)..(157): n is a, c, g, or t
cttggctttatatatcttgtggaaaggacgaaacaccgtaatttctactaagtgtagatggctccgccgcccgcccgcgtaatttctactaagtgtagatgcccaacgccccgaactctttaatttctactaagtgtagatttttttnnnnnnnnnnaagcttggcgtggatccgatatcaactagatcttgagacaaatggcagtattcatccacaattttaaaagaaaaggggggattggggggtacagtgcaggggaaagaatagtagacataatagcaacagacatacaaactaaag

SEQ ID NO: 13516 - DNA, 301 bp, Artificial Sequence
  Crebbp.3_Cdkn2a.3
  crRNA array
  misc_feature (148)..(157): n is a, c, g, or t
cttggctttatatatcttgtggaaaggacgaaacaccgtaatttctactaagtgtagatggctccgccgcccgcccgcgtaatttctactaagtgtagattgtaccgctgggaacgtcgctaatttctactaagtgtagatttttttnnnnnnnnnnaagcttggcgtggatccgatatcaactagatcttgagacaaatggcagtattcatccacaattttaaaagaaaaggggggattggggggtacagtgcaggggaaagaatagtagacataatagcaacagacatacaaactaaag

SEQ ID NO: 13517 - DNA, 301 bp, Artificial Sequence
  Crebbp.3_Cdkn2a.4
  crRNA array
  misc_feature (148)..(157): n is a, c, g, or t
cttggctttatatatcttgtggaaaggacgaaacaccgtaatttctactaagtgtagatggctccgccgcccgcccgcgtaatttctactaagtgtagataagccacatgctagacacgctaatttctactaagtgtagatttttttnnnnnnnnnnaagcttggcgtggatccgatatcaactagatcttgagacaaatggcagtattcatccacaattttaaaagaaaaggggggattggggggtacagtgcaggggaaagaatagtagacataatagcaacagacatacaaactaaag

SEQ ID NO: 13518 - DNA, 301 bp, Artificial Sequence
  Crebbp.4_Cdkn2a.1
  crRNA array
  misc_feature (148)..(157): n is a, c, g, or t
cttggctttatatatcttgtggaaaggacgaaacaccgtaatttctactaagtgtagattggactagatgactccgtagtaatttctactaagtgtagatcaatcacgggagggagcagataatttctactaagtgtagatttttttnnnnnnnnnnaagcttggcgtggatccgatatcaactagatcttgagacaaatggcagtattcatccacaattttaaaagaaaaggggggattggggggtacagtgcaggggaaagaatagtagacataatagcaacagacatacaaactaaag

SEQ ID NO: 13519 - DNA, 301 bp, Artificial Sequence
  Crebbp.4_Cdkn2a.2
  crRNA array
  misc_feature (148)..(157): n is a, c, g, or t
cttggctttatatatcttgtggaaaggacgaaacaccgtaatttctactaagtgtagattggactagatgactccgtagtaatttctactaagtgtagatgcccaacgccccgaactctttaatttctactaagtgtagatttttttnnnnnnnnnnaagcttggcgtggatccgatatcaactagatcttgagacaaatggcagtattcatccacaattttaaaagaaaaggggggattggggggtacagtgcaggggaaagaatagtagacataatagcaacagacatacaaactaaag

SEQ ID NO: 13520 - DNA, 301 bp, Artificial Sequence
  Crebbp.4_Cdkn2a.3
  crRNA array
  misc_feature (148)..(157): n is a, c, g, or t
cttggctttatatatcttgtggaaaggacgaaacaccgtaatttctactaagtgtagattggactagatgactccgtagtaatttctactaagtgtagattgtaccgctgggaacgtcgctaatttctactaagtgtagatttttttnnnnnnnnnnaagcttggcgtggatccgatatcaactagatcttgagacaaatggcagtattcatccacaattttaaaagaaaaggggggattggggggtacagtgcaggggaaagaatagtagacataatagcaacagacatacaaactaaag

SEQ ID NO: 13521 - DNA, 301 bp, Artificial Sequence
  Crebbp.4_Cdkn2a.4
  crRNA array
  misc_feature (148)..(157): n is a, c, g, or t
cttggctttatatatcttgtggaaaggacgaaacaccgtaatttctactaagtgtagattggactagatgactccgtagtaatttctactaagtgtagataagccacatgctagacacgctaatttctactaagtgtagatttttttnnnnnnnnnnaagcttggcgtggatccgatatcaactagatcttgagacaaatggcagtattcatccacaattttaaaagaaaaggggggattggggggtacagtgcaggggaaagaatagtagacataatagcaacagacatacaaactaaag

SEQ ID NO: 13522 - DNA, 301 bp, Artificial Sequence
  Crebbp.1_Wrn.1
  crRNA array
  misc_feature (148)..(157): n is a, c, g, or t
cttggctttatatatcttgtggaaaggacgaaacaccgtaatttctactaagtgtagatctcacggcggcggcgggccgtaatttctactaagtgtagatgcaaaccactcgggtaattttaatttctactaagtgtagatttttttnnnnnnnnnnaagcttggcgtggatccgatatcaactagatcttgagacaaatggcagtattcatccacaattttaaaagaaaaggggggattggggggtacagtgcaggggaaagaatagtagacataatagcaacagacatacaaactaaag

SEQ ID NO: 13523 - DNA, 301 bp, Artificial Sequence
  Crebbp.1_Wrn.2
  crRNA array
  misc_feature (148)..(157): n is a, c, g, or t
cttggctttatatatcttgtggaaaggacgaaacaccgtaatttctactaagtgtagatctcacggcggcggcgggccgtaatttctactaagtgtagatgccatgtccagcagaacctttaatttctactaagtgtagatttttttnnnnnnnnnnaagcttggcgtggatccgatatcaactagatcttgagacaaatggcagtattcatccacaattttaaaagaaaaggggggattggggggtacagtgcaggggaaagaatagtagacataatagcaacagacatacaaactaaag

SEQ ID NO: 13524 - DNA, 301 bp, Artificial Sequence
  Crebbp.1_Wrn.3
  crRNA array
  misc_feature (148)..(157): n is a, c, g, or t
cttggctttatatatcttgtggaaaggacgaaacaccgtaatttctactaagtgtagatctcacggcggcggcgggccgtaatttctactaagtgtagatctgcagcaggccaccgcaattaatttctactaagtgtagatttttttnnnnnnnnnnaagcttggcgtggatccgatatcaactagatcttgagacaaatggcagtattcatccacaattttaaaagaaaaggggggattggggggtacagtgcaggggaaagaatagtagacataatagcaacagacatacaaactaaag

SEQ ID NO: 13525 - DNA, 301 bp, Artificial Sequence
  Crebbp.1_Wrn.4
  crRNA array
  misc_feature (148)..(157): n is a, c, g, or t
cttggctttatatatcttgtggaaaggacgaaacaccgtaatttctactaagtgtagatctcacggcggcggcgggccgtaatttctactaagtgtagattcgaaggacaatagatgatgtaatttctactaagtgtagatttttttnnnnnnnnnnaagcttggcgtggatccgatatcaactagatcttgagacaaatggcagtattcatccacaattttaaaagaaaaggggggattggggggtacagtgcaggggaaagaatagtagacataatagcaacagacatacaaactaaag

SEQ ID NO: 13526 - DNA, 301 bp, Artificial Sequence
  Crebbp.2_Wrn.1
  crRNA array
  misc_feature (148)..(157): n is a, c, g, or t
cttggctttatatatcttgtggaaaggacgaaacaccgtaatttctactaagtgtagatcgcgagcaggtgaagatggctaatttctactaagtgtagatgcaaaccactcgggtaattttaatttctactaagtgtagatttttttnnnnnnnnnnaagcttggcgtggatccgatatcaactagatcttgagacaaatggcagtattcatccacaattttaaaagaaaaggggggattggggggtacagtgcaggggaaagaatagtagacataatagcaacagacatacaaactaaag

SEQ ID NO: 13527 - DNA, 301 bp, Artificial Sequence
  Crebbp.2_Wrn.2
  crRNA array
  misc_feature (148)..(157): n is a, c, g, or t
cttggctttatatatcttgtggaaaggacgaaacaccgtaatttctactaagtgtagatcgcgagcaggtgaagatggctaatttctactaagtgtagatgccatgtccagcagaacctttaatttctactaagtgtagatttttttnnnnnnnnnnaagcttggcgtggatccgatatcaactagatcttgagacaaatggcagtattcatccacaattttaaaagaaaaggggggattggggggtacagtgcaggggaaagaatagtagacataatagcaacagacatacaaactaaag

SEQ ID NO: 13528 - DNA, 301 bp, Artificial Sequence
  Crebbp.2_Wrn.3
  crRNA array
  misc_feature (148)..(157): n is a, c, g, or t
cttggctttatatatcttgtggaaaggacgaaacaccgtaatttctactaagtgtagatcgcgagcaggtgaagatggctaatttctactaagtgtagatctgcagcaggccaccgcaattaatttctactaagtgtagatttttttnnnnnnnnnnaagcttggcgtggatccgatatcaactagatcttgagacaaatggcagtattcatccacaattttaaaagaaaaggggggattggggggtacagtgcaggggaaagaatagtagacataatagcaacagacatacaaactaaag

SEQ ID NO: 13529 - DNA, 301 bp, Artificial Sequence
  Crebbp.2_Wrn.4
  crRNA array
  misc_feature (148)..(157): n is a, c, g, or t
cttggctttatatatcttgtggaaaggacgaaacaccgtaatttctactaagtgtagatcgcgagcaggtgaagatggctaatttctactaagtgtagattcgaaggacaatagatgatgtaatttctactaagtgtagatttttttnnnnnnnnnnaagcttggcgtggatccgatatcaactagatcttgagacaaatggcagtattcatccacaattttaaaagaaaaggggggattggggggtacagtgcaggggaaagaatagtagacataatagcaacagacatacaaactaaag

SEQ ID NO: 13530 - DNA, 301 bp, Artificial Sequence
  Crebbp.3_Wrn.1
  crRNA array
  misc_feature (148)..(157): n is a, c, g, or t
cttggctttatatatcttgtggaaaggacgaaacaccgtaatttctactaagtgtagatggctccgccgcccgcccgcgtaatttctactaagtgtagatgcaaaccactcgggtaattttaatttctactaagtgtagatttttttnnnnnnnnnnaagcttggcgtggatccgatatcaactagatcttgagacaaatggcagtattcatccacaattttaaaagaaaaggggggattggggggtacagtgcaggggaaagaatagtagacataatagcaacagacatacaaactaaag

SEQ ID NO: 13531 - DNA, 301 bp, Artificial Sequence
  Crebbp.3_Wrn.2
  crRNA array
  misc_feature (148)..(157): n is a, c, g, or t
cttggctttatatatcttgtggaaaggacgaaacaccgtaatttctactaagtgtagatggctccgccgcccgcccgcgtaatttctactaagtgtagatgccatgtccagcagaacctttaatttctactaagtgtagatttttttnnnnnnnnnnaagcttggcgtggatccgatatcaactagatcttgagacaaatggcagtattcatccacaattttaaaagaaaaggggggattggggggtacagtgcaggggaaagaatagtagacataatagcaacagacatacaaactaaag

SEQ ID NO: 13532 - DNA, 301 bp, Artificial Sequence
  Crebbp.3_Wrn.3
  crRNA array
  misc_feature (148)..(157): n is a, c, g, or t
cttggctttatatatcttgtggaaaggacgaaacaccgtaatttctactaagtgtagatggctccgccgcccgcccgcgtaatttctactaagtgtagatctgcagcaggccaccgcaattaatttctactaagtgtagatttttttnnnnnnnnnnaagcttggcgtggatccgatatcaactagatcttgagacaaatggcagtattcatccacaattttaaaagaaaaggggggattggggggtacagtgcaggggaaagaatagtagacataatagcaacagacatacaaactaaag

SEQ ID NO: 13533 - DNA, 301 bp, Artificial Sequence
  Crebbp.3_Wrn.4
  crRNA array
  misc_feature (148)..(157): n is a, c, g, or t
cttggctttatatatcttgtggaaaggacgaaacaccgtaatttctactaagtgtagatggctccgccgcccgcccgcgtaatttctactaagtgtagattcgaaggacaatagatgatgtaatttctactaagtgtagatttttttnnnnnnnnnnaagcttggcgtggatccgatatcaactagatcttgagacaaatggcagtattcatccacaattttaaaagaaaaggggggattggggggtacagtgcaggggaaagaatagtagacataatagcaacagacatacaaactaaag

SEQ ID NO: 13534 - DNA, 301 bp, Artificial Sequence
  Crebbp.4_Wrn.1
  crRNA array
  misc_feature (148)..(157): n is a, c, g, or t
cttggctttatatatcttgtggaaaggacgaaacaccgtaatttctactaagtgtagattggactagatgactccgtagtaatttctactaagtgtagatgcaaaccactcgggtaattttaatttctactaagtgtagatttttttnnnnnnnnnnaagcttggcgtggatccgatatcaactagatcttgagacaaatggcagtattcatccacaattttaaaagaaaaggggggattggggggtacagtgcaggggaaagaatagtagacataatagcaacagacatacaaactaaag

SEQ ID NO: 13535 - DNA, 301 bp, Artificial Sequence
  Crebbp.4_Wrn.2
  crRNA array
  misc_feature (148)..(157): n is a, c, g, or t
cttggctttatatatcttgtggaaaggacgaaacaccgtaatttctactaagtgtagattggactagatgactccgtagtaatttctactaagtgtagatgccatgtccagcagaacctttaatttctactaagtgtagatttttttnnnnnnnnnnaagcttggcgtggatccgatatcaactagatcttgagacaaatggcagtattcatccacaattttaaaagaaaaggggggattggggggtacagtgcaggggaaagaatagtagacataatagcaacagacatacaaactaaag

SEQ ID NO: 13536 - DNA, 301 bp, Artificial Sequence
  Crebbp.4_Wrn.3
  crRNA array
  misc_feature (148)..(157): n is a, c, g, or t
cttggctttatatatcttgtggaaaggacgaaacaccgtaatttctactaagtgtagattggactagatgactccgtagtaatttctactaagtgtagatctgcagcaggccaccgcaattaatttctactaagtgtagatttttttnnnnnnnnnnaagcttggcgtggatccgatatcaactagatcttgagacaaatggcagtattcatccacaattttaaaagaaaaggggggattggggggtacagtgcaggggaaagaatagtagacataatagcaacagacatacaaactaaag

SEQ ID NO: 13537 - DNA, 301 bp, Artificial Sequence
  Crebbp.4_Wrn.4
  crRNA array
  misc_feature (148)..(157): n is a, c, g, or t
cttggctttatatatcttgtggaaaggacgaaacaccgtaatttctactaagtgtagattggactagatgactccgtagtaatttctactaagtgtagattcgaaggacaatagatgatgtaatttctactaagtgtagatttttttnnnnnnnnnnaagcttggcgtggatccgatatcaactagatcttgagacaaatggcagtattcatccacaattttaaaagaaaaggggggattggggggtacagtgcaggggaaagaatagtagacataatagcaacagacatacaaactaaag

SEQ ID NO: 13538 - DNA, 301 bp, Artificial Sequence
  Crebbp.1_Brca2.1
  crRNA array
  misc_feature (148)..(157): n is a, c, g, or t
cttggctttatatatcttgtggaaaggacgaaacaccgtaatttctactaagtgtagatctcacggcggcggcgggccgtaatttctactaagtgtagatctaagcgtagaaccagaaattaatttctactaagtgtagatttttttnnnnnnnnnnaagcttggcgtggatccgatatcaactagatcttgagacaaatggcagtattcatccacaattttaaaagaaaaggggggattggggggtacagtgcaggggaaagaatagtagacataatagcaacagacatacaaactaaag

SEQ ID NO: 13539 - DNA, 301 bp, Artificial Sequence
  Crebbp.1_Brca2.2
  crRNA array
  misc_feature (148)..(157): n is a, c, g, or t
cttggctttatatatcttgtggaaaggacgaaacaccgtaatttctactaagtgtagatctcacggcggcggcgggccgtaatttctactaagtgtagatgatccaggtgtaacaagccataatttctactaagtgtagatttttttnnnnnnnnnnaagcttggcgtggatccgatatcaactagatcttgagacaaatggcagtattcatccacaattttaaaagaaaaggggggattggggggtacagtgcaggggaaagaatagtagacataatagcaacagacatacaaactaaag

SEQ ID NO: 13540 - DNA, 301 bp, Artificial Sequence
  Crebbp.1_Brca2.3
  crRNA array
  misc_feature (148)..(157): n is a, c, g, or t
cttggctttatatatcttgtggaaaggacgaaacaccgtaatttctactaagtgtagatctcacggcggcggcgggccgtaatttctactaagtgtagattgaatataaactgggccacttaatttctactaagtgtagatttttttnnnnnnnnnnaagcttggcgtggatccgatatcaactagatcttgagacaaatggcagtattcatccacaattttaaaagaaaaggggggattggggggtacagtgcaggggaaagaatagtagacataatagcaacagacatacaaactaaag

SEQ ID NO: 13541 - DNA, 301 bp, Artificial Sequence
  Crebbp.1_Brca2.4
  crRNA array
  misc_feature (148)..(157): n is a, c, g, or t
cttggctttatatatcttgtggaaaggacgaaacaccgtaatttctactaagtgtagatctcacggcggcggcgggccgtaatttctactaagtgtagatgaaacgccgtatatatagagtaatttctactaagtgtagatttttttnnnnnnnnnnaagcttggcgtggatccgatatcaactagatcttgagacaaatggcagtattcatccacaattttaaaagaaaaggggggattggggggtacagtgcaggggaaagaatagtagacataatagcaacagacatacaaactaaag

SEQ ID NO: 13542 - DNA, 301 bp, Artificial Sequence
  Crebbp.2_Brca2.1
  crRNA array
  misc_feature (148)..(157): n is a, c, g, or t
cttggctttatatatcttgtggaaaggacgaaacaccgtaatttctactaagtgtagatcgcgagcaggtgaagatggctaatttctactaagtgtagatctaagcgtagaaccagaaattaatttctactaagtgtagatttttttnnnnnnnnnnaagcttggcgtggatccgatatcaactagatcttgagacaaatggcagtattcatccacaattttaaaagaaaaggggggattggggggtacagtgcaggggaaagaatagtagacataatagcaacagacatacaaactaaag

SEQ ID NO: 13543 - DNA, 301 bp, Artificial Sequence
  Crebbp.2_Brca2.2
  crRNA array
  misc_feature (148)..(157): n is a, c, g, or t
cttggctttatatatcttgtggaaaggacgaaacaccgtaatttctactaagtgtagatcgcgagcaggtgaagatggctaatttctactaagtgtagatgatccaggtgtaacaagccataatttctactaagtgtagatttttttnnnnnnnnnnaagcttggcgtggatccgatatcaactagatcttgagacaaatggcagtattcatccacaattttaaaagaaaaggggggattggggggtacagtgcaggggaaagaatagtagacataatagcaacagacatacaaactaaag

SEQ ID NO: 13544 - DNA, 301 bp, Artificial Sequence
  Crebbp.2_Brca2.3
  crRNA array
  misc_feature (148)..(157): n is a, c, g, or t
cttggctttatatatcttgtggaaaggacgaaacaccgtaatttctactaagtgtagatcgcgagcaggtgaagatggctaatttctactaagtgtagattgaatataaactgggccacttaatttctactaagtgtagatttttttnnnnnnnnnnaagcttggcgtggatccgatatcaactagatcttgagacaaatggcagtattcatccacaattttaaaagaaaaggggggattggggggtacagtgcaggggaaagaatagtagacataatagcaacagacatacaaactaaag

SEQ ID NO: 13545 - DNA, 301 bp, Artificial Sequence
  Crebbp.2_Brca2.4
  crRNA array
  misc_feature (148)..(157): n is a, c, g, or t
cttggctttatatatcttgtggaaaggacgaaacaccgtaatttctactaagtgtagatcgcgagcaggtgaagatggctaatttctactaagtgtagatgaaacgccgtatatatagagtaatttctactaagtgtagatttttttnnnnnnnnnnaagcttggcgtggatccgatatcaactagatcttgagacaaatggcagtattcatccacaattttaaaagaaaaggggggattggggggtacagtgcaggggaaagaatagtagacataatagcaacagacatacaaactaaag

SEQ ID NO: 13546 - DNA, 301 bp, Artificial Sequence
  Crebbp.3_Brca2.1
  crRNA array
  misc_feature (148)..(157): n is a, c, g, or t
cttggctttatatatcttgtggaaaggacgaaacaccgtaatttctactaagtgtagatggctccgccgcccgcccgcgtaatttctactaagtgtagatctaagcgtagaaccagaaattaatttctactaagtgtagatttttttnnnnnnnnnnaagcttggcgtggatccgatatcaactagatcttgagacaaatggcagtattcatccacaattttaaaagaaaaggggggattggggggtacagtgcaggggaaagaatagtagacataatagcaacagacatacaaactaaag

SEQ ID NO: 13547 - DNA, 301 bp, Artificial Sequence
  Crebbp.3_Brca2.2
  crRNA array
  misc_feature (148)..(157): n is a, c, g, or t
cttggctttatatatcttgtggaaaggacgaaacaccgtaatttctactaagtgtagatggctccgccgcccgcccgcgtaatttctactaagtgtagatgatccaggtgtaacaagccataatttctactaagtgtagatttttttnnnnnnnnnnaagcttggcgtggatccgatatcaactagatcttgagacaaatggcagtattcatccacaattttaaaagaaaaggggggattggggggtacagtgcaggggaaagaatagtagacataatagcaacagacatacaaactaaag

SEQ ID NO: 13548 - DNA, 301 bp, Artificial Sequence
  Crebbp.3_Brca2.3
  crRNA array
  misc_feature (148)..(157): n is a, c, g, or t
cttggctttatatatcttgtggaaaggacgaaacaccgtaatttctactaagtgtagatggctccgccgcccgcccgcgtaatttctactaagtgtagattgaatataaactgggccacttaatttctactaagtgtagatttttttnnnnnnnnnnaagcttggcgtggatccgatatcaactagatcttgagacaaatggcagtattcatccacaattttaaaagaaaaggggggattggggggtacagtgcaggggaaagaatagtagacataatagcaacagacatacaaactaaag

SEQ ID NO: 13549 - DNA, 301 bp, Artificial Sequence
  Crebbp.3_Brca2.4
  crRNA array
  misc_feature (148)..(157): n is a, c, g, or t
cttggctttatatatcttgtggaaaggacgaaacaccgtaatttctactaagtgtagatggctccgccgcccgcccgcgtaatttctactaagtgtagatgaaacgccgtatatatagagtaatttctactaagtgtagatttttttnnnnnnnnnnaagcttggcgtggatccgatatcaactagatcttgagacaaatggcagtattcatccacaattttaaaagaaaaggggggattggggggtacagtgcaggggaaagaatagtagacataatagcaacagacatacaaactaaag

SEQ ID NO: 13550 - DNA, 301 bp, Artificial Sequence
  Crebbp.4_Brca2.1
  crRNA array
  misc_feature (148)..(157): n is a, c, g, or t
cttggctttatatatcttgtggaaaggacgaaacaccgtaatttctactaagtgtagattggactagatgactccgtagtaatttctactaagtgtagatctaagcgtagaaccagaaattaatttctactaagtgtagatttttttnnnnnnnnnnaagcttggcgtggatccgatatcaactagatcttgagacaaatggcagtattcatccacaattttaaaagaaaaggggggattggggggtacagtgcaggggaaagaatagtagacataatagcaacagacatacaaactaaag

SEQ ID NO: 13551 - DNA, 301 bp, Artificial Sequence
  Crebbp.4_Brca2.2
  crRNA array
  misc_feature (148)..(157): n is a, c, g, or t
cttggctttatatatcttgtggaaaggacgaaacaccgtaatttctactaagtgtagattggactagatgactccgtagtaatttctactaagtgtagatgatccaggtgtaacaagccataatttctactaagtgtagatttttttnnnnnnnnnnaagcttggcgtggatccgatatcaactagatcttgagacaaatggcagtattcatccacaattttaaaagaaaaggggggattggggggtacagtgcaggggaaagaatagtagacataatagcaacagacatacaaactaaag

SEQ ID NO: 13552 - DNA, 301 bp, Artificial Sequence
  Crebbp.4_Brca2.3
  crRNA array
  misc_feature (148)..(157): n is a, c, g, or t
cttggctttatatatcttgtggaaaggacgaaacaccgtaatttctactaagtgtagattggactagatgactccgtagtaatttctactaagtgtagattgaatataaactgggccacttaatttctactaagtgtagatttttttnnnnnnnnnnaagcttggcgtggatccgatatcaactagatcttgagacaaatggcagtattcatccacaattttaaaagaaaaggggggattggggggtacagtgcaggggaaagaatagtagacataatagcaacagacatacaaactaaag

SEQ ID NO: 13553 - DNA, 301 bp, Artificial Sequence
  Crebbp.4_Brca2.4
  crRNA array
  misc_feature (148)..(157): n is a, c, g, or t
cttggctttatatatcttgtggaaaggacgaaacaccgtaatttctactaagtgtagattggactagatgactccgtagtaatttctactaagtgtagatgaaacgccgtatatatagagtaatttctactaagtgtagatttttttnnnnnnnnnnaagcttggcgtggatccgatatcaactagatcttgagacaaatggcagtattcatccacaattttaaaagaaaaggggggattggggggtacagtgcaggggaaagaatagtagacataatagcaacagacatacaaactaaag

SEQ ID NO: 13554 - DNA, 301 bp, Artificial Sequence
  Crebbp.1_Apc.1
  crRNA array
  misc_feature (148)..(157): n is a, c, g, or t
cttggctttatatatcttgtggaaaggacgaaacaccgtaatttctactaagtgtagatctcacggcggcggcgggccgtaatttctactaagtgtagatgtgatccacacgtgtagctgtaatttctactaagtgtagatttttttnnnnnnnnnnaagcttggcgtggatccgatatcaactagatcttgagacaaatggcagtattcatccacaattttaaaagaaaaggggggattggggggtacagtgcaggggaaagaatagtagacataatagcaacagacatacaaactaaag

SEQ ID NO: 13555 - DNA, 301 bp, Artificial Sequence
  Crebbp.1_Apc.2
  crRNA array
  misc_feature (148)..(157): n is a, c, g, or t
cttggctttatatatcttgtggaaaggacgaaacaccgtaatttctactaagtgtagatctcacggcggcggcgggccgtaatttctactaagtgtagatcatctgctcgccaagacaaataatttctactaagtgtagatttttttnnnnnnnnnnaagcttggcgtggatccgatatcaactagatcttgagacaaatggcagtattcatccacaattttaaaagaaaaggggggattggggggtacagtgcaggggaaagaatagtagacataatagcaacagacatacaaactaaag

SEQ ID NO: 13556 - DNA, 301 bp, Artificial Sequence
  Crebbp.1_Apc.3
  crRNA array
  misc_feature (148)..(157): n is a, c, g, or t
cttggctttatatatcttgtggaaaggacgaaacaccgtaatttctactaagtgtagatctcacggcggcggcgggccgtaatttctactaagtgtagatacgccaatcgacatgatgattaatttctactaagtgtagatttttttnnnnnnnnnnaagcttggcgtggatccgatatcaactagatcttgagacaaatggcagtattcatccacaattttaaaagaaaaggggggattggggggtacagtgcaggggaaagaatagtagacataatagcaacagacatacaaactaaag

SEQ ID NO: 13557 - DNA, 301 bp, Artificial Sequence
  Crebbp.1_Apc.4
  crRNA array
  misc_feature (148)..(157): n is a, c, g, or t
cttggctttatatatcttgtggaaaggacgaaacaccgtaatttctactaagtgtagatctcacggcggcggcgggccgtaatttctactaagtgtagatcaccaggggatgatgtgccctaatttctactaagtgtagatttttttnnnnnnnnnnaagcttggcgtggatccgatatcaactagatcttgagacaaatggcagtattcatccacaattttaaaagaaaaggggggattggggggtacagtgcaggggaaagaatagtagacataatagcaacagacatacaaactaaag

SEQ ID NO: 13558 - DNA, 301 bp, Artificial Sequence
  Crebbp.2_Apc.1
  crRNA array
  misc_feature (148)..(157): n is a, c, g, or t
cttggctttatatatcttgtggaaaggacgaaacaccgtaatttctactaagtgtagatcgcgagcaggtgaagatggctaatttctactaagtgtagatgtgatccacacgtgtagctgtaatttctactaagtgtagatttttttnnnnnnnnnnaagcttggcgtggatccgatatcaactagatcttgagacaaatggcagtattcatccacaattttaaaagaaaaggggggattggggggtacagtgcaggggaaagaatagtagacataatagcaacagacatacaaactaaag

SEQ ID NO: 13559 - DNA, 301 bp, Artificial Sequence
  Crebbp.2_Apc.2
  crRNA array
  misc_feature (148)..(157): n is a, c, g, or t
cttggctttatatatcttgtggaaaggacgaaacaccgtaatttctactaagtgtagatcgcgagcaggtgaagatggctaatttctactaagtgtagatcatctgctcgccaagacaaataatttctactaagtgtagatttttttnnnnnnnnnnaagcttggcgtggatccgatatcaactagatcttgagacaaatggcagtattcatccacaattttaaaagaaaaggggggattggggggtacagtgcaggggaaagaatagtagacataatagcaacagacatacaaactaaag

SEQ ID NO: 13560 - DNA, 301 bp, Artificial Sequence
  Crebbp.2_Apc.3
  crRNA array
  misc_feature (148)..(157): n is a, c, g, or t
cttggctttatatatcttgtggaaaggacgaaacaccgtaatttctactaagtgtagatcgcgagcaggtgaagatggctaatttctactaagtgtagatacgccaatcgacatgatgattaatttctactaagtgtagatttttttnnnnnnnnnnaagcttggcgtggatccgatatcaactagatcttgagacaaatggcagtattcatccacaattttaaaagaaaaggggggattggggggtacagtgcaggggaaagaatagtagacataatagcaacagacatacaaactaaag

SEQ ID NO: 13561 - DNA, 301 bp, Artificial Sequence
  Crebbp.2_Apc.4
  crRNA array
  misc_feature (148)..(157): n is a, c, g, or t
cttggctttatatatcttgtggaaaggacgaaacaccgtaatttctactaagtgtagatcgcgagcaggtgaagatggctaatttctactaagtgtagatcaccaggggatgatgtgccctaatttctactaagtgtagatttttttnnnnnnnnnnaagcttggcgtggatccgatatcaactagatcttgagacaaatggcagtattcatccacaattttaaaagaaaaggggggattggggggtacagtgcaggggaaagaatagtagacataatagcaacagacatacaaactaaag

SEQ ID NO: 13562 - DNA, 301 bp, Artificial Sequence
  Crebbp.3_Apc.1
  crRNA array
  misc_feature (148)..(157): n is a, c, g, or t
cttggctttatatatcttgtggaaaggacgaaacaccgtaatttctactaagtgtagatggctccgccgcccgcccgcgtaatttctactaagtgtagatgtgatccacacgtgtagctgtaatttctactaagtgtagatttttttnnnnnnnnnnaagcttggcgtggatccgatatcaactagatcttgagacaaatggcagtattcatccacaattttaaaagaaaaggggggattggggggtacagtgcaggggaaagaatagtagacataatagcaacagacatacaaactaaag

SEQ ID NO: 13563 - DNA, 301 bp, Artificial Sequence
  Crebbp.3_Apc.2
  crRNA array
  misc_feature (148)..(157): n is a, c, g, or t
cttggctttatatatcttgtggaaaggacgaaacaccgtaatttctactaagtgtagatggctccgccgcccgcccgcgtaatttctactaagtgtagatcatctgctcgccaagacaaataatttctactaagtgtagatttttttnnnnnnnnnnaagcttggcgtggatccgatatcaactagatcttgagacaaatggcagtattcatccacaattttaaaagaaaaggggggattggggggtacagtgcaggggaaagaatagtagacataatagcaacagacatacaaactaaag

SEQ ID NO: 13564 - DNA, 301 bp, Artificial Sequence
  Crebbp.3_Apc.3
  crRNA array
  misc_feature (148)..(157): n is a, c, g, or t
cttggctttatatatcttgtggaaaggacgaaacaccgtaatttctactaagtgtagatggctccgccgcccgcccgcgtaatttctactaagtgtagatacgccaatcgacatgatgattaatttctactaagtgtagatttttttnnnnnnnnnnaagcttggcgtggatccgatatcaactagatcttgagacaaatggcagtattcatccacaattttaaaagaaaaggggggattggggggtacagtgcaggggaaagaatagtagacataatagcaacagacatacaaactaaag

SEQ ID NO: 13565 - DNA, 301 bp, Artificial Sequence
  Crebbp.3_Apc.4
  crRNA array
  misc_feature (148)..(157): n is a, c, g, or t
cttggctttatatatcttgtggaaaggacgaaacaccgtaatttctactaagtgtagatggctccgccgcccgcccgcgtaatttctactaagtgtagatcaccaggggatgatgtgccctaatttctactaagtgtagatttttttnnnnnnnnnnaagcttggcgtggatccgatatcaactagatcttgagacaaatggcagtattcatccacaattttaaaagaaaaggggggattggggggtacagtgcaggggaaagaatagtagacataatagcaacagacatacaaactaaag

SEQ ID NO: 13566 - DNA, 301 bp, Artificial Sequence
  Crebbp.4_Apc.1
  crRNA array
  misc_feature (148)..(157): n is a, c, g, or t
cttggctttatatatcttgtggaaaggacgaaacaccgtaatttctactaagtgtagattggactagatgactccgtagtaatttctactaagtgtagatgtgatccacacgtgtagctgtaatttctactaagtgtagatttttttnnnnnnnnnnaagcttggcgtggatccgatatcaactagatcttgagacaaatggcagtattcatccacaattttaaaagaaaaggggggattggggggtacagtgcaggggaaagaatagtagacataatagcaacagacatacaaactaaag

SEQ ID NO: 13567 - DNA, 301 bp, Artificial Sequence
  Crebbp.4_Apc.2
  crRNA array
  misc_feature (148)..(157): n is a, c, g, or t
cttggctttatatatcttgtggaaaggacgaaacaccgtaatttctactaagtgtagattggactagatgactccgtagtaatttctactaagtgtagatcatctgctcgccaagacaaataatttctactaagtgtagatttttttnnnnnnnnnnaagcttggcgtggatccgatatcaactagatcttgagacaaatggcagtattcatccacaattttaaaagaaaaggggggattggggggtacagtgcaggggaaagaatagtagacataatagcaacagacatacaaactaaag

SEQ ID NO: 13568 - DNA, 301 bp, Artificial Sequence
  Crebbp.4_Apc.3
  crRNA array
  misc_feature (148)..(157): n is a, c, g, or t
cttggctttatatatcttgtggaaaggacgaaacaccgtaatttctactaagtgtagattggactagatgactccgtagtaatttctactaagtgtagatacgccaatcgacatgatgattaatttctactaagtgtagatttttttnnnnnnnnnnaagcttggcgtggatccgatatcaactagatcttgagacaaatggcagtattcatccacaattttaaaagaaaaggggggattggggggtacagtgcaggggaaagaatagtagacataatagcaacagacatacaaactaaag

SEQ ID NO: 13569 - DNA, 301 bp, Artificial Sequence
  Crebbp.4_Apc.4
  crRNA array
  misc_feature (148)..(157): n is a, c, g, or t
cttggctttatatatcttgtggaaaggacgaaacaccgtaatttctactaagtgtagattggactagatgactccgtagtaatttctactaagtgtagatcaccaggggatgatgtgccctaatttctactaagtgtagatttttttnnnnnnnnnnaagcttggcgtggatccgatatcaactagatcttgagacaaatggcagtattcatccacaattttaaaagaaaaggggggattggggggtacagtgcaggggaaagaatagtagacataatagcaacagacatacaaactaaag

SEQ ID NO: 13570 - DNA, 301 bp, Artificial Sequence
  Crebbp.1_Fanca.1
  crRNA array
  misc_feature (148)..(157): n is a, c, g, or t
cttggctttatatatcttgtggaaaggacgaaacaccgtaatttctactaagtgtagatctcacggcggcggcgggccgtaatttctactaagtgtagatggaggccccggggcccaccataatttctactaagtgtagatttttttnnnnnnnnnnaagcttggcgtggatccgatatcaactagatcttgagacaaatggcagtattcatccacaattttaaaagaaaaggggggattggggggtacagtgcaggggaaagaatagtagacataatagcaacagacatacaaactaaag

SEQ ID NO: 13571 - DNA, 301 bp, Artificial Sequence
  Crebbp.1_Fanca.2
  crRNA array
  misc_feature (148)..(157): n is a, c, g, or t
cttggctttatatatcttgtggaaaggacgaaacaccgtaatttctactaagtgtagatctcacggcggcggcgggccgtaatttctactaagtgtagatagagctaccacctagacagctaatttctactaagtgtagatttttttnnnnnnnnnnaagcttggcgtggatccgatatcaactagatcttgagacaaatggcagtattcatccacaattttaaaagaaaaggggggattggggggtacagtgcaggggaaagaatagtagacataatagcaacagacatacaaactaaag

SEQ ID NO: 13572 - DNA, 301 bp, Artificial Sequence
  Crebbp.1_Fanca.3
  crRNA array
  misc_feature (148)..(157): n is a, c, g, or t
cttggctttatatatcttgtggaaaggacgaaacaccgtaatttctactaagtgtagatctcacggcggcggcgggccgtaatttctactaagtgtagataccaactgctgtgcctcgggtaatttctactaagtgtagatttttttnnnnnnnnnnaagcttggcgtggatccgatatcaactagatcttgagacaaatggcagtattcatccacaattttaaaagaaaaggggggattggggggtacagtgcaggggaaagaatagtagacataatagcaacagacatacaaactaaag

SEQ ID NO: 13573 - DNA, 301 bp, Artificial Sequence
  Crebbp.1_Fanca.4
  crRNA array
  misc_feature (148)..(157): n is a, c, g, or t
cttggctttatatatcttgtggaaaggacgaaacaccgtaatttctactaagtgtagatctcacggcggcggcgggccgtaatttctactaagtgtagatcacccacccctggtgccaagtaatttctactaagtgtagatttttttnnnnnnnnnnaagcttggcgtggatccgatatcaactagatcttgagacaaatggcagtattcatccacaattttaaaagaaaaggggggattggggggtacagtgcaggggaaagaatagtagacataatagcaacagacatacaaactaaag

SEQ ID NO: 13574 - DNA, 301 bp, Artificial Sequence
  Crebbp.2_Fanca.1
  crRNA array
  misc_feature (148)..(157): n is a, c, g, or t
cttggctttatatatcttgtggaaaggacgaaacaccgtaatttctactaagtgtagatcgcgagcaggtgaagatggctaatttctactaagtgtagatggaggccccggggcccaccataatttctactaagtgtagatttttttnnnnnnnnnnaagcttggcgtggatccgatatcaactagatcttgagacaaatggcagtattcatccacaattttaaaagaaaaggggggattggggggtacagtgcaggggaaagaatagtagacataatagcaacagacatacaaactaaag

SEQ ID NO: 13575 - DNA, 301 bp, Artificial Sequence
  Crebbp.2_Fanca.2
  crRNA array
  misc_feature (148)..(157): n is a, c, g, or t
cttggctttatatatcttgtggaaaggacgaaacaccgtaatttctactaagtgtagatcgcgagcaggtgaagatggctaatttctactaagtgtagatagagctaccacctagacagctaatttctactaagtgtagatttttttnnnnnnnnnnaagcttggcgtggatccgatatcaactagatcttgagacaaatggcagtattcatccacaattttaaaagaaaaggggggattggggggtacagtgcaggggaaagaatagtagacataatagcaacagacatacaaactaaag

SEQ ID NO: 13576 - DNA, 301 bp, Artificial Sequence
  Crebbp.2_Fanca.3
  crRNA array
  misc_feature (148)..(157): n is a, c, g, or t
cttggctttatatatcttgtggaaaggacgaaacaccgtaatttctactaagtgtagatcgcgagcaggtgaagatggctaatttctactaagtgtagataccaactgctgtgcctcgggtaatttctactaagtgtagatttttttnnnnnnnnnnaagcttggcgtggatccgatatcaactagatcttgagacaaatggcagtattcatccacaattttaaaagaaaaggggggattggggggtacagtgcaggggaaagaatagtagacataatagcaacagacatacaaactaaag

SEQ ID NO: 13577 - DNA, 301 bp, Artificial Sequence
  Crebbp.2_Fanca.4
  crRNA array
  misc_feature (148)..(157): n is a, c, g, or t
cttggctttatatatcttgtggaaaggacgaaacaccgtaatttctactaagtgtagatcgcgagcaggtgaagatggctaatttctactaagtgtagatcacccacccctggtgccaagtaatttctactaagtgtagatttttttnnnnnnnnnnaagcttggcgtggatccgatatcaactagatcttgagacaaatggcagtattcatccacaattttaaaagaaaaggggggattggggggtacagtgcaggggaaagaatagtagacataatagcaacagacatacaaactaaag

SEQ ID NO: 13578 - DNA, 301 bp, Artificial Sequence
  Crebbp.3_Fanca.1
  crRNA array
  misc_feature (148)..(157): n is a, c, g, or t
cttggctttatatatcttgtggaaaggacgaaacaccgtaatttctactaagtgtagatggctccgccgcccgcccgcgtaatttctactaagtgtagatggaggccccggggcccaccataatttctactaagtgtagatttttttnnnnnnnnnnaagcttggcgtggatccgatatcaactagatcttgagacaaatggcagtattcatccacaattttaaaagaaaaggggggattggggggtacagtgcaggggaaagaatagtagacataatagcaacagacatacaaactaaag

SEQ ID NO: 13579 - DNA, 301 bp, Artificial Sequence
  Crebbp.3_Fanca.2
  crRNA array
  misc_feature (148)..(157): n is a, c, g, or t
cttggctttatatatcttgtggaaaggacgaaacaccgtaatttctactaagtgtagatggctccgccgcccgcccgcgtaatttctactaagtgtagatagagctaccacctagacagctaatttctactaagtgtagatttttttnnnnnnnnnnaagcttggcgtggatccgatatcaactagatcttgagacaaatggcagtattcatccacaattttaaaagaaaaggggggattggggggtacagtgcaggggaaagaatagtagacataatagcaacagacatacaaactaaag

SEQ ID NO: 13580 - DNA, 301 bp, Artificial Sequence
  Crebbp.3_Fanca.3
  crRNA array
  misc_feature (148)..(157): n is a, c, g, or t
cttggctttatatatcttgtggaaaggacgaaacaccgtaatttctactaagtgtagatggctccgccgcccgcccgcgtaatttctactaagtgtagataccaactgctgtgcctcgggtaatttctactaagtgtagatttttttnnnnnnnnnnaagcttggcgtggatccgatatcaactagatcttgagacaaatggcagtattcatccacaattttaaaagaaaaggggggattggggggtacagtgcaggggaaagaatagtagacataatagcaacagacatacaaactaaag

SEQ ID NO: 13581 - DNA, 301 bp, Artificial Sequence
  Crebbp.3_Fanca.4
  crRNA array
  misc_feature (148)..(157): n is a, c, g, or t
cttggctttatatatcttgtggaaaggacgaaacaccgtaatttctactaagtgtagatggctccgccgcccgcccgcgtaatttctactaagtgtagatcacccacccctggtgccaagtaatttctactaagtgtagatttttttnnnnnnnnnnaagcttggcgtggatccgatatcaactagatcttgagacaaatggcagtattcatccacaattttaaaagaaaaggggggattggggggtacagtgcaggggaaagaatagtagacataatagcaacagacatacaaactaaag

SEQ ID NO: 13582 - DNA, 301 bp, Artificial Sequence
  Crebbp.4_Fanca.1
  crRNA array
  misc_feature (148)..(157): n is a, c, g, or t
cttggctttatatatcttgtggaaaggacgaaacaccgtaatttctactaagtgtagattggactagatgactccgtagtaatttctactaagtgtagatggaggccccggggcccaccataatttctactaagtgtagatttttttnnnnnnnnnnaagcttggcgtggatccgatatcaactagatcttgagacaaatggcagtattcatccacaattttaaaagaaaaggggggattggggggtacagtgcaggggaaagaatagtagacataatagcaacagacatacaaactaaag

SEQ ID NO: 13583 - DNA, 301 bp, Artificial Sequence
  Crebbp.4_Fanca.2
  crRNA array
  misc_feature (148)..(157): n is a, c, g, or t
cttggctttatatatcttgtggaaaggacgaaacaccgtaatttctactaagtgtagattggactagatgactccgtagtaatttctactaagtgtagatagagctaccacctagacagctaatttctactaagtgtagatttttttnnnnnnnnnnaagcttggcgtggatccgatatcaactagatcttgagacaaatggcagtattcatccacaattttaaaagaaaaggggggattggggggtacagtgcaggggaaagaatagtagacataatagcaacagacatacaaactaaag

SEQ ID NO: 13584 - DNA, 301 bp, Artificial Sequence
  Crebbp.4_Fanca.3
  crRNA array
  misc_feature (148)..(157): n is a, c, g, or t
cttggctttatatatcttgtggaaaggacgaaacaccgtaatttctactaagtgtagattggactagatgactccgtagtaatttctactaagtgtagataccaactgctgtgcctcgggtaatttctactaagtgtagatttttttnnnnnnnnnnaagcttggcgtggatccgatatcaactagatcttgagacaaatggcagtattcatccacaattttaaaagaaaaggggggattggggggtacagtgcaggggaaagaatagtagacataatagcaacagacatacaaactaaag

SEQ ID NO: 13585 - DNA, 301 bp, Artificial Sequence
  Crebbp.4_Fanca.4
  crRNA array
  misc_feature (148)..(157): n is a, c, g, or t
cttggctttatatatcttgtggaaaggacgaaacaccgtaatttctactaagtgtagattggactagatgactccgtagtaatttctactaagtgtagatcacccacccctggtgccaagtaatttctactaagtgtagatttttttnnnnnnnnnnaagcttggcgtggatccgatatcaactagatcttgagacaaatggcagtattcatccacaattttaaaagaaaaggggggattggggggtacagtgcaggggaaagaatagtagacataatagcaacagacatacaaactaaag

SEQ ID NO: 13586 - DNA, 301 bp, Artificial Sequence
  Crebbp.1_Nf1.1
  crRNA array
  misc_feature (148)..(157): n is a, c, g, or t
cttggctttatatatcttgtggaaaggacgaaacaccgtaatttctactaagtgtagatctcacggcggcggcgggccgtaatttctactaagtgtagattggcgatccggaatcctctgtaatttctactaagtgtagatttttttnnnnnnnnnnaagcttggcgtggatccgatatcaactagatcttgagacaaatggcagtattcatccacaattttaaaagaaaaggggggattggggggtacagtgcaggggaaagaatagtagacataatagcaacagacatacaaactaaag

SEQ ID NO: 13587 - DNA, 301 bp, Artificial Sequence
  Crebbp.1_Nf1.2
  crRNA array
  misc_feature (148)..(157): n is a, c, g, or t
cttggctttatatatcttgtggaaaggacgaaacaccgtaatttctactaagtgtagatctcacggcggcggcgggccgtaatttctactaagtgtagatggaaacacaacgctggcctctaatttctactaagtgtagatttttttnnnnnnnnnnaagcttggcgtggatccgatatcaactagatcttgagacaaatggcagtattcatccacaattttaaaagaaaaggggggattggggggtacagtgcaggggaaagaatagtagacataatagcaacagacatacaaactaaag

SEQ ID NO: 13588 - DNA, 301 bp, Artificial Sequence
  Crebbp.1_Nf1.3
  crRNA array
  misc_feature (148)..(157): n is a, c, g, or t
cttggctttatatatcttgtggaaaggacgaaacaccgtaatttctactaagtgtagatctcacggcggcggcgggccgtaatttctactaagtgtagataatgatggaacgcagtcgcataatttctactaagtgtagatttttttnnnnnnnnnnaagcttggcgtggatccgatatcaactagatcttgagacaaatggcagtattcatccacaattttaaaagaaaaggggggattggggggtacagtgcaggggaaagaatagtagacataatagcaacagacatacaaactaaag

SEQ ID NO: 13589 - DNA, 301 bp, Artificial Sequence
  Crebbp.1_Nf1.4
  crRNA array
  misc_feature (148)..(157): n is a, c, g, or t
cttggctttatatatcttgtggaaaggacgaaacaccgtaatttctactaagtgtagatctcacggcggcggcgggccgtaatttctactaagtgtagattgcaaaaccatccaccaagttaatttctactaagtgtagatttttttnnnnnnnnnnaagcttggcgtggatccgatatcaactagatcttgagacaaatggcagtattcatccacaattttaaaagaaaaggggggattggggggtacagtgcaggggaaagaatagtagacataatagcaacagacatacaaactaaag

SEQ ID NO: 13590 - DNA, 301 bp, Artificial Sequence
  Crebbp.2_Nf1.1
  crRNA array
  misc_feature (148)..(157): n is a, c, g, or t
cttggctttatatatcttgtggaaaggacgaaacaccgtaatttctactaagtgtagatcgcgagcaggtgaagatggctaatttctactaagtgtagattggcgatccggaatcctctgtaatttctactaagtgtagatttttttnnnnnnnnnnaagcttggcgtggatccgatatcaactagatcttgagacaaatggcagtattcatccacaattttaaaagaaaaggggggattggggggtacagtgcaggggaaagaatagtagacataatagcaacagacatacaaactaaag

SEQ ID NO: 13591 - DNA, 301 bp, Artificial Sequence
  Crebbp.2_Nf1.2
  crRNA array
  misc_feature (148)..(157): n is a, c, g, or t
cttggctttatatatcttgtggaaaggacgaaacaccgtaatttctactaagtgtagatcgcgagcaggtgaagatggctaatttctactaagtgtagatggaaacacaacgctggcctctaatttctactaagtgtagatttttttnnnnnnnnnnaagcttggcgtggatccgatatcaactagatcttgagacaaatggcagtattcatccacaattttaaaagaaaaggggggattggggggtacagtgcaggggaaagaatagtagacataatagcaacagacatacaaactaaag

SEQ ID NO: 13592 - DNA, 301 bp, Artificial Sequence
  Crebbp.2_Nf1.3
  crRNA array
  misc_feature (148)..(157): n is a, c, g, or t
cttggctttatatatcttgtggaaaggacgaaacaccgtaatttctactaagtgtagatcgcgagcaggtgaagatggctaatttctactaagtgtagataatgatggaacgcagtcgcataatttctactaagtgtagatttttttnnnnnnnnnnaagcttggcgtggatccgatatcaactagatcttgagacaaatggcagtattcatccacaattttaaaagaaaaggggggattggggggtacagtgcaggggaaagaatagtagacataatagcaacagacatacaaactaaag

SEQ ID NO: 13593 - DNA, 301 bp, Artificial Sequence
  Crebbp.2_Nf1.4
  crRNA array
  misc_feature (148)..(157): n is a, c, g, or t
cttggctttatatatcttgtggaaaggacgaaacaccgtaatttctactaagtgtagatcgcgagcaggtgaagatggctaatttctactaagtgtagattgcaaaaccatccaccaagttaatttctactaagtgtagatttttttnnnnnnnnnnaagcttggcgtggatccgatatcaactagatcttgagacaaatggcagtattcatccacaattttaaaagaaaaggggggattggggggtacagtgcaggggaaagaatagtagacataatagcaacagacatacaaactaaag

SEQ ID NO: 13594 - DNA, 301 bp, Artificial Sequence
  Crebbp.3_Nf1.1
  crRNA array
  misc_feature (148)..(157): n is a, c, g, or t
cttggctttatatatcttgtggaaaggacgaaacaccgtaatttctactaagtgtagatggctccgccgcccgcccgcgtaatttctactaagtgtagattggcgatccggaatcctctgtaatttctactaagtgtagatttttttnnnnnnnnnnaagcttggcgtggatccgatatcaactagatcttgagacaaatggcagtattcatccacaattttaaaagaaaaggggggattggggggtacagtgcaggggaaagaatagtagacataatagcaacagacatacaaactaaag

SEQ ID NO: 13595 - DNA, 301 bp, Artificial Sequence
  Crebbp.3_Nf1.2
  crRNA array
  misc_feature (148)..(157): n is a, c, g, or t
cttggctttatatatcttgtggaaaggacgaaacaccgtaatttctactaagtgtagatggctccgccgcccgcccgcgtaatttctactaagtgtagatggaaacacaacgctggcctctaatttctactaagtgtagatttttttnnnnnnnnnnaagcttggcgtggatccgatatcaactagatcttgagacaaatggcagtattcatccacaattttaaaagaaaaggggggattggggggtacagtgcaggggaaagaatagtagacataatagcaacagacatacaaactaaag

SEQ ID NO: 13596 - DNA, 301 bp, Artificial Sequence
  Crebbp.3_Nf1.3
  crRNA array
  misc_feature (148)..(157): n is a, c, g, or t
cttggctttatatatcttgtggaaaggacgaaacaccgtaatttctactaagtgtagatggctccgccgcccgcccgcgtaatttctactaagtgtagataatgatggaacgcagtcgcataatttctactaagtgtagatttttttnnnnnnnnnnaagcttggcgtggatccgatatcaactagatcttgagacaaatggcagtattcatccacaattttaaaagaaaaggggggattggggggtacagtgcaggggaaagaatagtagacataatagcaacagacatacaaactaaag

SEQ ID NO: 13597 - DNA, 301 bp, Artificial Sequence
  Crebbp.3_Nf1.4
  crRNA array
  misc_feature (148)..(157): n is a, c, g, or t
cttggctttatatatcttgtggaaaggacgaaacaccgtaatttctactaagtgtagatggctccgccgcccgcccgcgtaatttctactaagtgtagattgcaaaaccatccaccaagttaatttctactaagtgtagatttttttnnnnnnnnnnaagcttggcgtggatccgatatcaactagatcttgagacaaatggcagtattcatccacaattttaaaagaaaaggggggattggggggtacagtgcaggggaaagaatagtagacataatagcaacagacatacaaactaaag

SEQ ID NO: 13598 - DNA, 301 bp, Artificial Sequence
  Crebbp.4_Nf1.1
  crRNA array
  misc_feature (148)..(157): n is a, c, g, or t
cttggctttatatatcttgtggaaaggacgaaacaccgtaatttctactaagtgtagattggactagatgactccgtagtaatttctactaagtgtagattggcgatccggaatcctctgtaatttctactaagtgtagatttttttnnnnnnnnnnaagcttggcgtggatccgatatcaactagatcttgagacaaatggcagtattcatccacaattttaaaagaaaaggggggattggggggtacagtgcaggggaaagaatagtagacataatagcaacagacatacaaactaaag

SEQ ID NO: 13599 - DNA, 301 bp, Artificial Sequence
  Crebbp.4_Nf1.2
  crRNA array
  misc_feature (148)..(157): n is a, c, g, or t
cttggctttatatatcttgtggaaaggacgaaacaccgtaatttctactaagtgtagattggactagatgactccgtagtaatttctactaagtgtagatggaaacacaacgctggcctctaatttctactaagtgtagatttttttnnnnnnnnnnaagcttggcgtggatccgatatcaactagatcttgagacaaatggcagtattcatccacaattttaaaagaaaaggggggattggggggtacagtgcaggggaaagaatagtagacataatagcaacagacatacaaactaaag

SEQ ID NO: 13600 - DNA, 301 bp, Artificial Sequence
  Crebbp.4_Nf1.3
  crRNA array
  misc_feature (148)..(157): n is a, c, g, or t
cttggctttatatatcttgtggaaaggacgaaacaccgtaatttctactaagtgtagattggactagatgactccgtagtaatttctactaagtgtagataatgatggaacgcagtcgcataatttctactaagtgtagatttttttnnnnnnnnnnaagcttggcgtggatccgatatcaactagatcttgagacaaatggcagtattcatccacaattttaaaagaaaaggggggattggggggtacagtgcaggggaaagaatagtagacataatagcaacagacatacaaactaaag

SEQ ID NO: 13601 - DNA, 301 bp, Artificial Sequence
  Crebbp.4_Nf1.4
  crRNA array
  misc_feature (148)..(157): n is a, c, g, or t
cttggctttatatatcttgtggaaaggacgaaacaccgtaatttctactaagtgtagattggactagatgactccgtagtaatttctactaagtgtagattgcaaaaccatccaccaagttaatttctactaagtgtagatttttttnnnnnnnnnnaagcttggcgtggatccgatatcaactagatcttgagacaaatggcagtattcatccacaattttaaaagaaaaggggggattggggggtacagtgcaggggaaagaatagtagacataatagcaacagacatacaaactaaag

SEQ ID NO: 13602 - DNA, 301 bp, Artificial Sequence
  Crebbp.1_Kdm6a.1
  crRNA array
  misc_feature (148)..(157): n is a, c, g, or t
cttggctttatatatcttgtggaaaggacgaaacaccgtaatttctactaagtgtagatctcacggcggcggcgggccgtaatttctactaagtgtagatgctgccgcctctcgcggcagtaatttctactaagtgtagatttttttnnnnnnnnnnaagcttggcgtggatccgatatcaactagatcttgagacaaatggcagtattcatccacaattttaaaagaaaaggggggattggggggtacagtgcaggggaaagaatagtagacataatagcaacagacatacaaactaaag

SEQ ID NO: 13603 - DNA, 301 bp, Artificial Sequence
  Crebbp.1_Kdm6a.2
  crRNA array
  misc_feature (148)..(157): n is a, c, g, or t
cttggctttatatatcttgtggaaaggacgaaacaccgtaatttctactaagtgtagatctcacggcggcggcgggccgtaatttctactaagtgtagatgctgcaggtaaggcacgttttaatttctactaagtgtagatttttttnnnnnnnnnnaagcttggcgtggatccgatatcaactagatcttgagacaaatggcagtattcatccacaattttaaaagaaaaggggggattggggggtacagtgcaggggaaagaatagtagacataatagcaacagacatacaaactaaag

SEQ ID NO: 13604 - DNA, 301 bp, Artificial Sequence
  Crebbp.1_Kdm6a.3
  crRNA array
  misc_feature (148)..(157): n is a, c, g, or t
cttggctttatatatcttgtggaaaggacgaaacaccgtaatttctactaagtgtagatctcacggcggcggcgggccgtaatttctactaagtgtagattgctggtgccggggaagttttaatttctactaagtgtagatttttttnnnnnnnnnnaagcttggcgtggatccgatatcaactagatcttgagacaaatggcagtattcatccacaattttaaaagaaaaggggggattggggggtacagtgcaggggaaagaatagtagacataatagcaacagacatacaaactaaag

SEQ ID NO: 13605 - DNA, 301 bp, Artificial Sequence
  Crebbp.1_Kdm6a.4
  crRNA array
  misc_feature (148)..(157): n is a, c, g, or t
cttggctttatatatcttgtggaaaggacgaaacaccgtaatttctactaagtgtagatctcacggcggcggcgggccgtaatttctactaagtgtagattgtctcctacgaatcccccctaatttctactaagtgtagatttttttnnnnnnnnnnaagcttggcgtggatccgatatcaactagatcttgagacaaatggcagtattcatccacaattttaaaagaaaaggggggattggggggtacagtgcaggggaaagaatagtagacataatagcaacagacatacaaactaaag

SEQ ID NO: 13606 - DNA, 301 bp, Artificial Sequence
  Crebbp.2_Kdm6a.1
  crRNA array
  misc_feature (148)..(157): n is a, c, g, or t
cttggctttatatatcttgtggaaaggacgaaacaccgtaatttctactaagtgtagatcgcgagcaggtgaagatggctaatttctactaagtgtagatgctgccgcctctcgcggcagtaatttctactaagtgtagatttttttnnnnnnnnnnaagcttggcgtggatccgatatcaactagatcttgagacaaatggcagtattcatccacaattttaaaagaaaaggggggattggggggtacagtgcaggggaaagaatagtagacataatagcaacagacatacaaactaaag

SEQ ID NO: 13607 - DNA, 301 bp, Artificial Sequence
  Crebbp.2_Kdm6a.2
  crRNA array
  misc_feature (148)..(157): n is a, c, g, or t
cttggctttatatatcttgtggaaaggacgaaacaccgtaatttctactaagtgtagatcgcgagcaggtgaagatggctaatttctactaagtgtagatgctgcaggtaaggcacgttttaatttctactaagtgtagatttttttnnnnnnnnnnaagcttggcgtggatccgatatcaactagatcttgagacaaatggcagtattcatccacaattttaaaagaaaaggggggattggggggtacagtgcaggggaaagaatagtagacataatagcaacagacatacaaactaaag

SEQ ID NO: 13608 - DNA, 301 bp, Artificial Sequence
  Crebbp.2_Kdm6a.3
  crRNA array
  misc_feature (148)..(157): n is a, c, g, or t
cttggctttatatatcttgtggaaaggacgaaacaccgtaatttctactaagtgtagatcgcgagcaggtgaagatggctaatttctactaagtgtagattgctggtgccggggaagttttaatttctactaagtgtagatttttttnnnnnnnnnnaagcttggcgtggatccgatatcaactagatcttgagacaaatggcagtattcatccacaattttaaaagaaaaggggggattggggggtacagtgcaggggaaagaatagtagacataatagcaacagacatacaaactaaag

SEQ ID NO: 13609 - DNA, 301 bp, Artificial Sequence
  Crebbp.2_Kdm6a.4
  crRNA array
  misc_feature (148)..(157): n is a, c, g, or t
cttggctttatatatcttgtggaaaggacgaaacaccgtaatttctactaagtgtagatcgcgagcaggtgaagatggctaatttctactaagtgtagattgtctcctacgaatcccccctaatttctactaagtgtagatttttttnnnnnnnnnnaagcttggcgtggatccgatatcaactagatcttgagacaaatggcagtattcatccacaattttaaaagaaaaggggggattggggggtacagtgcaggggaaagaatagtagacataatagcaacagacatacaaactaaag

SEQ ID NO: 13610 - DNA, 301 bp, Artificial Sequence
  Crebbp.3_Kdm6a.1
  crRNA array
  misc_feature (148)..(157): n is a, c, g, or t
cttggctttatatatcttgtggaaaggacgaaacaccgtaatttctactaagtgtagatggctccgccgcccgcccgcgtaatttctactaagtgtagatgctgccgcctctcgcggcagtaatttctactaagtgtagatttttttnnnnnnnnnnaagcttggcgtggatccgatatcaactagatcttgagacaaatggcagtattcatccacaattttaaaagaaaaggggggattggggggtacagtgcaggggaaagaatagtagacataatagcaacagacatacaaactaaag

SEQ ID NO: 13611 - DNA, 301 bp, Artificial Sequence
  Crebbp.3_Kdm6a.2
  crRNA array
  misc_feature (148)..(157): n is a, c, g, or t
cttggctttatatatcttgtggaaaggacgaaacaccgtaatttctactaagtgtagatggctccgccgcccgcccgcgtaatttctactaagtgtagatgctgcaggtaaggcacgttttaatttctactaagtgtagatttttttnnnnnnnnnnaagcttggcgtggatccgatatcaactagatcttgagacaaatggcagtattcatccacaattttaaaagaaaaggggggattggggggtacagtgcaggggaaagaatagtagacataatagcaacagacatacaaactaaag

SEQ ID NO: 13612 - DNA, 301 bp, Artificial Sequence
  Crebbp.3_Kdm6a.3
  crRNA array
  misc_feature (148)..(157): n is a, c, g, or t
cttggctttatatatcttgtggaaaggacgaaacaccgtaatttctactaagtgtagatggctccgccgcccgcccgcgtaatttctactaagtgtagattgctggtgccggggaagttttaatttctactaagtgtagatttttttnnnnnnnnnnaagcttggcgtggatccgatatcaactagatcttgagacaaatggcagtattcatccacaattttaaaagaaaaggggggattggggggtacagtgcaggggaaagaatagtagacataatagcaacagacatacaaactaaag

SEQ ID NO: 13613 - DNA, 301 bp, Artificial Sequence
  Crebbp.3_Kdm6a.4
  crRNA array
  misc_feature (148)..(157): n is a, c, g, or t
cttggctttatatatcttgtggaaaggacgaaacaccgtaatttctactaagtgtagatggctccgccgcccgcccgcgtaatttctactaagtgtagattgtctcctacgaatcccccctaatttctactaagtgtagatttttttnnnnnnnnnnaagcttggcgtggatccgatatcaactagatcttgagacaaatggcagtattcatccacaattttaaaagaaaaggggggattggggggtacagtgcaggggaaagaatagtagacataatagcaacagacatacaaactaaag

SEQ ID NO: 13614 - DNA, 301 bp, Artificial Sequence
  Crebbp.4_Kdm6a.1
  crRNA array
  misc_feature (148)..(157): n is a, c, g, or t
cttggctttatatatcttgtggaaaggacgaaacaccgtaatttctactaagtgtagattggactagatgactccgtagtaatttctactaagtgtagatgctgccgcctctcgcggcagtaatttctactaagtgtagatttttttnnnnnnnnnnaagcttggcgtggatccgatatcaactagatcttgagacaaatggcagtattcatccacaattttaaaagaaaaggggggattggggggtacagtgcaggggaaagaatagtagacataatagcaacagacatacaaactaaag

SEQ ID NO: 13615 - DNA, 301 bp, Artificial Sequence
  Crebbp.4_Kdm6a.2
  crRNA array
  misc_feature (148)..(157): n is a, c, g, or t
cttggctttatatatcttgtggaaaggacgaaacaccgtaatttctactaagtgtagattggactagatgactccgtagtaatttctactaagtgtagatgctgcaggtaaggcacgttttaatttctactaagtgtagatttttttnnnnnnnnnnaagcttggcgtggatccgatatcaactagatcttgagacaaatggcagtattcatccacaattttaaaagaaaaggggggattggggggtacagtgcaggggaaagaatagtagacataatagcaacagacatacaaactaaag

SEQ ID NO: 13616 - DNA, 301 bp, Artificial Sequence
  Crebbp.4_Kdm6a.3
  crRNA array
  misc_feature (148)..(157): n is a, c, g, or t
cttggctttatatatcttgtggaaaggacgaaacaccgtaatttctactaagtgtagattggactagatgactccgtagtaatttctactaagtgtagattgctggtgccggggaagttttaatttctactaagtgtagatttttttnnnnnnnnnnaagcttggcgtggatccgatatcaactagatcttgagacaaatggcagtattcatccacaattttaaaagaaaaggggggattggggggtacagtgcaggggaaagaatagtagacataatagcaacagacatacaaactaaag

SEQ ID NO: 13617 - DNA, 301 bp, Artificial Sequence
  Crebbp.4_Kdm6a.4
  crRNA array
  misc_feature (148)..(157): n is a, c, g, or t
cttggctttatatatcttgtggaaaggacgaaacaccgtaatttctactaagtgtagattggactagatgactccgtagtaatttctactaagtgtagattgtctcctacgaatcccccctaatttctactaagtgtagatttttttnnnnnnnnnnaagcttggcgtggatccgatatcaactagatcttgagacaaatggcagtattcatccacaattttaaaagaaaaggggggattggggggtacagtgcaggggaaagaatagtagacataatagcaacagacatacaaactaaag

SEQ ID NO: 13618 - DNA, 301 bp, Artificial Sequence
  Crebbp.1_Ercc5.1
  crRNA array
  misc_feature (148)..(157): n is a, c, g, or t
cttggctttatatatcttgtggaaaggacgaaacaccgtaatttctactaagtgtagatctcacggcggcggcgggccgtaatttctactaagtgtagatacggcacgagcaagagacactaatttctactaagtgtagatttttttnnnnnnnnnnaagcttggcgtggatccgatatcaactagatcttgagacaaatggcagtattcatccacaattttaaaagaaaaggggggattggggggtacagtgcaggggaaagaatagtagacataatagcaacagacatacaaactaaag

SEQ ID NO: 13619 - DNA, 301 bp, Artificial Sequence
  Crebbp.1_Ercc5.2
  crRNA array
  misc_feature (148)..(157): n is a, c, g, or t
cttggctttatatatcttgtggaaaggacgaaacaccgtaatttctactaagtgtagatctcacggcggcggcgggccgtaatttctactaagtgtagatgagtatcacatcggtgactctaatttctactaagtgtagatttttttnnnnnnnnnnaagcttggcgtggatccgatatcaactagatcttgagacaaatggcagtattcatccacaattttaaaagaaaaggggggattggggggtacagtgcaggggaaagaatagtagacataatagcaacagacatacaaactaaag

SEQ ID NO: 13620 - DNA, 301 bp, Artificial Sequence
  Crebbp.1_Ercc5.3
  crRNA array
  misc_feature (148)..(157): n is a, c, g, or t
cttggctttatatatcttgtggaaaggacgaaacaccgtaatttctactaagtgtagatctcacggcggcggcgggccgtaatttctactaagtgtagatggagtgggtccaggcctcgttaatttctactaagtgtagatttttttnnnnnnnnnnaagcttggcgtggatccgatatcaactagatcttgagacaaatggcagtattcatccacaattttaaaagaaaaggggggattggggggtacagtgcaggggaaagaatagtagacataatagcaacagacatacaaactaaag

SEQ ID NO: 13621 - DNA, 301 bp, Artificial Sequence
  Crebbp.1_Ercc5.4
  crRNA array
  misc_feature (148)..(157): n is a, c, g, or t
cttggctttatatatcttgtggaaaggacgaaacaccgtaatttctactaagtgtagatctcacggcggcggcgggccgtaatttctactaagtgtagatcagagccggtggaataatgttaatttctactaagtgtagatttttttnnnnnnnnnnaagcttggcgtggatccgatatcaactagatcttgagacaaatggcagtattcatccacaattttaaaagaaaaggggggattggggggtacagtgcaggggaaagaatagtagacataatagcaacagacatacaaactaaag

SEQ ID NO: 13622 - DNA, 301 bp, Artificial Sequence
  Crebbp.2_Ercc5.1
  crRNA array
  misc_feature (148)..(157): n is a, c, g, or t
cttggctttatatatcttgtggaaaggacgaaacaccgtaatttctactaagtgtagatcgcgagcaggtgaagatggctaatttctactaagtgtagatacggcacgagcaagagacactaatttctactaagtgtagatttttttnnnnnnnnnnaagcttggcgtggatccgatatcaactagatcttgagacaaatggcagtattcatccacaattttaaaagaaaaggggggattggggggtacagtgcaggggaaagaatagtagacataatagcaacagacatacaaactaaag

SEQ ID NO: 13623 - DNA, 301 bp, Artificial Sequence
  Crebbp.2_Ercc5.2
  crRNA array
  misc_feature (148)..(157): n is a, c, g, or t
cttggctttatatatcttgtggaaaggacgaaacaccgtaatttctactaagtgtagatcgcgagcaggtgaagatggctaatttctactaagtgtagatgagtatcacatcggtgactctaatttctactaagtgtagatttttttnnnnnnnnnnaagcttggcgtggatccgatatcaactagatcttgagacaaatggcagtattcatccacaattttaaaagaaaaggggggattggggggtacagtgcaggggaaagaatagtagacataatagcaacagacatacaaactaaag

SEQ ID NO: 13624 - DNA, 301 bp, Artificial Sequence
  Crebbp.2_Ercc5.3
  crRNA array
  misc_feature (148)..(157): n is a, c, g, or t
cttggctttatatatcttgtggaaaggacgaaacaccgtaatttctactaagtgtagatcgcgagcaggtgaagatggctaatttctactaagtgtagatggagtgggtccaggcctcgttaatttctactaagtgtagatttttttnnnnnnnnnnaagcttggcgtggatccgatatcaactagatcttgagacaaatggcagtattcatccacaattttaaaagaaaaggggggattggggggtacagtgcaggggaaagaatagtagacataatagcaacagacatacaaactaaag

SEQ ID NO: 13625 - DNA, 301 bp, Artificial Sequence
  Crebbp.2_Ercc5.4
  crRNA array
  misc_feature (148)..(157): n is a, c, g, or t
cttggctttatatatcttgtggaaaggacgaaacaccgtaatttctactaagtgtagatcgcgagcaggtgaagatggctaatttctactaagtgtagatcagagccggtggaataatgttaatttctactaagtgtagatttttttnnnnnnnnnnaagcttggcgtggatccgatatcaactagatcttgagacaaatggcagtattcatccacaattttaaaagaaaaggggggattggggggtacagtgcaggggaaagaatagtagacataatagcaacagacatacaaactaaag

SEQ ID NO: 13626 - DNA, 301 bp, Artificial Sequence
  Crebbp.3_Ercc5.1
  crRNA array
  misc_feature (148)..(157): n is a, c, g, or t
cttggctttatatatcttgtggaaaggacgaaacaccgtaatttctactaagtgtagatggctccgccgcccgcccgcgtaatttctactaagtgtagatacggcacgagcaagagacactaatttctactaagtgtagatttttttnnnnnnnnnnaagcttggcgtggatccgatatcaactagatcttgagacaaatggcagtattcatccacaattttaaaagaaaaggggggattggggggtacagtgcaggggaaagaatagtagacataatagcaacagacatacaaactaaag

SEQ ID NO: 13627 - DNA, 301 bp, Artificial Sequence
  Crebbp.3_Ercc5.2
  crRNA array
  misc_feature (148)..(157): n is a, c, g, or t
cttggctttatatatcttgtggaaaggacgaaacaccgtaatttctactaagtgtagatggctccgccgcccgcccgcgtaatttctactaagtgtagatgagtatcacatcggtgactctaatttctactaagtgtagatttttttnnnnnnnnnnaagcttggcgtggatccgatatcaactagatcttgagacaaatggcagtattcatccacaattttaaaagaaaaggggggattggggggtacagtgcaggggaaagaatagtagacataatagcaacagacatacaaactaaag

SEQ ID NO: 13628 - DNA, 301 bp, Artificial Sequence
  Crebbp.3_Ercc5.3
  crRNA array
  misc_feature (148)..(157): n is a, c, g, or t
cttggctttatatatcttgtggaaaggacgaaacaccgtaatttctactaagtgtagatggctccgccgcccgcccgcgtaatttctactaagtgtagatggagtgggtccaggcctcgttaatttctactaagtgtagatttttttnnnnnnnnnnaagcttggcgtggatccgatatcaactagatcttgagacaaatggcagtattcatccacaattttaaaagaaaaggggggattggggggtacagtgcaggggaaagaatagtagacataatagcaacagacatacaaactaaag

SEQ ID NO: 13629 - DNA, 301 bp, Artificial Sequence
  Crebbp.3_Ercc5.4
  crRNA array
  misc_feature (148)..(157): n is a, c, g, or t
cttggctttatatatcttgtggaaaggacgaaacaccgtaatttctactaagtgtagatggctccgccgcccgcccgcgtaatttctactaagtgtagatcagagccggtggaataatgttaatttctactaagtgtagatttttttnnnnnnnnnnaagcttggcgtggatccgatatcaactagatcttgagacaaatggcagtattcatccacaattttaaaagaaaaggggggattggggggtacagtgcaggggaaagaatagtagacataatagcaacagacatacaaactaaag

SEQ ID NO: 13630 - DNA, 301 bp, Artificial Sequence
  Crebbp.4_Ercc5.1
  crRNA array
  misc_feature (148)..(157): n is a, c, g, or t
cttggctttatatatcttgtggaaaggacgaaacaccgtaatttctactaagtgtagattggactagatgactccgtagtaatttctactaagtgtagatacggcacgagcaagagacactaatttctactaagtgtagatttttttnnnnnnnnnnaagcttggcgtggatccgatatcaactagatcttgagacaaatggcagtattcatccacaattttaaaagaaaaggggggattggggggtacagtgcaggggaaagaatagtagacataatagcaacagacatacaaactaaag

SEQ ID NO: 13631 - DNA, 301 bp, Artificial Sequence
  Crebbp.4_Ercc5.2
  crRNA array
  misc_feature (148)..(157): n is a, c, g, or t
cttggctttatatatcttgtggaaaggacgaaacaccgtaatttctactaagtgtagattggactagatgactccgtagtaatttctactaagtgtagatgagtatcacatcggtgactctaatttctactaagtgtagatttttttnnnnnnnnnnaagcttggcgtggatccgatatcaactagatcttgagacaaatggcagtattcatccacaattttaaaagaaaaggggggattggggggtacagtgcaggggaaagaatagtagacataatagcaacagacatacaaactaaag

SEQ ID NO: 13632 - DNA, 301 bp, Artificial Sequence
  Crebbp.4_Ercc5.3
  crRNA array
  misc_feature (148)..(157): n is a, c, g, or t
cttggctttatatatcttgtggaaaggacgaaacaccgtaatttctactaagtgtagattggactagatgactccgtagtaatttctactaagtgtagatggagtgggtccaggcctcgttaatttctactaagtgtagatttttttnnnnnnnnnnaagcttggcgtggatccgatatcaactagatcttgagacaaatggcagtattcatccacaattttaaaagaaaaggggggattggggggtacagtgcaggggaaagaatagtagacataatagcaacagacatacaaactaaag

SEQ ID NO: 13633 - DNA, 301 bp, Artificial Sequence
  Crebbp.4_Ercc5.4
  crRNA array
  misc_feature (148)..(157): n is a, c, g, or t
cttggctttatatatcttgtggaaaggacgaaacaccgtaatttctactaagtgtagattggactagatgactccgtagtaatttctactaagtgtagatcagagccggtggaataatgttaatttctactaagtgtagatttttttnnnnnnnnnnaagcttggcgtggatccgatatcaactagatcttgagacaaatggcagtattcatccacaattttaaaagaaaaggggggattggggggtacagtgcaggggaaagaatagtagacataatagcaacagacatacaaactaaag

SEQ ID NO: 13634 - DNA, 301 bp, Artificial Sequence
  Crebbp.1_Arid1b.1
  crRNA array
  misc_feature (148)..(157): n is a, c, g, or t
cttggctttatatatcttgtggaaaggacgaaacaccgtaatttctactaagtgtagatctcacggcggcggcgggccgtaatttctactaagtgtagatgctgctgctgtagtgcgtggtaatttctactaagtgtagatttttttnnnnnnnnnnaagcttggcgtggatccgatatcaactagatcttgagacaaatggcagtattcatccacaattttaaaagaaaaggggggattggggggtacagtgcaggggaaagaatagtagacataatagcaacagacatacaaactaaag

SEQ ID NO: 13635 - DNA, 301 bp, Artificial Sequence
  Crebbp.1_Arid1b.2
  crRNA array
  misc_feature (148)..(157): n is a, c, g, or t
cttggctttatatatcttgtggaaaggacgaaacaccgtaatttctactaagtgtagatctcacggcggcggcgggccgtaatttctactaagtgtagatagtgcaaaactgagcgcgggtaatttctactaagtgtagatttttttnnnnnnnnnnaagcttggcgtggatccgatatcaactagatcttgagacaaatggcagtattcatccacaattttaaaagaaaaggggggattggggggtacagtgcaggggaaagaatagtagacataatagcaacagacatacaaactaaag

SEQ ID NO: 13636 - DNA, 301 bp, Artificial Sequence
  Crebbp.1_Arid1b.3
  crRNA array
  misc_feature (148)..(157): n is a, c, g, or t
cttggctttatatatcttgtggaaaggacgaaacaccgtaatttctactaagtgtagatctcacggcggcggcgggccgtaatttctactaagtgtagatcactcaaaggcgaacaggtataatttctactaagtgtagatttttttnnnnnnnnnnaagcttggcgtggatccgatatcaactagatcttgagacaaatggcagtattcatccacaattttaaaagaaaaggggggattggggggtacagtgcaggggaaagaatagtagacataatagcaacagacatacaaactaaag

SEQ ID NO: 13637 - DNA, 301 bp, Artificial Sequence
  Crebbp.1_Arid1b.4
  crRNA array
  misc_feature (148)..(157): n is a, c, g, or t
cttggctttatatatcttgtggaaaggacgaaacaccgtaatttctactaagtgtagatctcacggcggcggcgggccgtaatttctactaagtgtagatctcctggctccgtagaagcataatttctactaagtgtagatttttttnnnnnnnnnnaagcttggcgtggatccgatatcaactagatcttgagacaaatggcagtattcatccacaattttaaaagaaaaggggggattggggggtacagtgcaggggaaagaatagtagacataatagcaacagacatacaaactaaag

SEQ ID NO: 13638 - DNA, 301 bp, Artificial Sequence
  Crebbp.2_Arid1b.1
  crRNA array
  misc_feature (148)..(157): n is a, c, g, or t
cttggctttatatatcttgtggaaaggacgaaacaccgtaatttctactaagtgtagatcgcgagcaggtgaagatggctaatttctactaagtgtagatgctgctgctgtagtgcgtggtaatttctactaagtgtagatttttttnnnnnnnnnnaagcttggcgtggatccgatatcaactagatcttgagacaaatggcagtattcatccacaattttaaaagaaaaggggggattggggggtacagtgcaggggaaagaatagtagacataatagcaacagacatacaaactaaag

SEQ ID NO: 13639 - DNA, 301 bp, Artificial Sequence
  Crebbp.2_Arid1b.2
  crRNA array
  misc_feature (148)..(157): n is a, c, g, or t
cttggctttatatatcttgtggaaaggacgaaacaccgtaatttctactaagtgtagatcgcgagcaggtgaagatggctaatttctactaagtgtagatagtgcaaaactgagcgcgggtaatttctactaagtgtagatttttttnnnnnnnnnnaagcttggcgtggatccgatatcaactagatcttgagacaaatggcagtattcatccacaattttaaaagaaaaggggggattggggggtacagtgcaggggaaagaatagtagacataatagcaacagacatacaaactaaag

SEQ ID NO: 13640 - DNA, 301 bp, Artificial Sequence
  Crebbp.2_Arid1b.3
  crRNA array
  misc_feature (148)..(157): n is a, c, g, or t
cttggctttatatatcttgtggaaaggacgaaacaccgtaatttctactaagtgtagatcgcgagcaggtgaagatggctaatttctactaagtgtagatcactcaaaggcgaacaggtataatttctactaagtgtagatttttttnnnnnnnnnnaagcttggcgtggatccgatatcaactagatcttgagacaaatggcagtattcatccacaattttaaaagaaaaggggggattggggggtacagtgcaggggaaagaatagtagacataatagcaacagacatacaaactaaag

SEQ ID NO: 13641 - DNA, 301 bp, Artificial Sequence
  Crebbp.2_Arid1b.4
  crRNA array
  misc_feature (148)..(157): n is a, c, g, or t
cttggctttatatatcttgtggaaaggacgaaacaccgtaatttctactaagtgtagatcgcgagcaggtgaagatggctaatttctactaagtgtagatctcctggctccgtagaagcataatttctactaagtgtagatttttttnnnnnnnnnnaagcttggcgtggatccgatatcaactagatcttgagacaaatggcagtattcatccacaattttaaaagaaaaggggggattggggggtacagtgcaggggaaagaatagtagacataatagcaacagacatacaaactaaag

SEQ ID NO: 13642 - DNA, 301 bp, Artificial Sequence
  Crebbp.3_Arid1b.1
  crRNA array
  misc_feature (148)..(157): n is a, c, g, or t
cttggctttatatatcttgtggaaaggacgaaacaccgtaatttctactaagtgtagatggctccgccgcccgcccgcgtaatttctactaagtgtagatgctgctgctgtagtgcgtggtaatttctactaagtgtagatttttttnnnnnnnnnnaagcttggcgtggatccgatatcaactagatcttgagacaaatggcagtattcatccacaattttaaaagaaaaggggggattggggggtacagtgcaggggaaagaatagtagacataatagcaacagacatacaaactaaag

SEQ ID NO: 13643 - DNA, 301 bp, Artificial Sequence
  Crebbp.3_Arid1b.2
  crRNA array
  misc_feature (148)..(157): n is a, c, g, or t
cttggctttatatatcttgtggaaaggacgaaacaccgtaatttctactaagtgtagatggctccgccgcccgcccgcgtaatttctactaagtgtagatagtgcaaaactgagcgcgggtaatttctactaagtgtagatttttttnnnnnnnnnnaagcttggcgtggatccgatatcaactagatcttgagacaaatggcagtattcatccacaattttaaaagaaaaggggggattggggggtacagtgcaggggaaagaatagtagacataatagcaacagacatacaaactaaag

SEQ ID NO: 13644 - DNA, 301 bp, Artificial Sequence
  Crebbp.3_Arid1b.3
  crRNA array
  misc_feature (148)..(157): n is a, c, g, or t
cttggctttatatatcttgtggaaaggacgaaacaccgtaatttctactaagtgtagatggctccgccgcccgcccgcgtaatttctactaagtgtagatcactcaaaggcgaacaggtataatttctactaagtgtagatttttttnnnnnnnnnnaagcttggcgtggatccgatatcaactagatcttgagacaaatggcagtattcatccacaattttaaaagaaaaggggggattggggggtacagtgcaggggaaagaatagtagacataatagcaacagacatacaaactaaag

SEQ ID NO: 13645 - DNA, 301 bp, Artificial Sequence
  Crebbp.3_Arid1b.4
  crRNA array
  misc_feature (148)..(157): n is a, c, g, or t
cttggctttatatatcttgtggaaaggacgaaacaccgtaatttctactaagtgtagatggctccgccgcccgcccgcgtaatttctactaagtgtagatctcctggctccgtagaagcataatttctactaagtgtagatttttttnnnnnnnnnnaagcttggcgtggatccgatatcaactagatcttgagacaaatggcagtattcatccacaattttaaaagaaaaggggggattggggggtacagtgcaggggaaagaatagtagacataatagcaacagacatacaaactaaag

SEQ ID NO: 13646 - DNA, 301 bp, Artificial Sequence
  Crebbp.4_Arid1b.1
  crRNA array
  misc_feature (148)..(157): n is a, c, g, or t
cttggctttatatatcttgtggaaaggacgaaacaccgtaatttctactaagtgtagattggactagatgactccgtagtaatttctactaagtgtagatgctgctgctgtagtgcgtggtaatttctactaagtgtagatttttttnnnnnnnnnnaagcttggcgtggatccgatatcaactagatcttgagacaaatggcagtattcatccacaattttaaaagaaaaggggggattggggggtacagtgcaggggaaagaatagtagacataatagcaacagacatacaaactaaag

SEQ ID NO: 13647 - DNA, 301 bp, Artificial Sequence
  Crebbp.4_Arid1b.2
  crRNA array
  misc_feature (148)..(157): n is a, c, g, or t
cttggctttatatatcttgtggaaaggacgaaacaccgtaatttctactaagtgtagattggactagatgactccgtagtaatttctactaagtgtagatagtgcaaaactgagcgcgggtaatttctactaagtgtagatttttttnnnnnnnnnnaagcttggcgtggatccgatatcaactagatcttgagacaaatggcagtattcatccacaattttaaaagaaaaggggggattggggggtacagtgcaggggaaagaatagtagacataatagcaacagacatacaaactaaag

SEQ ID NO: 13648 - DNA, 301 bp, Artificial Sequence
  Crebbp.4_Arid1b.3
  crRNA array
  misc_feature (148)..(157): n is a, c, g, or t
cttggctttatatatcttgtggaaaggacgaaacaccgtaatttctactaagtgtagattggactagatgactccgtagtaatttctactaagtgtagatcactcaaaggcgaacaggtataatttctactaagtgtagatttttttnnnnnnnnnnaagcttggcgtggatccgatatcaactagatcttgagacaaatggcagtattcatccacaattttaaaagaaaaggggggattggggggtacagtgcaggggaaagaatagtagacataatagcaacagacatacaaactaaag

SEQ ID NO: 13649 - DNA, 301 bp, Artificial Sequence
  Crebbp.4_Arid1b.4
  crRNA array
  misc_feature (148)..(157): n is a, c, g, or t
cttggctttatatatcttgtggaaaggacgaaacaccgtaatttctactaagtgtagattggactagatgactccgtagtaatttctactaagtgtagatctcctggctccgtagaagcataatttctactaagtgtagatttttttnnnnnnnnnnaagcttggcgtggatccgatatcaactagatcttgagacaaatggcagtattcatccacaattttaaaagaaaaggggggattggggggtacagtgcaggggaaagaatagtagacataatagcaacagacatacaaactaaag

SEQ ID NO: 13650 - DNA, 301 bp, Artificial Sequence
  Crebbp.1_Rb1.1
  crRNA array
  misc_feature (148)..(157): n is a, c, g, or t
cttggctttatatatcttgtggaaaggacgaaacaccgtaatttctactaagtgtagatctcacggcggcggcgggccgtaatttctactaagtgtagattctgacatgatcgggtaccttaatttctactaagtgtagatttttttnnnnnnnnnnaagcttggcgtggatccgatatcaactagatcttgagacaaatggcagtattcatccacaattttaaaagaaaaggggggattggggggtacagtgcaggggaaagaatagtagacataatagcaacagacatacaaactaaag

SEQ ID NO: 13651 - DNA, 301 bp, Artificial Sequence
  Crebbp.1_Rb1.2
  crRNA array
  misc_feature (148)..(157): n is a, c, g, or t
cttggctttatatatcttgtggaaaggacgaaacaccgtaatttctactaagtgtagatctcacggcggcggcgggccgtaatttctactaagtgtagatgtctctgcatgaaaacggagtaatttctactaagtgtagatttttttnnnnnnnnnnaagcttggcgtggatccgatatcaactagatcttgagacaaatggcagtattcatccacaattttaaaagaaaaggggggattggggggtacagtgcaggggaaagaatagtagacataatagcaacagacatacaaactaaag

SEQ ID NO: 13652 - DNA, 301 bp, Artificial Sequence
  Crebbp.1_Rb1.3
  crRNA array
  misc_feature (148)..(157): n is a, c, g, or t
cttggctttatatatcttgtggaaaggacgaaacaccgtaatttctactaagtgtagatctcacggcggcggcgggccgtaatttctactaagtgtagatagccaatctggtctaataactaatttctactaagtgtagatttttttnnnnnnnnnnaagcttggcgtggatccgatatcaactagatcttgagacaaatggcagtattcatccacaattttaaaagaaaaggggggattggggggtacagtgcaggggaaagaatagtagacataatagcaacagacatacaaactaaag

SEQ ID NO: 13653 - DNA, 301 bp, Artificial Sequence
  Crebbp.1_Rb1.4
  crRNA array
  misc_feature (148)..(157): n is a, c, g, or t
cttggctttatatatcttgtggaaaggacgaaacaccgtaatttctactaagtgtagatctcacggcggcggcgggccgtaatttctactaagtgtagattgtagctcagtaaaagtgaataatttctactaagtgtagatttttttnnnnnnnnnnaagcttggcgtggatccgatatcaactagatcttgagacaaatggcagtattcatccacaattttaaaagaaaaggggggattggggggtacagtgcaggggaaagaatagtagacataatagcaacagacatacaaactaaag

SEQ ID NO: 13654 - DNA, 301 bp, Artificial Sequence
  Crebbp.2_Rb1.1
  crRNA array
  misc_feature (148)..(157): n is a, c, g, or t
cttggctttatatatcttgtggaaaggacgaaacaccgtaatttctactaagtgtagatcgcgagcaggtgaagatggctaatttctactaagtgtagattctgacatgatcgggtaccttaatttctactaagtgtagatttttttnnnnnnnnnnaagcttggcgtggatccgatatcaactagatcttgagacaaatggcagtattcatccacaattttaaaagaaaaggggggattggggggtacagtgcaggggaaagaatagtagacataatagcaacagacatacaaactaaag

SEQ ID NO: 13655 - DNA, 301 bp, Artificial Sequence
  Crebbp.2_Rb1.2
  crRNA array
  misc_feature (148)..(157): n is a, c, g, or t
cttggctttatatatcttgtggaaaggacgaaacaccgtaatttctactaagtgtagatcgcgagcaggtgaagatggctaatttctactaagtgtagatgtctctgcatgaaaacggagtaatttctactaagtgtagatttttttnnnnnnnnnnaagcttggcgtggatccgatatcaactagatcttgagacaaatggcagtattcatccacaattttaaaagaaaaggggggattggggggtacagtgcaggggaaagaatagtagacataatagcaacagacatacaaactaaag

SEQ ID NO: 13656 - DNA, 301 bp, Artificial Sequence
  Crebbp.2_Rb1.3
  crRNA array
  misc_feature (148)..(157): n is a, c, g, or t
cttggctttatatatcttgtggaaaggacgaaacaccgtaatttctactaagtgtagatcgcgagcaggtgaagatggctaatttctactaagtgtagatagccaatctggtctaataactaatttctactaagtgtagatttttttnnnnnnnnnnaagcttggcgtggatccgatatcaactagatcttgagacaaatggcagtattcatccacaattttaaaagaaaaggggggattggggggtacagtgcaggggaaagaatagtagacataatagcaacagacatacaaactaaag

SEQ ID NO: 13657 - DNA, 301 bp, Artificial Sequence
  Crebbp.2_Rb1.4
  crRNA array
  misc_feature (148)..(157): n is a, c, g, or t
cttggctttatatatcttgtggaaaggacgaaacaccgtaatttctactaagtgtagatcgcgagcaggtgaagatggctaatttctactaagtgtagattgtagctcagtaaaagtgaataatttctactaagtgtagatttttttnnnnnnnnnnaagcttggcgtggatccgatatcaactagatcttgagacaaatggcagtattcatccacaattttaaaagaaaaggggggattggggggtacagtgcaggggaaagaatagtagacataatagcaacagacatacaaactaaag

SEQ ID NO: 13658 - DNA, 301 bp, Artificial Sequence
  Crebbp.3_Rb1.1
  crRNA array
  misc_feature (148)..(157): n is a, c, g, or t
cttggctttatatatcttgtggaaaggacgaaacaccgtaatttctactaagtgtagatggctccgccgcccgcccgcgtaatttctactaagtgtagattctgacatgatcgggtaccttaatttctactaagtgtagatttttttnnnnnnnnnnaagcttggcgtggatccgatatcaactagatcttgagacaaatggcagtattcatccacaattttaaaagaaaaggggggattggggggtacagtgcaggggaaagaatagtagacataatagcaacagacatacaaactaaag

SEQ ID NO: 13659 - DNA, 301 bp, Artificial Sequence
  Crebbp.3_Rb1.2
  crRNA array
  misc_feature (148)..(157): n is a, c, g, or t
cttggctttatatatcttgtggaaaggacgaaacaccgtaatttctactaagtgtagatggctccgccgcccgcccgcgtaatttctactaagtgtagatgtctctgcatgaaaacggagtaatttctactaagtgtagatttttttnnnnnnnnnnaagcttggcgtggatccgatatcaactagatcttgagacaaatggcagtattcatccacaattttaaaagaaaaggggggattggggggtacagtgcaggggaaagaatagtagacataatagcaacagacatacaaactaaag

SEQ ID NO: 13660 - DNA, 301 bp, Artificial Sequence
  Crebbp.3_Rb1.3
  crRNA array
  misc_feature (148)..(157): n is a, c, g, or t
cttggctttatatatcttgtggaaaggacgaaacaccgtaatttctactaagtgtagatggctccgccgcccgcccgcgtaatttctactaagtgtagatagccaatctggtctaataactaatttctactaagtgtagatttttttnnnnnnnnnnaagcttggcgtggatccgatatcaactagatcttgagacaaatggcagtattcatccacaattttaaaagaaaaggggggattggggggtacagtgcaggggaaagaatagtagacataatagcaacagacatacaaactaaag

SEQ ID NO: 13661 - DNA, 301 bp, Artificial Sequence
  Crebbp.3_Rb1.4
  crRNA array
  misc_feature (148)..(157): n is a, c, g, or t
cttggctttatatatcttgtggaaaggacgaaacaccgtaatttctactaagtgtagatggctccgccgcccgcccgcgtaatttctactaagtgtagattgtagctcagtaaaagtgaataatttctactaagtgtagatttttttnnnnnnnnnnaagcttggcgtggatccgatatcaactagatcttgagacaaatggcagtattcatccacaattttaaaagaaaaggggggattggggggtacagtgcaggggaaagaatagtagacataatagcaacagacatacaaactaaag

SEQ ID NO: 13662 - DNA, 301 bp, Artificial Sequence
  Crebbp.4_Rb1.1
  crRNA array
  misc_feature (148)..(157): n is a, c, g, or t
cttggctttatatatcttgtggaaaggacgaaacaccgtaatttctactaagtgtagattggactagatgactccgtagtaatttctactaagtgtagattctgacatgatcgggtaccttaatttctactaagtgtagatttttttnnnnnnnnnnaagcttggcgtggatccgatatcaactagatcttgagacaaatggcagtattcatccacaattttaaaagaaaaggggggattggggggtacagtgcaggggaaagaatagtagacataatagcaacagacatacaaactaaag

SEQ ID NO: 13663 - DNA, 301 bp, Artificial Sequence
  Crebbp.4_Rb1.2
  crRNA array
  misc_feature (148)..(157): n is a, c, g, or t
cttggctttatatatcttgtggaaaggacgaaacaccgtaatttctactaagtgtagattggactagatgactccgtagtaatttctactaagtgtagatgtctctgcatgaaaacggagtaatttctactaagtgtagatttttttnnnnnnnnnnaagcttggcgtggatccgatatcaactagatcttgagacaaatggcagtattcatccacaattttaaaagaaaaggggggattggggggtacagtgcaggggaaagaatagtagacataatagcaacagacatacaaactaaag

SEQ ID NO: 13664 - DNA, 301 bp, Artificial Sequence
  Crebbp.4_Rb1.3
  crRNA array
  misc_feature (148)..(157): n is a, c, g, or t
cttggctttatatatcttgtggaaaggacgaaacaccgtaatttctactaagtgtagattggactagatgactccgtagtaatttctactaagtgtagatagccaatctggtctaataactaatttctactaagtgtagatttttttnnnnnnnnnnaagcttggcgtggatccgatatcaactagatcttgagacaaatggcagtattcatccacaattttaaaagaaaaggggggattggggggtacagtgcaggggaaagaatagtagacataatagcaacagacatacaaactaaag

SEQ ID NO: 13665 - DNA, 301 bp, Artificial Sequence
  Crebbp.4_Rb1.4
  crRNA array
  misc_feature (148)..(157): n is a, c, g, or t
cttggctttatatatcttgtggaaaggacgaaacaccgtaatttctactaagtgtagattggactagatgactccgtagtaatttctactaagtgtagattgtagctcagtaaaagtgaataatttctactaagtgtagatttttttnnnnnnnnnnaagcttggcgtggatccgatatcaactagatcttgagacaaatggcagtattcatccacaattttaaaagaaaaggggggattggggggtacagtgcaggggaaagaatagtagacataatagcaacagacatacaaactaaag

SEQ ID NO: 13666 - DNA, 301 bp, Artificial Sequence
  Crebbp.1_Kmt2c.1
  crRNA array
  misc_feature (148)..(157): n is a, c, g, or t
cttggctttatatatcttgtggaaaggacgaaacaccgtaatttctactaagtgtagatctcacggcggcggcgggccgtaatttctactaagtgtagatactcgacctccacctccctataatttctactaagtgtagatttttttnnnnnnnnnnaagcttggcgtggatccgatatcaactagatcttgagacaaatggcagtattcatccacaattttaaaagaaaaggggggattggggggtacagtgcaggggaaagaatagtagacataatagcaacagacatacaaactaaag

SEQ ID NO: 13667 - DNA, 301 bp, Artificial Sequence
  Crebbp.1_Kmt2c.2
  crRNA array
  misc_feature (148)..(157): n is a, c, g, or t
cttggctttatatatcttgtggaaaggacgaaacaccgtaatttctactaagtgtagatctcacggcggcggcgggccgtaatttctactaagtgtagatcccaaagatcagcgtggacctaatttctactaagtgtagatttttttnnnnnnnnnnaagcttggcgtggatccgatatcaactagatcttgagacaaatggcagtattcatccacaattttaaaagaaaaggggggattggggggtacagtgcaggggaaagaatagtagacataatagcaacagacatacaaactaaag

SEQ ID NO: 13668 - DNA, 301 bp, Artificial Sequence
  Crebbp.1_Kmt2c.3
  crRNA array
  misc_feature (148)..(157): n is a, c, g, or t
cttggctttatatatcttgtggaaaggacgaaacaccgtaatttctactaagtgtagatctcacggcggcggcgggccgtaatttctactaagtgtagataaaagatccgaatcgatgcgtaatttctactaagtgtagatttttttnnnnnnnnnnaagcttggcgtggatccgatatcaactagatcttgagacaaatggcagtattcatccacaattttaaaagaaaaggggggattggggggtacagtgcaggggaaagaatagtagacataatagcaacagacatacaaactaaag

SEQ ID NO: 13669 - DNA, 301 bp, Artificial Sequence
  Crebbp.1_Kmt2c.4
  crRNA array
  misc_feature (148)..(157): n is a, c, g, or t
cttggctttatatatcttgtggaaaggacgaaacaccgtaatttctactaagtgtagatctcacggcggcggcgggccgtaatttctactaagtgtagatctgaggcacatggaagcgattaatttctactaagtgtagatttttttnnnnnnnnnnaagcttggcgtggatccgatatcaactagatcttgagacaaatggcagtattcatccacaattttaaaagaaaaggggggattggggggtacagtgcaggggaaagaatagtagacataatagcaacagacatacaaactaaag

SEQ ID NO: 13670 - DNA, 301 bp, Artificial Sequence
  Crebbp.2_Kmt2c.1
  crRNA array
  misc_feature (148)..(157): n is a, c, g, or t
cttggctttatatatcttgtggaaaggacgaaacaccgtaatttctactaagtgtagatcgcgagcaggtgaagatggctaatttctactaagtgtagatactcgacctccacctccctataatttctactaagtgtagatttttttnnnnnnnnnnaagcttggcgtggatccgatatcaactagatcttgagacaaatggcagtattcatccacaattttaaaagaaaaggggggattggggggtacagtgcaggggaaagaatagtagacataatagcaacagacatacaaactaaag

SEQ ID NO: 13671 - DNA, 301 bp, Artificial Sequence
  Crebbp.2_Kmt2c.2
  crRNA array
  misc_feature (148)..(157): n is a, c, g, or t
cttggctttatatatcttgtggaaaggacgaaacaccgtaatttctactaagtgtagatcgcgagcaggtgaagatggctaatttctactaagtgtagatcccaaagatcagcgtggacctaatttctactaagtgtagatttttttnnnnnnnnnnaagcttggcgtggatccgatatcaactagatcttgagacaaatggcagtattcatccacaattttaaaagaaaaggggggattggggggtacagtgcaggggaaagaatagtagacataatagcaacagacatacaaactaaag

SEQ ID NO: 13672 - DNA, 301 bp, Artificial Sequence
  Crebbp.2_Kmt2c.3
  crRNA array
  misc_feature (148)..(157): n is a, c, g, or t
cttggctttatatatcttgtggaaaggacgaaacaccgtaatttctactaagtgtagatcgcgagcaggtgaagatggctaatttctactaagtgtagataaaagatccgaatcgatgcgtaatttctactaagtgtagatttttttnnnnnnnnnnaagcttggcgtggatccgatatcaactagatcttgagacaaatggcagtattcatccacaattttaaaagaaaaggggggattggggggtacagtgcaggggaaagaatagtagacataatagcaacagacatacaaactaaag

SEQ ID NO: 13673 - DNA, 301 bp, Artificial Sequence
  Crebbp.2_Kmt2c.4
  crRNA array
  misc_feature (148)..(157): n is a, c, g, or t
cttggctttatatatcttgtggaaaggacgaaacaccgtaatttctactaagtgtagatcgcgagcaggtgaagatggctaatttctactaagtgtagatctgaggcacatggaagcgattaatttctactaagtgtagatttttttnnnnnnnnnnaagcttggcgtggatccgatatcaactagatcttgagacaaatggcagtattcatccacaattttaaaagaaaaggggggattggggggtacagtgcaggggaaagaatagtagacataatagcaacagacatacaaactaaag

SEQ ID NO: 13674 - DNA, 301 bp, Artificial Sequence
  Crebbp.3_Kmt2c.1
  crRNA array
  misc_feature (148)..(157): n is a, c, g, or t
cttggctttatatatcttgtggaaaggacgaaacaccgtaatttctactaagtgtagatggctccgccgcccgcccgcgtaatttctactaagtgtagatactcgacctccacctccctataatttctactaagtgtagatttttttnnnnnnnnnnaagcttggcgtggatccgatatcaactagatcttgagacaaatggcagtattcatccacaattttaaaagaaaaggggggattggggggtacagtgcaggggaaagaatagtagacataatagcaacagacatacaaactaaag

SEQ ID NO: 13675 - DNA, 301 bp, Artificial Sequence
  Crebbp.3_Kmt2c.2
  crRNA array
  misc_feature (148)..(157): n is a, c, g, or t
cttggctttatatatcttgtggaaaggacgaaacaccgtaatttctactaagtgtagatggctccgccgcccgcccgcgtaatttctactaagtgtagatcccaaagatcagcgtggacctaatttctactaagtgtagatttttttnnnnnnnnnnaagcttggcgtggatccgatatcaactagatcttgagacaaatggcagtattcatccacaattttaaaagaaaaggggggattggggggtacagtgcaggggaaagaatagtagacataatagcaacagacatacaaactaaag

SEQ ID NO: 13676 - DNA, 301 bp, Artificial Sequence
  Crebbp.3_Kmt2c.3
  crRNA array
  misc_feature (148)..(157): n is a, c, g, or t
cttggctttatatatcttgtggaaaggacgaaacaccgtaatttctactaagtgtagatggctccgccgcccgcccgcgtaatttctactaagtgtagataaaagatccgaatcgatgcgtaatttctactaagtgtagatttttttnnnnnnnnnnaagcttggcgtggatccgatatcaactagatcttgagacaaatggcagtattcatccacaattttaaaagaaaaggggggattggggggtacagtgcaggggaaagaatagtagacataatagcaacagacatacaaactaaag

SEQ ID NO: 13677 - DNA, 301 bp, Artificial Sequence
  Crebbp.3_Kmt2c.4
  crRNA array
  misc_feature (148)..(157): n is a, c, g, or t
cttggctttatatatcttgtggaaaggacgaaacaccgtaatttctactaagtgtagatggctccgccgcccgcccgcgtaatttctactaagtgtagatctgaggcacatggaagcgattaatttctactaagtgtagatttttttnnnnnnnnnnaagcttggcgtggatccgatatcaactagatcttgagacaaatggcagtattcatccacaattttaaaagaaaaggggggattggggggtacagtgcaggggaaagaatagtagacataatagcaacagacatacaaactaaag

SEQ ID NO: 13678 - DNA, 301 bp, Artificial Sequence
  Crebbp.4_Kmt2c.1
  crRNA array
  misc_feature (148)..(157): n is a, c, g, or t
cttggctttatatatcttgtggaaaggacgaaacaccgtaatttctactaagtgtagattggactagatgactccgtagtaatttctactaagtgtagatactcgacctccacctccctataatttctactaagtgtagatttttttnnnnnnnnnnaagcttggcgtggatccgatatcaactagatcttgagacaaatggcagtattcatccacaattttaaaagaaaaggggggattggggggtacagtgcaggggaaagaatagtagacataatagcaacagacatacaaactaaag

SEQ ID NO: 13679 - DNA, 301 bp, Artificial Sequence
  Crebbp.4_Kmt2c.2
  crRNA array
  misc_feature (148)..(157): n is a, c, g, or t
cttggctttatatatcttgtggaaaggacgaaacaccgtaatttctactaagtgtagattggactagatgactccgtagtaatttctactaagtgtagatcccaaagatcagcgtggacctaatttctactaagtgtagatttttttnnnnnnnnnnaagcttggcgtggatccgatatcaactagatcttgagacaaatggcagtattcatccacaattttaaaagaaaaggggggattggggggtacagtgcaggggaaagaatagtagacataatagcaacagacatacaaactaaag

SEQ ID NO: 13680 - DNA, 301 bp, Artificial Sequence
  Crebbp.4_Kmt2c.3
  crRNA array
  misc_feature (148)..(157): n is a, c, g, or t
cttggctttatatatcttgtggaaaggacgaaacaccgtaatttctactaagtgtagattggactagatgactccgtagtaatttctactaagtgtagataaaagatccgaatcgatgcgtaatttctactaagtgtagatttttttnnnnnnnnnnaagcttggcgtggatccgatatcaactagatcttgagacaaatggcagtattcatccacaattttaaaagaaaaggggggattggggggtacagtgcaggggaaagaatagtagacataatagcaacagacatacaaactaaag

SEQ ID NO: 13681 - DNA, 301 bp, Artificial Sequence
  Crebbp.4_Kmt2c.4
  crRNA array
  misc_feature (148)..(157): n is a, c, g, or t
cttggctttatatatcttgtggaaaggacgaaacaccgtaatttctactaagtgtagattggactagatgactccgtagtaatttctactaagtgtagatctgaggcacatggaagcgattaatttctactaagtgtagatttttttnnnnnnnnnnaagcttggcgtggatccgatatcaactagatcttgagacaaatggcagtattcatccacaattttaaaagaaaaggggggattggggggtacagtgcaggggaaagaatagtagacataatagcaacagacatacaaactaaag

SEQ ID NO: 13682 - DNA, 301 bp, Artificial Sequence
  Crebbp.1_Pten.1
  crRNA array
  misc_feature (148)..(157): n is a, c, g, or t
cttggctttatatatcttgtggaaaggacgaaacaccgtaatttctactaagtgtagatctcacggcggcggcgggccgtaatttctactaagtgtagataagcgtggtgcgtgacgcactaatttctactaagtgtagatttttttnnnnnnnnnnaagcttggcgtggatccgatatcaactagatcttgagacaaatggcagtattcatccacaattttaaaagaaaaggggggattggggggtacagtgcaggggaaagaatagtagacataatagcaacagacatacaaactaaag

SEQ ID NO: 13683 - DNA, 301 bp, Artificial Sequence
  Crebbp.1_Pten.2
  crRNA array
  misc_feature (148)..(157): n is a, c, g, or t
cttggctttatatatcttgtggaaaggacgaaacaccgtaatttctactaagtgtagatctcacggcggcggcgggccgtaatttctactaagtgtagattgtcaccagctgaagtggcttaatttctactaagtgtagatttttttnnnnnnnnnnaagcttggcgtggatccgatatcaactagatcttgagacaaatggcagtattcatccacaattttaaaagaaaaggggggattggggggtacagtgcaggggaaagaatagtagacataatagcaacagacatacaaactaaag

SEQ ID NO: 13684 - DNA, 301 bp, Artificial Sequence
  Crebbp.1_Pten.3
  crRNA array
  misc_feature (148)..(157): n is a, c, g, or t
cttggctttatatatcttgtggaaaggacgaaacaccgtaatttctactaagtgtagatctcacggcggcggcgggccgtaatttctactaagtgtagatggagtcaagaggctgatttttaatttctactaagtgtagatttttttnnnnnnnnnnaagcttggcgtggatccgatatcaactagatcttgagacaaatggcagtattcatccacaattttaaaagaaaaggggggattggggggtacagtgcaggggaaagaatagtagacataatagcaacagacatacaaactaaag

SEQ ID NO: 13685 - DNA, 301 bp, Artificial Sequence
  Crebbp.1_Pten.4
  crRNA array
  misc_feature (148)..(157): n is a, c, g, or t
cttggctttatatatcttgtggaaaggacgaaacaccgtaatttctactaagtgtagatctcacggcggcggcgggccgtaatttctactaagtgtagatctgtaagctaaaccactacataatttctactaagtgtagatttttttnnnnnnnnnnaagcttggcgtggatccgatatcaactagatcttgagacaaatggcagtattcatccacaattttaaaagaaaaggggggattggggggtacagtgcaggggaaagaatagtagacataatagcaacagacatacaaactaaag

SEQ ID NO: 13686 - DNA, 301 bp, Artificial Sequence
  Crebbp.2_Pten.1
  crRNA array
  misc_feature (148)..(157): n is a, c, g, or t
cttggctttatatatcttgtggaaaggacgaaacaccgtaatttctactaagtgtagatcgcgagcaggtgaagatggctaatttctactaagtgtagataagcgtggtgcgtgacgcactaatttctactaagtgtagatttttttnnnnnnnnnnaagcttggcgtggatccgatatcaactagatcttgagacaaatggcagtattcatccacaattttaaaagaaaaggggggattggggggtacagtgcaggggaaagaatagtagacataatagcaacagacatacaaactaaag

SEQ ID NO: 13687 - DNA, 301 bp, Artificial Sequence
  Crebbp.2_Pten.2
  crRNA array
  misc_feature (148)..(157): n is a, c, g, or t
cttggctttatatatcttgtggaaaggacgaaacaccgtaatttctactaagtgtagatcgcgagcaggtgaagatggctaatttctactaagtgtagattgtcaccagctgaagtggcttaatttctactaagtgtagatttttttnnnnnnnnnnaagcttggcgtggatccgatatcaactagatcttgagacaaatggcagtattcatccacaattttaaaagaaaaggggggattggggggtacagtgcaggggaaagaatagtagacataatagcaacagacatacaaactaaag

SEQ ID NO: 13688 - DNA, 301 bp, Artificial Sequence
  Crebbp.2_Pten.3
  crRNA array
  misc_feature (148)..(157): n is a, c, g, or t
cttggctttatatatcttgtggaaaggacgaaacaccgtaatttctactaagtgtagatcgcgagcaggtgaagatggctaatttctactaagtgtagatggagtcaagaggctgatttttaatttctactaagtgtagatttttttnnnnnnnnnnaagcttggcgtggatccgatatcaactagatcttgagacaaatggcagtattcatccacaattttaaaagaaaaggggggattggggggtacagtgcaggggaaagaatagtagacataatagcaacagacatacaaactaaag

SEQ ID NO: 13689 - DNA, 301 bp, Artificial Sequence
  Crebbp.2_Pten.4
  crRNA array
  misc_feature (148)..(157): n is a, c, g, or t
cttggctttatatatcttgtggaaaggacgaaacaccgtaatttctactaagtgtagatcgcgagcaggtgaagatggctaatttctactaagtgtagatctgtaagctaaaccactacataatttctactaagtgtagatttttttnnnnnnnnnnaagcttggcgtggatccgatatcaactagatcttgagacaaatggcagtattcatccacaattttaaaagaaaaggggggattggggggtacagtgcaggggaaagaatagtagacataatagcaacagacatacaaactaaag

SEQ ID NO: 13690 - DNA, 301 bp, Artificial Sequence
  Crebbp.3_Pten.1
  crRNA array
  misc_feature (148)..(157): n is a, c, g, or t
cttggctttatatatcttgtggaaaggacgaaacaccgtaatttctactaagtgtagatggctccgccgcccgcccgcgtaatttctactaagtgtagataagcgtggtgcgtgacgcactaatttctactaagtgtagatttttttnnnnnnnnnnaagcttggcgtggatccgatatcaactagatcttgagacaaatggcagtattcatccacaattttaaaagaaaaggggggattggggggtacagtgcaggggaaagaatagtagacataatagcaacagacatacaaactaaag

SEQ ID NO: 13691 - DNA, 301 bp, Artificial Sequence
  Crebbp.3_Pten.2
  crRNA array
  misc_feature (148)..(157): n is a, c, g, or t
cttggctttatatatcttgtggaaaggacgaaacaccgtaatttctactaagtgtagatggctccgccgcccgcccgcgtaatttctactaagtgtagattgtcaccagctgaagtggcttaatttctactaagtgtagatttttttnnnnnnnnnnaagcttggcgtggatccgatatcaactagatcttgagacaaatggcagtattcatccacaattttaaaagaaaaggggggattggggggtacagtgcaggggaaagaatagtagacataatagcaacagacatacaaactaaag

SEQ ID NO: 13692 - DNA, 301 bp, Artificial Sequence
  Crebbp.3_Pten.3
  crRNA array
  misc_feature (148)..(157): n is a, c, g, or t
cttggctttatatatcttgtggaaaggacgaaacaccgtaatttctactaagtgtagatggctccgccgcccgcccgcgtaatttctactaagtgtagatggagtcaagaggctgatttttaatttctactaagtgtagatttttttnnnnnnnnnnaagcttggcgtggatccgatatcaactagatcttgagacaaatggcagtattcatccacaattttaaaagaaaaggggggattggggggtacagtgcaggggaaagaatagtagacataatagcaacagacatacaaactaaag

SEQ ID NO: 13693 - DNA, 301 bp, Artificial Sequence
  Crebbp.3_Pten.4
  crRNA array
  misc_feature (148)..(157): n is a, c, g, or t
cttggctttatatatcttgtggaaaggacgaaacaccgtaatttctactaagtgtagatggctccgccgcccgcccgcgtaatttctactaagtgtagatctgtaagctaaaccactacataatttctactaagtgtagatttttttnnnnnnnnnnaagcttggcgtggatccgatatcaactagatcttgagacaaatggcagtattcatccacaattttaaaagaaaaggggggattggggggtacagtgcaggggaaagaatagtagacataatagcaacagacatacaaactaaag

SEQ ID NO: 13694 - DNA, 301 bp, Artificial Sequence
  Crebbp.4_Pten.1
  crRNA array
  misc_feature (148)..(157): n is a, c, g, or t
cttggctttatatatcttgtggaaaggacgaaacaccgtaatttctactaagtgtagattggactagatgactccgtagtaatttctactaagtgtagataagcgtggtgcgtgacgcactaatttctactaagtgtagatttttttnnnnnnnnnnaagcttggcgtggatccgatatcaactagatcttgagacaaatggcagtattcatccacaattttaaaagaaaaggggggattggggggtacagtgcaggggaaagaatagtagacataatagcaacagacatacaaactaaag

SEQ ID NO: 13695 - DNA, 301 bp, Artificial Sequence
  Crebbp.4_Pten.2
  crRNA array
  misc_feature (148)..(157): n is a, c, g, or t
cttggctttatatatcttgtggaaaggacgaaacaccgtaatttctactaagtgtagattggactagatgactccgtagtaatttctactaagtgtagattgtcaccagctgaagtggcttaatttctactaagtgtagatttttttnnnnnnnnnnaagcttggcgtggatccgatatcaactagatcttgagacaaatggcagtattcatccacaattttaaaagaaaaggggggattggggggtacagtgcaggggaaagaatagtagacataatagcaacagacatacaaactaaag

SEQ ID NO: 13696 - DNA, 301 bp, Artificial Sequence
  Crebbp.4_Pten.3
  crRNA array
  misc_feature (148)..(157): n is a, c, g, or t
cttggctttatatatcttgtggaaaggacgaaacaccgtaatttctactaagtgtagattggactagatgactccgtagtaatttctactaagtgtagatggagtcaagaggctgatttttaatttctactaagtgtagatttttttnnnnnnnnnnaagcttggcgtggatccgatatcaactagatcttgagacaaatggcagtattcatccacaattttaaaagaaaaggggggattggggggtacagtgcaggggaaagaatagtagacataatagcaacagacatacaaactaaag

SEQ ID NO: 13697 - DNA, 301 bp, Artificial Sequence
  Crebbp.4_Pten.4
  crRNA array
  misc_feature (148)..(157): n is a, c, g, or t
cttggctttatatatcttgtggaaaggacgaaacaccgtaatttctactaagtgtagattggactagatgactccgtagtaatttctactaagtgtagatctgtaagctaaaccactacataatttctactaagtgtagatttttttnnnnnnnnnnaagcttggcgtggatccgatatcaactagatcttgagacaaatggcagtattcatccacaattttaaaagaaaaggggggattggggggtacagtgcaggggaaagaatagtagacataatagcaacagacatacaaactaaag

SEQ ID NO: 13698 - DNA, 301 bp, Artificial Sequence
  Crebbp.1_Atm.1
  crRNA array
  misc_feature (148)..(157): n is a, c, g, or t
cttggctttatatatcttgtggaaaggacgaaacaccgtaatttctactaagtgtagatctcacggcggcggcgggccgtaatttctactaagtgtagatgagaaagtctccgaatcgtttaatttctactaagtgtagatttttttnnnnnnnnnnaagcttggcgtggatccgatatcaactagatcttgagacaaatggcagtattcatccacaattttaaaagaaaaggggggattggggggtacagtgcaggggaaagaatagtagacataatagcaacagacatacaaactaaag

SEQ ID NO: 13699 - DNA, 301 bp, Artificial Sequence
  Crebbp.1_Atm.2
  crRNA array
  misc_feature (148)..(157): n is a, c, g, or t
cttggctttatatatcttgtggaaaggacgaaacaccgtaatttctactaagtgtagatctcacggcggcggcgggccgtaatttctactaagtgtagatcctacgagggcacgagagactaatttctactaagtgtagatttttttnnnnnnnnnnaagcttggcgtggatccgatatcaactagatcttgagacaaatggcagtattcatccacaattttaaaagaaaaggggggattggggggtacagtgcaggggaaagaatagtagacataatagcaacagacatacaaactaaag

SEQ ID NO: 13700 - DNA, 301 bp, Artificial Sequence
  Crebbp.1_Atm.3
  crRNA array
  misc_feature (148)..(157): n is a, c, g, or t
cttggctttatatatcttgtggaaaggacgaaacaccgtaatttctactaagtgtagatctcacggcggcggcgggccgtaatttctactaagtgtagattgaaagtctccgatatgccataatttctactaagtgtagatttttttnnnnnnnnnnaagcttggcgtggatccgatatcaactagatcttgagacaaatggcagtattcatccacaattttaaaagaaaaggggggattggggggtacagtgcaggggaaagaatagtagacataatagcaacagacatacaaactaaag

SEQ ID NO: 13701 - DNA, 301 bp, Artificial Sequence
  Crebbp.1_Atm.4
  crRNA array
  misc_feature (148)..(157): n is a, c, g, or t
cttggctttatatatcttgtggaaaggacgaaacaccgtaatttctactaagtgtagatctcacggcggcggcgggccgtaatttctactaagtgtagatggtggtgatcagtcaagtagtaatttctactaagtgtagatttttttnnnnnnnnnnaagcttggcgtggatccgatatcaactagatcttgagacaaatggcagtattcatccacaattttaaaagaaaaggggggattggggggtacagtgcaggggaaagaatagtagacataatagcaacagacatacaaactaaag

SEQ ID NO: 13702 - DNA, 301 bp, Artificial Sequence
  Crebbp.2_Atm.1
  crRNA array
  misc_feature (148)..(157): n is a, c, g, or t
cttggctttatatatcttgtggaaaggacgaaacaccgtaatttctactaagtgtagatcgcgagcaggtgaagatggctaatttctactaagtgtagatgagaaagtctccgaatcgtttaatttctactaagtgtagatttttttnnnnnnnnnnaagcttggcgtggatccgatatcaactagatcttgagacaaatggcagtattcatccacaattttaaaagaaaaggggggattggggggtacagtgcaggggaaagaatagtagacataatagcaacagacatacaaactaaag

SEQ ID NO: 13703 - DNA, 301 bp, Artificial Sequence
  Crebbp.2_Atm.2
  crRNA array
  misc_feature (148)..(157): n is a, c, g, or t
cttggctttatatatcttgtggaaaggacgaaacaccgtaatttctactaagtgtagatcgcgagcaggtgaagatggctaatttctactaagtgtagatcctacgagggcacgagagactaatttctactaagtgtagatttttttnnnnnnnnnnaagcttggcgtggatccgatatcaactagatcttgagacaaatggcagtattcatccacaattttaaaagaaaaggggggattggggggtacagtgcaggggaaagaatagtagacataatagcaacagacatacaaactaaag

SEQ ID NO: 13704 - DNA, 301 bp, Artificial Sequence
  Crebbp.2_Atm.3
  crRNA array
  misc_feature (148)..(157): n is a, c, g, or t
cttggctttatatatcttgtggaaaggacgaaacaccgtaatttctactaagtgtagatcgcgagcaggtgaagatggctaatttctactaagtgtagattgaaagtctccgatatgccataatttctactaagtgtagatttttttnnnnnnnnnnaagcttggcgtggatccgatatcaactagatcttgagacaaatggcagtattcatccacaattttaaaagaaaaggggggattggggggtacagtgcaggggaaagaatagtagacataatagcaacagacatacaaactaaag

SEQ ID NO: 13705 - DNA, 301 bp, Artificial Sequence
  Crebbp.2_Atm.4
  crRNA array
  misc_feature (148)..(157): n is a, c, g, or t
cttggctttatatatcttgtggaaaggacgaaacaccgtaatttctactaagtgtagatcgcgagcaggtgaagatggctaatttctactaagtgtagatggtggtgatcagtcaagtagtaatttctactaagtgtagatttttttnnnnnnnnnnaagcttggcgtggatccgatatcaactagatcttgagacaaatggcagtattcatccacaattttaaaagaaaaggggggattggggggtacagtgcaggggaaagaatagtagacataatagcaacagacatacaaactaaag

SEQ ID NO: 13706 - DNA, 301 bp, Artificial Sequence
  Crebbp.3_Atm.1
  crRNA array
  misc_feature (148)..(157): n is a, c, g, or t
cttggctttatatatcttgtggaaaggacgaaacaccgtaatttctactaagtgtagatggctccgccgcccgcccgcgtaatttctactaagtgtagatgagaaagtctccgaatcgtttaatttctactaagtgtagatttttttnnnnnnnnnnaagcttggcgtggatccgatatcaactagatcttgagacaaatggcagtattcatccacaattttaaaagaaaaggggggattggggggtacagtgcaggggaaagaatagtagacataatagcaacagacatacaaactaaag

SEQ ID NO: 13707 - DNA, 301 bp, Artificial Sequence
  Crebbp.3_Atm.2
  crRNA array
  misc_feature (148)..(157): n is a, c, g, or t
cttggctttatatatcttgtggaaaggacgaaacaccgtaatttctactaagtgtagatggctccgccgcccgcccgcgtaatttctactaagtgtagatcctacgagggcacgagagactaatttctactaagtgtagatttttttnnnnnnnnnnaagcttggcgtggatccgatatcaactagatcttgagacaaatggcagtattcatccacaattttaaaagaaaaggggggattggggggtacagtgcaggggaaagaatagtagacataatagcaacagacatacaaactaaag

SEQ ID NO: 13708 - DNA, 301 bp, Artificial Sequence
  Crebbp.3_Atm.3
  crRNA array
  misc_feature (148)..(157): n is a, c, g, or t
cttggctttatatatcttgtggaaaggacgaaacaccgtaatttctactaagtgtagatggctccgccgcccgcccgcgtaatttctactaagtgtagattgaaagtctccgatatgccataatttctactaagtgtagatttttttnnnnnnnnnnaagcttggcgtggatccgatatcaactagatcttgagacaaatggcagtattcatccacaattttaaaagaaaaggggggattggggggtacagtgcaggggaaagaatagtagacataatagcaacagacatacaaactaaag

SEQ ID NO: 13709 - DNA, 301 bp, Artificial Sequence
  Crebbp.3_Atm.4
  crRNA array
  misc_feature (148)..(157): n is a, c, g, or t
cttggctttatatatcttgtggaaaggacgaaacaccgtaatttctactaagtgtagatggctccgccgcccgcccgcgtaatttctactaagtgtagatggtggtgatcagtcaagtagtaatttctactaagtgtagatttttttnnnnnnnnnnaagcttggcgtggatccgatatcaactagatcttgagacaaatggcagtattcatccacaattttaaaagaaaaggggggattggggggtacagtgcaggggaaagaatagtagacataatagcaacagacatacaaactaaag

SEQ ID NO: 13710 - DNA, 301 bp, Artificial Sequence
  Crebbp.4_Atm.1
  crRNA array
  misc_feature (148)..(157): n is a, c, g, or t
cttggctttatatatcttgtggaaaggacgaaacaccgtaatttctactaagtgtagattggactagatgactccgtagtaatttctactaagtgtagatgagaaagtctccgaatcgtttaatttctactaagtgtagatttttttnnnnnnnnnnaagcttggcgtggatccgatatcaactagatcttgagacaaatggcagtattcatccacaattttaaaagaaaaggggggattggggggtacagtgcaggggaaagaatagtagacataatagcaacagacatacaaactaaag

SEQ ID NO: 13711 - DNA, 301 bp, Artificial Sequence
  Crebbp.4_Atm.2
  crRNA array
  misc_feature (148)..(157): n is a, c, g, or t
cttggctttatatatcttgtggaaaggacgaaacaccgtaatttctactaagtgtagattggactagatgactccgtagtaatttctactaagtgtagatcctacgagggcacgagagactaatttctactaagtgtagatttttttnnnnnnnnnnaagcttggcgtggatccgatatcaactagatcttgagacaaatggcagtattcatccacaattttaaaagaaaaggggggattggggggtacagtgcaggggaaagaatagtagacataatagcaacagacatacaaactaaag

SEQ ID NO: 13712 - DNA, 301 bp, Artificial Sequence
  Crebbp.4_Atm.3
  crRNA array
  misc_feature (148)..(157): n is a, c, g, or t
cttggctttatatatcttgtggaaaggacgaaacaccgtaatttctactaagtgtagattggactagatgactccgtagtaatttctactaagtgtagattgaaagtctccgatatgccataatttctactaagtgtagatttttttnnnnnnnnnnaagcttggcgtggatccgatatcaactagatcttgagacaaatggcagtattcatccacaattttaaaagaaaaggggggattggggggtacagtgcaggggaaagaatagtagacataatagcaacagacatacaaactaaag

SEQ ID NO: 13713 - DNA, 301 bp, Artificial Sequence
  Crebbp.4_Atm.4
  crRNA array
  misc_feature (148)..(157): n is a, c, g, or t
cttggctttatatatcttgtggaaaggacgaaacaccgtaatttctactaagtgtagattggactagatgactccgtagtaatttctactaagtgtagatggtggtgatcagtcaagtagtaatttctactaagtgtagatttttttnnnnnnnnnnaagcttggcgtggatccgatatcaactagatcttgagacaaatggcagtattcatccacaattttaaaagaaaaggggggattggggggtacagtgcaggggaaagaatagtagacataatagcaacagacatacaaactaaag

SEQ ID NO: 13714 - DNA, 301 bp, Artificial Sequence
  Cdkn2a.1_Wrn.1
  crRNA array
  misc_feature (148)..(157): n is a, c, g, or t
cttggctttatatatcttgtggaaaggacgaaacaccgtaatttctactaagtgtagatcaatcacgggagggagcagataatttctactaagtgtagatgcaaaccactcgggtaattttaatttctactaagtgtagatttttttnnnnnnnnnnaagcttggcgtggatccgatatcaactagatcttgagacaaatggcagtattcatccacaattttaaaagaaaaggggggattggggggtacagtgcaggggaaagaatagtagacataatagcaacagacatacaaactaaag

SEQ ID NO: 13715 - DNA, 301 bp, Artificial Sequence
  Cdkn2a.1_Wrn.2
  crRNA array
  misc_feature (148)..(157): n is a, c, g, or t
cttggctttatatatcttgtggaaaggacgaaacaccgtaatttctactaagtgtagatcaatcacgggagggagcagataatttctactaagtgtagatgccatgtccagcagaacctttaatttctactaagtgtagatttttttnnnnnnnnnnaagcttggcgtggatccgatatcaactagatcttgagacaaatggcagtattcatccacaattttaaaagaaaaggggggattggggggtacagtgcaggggaaagaatagtagacataatagcaacagacatacaaactaaag

SEQ ID NO: 13716 - DNA, 301 bp, Artificial Sequence
  Cdkn2a.1_Wrn.3
  crRNA array
  misc_feature (148)..(157): n is a, c, g, or t
cttggctttatatatcttgtggaaaggacgaaacaccgtaatttctactaagtgtagatcaatcacgggagggagcagataatttctactaagtgtagatctgcagcaggccaccgcaattaatttctactaagtgtagatttttttnnnnnnnnnnaagcttggcgtggatccgatatcaactagatcttgagacaaatggcagtattcatccacaattttaaaagaaaaggggggattggggggtacagtgcaggggaaagaatagtagacataatagcaacagacatacaaactaaag

SEQ ID NO: 13717 - DNA, 301 bp, Artificial Sequence
  Cdkn2a.1_Wrn.4
  crRNA array
  misc_feature (148)..(157): n is a, c, g, or t
cttggctttatatatcttgtggaaaggacgaaacaccgtaatttctactaagtgtagatcaatcacgggagggagcagataatttctactaagtgtagattcgaaggacaatagatgatgtaatttctactaagtgtagatttttttnnnnnnnnnnaagcttggcgtggatccgatatcaactagatcttgagacaaatggcagtattcatccacaattttaaaagaaaaggggggattggggggtacagtgcaggggaaagaatagtagacataatagcaacagacatacaaactaaag

SEQ ID NO: 13718 - DNA, 301 bp, Artificial Sequence
  Cdkn2a.2_Wrn.1
  crRNA array
  misc_feature (148)..(157): n is a, c, g, or t
cttggctttatatatcttgtggaaaggacgaaacaccgtaatttctactaagtgtagatgcccaacgccccgaactctttaatttctactaagtgtagatgcaaaccactcgggtaattttaatttctactaagtgtagatttttttnnnnnnnnnnaagcttggcgtggatccgatatcaactagatcttgagacaaatggcagtattcatccacaattttaaaagaaaaggggggattggggggtacagtgcaggggaaagaatagtagacataatagcaacagacatacaaactaaag

SEQ ID NO: 13719 - DNA, 301 bp, Artificial Sequence
  Cdkn2a.2_Wrn.2
  crRNA array
  misc_feature (148)..(157): n is a, c, g, or t
cttggctttatatatcttgtggaaaggacgaaacaccgtaatttctactaagtgtagatgcccaacgccccgaactctttaatttctactaagtgtagatgccatgtccagcagaacctttaatttctactaagtgtagatttttttnnnnnnnnnnaagcttggcgtggatccgatatcaactagatcttgagacaaatggcagtattcatccacaattttaaaagaaaaggggggattggggggtacagtgcaggggaaagaatagtagacataatagcaacagacatacaaactaaag

SEQ ID NO: 13720 - DNA, 301 bp, Artificial Sequence
  Cdkn2a.2_Wrn.3
  crRNA array
  misc_feature (148)..(157): n is a, c, g, or t
cttggctttatatatcttgtggaaaggacgaaacaccgtaatttctactaagtgtagatgcccaacgccccgaactctttaatttctactaagtgtagatctgcagcaggccaccgcaattaatttctactaagtgtagatttttttnnnnnnnnnnaagcttggcgtggatccgatatcaactagatcttgagacaaatggcagtattcatccacaattttaaaagaaaaggggggattggggggtacagtgcaggggaaagaatagtagacataatagcaacagacatacaaactaaag

SEQ ID NO: 13721 - DNA, 301 bp, Artificial Sequence
  Cdkn2a.2_Wrn.4
  crRNA array
  misc_feature (148)..(157): n is a, c, g, or t
cttggctttatatatcttgtggaaaggacgaaacaccgtaatttctactaagtgtagatgcccaacgccccgaactctttaatttctactaagtgtagattcgaaggacaatagatgatgtaatttctactaagtgtagatttttttnnnnnnnnnnaagcttggcgtggatccgatatcaactagatcttgagacaaatggcagtattcatccacaattttaaaagaaaaggggggattggggggtacagtgcaggggaaagaatagtagacataatagcaacagacatacaaactaaag

SEQ ID NO: 13722 - DNA, 301 bp, Artificial Sequence
  Cdkn2a.3_Wrn.1
  crRNA array
  misc_feature (148)..(157): n is a, c, g, or t
cttggctttatatatcttgtggaaaggacgaaacaccgtaatttctactaagtgtagattgtaccgctgggaacgtcgctaatttctactaagtgtagatgcaaaccactcgggtaattttaatttctactaagtgtagatttttttnnnnnnnnnnaagcttggcgtggatccgatatcaactagatcttgagacaaatggcagtattcatccacaattttaaaagaaaaggggggattggggggtacagtgcaggggaaagaatagtagacataatagcaacagacatacaaactaaag

SEQ ID NO: 13723 - DNA, 301 bp, Artificial Sequence
  Cdkn2a.3_Wrn.2
  crRNA array
  misc_feature (148)..(157): n is a, c, g, or t
cttggctttatatatcttgtggaaaggacgaaacaccgtaatttctactaagtgtagattgtaccgctgggaacgtcgctaatttctactaagtgtagatgccatgtccagcagaacctttaatttctactaagtgtagatttttttnnnnnnnnnnaagcttggcgtggatccgatatcaactagatcttgagacaaatggcagtattcatccacaattttaaaagaaaaggggggattggggggtacagtgcaggggaaagaatagtagacataatagcaacagacatacaaactaaag

SEQ ID NO: 13724 - DNA, 301 bp, Artificial Sequence
  Cdkn2a.3_Wrn.3
  crRNA array
  misc_feature (148)..(157): n is a, c, g, or t
cttggctttatatatcttgtggaaaggacgaaacaccgtaatttctactaagtgtagattgtaccgctgggaacgtcgctaatttctactaagtgtagatctgcagcaggccaccgcaattaatttctactaagtgtagatttttttnnnnnnnnnnaagcttggcgtggatccgatatcaactagatcttgagacaaatggcagtattcatccacaattttaaaagaaaaggggggattggggggtacagtgcaggggaaagaatagtagacataatagcaacagacatacaaactaaag

SEQ ID NO: 13725 - DNA, 301 bp, Artificial Sequence
  Cdkn2a.3_Wrn.4
  crRNA array
  misc_feature (148)..(157): n is a, c, g, or t
cttggctttatatatcttgtggaaaggacgaaacaccgtaatttctactaagtgtagattgtaccgctgggaacgtcgctaatttctactaagtgtagattcgaaggacaatagatgatgtaatttctactaagtgtagatttttttnnnnnnnnnnaagcttggcgtggatccgatatcaactagatcttgagacaaatggcagtattcatccacaattttaaaagaaaaggggggattggggggtacagtgcaggggaaagaatagtagacataatagcaacagacatacaaactaaag

SEQ ID NO: 13726 - DNA, 301 bp, Artificial Sequence
  Cdkn2a.4_Wrn.1
  crRNA array
  misc_feature (148)..(157): n is a, c, g, or t
cttggctttatatatcttgtggaaaggacgaaacaccgtaatttctactaagtgtagataagccacatgctagacacgctaatttctactaagtgtagatgcaaaccactcgggtaattttaatttctactaagtgtagatttttttnnnnnnnnnnaagcttggcgtggatccgatatcaactagatcttgagacaaatggcagtattcatccacaattttaaaagaaaaggggggattggggggtacagtgcaggggaaagaatagtagacataatagcaacagacatacaaactaaag

SEQ ID NO: 13727 - DNA, 301 bp, Artificial Sequence
  Cdkn2a.4_Wrn.2
  crRNA array
  misc_feature (148)..(157): n is a, c, g, or t
cttggctttatatatcttgtggaaaggacgaaacaccgtaatttctactaagtgtagataagccacatgctagacacgctaatttctactaagtgtagatgccatgtccagcagaacctttaatttctactaagtgtagatttttttnnnnnnnnnnaagcttggcgtggatccgatatcaactagatcttgagacaaatggcagtattcatccacaattttaaaagaaaaggggggattggggggtacagtgcaggggaaagaatagtagacataatagcaacagacatacaaactaaag

SEQ ID NO: 13728 - DNA, 301 bp, Artificial Sequence
  Cdkn2a.4_Wrn.3
  crRNA array
  misc_feature (148)..(157): n is a, c, g, or t
cttggctttatatatcttgtggaaaggacgaaacaccgtaatttctactaagtgtagataagccacatgctagacacgctaatttctactaagtgtagatctgcagcaggccaccgcaattaatttctactaagtgtagatttttttnnnnnnnnnnaagcttggcgtggatccgatatcaactagatcttgagacaaatggcagtattcatccacaattttaaaagaaaaggggggattggggggtacagtgcaggggaaagaatagtagacataatagcaacagacatacaaactaaag

SEQ ID NO: 13729 - DNA, 301 bp, Artificial Sequence
  Cdkn2a.4_Wrn.4
  crRNA array
  misc_feature (148)..(157): n is a, c, g, or t
cttggctttatatatcttgtggaaaggacgaaacaccgtaatttctactaagtgtagataagccacatgctagacacgctaatttctactaagtgtagattcgaaggacaatagatgatgtaatttctactaagtgtagatttttttnnnnnnnnnnaagcttggcgtggatccgatatcaactagatcttgagacaaatggcagtattcatccacaattttaaaagaaaaggggggattggggggtacagtgcaggggaaagaatagtagacataatagcaacagacatacaaactaaag

SEQ ID NO: 13730 - DNA, 301 bp, Artificial Sequence
  Cdkn2a.1_Brca2.1
  crRNA array
  misc_feature (148)..(157): n is a, c, g, or t
cttggctttatatatcttgtggaaaggacgaaacaccgtaatttctactaagtgtagatcaatcacgggagggagcagataatttctactaagtgtagatctaagcgtagaaccagaaattaatttctactaagtgtagatttttttnnnnnnnnnnaagcttggcgtggatccgatatcaactagatcttgagacaaatggcagtattcatccacaattttaaaagaaaaggggggattggggggtacagtgcaggggaaagaatagtagacataatagcaacagacatacaaactaaag

SEQ ID NO: 13731 - DNA, 301 bp, Artificial Sequence
  Cdkn2a.1_Brca2.2
  crRNA array
  misc_feature (148)..(157): n is a, c, g, or t
cttggctttatatatcttgtggaaaggacgaaacaccgtaatttctactaagtgtagatcaatcacgggagggagcagataatttctactaagtgtagatgatccaggtgtaacaagccataatttctactaagtgtagatttttttnnnnnnnnnnaagcttggcgtggatccgatatcaactagatcttgagacaaatggcagtattcatccacaattttaaaagaaaaggggggattggggggtacagtgcaggggaaagaatagtagacataatagcaacagacatacaaactaaag

SEQ ID NO: 13732 - DNA, 301 bp, Artificial Sequence
  Cdkn2a.1_Brca2.3
  crRNA array
  misc_feature (148)..(157): n is a, c, g, or t
cttggctttatatatcttgtggaaaggacgaaacaccgtaatttctactaagtgtagatcaatcacgggagggagcagataatttctactaagtgtagattgaatataaactgggccacttaatttctactaagtgtagatttttttnnnnnnnnnnaagcttggcgtggatccgatatcaactagatcttgagacaaatggcagtattcatccacaattttaaaagaaaaggggggattggggggtacagtgcaggggaaagaatagtagacataatagcaacagacatacaaactaaag

SEQ ID NO: 13733 - DNA, 301 bp, Artificial Sequence
  Cdkn2a.1_Brca2.4
  crRNA array
  misc_feature (148)..(157): n is a, c, g, or t
cttggctttatatatcttgtggaaaggacgaaacaccgtaatttctactaagtgtagatcaatcacgggagggagcagataatttctactaagtgtagatgaaacgccgtatatatagagtaatttctactaagtgtagatttttttnnnnnnnnnnaagcttggcgtggatccgatatcaactagatcttgagacaaatggcagtattcatccacaattttaaaagaaaaggggggattggggggtacagtgcaggggaaagaatagtagacataatagcaacagacatacaaactaaag

SEQ ID NO: 13734 - DNA, 301 bp, Artificial Sequence
  Cdkn2a.2_Brca2.1
  crRNA array
  misc_feature (148)..(157): n is a, c, g, or t
cttggctttatatatcttgtggaaaggacgaaacaccgtaatttctactaagtgtagatgcccaacgccccgaactctttaatttctactaagtgtagatctaagcgtagaaccagaaattaatttctactaagtgtagatttttttnnnnnnnnnnaagcttggcgtggatccgatatcaactagatcttgagacaaatggcagtattcatccacaattttaaaagaaaaggggggattggggggtacagtgcaggggaaagaatagtagacataatagcaacagacatacaaactaaag

SEQ ID NO: 13735 - DNA, 301 bp, Artificial Sequence
  Cdkn2a.2_Brca2.2
  crRNA array
  misc_feature (148)..(157): n is a, c, g, or t
cttggctttatatatcttgtggaaaggacgaaacaccgtaatttctactaagtgtagatgcccaacgccccgaactctttaatttctactaagtgtagatgatccaggtgtaacaagccataatttctactaagtgtagatttttttnnnnnnnnnnaagcttggcgtggatccgatatcaactagatcttgagacaaatggcagtattcatccacaattttaaaagaaaaggggggattggggggtacagtgcaggggaaagaatagtagacataatagcaacagacatacaaactaaag

SEQ ID NO: 13736 - DNA, 301 bp, Artificial Sequence
  Cdkn2a.2_Brca2.3
  crRNA array
  misc_feature (148)..(157): n is a, c, g, or t
cttggctttatatatcttgtggaaaggacgaaacaccgtaatttctactaagtgtagatgcccaacgccccgaactctttaatttctactaagtgtagattgaatataaactgggccacttaatttctactaagtgtagatttttttnnnnnnnnnnaagcttggcgtggatccgatatcaactagatcttgagacaaatggcagtattcatccacaattttaaaagaaaaggggggattggggggtacagtgcaggggaaagaatagtagacataatagcaacagacatacaaactaaag

SEQ ID NO: 13737 - DNA, 301 bp, Artificial Sequence
  Cdkn2a.2_Brca2.4
  crRNA array
  misc_feature (148)..(157): n is a, c, g, or t
cttggctttatatatcttgtggaaaggacgaaacaccgtaatttctactaagtgtagatgcccaacgccccgaactctttaatttctactaagtgtagatgaaacgccgtatatatagagtaatttctactaagtgtagatttttttnnnnnnnnnnaagcttggcgtggatccgatatcaactagatcttgagacaaatggcagtattcatccacaattttaaaagaaaaggggggattggggggtacagtgcaggggaaagaatagtagacataatagcaacagacatacaaactaaag

SEQ ID NO: 13738 - DNA, 301 bp, Artificial Sequence
  Cdkn2a.3_Brca2.1
  crRNA array
  misc_feature (148)..(157): n is a, c, g, or t
cttggctttatatatcttgtggaaaggacgaaacaccgtaatttctactaagtgtagattgtaccgctgggaacgtcgctaatttctactaagtgtagatctaagcgtagaaccagaaattaatttctactaagtgtagatttttttnnnnnnnnnnaagcttggcgtggatccgatatcaactagatcttgagacaaatggcagtattcatccacaattttaaaagaaaaggggggattggggggtacagtgcaggggaaagaatagtagacataatagcaacagacatacaaactaaag

SEQ ID NO: 13739 - DNA, 301 bp, Artificial Sequence
  Cdkn2a.3_Brca2.2
  crRNA array
  misc_feature (148)..(157): n is a, c, g, or t
cttggctttatatatcttgtggaaaggacgaaacaccgtaatttctactaagtgtagattgtaccgctgggaacgtcgctaatttctactaagtgtagatgatccaggtgtaacaagccataatttctactaagtgtagatttttttnnnnnnnnnnaagcttggcgtggatccgatatcaactagatcttgagacaaatggcagtattcatccacaattttaaaagaaaaggggggattggggggtacagtgcaggggaaagaatagtagacataatagcaacagacatacaaactaaag

SEQ ID NO: 13740 - DNA, 301 bp, Artificial Sequence
  Cdkn2a.3_Brca2.3
  crRNA array
  misc_feature (148)..(157): n is a, c, g, or t
cttggctttatatatcttgtggaaaggacgaaacaccgtaatttctactaagtgtagattgtaccgctgggaacgtcgctaatttctactaagtgtagattgaatataaactgggccacttaatttctactaagtgtagatttttttnnnnnnnnnnaagcttggcgtggatccgatatcaactagatcttgagacaaatggcagtattcatccacaattttaaaagaaaaggggggattggggggtacagtgcaggggaaagaatagtagacataatagcaacagacatacaaactaaag

SEQ ID NO: 13741 - DNA, 301 bp, Artificial Sequence
  Cdkn2a.3_Brca2.4
  crRNA array
  misc_feature (148)..(157): n is a, c, g, or t
cttggctttatatatcttgtggaaaggacgaaacaccgtaatttctactaagtgtagattgtaccgctgggaacgtcgctaatttctactaagtgtagatgaaacgccgtatatatagagtaatttctactaagtgtagatttttttnnnnnnnnnnaagcttggcgtggatccgatatcaactagatcttgagacaaatggcagtattcatccacaattttaaaagaaaaggggggattggggggtacagtgcaggggaaagaatagtagacataatagcaacagacatacaaactaaag

SEQ ID NO: 13742 - DNA, 301 bp, Artificial Sequence
  Cdkn2a.4_Brca2.1
  crRNA array
  misc_feature (148)..(157): n is a, c, g, or t
cttggctttatatatcttgtggaaaggacgaaacaccgtaatttctactaagtgtagataagccacatgctagacacgctaatttctactaagtgtagatctaagcgtagaaccagaaattaatttctactaagtgtagatttttttnnnnnnnnnnaagcttggcgtggatccgatatcaactagatcttgagacaaatggcagtattcatccacaattttaaaagaaaaggggggattggggggtacagtgcaggggaaagaatagtagacataatagcaacagacatacaaactaaag

SEQ ID NO: 13743 - DNA, 301 bp, Artificial Sequence
  Cdkn2a.4_Brca2.2
  crRNA array
  misc_feature (148)..(157): n is a, c, g, or t
cttggctttatatatcttgtggaaaggacgaaacaccgtaatttctactaagtgtagataagccacatgctagacacgctaatttctactaagtgtagatgatccaggtgtaacaagccataatttctactaagtgtagatttttttnnnnnnnnnnaagcttggcgtggatccgatatcaactagatcttgagacaaatggcagtattcatccacaattttaaaagaaaaggggggattggggggtacagtgcaggggaaagaatagtagacataatagcaacagacatacaaactaaag

SEQ ID NO: 13744 - DNA, 301 bp, Artificial Sequence
  Cdkn2a.4_Brca2.3
  crRNA array
  misc_feature (148)..(157): n is a, c, g, or t
cttggctttatatatcttgtggaaaggacgaaacaccgtaatttctactaagtgtagataagccacatgctagacacgctaatttctactaagtgtagattgaatataaactgggccacttaatttctactaagtgtagatttttttnnnnnnnnnnaagcttggcgtggatccgatatcaactagatcttgagacaaatggcagtattcatccacaattttaaaagaaaaggggggattggggggtacagtgcaggggaaagaatagtagacataatagcaacagacatacaaactaaag

SEQ ID NO: 13745 - DNA, 301 bp, Artificial Sequence
  Cdkn2a.4_Brca2.4
  crRNA array
  misc_feature (148)..(157): n is a, c, g, or t
cttggctttatatatcttgtggaaaggacgaaacaccgtaatttctactaagtgtagataagccacatgctagacacgctaatttctactaagtgtagatgaaacgccgtatatatagagtaatttctactaagtgtagatttttttnnnnnnnnnnaagcttggcgtggatccgatatcaactagatcttgagacaaatggcagtattcatccacaattttaaaagaaaaggggggattggggggtacagtgcaggggaaagaatagtagacataatagcaacagacatacaaactaaag

SEQ ID NO: 13746 - DNA, 301 bp, Artificial Sequence
  Cdkn2a.1_Apc.1
  crRNA array
  misc_feature (148)..(157): n is a, c, g, or t
cttggctttatatatcttgtggaaaggacgaaacaccgtaatttctactaagtgtagatcaatcacgggagggagcagataatttctactaagtgtagatgtgatccacacgtgtagctgtaatttctactaagtgtagatttttttnnnnnnnnnnaagcttggcgtggatccgatatcaactagatcttgagacaaatggcagtattcatccacaattttaaaagaaaaggggggattggggggtacagtgcaggggaaagaatagtagacataatagcaacagacatacaaactaaag

SEQ ID NO: 13747 - DNA, 301 bp, Artificial Sequence
  Cdkn2a.1_Apc.2
  crRNA array
  misc_feature (148)..(157): n is a, c, g, or t
cttggctttatatatcttgtggaaaggacgaaacaccgtaatttctactaagtgtagatcaatcacgggagggagcagataatttctactaagtgtagatcatctgctcgccaagacaaataatttctactaagtgtagatttttttnnnnnnnnnnaagcttggcgtggatccgatatcaactagatcttgagacaaatggcagtattcatccacaattttaaaagaaaaggggggattggggggtacagtgcaggggaaagaatagtagacataatagcaacagacatacaaactaaag

SEQ ID NO: 13748 - DNA, 301 bp, Artificial Sequence
  Cdkn2a.1_Apc.3
  crRNA array
  misc_feature (148)..(157): n is a, c, g, or t
cttggctttatatatcttgtggaaaggacgaaacaccgtaatttctactaagtgtagatcaatcacgggagggagcagataatttctactaagtgtagatacgccaatcgacatgatgattaatttctactaagtgtagatttttttnnnnnnnnnnaagcttggcgtggatccgatatcaactagatcttgagacaaatggcagtattcatccacaattttaaaagaaaaggggggattggggggtacagtgcaggggaaagaatagtagacataatagcaacagacatacaaactaaag

SEQ ID NO: 13749 - DNA, 301 bp, Artificial Sequence
  Cdkn2a.1_Apc.4
  crRNA array
  misc_feature (148)..(157): n is a, c, g, or t
cttggctttatatatcttgtggaaaggacgaaacaccgtaatttctactaagtgtagatcaatcacgggagggagcagataatttctactaagtgtagatcaccaggggatgatgtgccctaatttctactaagtgtagatttttttnnnnnnnnnnaagcttggcgtggatccgatatcaactagatcttgagacaaatggcagtattcatccacaattttaaaagaaaaggggggattggggggtacagtgcaggggaaagaatagtagacataatagcaacagacatacaaactaaag

SEQ ID NO: 13750 - DNA, 301 bp, Artificial Sequence
  Cdkn2a.2_Apc.1
  crRNA array
  misc_feature (148)..(157): n is a, c, g, or t
cttggctttatatatcttgtggaaaggacgaaacaccgtaatttctactaagtgtagatgcccaacgccccgaactctttaatttctactaagtgtagatgtgatccacacgtgtagctgtaatttctactaagtgtagatttttttnnnnnnnnnnaagcttggcgtggatccgatatcaactagatcttgagacaaatggcagtattcatccacaattttaaaagaaaaggggggattggggggtacagtgcaggggaaagaatagtagacataatagcaacagacatacaaactaaag

SEQ ID NO: 13751 - DNA, 301 bp, Artificial Sequence
  Cdkn2a.2_Apc.2
  crRNA array
  misc_feature (148)..(157): n is a, c, g, or t
cttggctttatatatcttgtggaaaggacgaaacaccgtaatttctactaagtgtagatgcccaacgccccgaactctttaatttctactaagtgtagatcatctgctcgccaagacaaataatttctactaagtgtagatttttttnnnnnnnnnnaagcttggcgtggatccgatatcaactagatcttgagacaaatggcagtattcatccacaattttaaaagaaaaggggggattggggggtacagtgcaggggaaagaatagtagacataatagcaacagacatacaaactaaag

SEQ ID NO: 13752 - DNA, 301 bp, Artificial Sequence
  Cdkn2a.2_Apc.3
  crRNA array
  misc_feature (148)..(157): n is a, c, g, or t
cttggctttatatatcttgtggaaaggacgaaacaccgtaatttctactaagtgtagatgcccaacgccccgaactctttaatttctactaagtgtagatacgccaatcgacatgatgattaatttctactaagtgtagatttttttnnnnnnnnnnaagcttggcgtggatccgatatcaactagatcttgagacaaatggcagtattcatccacaattttaaaagaaaaggggggattggggggtacagtgcaggggaaagaatagtagacataatagcaacagacatacaaactaaag

SEQ ID NO: 13753 - DNA, 301 bp, Artificial Sequence
  Cdkn2a.2_Apc.4
  crRNA array
  misc_feature (148)..(157): n is a, c, g, or t
cttggctttatatatcttgtggaaaggacgaaacaccgtaatttctactaagtgtagatgcccaacgccccgaactctttaatttctactaagtgtagatcaccaggggatgatgtgccctaatttctactaagtgtagatttttttnnnnnnnnnnaagcttggcgtggatccgatatcaactagatcttgagacaaatggcagtattcatccacaattttaaaagaaaaggggggattggggggtacagtgcaggggaaagaatagtagacataatagcaacagacatacaaactaaag

SEQ ID NO: 13754 - DNA, 301 bp, Artificial Sequence
  Cdkn2a.3_Apc.1
  crRNA array
  misc_feature (148)..(157): n is a, c, g, or t
cttggctttatatatcttgtggaaaggacgaaacaccgtaatttctactaagtgtagattgtaccgctgggaacgtcgctaatttctactaagtgtagatgtgatccacacgtgtagctgtaatttctactaagtgtagatttttttnnnnnnnnnnaagcttggcgtggatccgatatcaactagatcttgagacaaatggcagtattcatccacaattttaaaagaaaaggggggattggggggtacagtgcaggggaaagaatagtagacataatagcaacagacatacaaactaaag

SEQ ID NO: 13755 - DNA, 301 bp, Artificial Sequence
  Cdkn2a.3_Apc.2
  crRNA array
  misc_feature (148)..(157): n is a, c, g, or t
cttggctttatatatcttgtggaaaggacgaaacaccgtaatttctactaagtgtagattgtaccgctgggaacgtcgctaatttctactaagtgtagatcatctgctcgccaagacaaataatttctactaagtgtagatttttttnnnnnnnnnnaagcttggcgtggatccgatatcaactagatcttgagacaaatggcagtattcatccacaattttaaaagaaaaggggggattggggggtacagtgcaggggaaagaatagtagacataatagcaacagacatacaaactaaag

SEQ ID NO: 13756 - DNA, 301 bp, Artificial Sequence
  Cdkn2a.3_Apc.3
  crRNA array
  misc_feature (148)..(157): n is a, c, g, or t
cttggctttatatatcttgtggaaaggacgaaacaccgtaatttctactaagtgtagattgtaccgctgggaacgtcgctaatttctactaagtgtagatacgccaatcgacatgatgattaatttctactaagtgtagatttttttnnnnnnnnnnaagcttggcgtggatccgatatcaactagatcttgagacaaatggcagtattcatccacaattttaaaagaaaaggggggattggggggtacagtgcaggggaaagaatagtagacataatagcaacagacatacaaactaaag

SEQ ID NO: 13757 - DNA, 301 bp, Artificial Sequence
  Cdkn2a.3_Apc.4
  crRNA array
  misc_feature (148)..(157): n is a, c, g, or t
cttggctttatatatcttgtggaaaggacgaaacaccgtaatttctactaagtgtagattgtaccgctgggaacgtcgctaatttctactaagtgtagatcaccaggggatgatgtgccctaatttctactaagtgtagatttttttnnnnnnnnnnaagcttggcgtggatccgatatcaactagatcttgagacaaatggcagtattcatccacaattttaaaagaaaaggggggattggggggtacagtgcaggggaaagaatagtagacataatagcaacagacatacaaactaaag

SEQ ID NO: 13758 - DNA, 301 bp, Artificial Sequence
  Cdkn2a.4_Apc.1
  crRNA array
  misc_feature (148)..(157): n is a, c, g, or t
cttggctttatatatcttgtggaaaggacgaaacaccgtaatttctactaagtgtagataagccacatgctagacacgctaatttctactaagtgtagatgtgatccacacgtgtagctgtaatttctactaagtgtagatttttttnnnnnnnnnnaagcttggcgtggatccgatatcaactagatcttgagacaaatggcagtattcatccacaattttaaaagaaaaggggggattggggggtacagtgcaggggaaagaatagtagacataatagcaacagacatacaaactaaag

SEQ ID NO: 13759 - DNA, 301 bp, Artificial Sequence
  Cdkn2a.4_Apc.2
  crRNA array
  misc_feature (148)..(157): n is a, c, g, or t
cttggctttatatatcttgtggaaaggacgaaacaccgtaatttctactaagtgtagataagccacatgctagacacgctaatttctactaagtgtagatcatctgctcgccaagacaaataatttctactaagtgtagatttttttnnnnnnnnnnaagcttggcgtggatccgatatcaactagatcttgagacaaatggcagtattcatccacaattttaaaagaaaaggggggattggggggtacagtgcaggggaaagaatagtagacataatagcaacagacatacaaactaaag

SEQ ID NO: 13760 - DNA, 301 bp, Artificial Sequence
  Cdkn2a.4_Apc.3
  crRNA array
  misc_feature (148)..(157): n is a, c, g, or t
cttggctttatatatcttgtggaaaggacgaaacaccgtaatttctactaagtgtagataagccacatgctagacacgctaatttctactaagtgtagatacgccaatcgacatgatgattaatttctactaagtgtagatttttttnnnnnnnnnnaagcttggcgtggatccgatatcaactagatcttgagacaaatggcagtattcatccacaattttaaaagaaaaggggggattggggggtacagtgcaggggaaagaatagtagacataatagcaacagacatacaaactaaag

SEQ ID NO: 13761 - DNA, 301 bp, Artificial Sequence
  Cdkn2a.4_Apc.4
  crRNA array
  misc_feature (148)..(157): n is a, c, g, or t
cttggctttatatatcttgtggaaaggacgaaacaccgtaatttctactaagtgtagataagccacatgctagacacgctaatttctactaagtgtagatcaccaggggatgatgtgccctaatttctactaagtgtagatttttttnnnnnnnnnnaagcttggcgtggatccgatatcaactagatcttgagacaaatggcagtattcatccacaattttaaaagaaaaggggggattggggggtacagtgcaggggaaagaatagtagacataatagcaacagacatacaaactaaag

SEQ ID NO: 13762 - DNA, 301 bp, Artificial Sequence
  Cdkn2a.1_Fanca.1
  crRNA array
  misc_feature (148)..(157): n is a, c, g, or t
cttggctttatatatcttgtggaaaggacgaaacaccgtaatttctactaagtgtagatcaatcacgggagggagcagataatttctactaagtgtagatggaggccccggggcccaccataatttctactaagtgtagatttttttnnnnnnnnnnaagcttggcgtggatccgatatcaactagatcttgagacaaatggcagtattcatccacaattttaaaagaaaaggggggattggggggtacagtgcaggggaaagaatagtagacataatagcaacagacatacaaactaaag

SEQ ID NO: 13763 - DNA, 301 bp, Artificial Sequence
  Cdkn2a.1_Fanca.2
  crRNA array
  misc_feature (148)..(157): n is a, c, g, or t
cttggctttatatatcttgtggaaaggacgaaacaccgtaatttctactaagtgtagatcaatcacgggagggagcagataatttctactaagtgtagatagagctaccacctagacagctaatttctactaagtgtagatttttttnnnnnnnnnnaagcttggcgtggatccgatatcaactagatcttgagacaaatggcagtattcatccacaattttaaaagaaaaggggggattggggggtacagtgcaggggaaagaatagtagacataatagcaacagacatacaaactaaag

SEQ ID NO: 13764 - DNA, 301 bp, Artificial Sequence
  Cdkn2a.1_Fanca.3
  crRNA array
  misc_feature (148)..(157): n is a, c, g, or t
cttggctttatatatcttgtggaaaggacgaaacaccgtaatttctactaagtgtagatcaatcacgggagggagcagataatttctactaagtgtagataccaactgctgtgcctcgggtaatttctactaagtgtagatttttttnnnnnnnnnnaagcttggcgtggatccgatatcaactagatcttgagacaaatggcagtattcatccacaattttaaaagaaaaggggggattggggggtacagtgcaggggaaagaatagtagacataatagcaacagacatacaaactaaag

SEQ ID NO: 13765 - DNA, 301 bp, Artificial Sequence
  Cdkn2a.1_Fanca.4
  crRNA array
  misc_feature (148)..(157): n is a, c, g, or t
cttggctttatatatcttgtggaaaggacgaaacaccgtaatttctactaagtgtagatcaatcacgggagggagcagataatttctactaagtgtagatcacccacccctggtgccaagtaatttctactaagtgtagatttttttnnnnnnnnnnaagcttggcgtggatccgatatcaactagatcttgagacaaatggcagtattcatccacaattttaaaagaaaaggggggattggggggtacagtgcaggggaaagaatagtagacataatagcaacagacatacaaactaaag

SEQ ID NO: 13766 - DNA, 301 bp, Artificial Sequence
  Cdkn2a.2_Fanca.1
  crRNA array
  misc_feature (148)..(157): n is a, c, g, or t
cttggctttatatatcttgtggaaaggacgaaacaccgtaatttctactaagtgtagatgcccaacgccccgaactctttaatttctactaagtgtagatggaggccccggggcccaccataatttctactaagtgtagatttttttnnnnnnnnnnaagcttggcgtggatccgatatcaactagatcttgagacaaatggcagtattcatccacaattttaaaagaaaaggggggattggggggtacagtgcaggggaaagaatagtagacataatagcaacagacatacaaactaaag

SEQ ID NO: 13767 - DNA, 301 bp, Artificial Sequence
  Cdkn2a.2_Fanca.2
  crRNA array
  misc_feature (148)..(157): n is a, c, g, or t
cttggctttatatatcttgtggaaaggacgaaacaccgtaatttctactaagtgtagatgcccaacgccccgaactctttaatttctactaagtgtagatagagctaccacctagacagctaatttctactaagtgtagatttttttnnnnnnnnnnaagcttggcgtggatccgatatcaactagatcttgagacaaatggcagtattcatccacaattttaaaagaaaaggggggattggggggtacagtgcaggggaaagaatagtagacataatagcaacagacatacaaactaaag

SEQ ID NO: 13768 - DNA, 301 bp, Artificial Sequence
  Cdkn2a.2_Fanca.3
  crRNA array
  misc_feature (148)..(157): n is a, c, g, or t
cttggctttatatatcttgtggaaaggacgaaacaccgtaatttctactaagtgtagatgcccaacgccccgaactctttaatttctactaagtgtagataccaactgctgtgcctcgggtaatttctactaagtgtagatttttttnnnnnnnnnnaagcttggcgtggatccgatatcaactagatcttgagacaaatggcagtattcatccacaattttaaaagaaaaggggggattggggggtacagtgcaggggaaagaatagtagacataatagcaacagacatacaaactaaag

SEQ ID NO: 13769 - DNA, 301 bp, Artificial Sequence
  Cdkn2a.2_Fanca.4
  crRNA array
  misc_feature (148)..(157): n is a, c, g, or t
cttggctttatatatcttgtggaaaggacgaaacaccgtaatttctactaagtgtagatgcccaacgccccgaactctttaatttctactaagtgtagatcacccacccctggtgccaagtaatttctactaagtgtagatttttttnnnnnnnnnnaagcttggcgtggatccgatatcaactagatcttgagacaaatggcagtattcatccacaattttaaaagaaaaggggggattggggggtacagtgcaggggaaagaatagtagacataatagcaacagacatacaaactaaag

SEQ ID NO: 13770 - DNA, 301 bp, Artificial Sequence
  Cdkn2a.3_Fanca.1
  crRNA array
  misc_feature (148)..(157): n is a, c, g, or t
cttggctttatatatcttgtggaaaggacgaaacaccgtaatttctactaagtgtagattgtaccgctgggaacgtcgctaatttctactaagtgtagatggaggccccggggcccaccataatttctactaagtgtagatttttttnnnnnnnnnnaagcttggcgtggatccgatatcaactagatcttgagacaaatggcagtattcatccacaattttaaaagaaaaggggggattggggggtacagtgcaggggaaagaatagtagacataatagcaacagacatacaaactaaag

SEQ ID NO: 13771 - DNA, 301 bp, Artificial Sequence
  Cdkn2a.3_Fanca.2
  crRNA array
  misc_feature (148)..(157): n is a, c, g, or t
cttggctttatatatcttgtggaaaggacgaaacaccgtaatttctactaagtgtagattgtaccgctgggaacgtcgctaatttctactaagtgtagatagagctaccacctagacagctaatttctactaagtgtagatttttttnnnnnnnnnnaagcttggcgtggatccgatatcaactagatcttgagacaaatggcagtattcatccacaattttaaaagaaaaggggggattggggggtacagtgcaggggaaagaatagtagacataatagcaacagacatacaaactaaag

SEQ ID NO: 13772 - DNA, 301 bp, Artificial Sequence
  Cdkn2a.3_Fanca.3
  crRNA array
  misc_feature (148)..(157): n is a, c, g, or t
cttggctttatatatcttgtggaaaggacgaaacaccgtaatttctactaagtgtagattgtaccgctgggaacgtcgctaatttctactaagtgtagataccaactgctgtgcctcgggtaatttctactaagtgtagatttttttnnnnnnnnnnaagcttggcgtggatccgatatcaactagatcttgagacaaatggcagtattcatccacaattttaaaagaaaaggggggattggggggtacagtgcaggggaaagaatagtagacataatagcaacagacatacaaactaaag

SEQ ID NO: 13773 - DNA, 301 bp, Artificial Sequence
  Cdkn2a.3_Fanca.4
  crRNA array
  misc_feature (148)..(157): n is a, c, g, or t
cttggctttatatatcttgtggaaaggacgaaacaccgtaatttctactaagtgtagattgtaccgctgggaacgtcgctaatttctactaagtgtagatcacccacccctggtgccaagtaatttctactaagtgtagatttttttnnnnnnnnnnaagcttggcgtggatccgatatcaactagatcttgagacaaatggcagtattcatccacaattttaaaagaaaaggggggattggggggtacagtgcaggggaaagaatagtagacataatagcaacagacatacaaactaaag

SEQ ID NO: 13774 - DNA, 301 bp, Artificial Sequence
  Cdkn2a.4_Fanca.1
  crRNA array
  misc_feature (148)..(157): n is a, c, g, or t
cttggctttatatatcttgtggaaaggacgaaacaccgtaatttctactaagtgtagataagccacatgctagacacgctaatttctactaagtgtagatggaggccccggggcccaccataatttctactaagtgtagatttttttnnnnnnnnnnaagcttggcgtggatccgatatcaactagatcttgagacaaatggcagtattcatccacaattttaaaagaaaaggggggattggggggtacagtgcaggggaaagaatagtagacataatagcaacagacatacaaactaaag

SEQ ID NO: 13775 - DNA, 301 bp, Artificial Sequence
  Cdkn2a.4_Fanca.2
  crRNA array
  misc_feature (148)..(157): n is a, c, g, or t
cttggctttatatatcttgtggaaaggacgaaacaccgtaatttctactaagtgtagataagccacatgctagacacgctaatttctactaagtgtagatagagctaccacctagacagctaatttctactaagtgtagatttttttnnnnnnnnnnaagcttggcgtggatccgatatcaactagatcttgagacaaatggcagtattcatccacaattttaaaagaaaaggggggattggggggtacagtgcaggggaaagaatagtagacataatagcaacagacatacaaactaaag

SEQ ID NO: 13776 - DNA, 301 bp, Artificial Sequence
  Cdkn2a.4_Fanca.3
  crRNA array
  misc_feature (148)..(157): n is a, c, g, or t
cttggctttatatatcttgtggaaaggacgaaacaccgtaatttctactaagtgtagataagccacatgctagacacgctaatttctactaagtgtagataccaactgctgtgcctcgggtaatttctactaagtgtagatttttttnnnnnnnnnnaagcttggcgtggatccgatatcaactagatcttgagacaaatggcagtattcatccacaattttaaaagaaaaggggggattggggggtacagtgcaggggaaagaatagtagacataatagcaacagacatacaaactaaag

SEQ ID NO: 13777 - DNA, 301 bp, Artificial Sequence
  Cdkn2a.4_Fanca.4
  crRNA array
  misc_feature (148)..(157): n is a, c, g, or t
cttggctttatatatcttgtggaaaggacgaaacaccgtaatttctactaagtgtagataagccacatgctagacacgctaatttctactaagtgtagatcacccacccctggtgccaagtaatttctactaagtgtagatttttttnnnnnnnnnnaagcttggcgtggatccgatatcaactagatcttgagacaaatggcagtattcatccacaattttaaaagaaaaggggggattggggggtacagtgcaggggaaagaatagtagacataatagcaacagacatacaaactaaag

SEQ ID NO: 13778 - DNA, 301 bp, Artificial Sequence
  Cdkn2a.1_Nf1.1
  crRNA array
  misc_feature (148)..(157): n is a, c, g, or t
cttggctttatatatcttgtggaaaggacgaaacaccgtaatttctactaagtgtagatcaatcacgggagggagcagataatttctactaagtgtagattggcgatccggaatcctctgtaatttctactaagtgtagatttttttnnnnnnnnnnaagcttggcgtggatccgatatcaactagatcttgagacaaatggcagtattcatccacaattttaaaagaaaaggggggattggggggtacagtgcaggggaaagaatagtagacataatagcaacagacatacaaactaaag

SEQ ID NO: 13779 - DNA, 301 bp, Artificial Sequence
  Cdkn2a.1_Nf1.2
  crRNA array
  misc_feature (148)..(157): n is a, c, g, or t
cttggctttatatatcttgtggaaaggacgaaacaccgtaatttctactaagtgtagatcaatcacgggagggagcagataatttctactaagtgtagatggaaacacaacgctggcctctaatttctactaagtgtagatttttttnnnnnnnnnnaagcttggcgtggatccgatatcaactagatcttgagacaaatggcagtattcatccacaattttaaaagaaaaggggggattggggggtacagtgcaggggaaagaatagtagacataatagcaacagacatacaaactaaag

SEQ ID NO: 13780 - DNA, 301 bp, Artificial Sequence
  Cdkn2a.1_Nf1.3
  crRNA array
  misc_feature (148)..(157): n is a, c, g, or t
cttggctttatatatcttgtggaaaggacgaaacaccgtaatttctactaagtgtagatcaatcacgggagggagcagataatttctactaagtgtagataatgatggaacgcagtcgcataatttctactaagtgtagatttttttnnnnnnnnnnaagcttggcgtggatccgatatcaactagatcttgagacaaatggcagtattcatccacaattttaaaagaaaaggggggattggggggtacagtgcaggggaaagaatagtagacataatagcaacagacatacaaactaaag

SEQ ID NO: 13781 - DNA, 301 bp, Artificial Sequence
  Cdkn2a.1_Nf1.4
  crRNA array
  misc_feature (148)..(157): n is a, c, g, or t
cttggctttatatatcttgtggaaaggacgaaacaccgtaatttctactaagtgtagatcaatcacgggagggagcagataatttctactaagtgtagattgcaaaaccatccaccaagttaatttctactaagtgtagatttttttnnnnnnnnnnaagcttggcgtggatccgatatcaactagatcttgagacaaatggcagtattcatccacaattttaaaagaaaaggggggattggggggtacagtgcaggggaaagaatagtagacataatagcaacagacatacaaactaaag

SEQ ID NO: 13782 - DNA, 301 bp, Artificial Sequence
  Cdkn2a.2_Nf1.1
  crRNA array
  misc_feature (148)..(157): n is a, c, g, or t
cttggctttatatatcttgtggaaaggacgaaacaccgtaatttctactaagtgtagatgcccaacgccccgaactctttaatttctactaagtgtagattggcgatccggaatcctctgtaatttctactaagtgtagatttttttnnnnnnnnnnaagcttggcgtggatccgatatcaactagatcttgagacaaatggcagtattcatccacaattttaaaagaaaaggggggattggggggtacagtgcaggggaaagaatagtagacataatagcaacagacatacaaactaaag

SEQ ID NO: 13783 - DNA, 301 bp, Artificial Sequence
  Cdkn2a.2_Nf1.2
  crRNA array
  misc_feature (148)..(157): n is a, c, g, or t
cttggctttatatatcttgtggaaaggacgaaacaccgtaatttctactaagtgtagatgcccaacgccccgaactctttaatttctactaagtgtagatggaaacacaacgctggcctctaatttctactaagtgtagatttttttnnnnnnnnnnaagcttggcgtggatccgatatcaactagatcttgagacaaatggcagtattcatccacaattttaaaagaaaaggggggattggggggtacagtgcaggggaaagaatagtagacataatagcaacagacatacaaactaaag

SEQ ID NO: 13784 - DNA, 301 bp, Artificial Sequence
  Cdkn2a.2_Nf1.3
  crRNA array
  misc_feature (148)..(157): n is a, c, g, or t
cttggctttatatatcttgtggaaaggacgaaacaccgtaatttctactaagtgtagatgcccaacgccccgaactctttaatttctactaagtgtagataatgatggaacgcagtcgcataatttctactaagtgtagatttttttnnnnnnnnnnaagcttggcgtggatccgatatcaactagatcttgagacaaatggcagtattcatccacaattttaaaagaaaaggggggattggggggtacagtgcaggggaaagaatagtagacataatagcaacagacatacaaactaaag

SEQ ID NO: 13785 - DNA, 301 bp, Artificial Sequence
  Cdkn2a.2_Nf1.4
  crRNA array
  misc_feature (148)..(157): n is a, c, g, or t
cttggctttatatatcttgtggaaaggacgaaacaccgtaatttctactaagtgtagatgcccaacgccccgaactctttaatttctactaagtgtagattgcaaaaccatccaccaagttaatttctactaagtgtagatttttttnnnnnnnnnnaagcttggcgtggatccgatatcaactagatcttgagacaaatggcagtattcatccacaattttaaaagaaaaggggggattggggggtacagtgcaggggaaagaatagtagacataatagcaacagacatacaaactaaag

SEQ ID NO: 13786 - DNA, 301 bp, Artificial Sequence
  Cdkn2a.3_Nf1.1
  crRNA array
  misc_feature (148)..(157): n is a, c, g, or t
cttggctttatatatcttgtggaaaggacgaaacaccgtaatttctactaagtgtagattgtaccgctgggaacgtcgctaatttctactaagtgtagattggcgatccggaatcctctgtaatttctactaagtgtagatttttttnnnnnnnnnnaagcttggcgtggatccgatatcaactagatcttgagacaaatggcagtattcatccacaattttaaaagaaaaggggggattggggggtacagtgcaggggaaagaatagtagacataatagcaacagacatacaaactaaag

SEQ ID NO: 13787 - DNA, 301 bp, Artificial Sequence
  Cdkn2a.3_Nf1.2
  crRNA array
  misc_feature (148)..(157): n is a, c, g, or t
cttggctttatatatcttgtggaaaggacgaaacaccgtaatttctactaagtgtagattgtaccgctgggaacgtcgctaatttctactaagtgtagatggaaacacaacgctggcctctaatttctactaagtgtagatttttttnnnnnnnnnnaagcttggcgtggatccgatatcaactagatcttgagacaaatggcagtattcatccacaattttaaaagaaaaggggggattggggggtacagtgcaggggaaagaatagtagacataatagcaacagacatacaaactaaag

SEQ ID NO: 13788 - DNA, 301 bp, Artificial Sequence
  Cdkn2a.3_Nf1.3
  crRNA array
  misc_feature (148)..(157): n is a, c, g, or t
cttggctttatatatcttgtggaaaggacgaaacaccgtaatttctactaagtgtagattgtaccgctgggaacgtcgctaatttctactaagtgtagataatgatggaacgcagtcgcataatttctactaagtgtagatttttttnnnnnnnnnnaagcttggcgtggatccgatatcaactagatcttgagacaaatggcagtattcatccacaattttaaaagaaaaggggggattggggggtacagtgcaggggaaagaatagtagacataatagcaacagacatacaaactaaag

SEQ ID NO: 13789 - DNA, 301 bp, Artificial Sequence
  Cdkn2a.3_Nf1.4
  crRNA array
  misc_feature (148)..(157): n is a, c, g, or t
cttggctttatatatcttgtggaaaggacgaaacaccgtaatttctactaagtgtagattgtaccgctgggaacgtcgctaatttctactaagtgtagattgcaaaaccatccaccaagttaatttctactaagtgtagatttttttnnnnnnnnnnaagcttggcgtggatccgatatcaactagatcttgagacaaatggcagtattcatccacaattttaaaagaaaaggggggattggggggtacagtgcaggggaaagaatagtagacataatagcaacagacatacaaactaaag

SEQ ID NO: 13790 - DNA, 301 bp, Artificial Sequence
  Cdkn2a.4_Nf1.1
  crRNA array
  misc_feature (148)..(157): n is a, c, g, or t
cttggctttatatatcttgtggaaaggacgaaacaccgtaatttctactaagtgtagataagccacatgctagacacgctaatttctactaagtgtagattggcgatccggaatcctctgtaatttctactaagtgtagatttttttnnnnnnnnnnaagcttggcgtggatccgatatcaactagatcttgagacaaatggcagtattcatccacaattttaaaagaaaaggggggattggggggtacagtgcaggggaaagaatagtagacataatagcaacagacatacaaactaaag

SEQ ID NO: 13791 - DNA, 301 bp, Artificial Sequence
  Cdkn2a.4_Nf1.2
  crRNA array
  misc_feature (148)..(157): n is a, c, g, or t
cttggctttatatatcttgtggaaaggacgaaacaccgtaatttctactaagtgtagataagccacatgctagacacgctaatttctactaagtgtagatggaaacacaacgctggcctctaatttctactaagtgtagatttttttnnnnnnnnnnaagcttggcgtggatccgatatcaactagatcttgagacaaatggcagtattcatccacaattttaaaagaaaaggggggattggggggtacagtgcaggggaaagaatagtagacataatagcaacagacatacaaactaaag

SEQ ID NO: 13792 - DNA, 301 bp, Artificial Sequence
  Cdkn2a.4_Nf1.3
  crRNA array
  misc_feature (148)..(157): n is a, c, g, or t
cttggctttatatatcttgtggaaaggacgaaacaccgtaatttctactaagtgtagataagccacatgctagacacgctaatttctactaagtgtagataatgatggaacgcagtcgcataatttctactaagtgtagatttttttnnnnnnnnnnaagcttggcgtggatccgatatcaactagatcttgagacaaatggcagtattcatccacaattttaaaagaaaaggggggattggggggtacagtgcaggggaaagaatagtagacataatagcaacagacatacaaactaaag

SEQ ID NO: 13793 - DNA, 301 bp, Artificial Sequence
  Cdkn2a.4_Nf1.4
  crRNA array
  misc_feature (148)..(157): n is a, c, g, or t
cttggctttatatatcttgtggaaaggacgaaacaccgtaatttctactaagtgtagataagccacatgctagacacgctaatttctactaagtgtagattgcaaaaccatccaccaagttaatttctactaagtgtagatttttttnnnnnnnnnnaagcttggcgtggatccgatatcaactagatcttgagacaaatggcagtattcatccacaattttaaaagaaaaggggggattggggggtacagtgcaggggaaagaatagtagacataatagcaacagacatacaaactaaag

SEQ ID NO: 13794 - DNA, 301 bp, Artificial Sequence
  Cdkn2a.1_Kdm6a.1
  crRNA array
  misc_feature (148)..(157): n is a, c, g, or t
cttggctttatatatcttgtggaaaggacgaaacaccgtaatttctactaagtgtagatcaatcacgggagggagcagataatttctactaagtgtagatgctgccgcctctcgcggcagtaatttctactaagtgtagatttttttnnnnnnnnnnaagcttggcgtggatccgatatcaactagatcttgagacaaatggcagtattcatccacaattttaaaagaaaaggggggattggggggtacagtgcaggggaaagaatagtagacataatagcaacagacatacaaactaaag

SEQ ID NO: 13795 - DNA, 301 bp, Artificial Sequence
  Cdkn2a.1_Kdm6a.2
  crRNA array
  misc_feature (148)..(157): n is a, c, g, or t
cttggctttatatatcttgtggaaaggacgaaacaccgtaatttctactaagtgtagatcaatcacgggagggagcagataatttctactaagtgtagatgctgcaggtaaggcacgttttaatttctactaagtgtagatttttttnnnnnnnnnnaagcttggcgtggatccgatatcaactagatcttgagacaaatggcagtattcatccacaattttaaaagaaaaggggggattggggggtacagtgcaggggaaagaatagtagacataatagcaacagacatacaaactaaag

SEQ ID NO: 13796 - DNA, 301 bp, Artificial Sequence
  Cdkn2a.1_Kdm6a.3
  crRNA array
  misc_feature (148)..(157): n is a, c, g, or t
cttggctttatatatcttgtggaaaggacgaaacaccgtaatttctactaagtgtagatcaatcacgggagggagcagataatttctactaagtgtagattgctggtgccggggaagttttaatttctactaagtgtagatttttttnnnnnnnnnnaagcttggcgtggatccgatatcaactagatcttgagacaaatggcagtattcatccacaattttaaaagaaaaggggggattggggggtacagtgcaggggaaagaatagtagacataatagcaacagacatacaaactaaag

SEQ ID NO: 13797 - DNA, 301 bp, Artificial Sequence
  Cdkn2a.1_Kdm6a.4
  crRNA array
  misc_feature (148)..(157): n is a, c, g, or t
cttggctttatatatcttgtggaaaggacgaaacaccgtaatttctactaagtgtagatcaatcacgggagggagcagataatttctactaagtgtagattgtctcctacgaatcccccctaatttctactaagtgtagatttttttnnnnnnnnnnaagcttggcgtggatccgatatcaactagatcttgagacaaatggcagtattcatccacaattttaaaagaaaaggggggattggggggtacagtgcaggggaaagaatagtagacataatagcaacagacatacaaactaaag

SEQ ID NO: 13798 - DNA, 301 bp, Artificial Sequence
  Cdkn2a.2_Kdm6a.1
  crRNA array
  misc_feature (148)..(157): n is a, c, g, or t
cttggctttatatatcttgtggaaaggacgaaacaccgtaatttctactaagtgtagatgcccaacgccccgaactctttaatttctactaagtgtagatgctgccgcctctcgcggcagtaatttctactaagtgtagatttttttnnnnnnnnnnaagcttggcgtggatccgatatcaactagatcttgagacaaatggcagtattcatccacaattttaaaagaaaaggggggattggggggtacagtgcaggggaaagaatagtagacataatagcaacagacatacaaactaaag

SEQ ID NO: 13799 - DNA, 301 bp, Artificial Sequence
  Cdkn2a.2_Kdm6a.2
  crRNA array
  misc_feature (148)..(157): n is a, c, g, or t
cttggctttatatatcttgtggaaaggacgaaacaccgtaatttctactaagtgtagatgcccaacgccccgaactctttaatttctactaagtgtagatgctgcaggtaaggcacgttttaatttctactaagtgtagatttttttnnnnnnnnnnaagcttggcgtggatccgatatcaactagatcttgagacaaatggcagtattcatccacaattttaaaagaaaaggggggattggggggtacagtgcaggggaaagaatagtagacataatagcaacagacatacaaactaaag

SEQ ID NO: 13800 - DNA, 301 bp, Artificial Sequence
  Cdkn2a.2_Kdm6a.3
  crRNA array
  misc_feature (148)..(157): n is a, c, g, or t
cttggctttatatatcttgtggaaaggacgaaacaccgtaatttctactaagtgtagatgcccaacgccccgaactctttaatttctactaagtgtagattgctggtgccggggaagttttaatttctactaagtgtagatttttttnnnnnnnnnnaagcttggcgtggatccgatatcaactagatcttgagacaaatggcagtattcatccacaattttaaaagaaaaggggggattggggggtacagtgcaggggaaagaatagtagacataatagcaacagacatacaaactaaag

SEQ ID NO: 13801 - DNA, 301 bp, Artificial Sequence
  Cdkn2a.2_Kdm6a.4
  crRNA array
  misc_feature (148)..(157): n is a, c, g, or t
cttggctttatatatcttgtggaaaggacgaaacaccgtaatttctactaagtgtagatgcccaacgccccgaactctttaatttctactaagtgtagattgtctcctacgaatcccccctaatttctactaagtgtagatttttttnnnnnnnnnnaagcttggcgtggatccgatatcaactagatcttgagacaaatggcagtattcatccacaattttaaaagaaaaggggggattggggggtacagtgcaggggaaagaatagtagacataatagcaacagacatacaaactaaag

SEQ ID NO: 13802 - DNA, 301 bp, Artificial Sequence
  Cdkn2a.3_Kdm6a.1
  crRNA array
  misc_feature (148)..(157): n is a, c, g, or t
cttggctttatatatcttgtggaaaggacgaaacaccgtaatttctactaagtgtagattgtaccgctgggaacgtcgctaatttctactaagtgtagatgctgccgcctctcgcggcagtaatttctactaagtgtagatttttttnnnnnnnnnnaagcttggcgtggatccgatatcaactagatcttgagacaaatggcagtattcatccacaattttaaaagaaaaggggggattggggggtacagtgcaggggaaagaatagtagacataatagcaacagacatacaaactaaag

SEQ ID NO: 13803 - DNA, 301 bp, Artificial Sequence
  Cdkn2a.3_Kdm6a.2
  crRNA array
  misc_feature (148)..(157): n is a, c, g, or t
cttggctttatatatcttgtggaaaggacgaaacaccgtaatttctactaagtgtagattgtaccgctgggaacgtcgctaatttctactaagtgtagatgctgcaggtaaggcacgttttaatttctactaagtgtagatttttttnnnnnnnnnnaagcttggcgtggatccgatatcaactagatcttgagacaaatggcagtattcatccacaattttaaaagaaaaggggggattggggggtacagtgcaggggaaagaatagtagacataatagcaacagacatacaaactaaag

SEQ ID NO: 13804 - DNA, 301 bp, Artificial Sequence
  Cdkn2a.3_Kdm6a.3
  crRNA array
  misc_feature (148)..(157): n is a, c, g, or t
cttggctttatatatcttgtggaaaggacgaaacaccgtaatttctactaagtgtagattgtaccgctgggaacgtcgctaatttctactaagtgtagattgctggtgccggggaagttttaatttctactaagtgtagatttttttnnnnnnnnnnaagcttggcgtggatccgatatcaactagatcttgagacaaatggcagtattcatccacaattttaaaagaaaaggggggattggggggtacagtgcaggggaaagaatagtagacataatagcaacagacatacaaactaaag

SEQ ID NO: 13805 - DNA, 301 bp, Artificial Sequence
  Cdkn2a.3_Kdm6a.4
  crRNA array
  misc_feature (148)..(157): n is a, c, g, or t
cttggctttatatatcttgtggaaaggacgaaacaccgtaatttctactaagtgtagattgtaccgctgggaacgtcgctaatttctactaagtgtagattgtctcctacgaatcccccctaatttctactaagtgtagatttttttnnnnnnnnnnaagcttggcgtggatccgatatcaactagatcttgagacaaatggcagtattcatccacaattttaaaagaaaaggggggattggggggtacagtgcaggggaaagaatagtagacataatagcaacagacatacaaactaaag

SEQ ID NO: 13806 - DNA, 301 bp, Artificial Sequence
  Cdkn2a.4_Kdm6a.1
  crRNA array
  misc_feature (148)..(157): n is a, c, g, or t
cttggctttatatatcttgtggaaaggacgaaacaccgtaatttctactaagtgtagataagccacatgctagacacgctaatttctactaagtgtagatgctgccgcctctcgcggcagtaatttctactaagtgtagatttttttnnnnnnnnnnaagcttggcgtggatccgatatcaactagatcttgagacaaatggcagtattcatccacaattttaaaagaaaaggggggattggggggtacagtgcaggggaaagaatagtagacataatagcaacagacatacaaactaaag

SEQ ID NO: 13807 - DNA, 301 bp, Artificial Sequence
  Cdkn2a.4_Kdm6a.2
  crRNA array
  misc_feature (148)..(157): n is a, c, g, or t
cttggctttatatatcttgtggaaaggacgaaacaccgtaatttctactaagtgtagataagccacatgctagacacgctaatttctactaagtgtagatgctgcaggtaaggcacgttttaatttctactaagtgtagatttttttnnnnnnnnnnaagcttggcgtggatccgatatcaactagatcttgagacaaatggcagtattcatccacaattttaaaagaaaaggggggattggggggtacagtgcaggggaaagaatagtagacataatagcaacagacatacaaactaaag

SEQ ID NO: 13808 - DNA, 301 bp, Artificial Sequence
  Cdkn2a.4_Kdm6a.3
  crRNA array
  misc_feature (148)..(157): n is a, c, g, or t
cttggctttatatatcttgtggaaaggacgaaacaccgtaatttctactaagtgtagataagccacatgctagacacgctaatttctactaagtgtagattgctggtgccggggaagttttaatttctactaagtgtagatttttttnnnnnnnnnnaagcttggcgtggatccgatatcaactagatcttgagacaaatggcagtattcatccacaattttaaaagaaaaggggggattggggggtacagtgcaggggaaagaatagtagacataatagcaacagacatacaaactaaag

SEQ ID NO: 13809 - DNA, 301 bp, Artificial Sequence
  Cdkn2a.4_Kdm6a.4
  crRNA array
  misc_feature (148)..(157): n is a, c, g, or t
cttggctttatatatcttgtggaaaggacgaaacaccgtaatttctactaagtgtagataagccacatgctagacacgctaatttctactaagtgtagattgtctcctacgaatcccccctaatttctactaagtgtagatttttttnnnnnnnnnnaagcttggcgtggatccgatatcaactagatcttgagacaaatggcagtattcatccacaattttaaaagaaaaggggggattggggggtacagtgcaggggaaagaatagtagacataatagcaacagacatacaaactaaag

SEQ ID NO: 13810 - DNA, 301 bp, Artificial Sequence
  Cdkn2a.1_Ercc5.1
  crRNA array
  misc_feature (148)..(157): n is a, c, g, or t
cttggctttatatatcttgtggaaaggacgaaacaccgtaatttctactaagtgtagatcaatcacgggagggagcagataatttctactaagtgtagatacggcacgagcaagagacactaatttctactaagtgtagatttttttnnnnnnnnnnaagcttggcgtggatccgatatcaactagatcttgagacaaatggcagtattcatccacaattttaaaagaaaaggggggattggggggtacagtgcaggggaaagaatagtagacataatagcaacagacatacaaactaaag

SEQ ID NO: 13811 - DNA, 301 bp, Artificial Sequence
  Cdkn2a.1_Ercc5.2
  crRNA array
  misc_feature (148)..(157): n is a, c, g, or t
cttggctttatatatcttgtggaaaggacgaaacaccgtaatttctactaagtgtagatcaatcacgggagggagcagataatttctactaagtgtagatgagtatcacatcggtgactctaatttctactaagtgtagatttttttnnnnnnnnnnaagcttggcgtggatccgatatcaactagatcttgagacaaatggcagtattcatccacaattttaaaagaaaaggggggattggggggtacagtgcaggggaaagaatagtagacataatagcaacagacatacaaactaaag

SEQ ID NO: 13812 - DNA, 301 bp, Artificial Sequence
  Cdkn2a.1_Ercc5.3
  crRNA array
  misc_feature (148)..(157): n is a, c, g, or t
cttggctttatatatcttgtggaaaggacgaaacaccgtaatttctactaagtgtagatcaatcacgggagggagcagataatttctactaagtgtagatggagtgggtccaggcctcgttaatttctactaagtgtagatttttttnnnnnnnnnnaagcttggcgtggatccgatatcaactagatcttgagacaaatggcagtattcatccacaattttaaaagaaaaggggggattggggggtacagtgcaggggaaagaatagtagacataatagcaacagacatacaaactaaag

SEQ ID NO: 13813 - DNA, 301 bp, Artificial Sequence
  Cdkn2a.1_Ercc5.4
  crRNA array
  misc_feature (148)..(157): n is a, c, g, or t
cttggctttatatatcttgtggaaaggacgaaacaccgtaatttctactaagtgtagatcaatcacgggagggagcagataatttctactaagtgtagatcagagccggtggaataatgttaatttctactaagtgtagatttttttnnnnnnnnnnaagcttggcgtggatccgatatcaactagatcttgagacaaatggcagtattcatccacaattttaaaagaaaaggggggattggggggtacagtgcaggggaaagaatagtagacataatagcaacagacatacaaactaaag

SEQ ID NO: 13814 - DNA, 301 bp, Artificial Sequence
  Cdkn2a.2_Ercc5.1
  crRNA array
  misc_feature (148)..(157): n is a, c, g, or t
cttggctttatatatcttgtggaaaggacgaaacaccgtaatttctactaagtgtagatgcccaacgccccgaactctttaatttctactaagtgtagatacggcacgagcaagagacactaatttctactaagtgtagatttttttnnnnnnnnnnaagcttggcgtggatccgatatcaactagatcttgagacaaatggcagtattcatccacaattttaaaagaaaaggggggattggggggtacagtgcaggggaaagaatagtagacataatagcaacagacatacaaactaaag

SEQ ID NO: 13815 - DNA, 301 bp, Artificial Sequence
  Cdkn2a.2_Ercc5.2
  crRNA array
  misc_feature (148)..(157): n is a, c, g, or t
cttggctttatatatcttgtggaaaggacgaaacaccgtaatttctactaagtgtagatgcccaacgccccgaactctttaatttctactaagtgtagatgagtatcacatcggtgactctaatttctactaagtgtagatttttttnnnnnnnnnnaagcttggcgtggatccgatatcaactagatcttgagacaaatggcagtattcatccacaattttaaaagaaaaggggggattggggggtacagtgcaggggaaagaatagtagacataatagcaacagacatacaaactaaag

SEQ ID NO: 13816 - DNA, 301 bp, Artificial Sequence
  Cdkn2a.2_Ercc5.3
  crRNA array
  misc_feature (148)..(157): n is a, c, g, or t
cttggctttatatatcttgtggaaaggacgaaacaccgtaatttctactaagtgtagatgcccaacgccccgaactctttaatttctactaagtgtagatggagtgggtccaggcctcgttaatttctactaagtgtagatttttttnnnnnnnnnnaagcttggcgtggatccgatatcaactagatcttgagacaaatggcagtattcatccacaattttaaaagaaaaggggggattggggggtacagtgcaggggaaagaatagtagacataatagcaacagacatacaaactaaag

SEQ ID NO: 13817 - DNA, 301 bp, Artificial Sequence
  Cdkn2a.2_Ercc5.4
  crRNA array
  misc_feature (148)..(157): n is a, c, g, or t
cttggctttatatatcttgtggaaaggacgaaacaccgtaatttctactaagtgtagatgcccaacgccccgaactctttaatttctactaagtgtagatcagagccggtggaataatgttaatttctactaagtgtagatttttttnnnnnnnnnnaagcttggcgtggatccgatatcaactagatcttgagacaaatggcagtattcatccacaattttaaaagaaaaggggggattggggggtacagtgcaggggaaagaatagtagacataatagcaacagacatacaaactaaag

SEQ ID NO: 13818 - DNA, 301 bp, Artificial Sequence
  Cdkn2a.3_Ercc5.1
  crRNA array
  misc_feature (148)..(157): n is a, c, g, or t
cttggctttatatatcttgtggaaaggacgaaacaccgtaatttctactaagtgtagattgtaccgctgggaacgtcgctaatttctactaagtgtagatacggcacgagcaagagacactaatttctactaagtgtagatttttttnnnnnnnnnnaagcttggcgtggatccgatatcaactagatcttgagacaaatggcagtattcatccacaattttaaaagaaaaggggggattggggggtacagtgcaggggaaagaatagtagacataatagcaacagacatacaaactaaag

SEQ ID NO: 13819 - DNA, 301 bp, Artificial Sequence
  Cdkn2a.3_Ercc5.2
  crRNA array
  misc_feature (148)..(157): n is a, c, g, or t
cttggctttatatatcttgtggaaaggacgaaacaccgtaatttctactaagtgtagattgtaccgctgggaacgtcgctaatttctactaagtgtagatgagtatcacatcggtgactctaatttctactaagtgtagatttttttnnnnnnnnnnaagcttggcgtggatccgatatcaactagatcttgagacaaatggcagtattcatccacaattttaaaagaaaaggggggattggggggtacagtgcaggggaaagaatagtagacataatagcaacagacatacaaactaaag

SEQ ID NO: 13820 - DNA, 301 bp, Artificial Sequence
  Cdkn2a.3_Ercc5.3
  crRNA array
  misc_feature (148)..(157): n is a, c, g, or t
cttggctttatatatcttgtggaaaggacgaaacaccgtaatttctactaagtgtagattgtaccgctgggaacgtcgctaatttctactaagtgtagatggagtgggtccaggcctcgttaatttctactaagtgtagatttttttnnnnnnnnnnaagcttggcgtggatccgatatcaactagatcttgagacaaatggcagtattcatccacaattttaaaagaaaaggggggattggggggtacagtgcaggggaaagaatagtagacataatagcaacagacatacaaactaaag

SEQ ID NO: 13821 - DNA, 301 bp, Artificial Sequence
  Cdkn2a.3_Ercc5.4
  crRNA array
  misc_feature (148)..(157): n is a, c, g, or t
cttggctttatatatcttgtggaaaggacgaaacaccgtaatttctactaagtgtagattgtaccgctgggaacgtcgctaatttctactaagtgtagatcagagccggtggaataatgttaatttctactaagtgtagatttttttnnnnnnnnnnaagcttggcgtggatccgatatcaactagatcttgagacaaatggcagtattcatccacaattttaaaagaaaaggggggattggggggtacagtgcaggggaaagaatagtagacataatagcaacagacatacaaactaaag

SEQ ID NO: 13822 - DNA, 301 bp, Artificial Sequence
  Cdkn2a.4_Ercc5.1
  crRNA array
  misc_feature (148)..(157): n is a, c, g, or t
cttggctttatatatcttgtggaaaggacgaaacaccgtaatttctactaagtgtagataagccacatgctagacacgctaatttctactaagtgtagatacggcacgagcaagagacactaatttctactaagtgtagatttttttnnnnnnnnnnaagcttggcgtggatccgatatcaactagatcttgagacaaatggcagtattcatccacaattttaaaagaaaaggggggattggggggtacagtgcaggggaaagaatagtagacataatagcaacagacatacaaactaaag

SEQ ID NO: 13823 - DNA, 301 bp, Artificial Sequence
  Cdkn2a.4_Ercc5.2
  crRNA array
  misc_feature (148)..(157): n is a, c, g, or t
cttggctttatatatcttgtggaaaggacgaaacaccgtaatttctactaagtgtagataagccacatgctagacacgctaatttctactaagtgtagatgagtatcacatcggtgactctaatttctactaagtgtagatttttttnnnnnnnnnnaagcttggcgtggatccgatatcaactagatcttgagacaaatggcagtattcatccacaattttaaaagaaaaggggggattggggggtacagtgcaggggaaagaatagtagacataatagcaacagacatacaaactaaag

SEQ ID NO: 13824 - DNA, 301 bp, Artificial Sequence
  Cdkn2a.4_Ercc5.3
  crRNA array
  misc_feature (148)..(157): n is a, c, g, or t
cttggctttatatatcttgtggaaaggacgaaacaccgtaatttctactaagtgtagataagccacatgctagacacgctaatttctactaagtgtagatggagtgggtccaggcctcgttaatttctactaagtgtagatttttttnnnnnnnnnnaagcttggcgtggatccgatatcaactagatcttgagacaaatggcagtattcatccacaattttaaaagaaaaggggggattggggggtacagtgcaggggaaagaatagtagacataatagcaacagacatacaaactaaag

SEQ ID NO: 13825 - DNA, 301 bp, Artificial Sequence
  Cdkn2a.4_Ercc5.4
  crRNA array
  misc_feature (148)..(157): n is a, c, g, or t
cttggctttatatatcttgtggaaaggacgaaacaccgtaatttctactaagtgtagataagccacatgctagacacgctaatttctactaagtgtagatcagagccggtggaataatgttaatttctactaagtgtagatttttttnnnnnnnnnnaagcttggcgtggatccgatatcaactagatcttgagacaaatggcagtattcatccacaattttaaaagaaaaggggggattggggggtacagtgcaggggaaagaatagtagacataatagcaacagacatacaaactaaag

SEQ ID NO: 13826 - DNA, 301 bp, Artificial Sequence
  Cdkn2a.1_Arid1b.1
  crRNA array
  misc_feature (148)..(157): n is a, c, g, or t
cttggctttatatatcttgtggaaaggacgaaacaccgtaatttctactaagtgtagatcaatcacgggagggagcagataatttctactaagtgtagatgctgctgctgtagtgcgtggtaatttctactaagtgtagatttttttnnnnnnnnnnaagcttggcgtggatccgatatcaactagatcttgagacaaatggcagtattcatccacaattttaaaagaaaaggggggattggggggtacagtgcaggggaaagaatagtagacataatagcaacagacatacaaactaaag

SEQ ID NO: 13827 - DNA, 301 bp, Artificial Sequence
  Cdkn2a.1_Arid1b.2
  crRNA array
  misc_feature (148)..(157): n is a, c, g, or t
cttggctttatatatcttgtggaaaggacgaaacaccgtaatttctactaagtgtagatcaatcacgggagggagcagataatttctactaagtgtagatagtgcaaaactgagcgcgggtaatttctactaagtgtagatttttttnnnnnnnnnnaagcttggcgtggatccgatatcaactagatcttgagacaaatggcagtattcatccacaattttaaaagaaaaggggggattggggggtacagtgcaggggaaagaatagtagacataatagcaacagacatacaaactaaag

SEQ ID NO: 13828 - DNA, 301 bp, Artificial Sequence
  Cdkn2a.1_Arid1b.3
  crRNA array
  misc_feature (148)..(157): n is a, c, g, or t
cttggctttatatatcttgtggaaaggacgaaacaccgtaatttctactaagtgtagatcaatcacgggagggagcagataatttctactaagtgtagatcactcaaaggcgaacaggtataatttctactaagtgtagatttttttnnnnnnnnnnaagcttggcgtggatccgatatcaactagatcttgagacaaatggcagtattcatccacaattttaaaagaaaaggggggattggggggtacagtgcaggggaaagaatagtagacataatagcaacagacatacaaactaaag

SEQ ID NO: 13829 - DNA, 301 bp, Artificial Sequence
  Cdkn2a.1_Arid1b.4
  crRNA array
  misc_feature (148)..(157): n is a, c, g, or t
cttggctttatatatcttgtggaaaggacgaaacaccgtaatttctactaagtgtagatcaatcacgggagggagcagataatttctactaagtgtagatctcctggctccgtagaagcataatttctactaagtgtagatttttttnnnnnnnnnnaagcttggcgtggatccgatatcaactagatcttgagacaaatggcagtattcatccacaattttaaaagaaaaggggggattggggggtacagtgcaggggaaagaatagtagacataatagcaacagacatacaaactaaag

SEQ ID NO: 13830 - DNA, 301 bp, Artificial Sequence
  Cdkn2a.2_Arid1b.1
  crRNA array
  misc_feature (148)..(157): n is a, c, g, or t
cttggctttatatatcttgtggaaaggacgaaacaccgtaatttctactaagtgtagatgcccaacgccccgaactctttaatttctactaagtgtagatgctgctgctgtagtgcgtggtaatttctactaagtgtagatttttttnnnnnnnnnnaagcttggcgtggatccgatatcaactagatcttgagacaaatggcagtattcatccacaattttaaaagaaaaggggggattggggggtacagtgcaggggaaagaatagtagacataatagcaacagacatacaaactaaag

SEQ ID NO: 13831 - DNA, 301 bp, Artificial Sequence
  Cdkn2a.2_Arid1b.2
  crRNA array
  misc_feature (148)..(157): n is a, c, g, or t
cttggctttatatatcttgtggaaaggacgaaacaccgtaatttctactaagtgtagatgcccaacgccccgaactctttaatttctactaagtgtagatagtgcaaaactgagcgcgggtaatttctactaagtgtagatttttttnnnnnnnnnnaagcttggcgtggatccgatatcaactagatcttgagacaaatggcagtattcatccacaattttaaaagaaaaggggggattggggggtacagtgcaggggaaagaatagtagacataatagcaacagacatacaaactaaag

SEQ ID NO: 13832 - DNA, 301 bp, Artificial Sequence
  Cdkn2a.2_Arid1b.3
  crRNA array
  misc_feature (148)..(157): n is a, c, g, or t
cttggctttatatatcttgtggaaaggacgaaacaccgtaatttctactaagtgtagatgcccaacgccccgaactctttaatttctactaagtgtagatcactcaaaggcgaacaggtataatttctactaagtgtagatttttttnnnnnnnnnnaagcttggcgtggatccgatatcaactagatcttgagacaaatggcagtattcatccacaattttaaaagaaaaggggggattggggggtacagtgcaggggaaagaatagtagacataatagcaacagacatacaaactaaag

SEQ ID NO: 13833 - DNA, 301 bp, Artificial Sequence
  Cdkn2a.2_Arid1b.4
  crRNA array
  misc_feature (148)..(157): n is a, c, g, or t
cttggctttatatatcttgtggaaaggacgaaacaccgtaatttctactaagtgtagatgcccaacgccccgaactctttaatttctactaagtgtagatctcctggctccgtagaagcataatttctactaagtgtagatttttttnnnnnnnnnnaagcttggcgtggatccgatatcaactagatcttgagacaaatggcagtattcatccacaattttaaaagaaaaggggggattggggggtacagtgcaggggaaagaatagtagacataatagcaacagacatacaaactaaag

SEQ ID NO: 13834 - DNA, 301 bp, Artificial Sequence
  Cdkn2a.3_Arid1b.1
  crRNA array
  misc_feature (148)..(157): n is a, c, g, or t
cttggctttatatatcttgtggaaaggacgaaacaccgtaatttctactaagtgtagattgtaccgctgggaacgtcgctaatttctactaagtgtagatgctgctgctgtagtgcgtggtaatttctactaagtgtagatttttttnnnnnnnnnnaagcttggcgtggatccgatatcaactagatcttgagacaaatggcagtattcatccacaattttaaaagaaaaggggggattggggggtacagtgcaggggaaagaatagtagacataatagcaacagacatacaaactaaag

SEQ ID NO: 13835 - DNA, 301 bp, Artificial Sequence
  Cdkn2a.3_Arid1b.2
  crRNA array
  misc_feature (148)..(157): n is a, c, g, or t
cttggctttatatatcttgtggaaaggacgaaacaccgtaatttctactaagtgtagattgtaccgctgggaacgtcgctaatttctactaagtgtagatagtgcaaaactgagcgcgggtaatttctactaagtgtagatttttttnnnnnnnnnnaagcttggcgtggatccgatatcaactagatcttgagacaaatggcagtattcatccacaattttaaaagaaaaggggggattggggggtacagtgcaggggaaagaatagtagacataatagcaacagacatacaaactaaag

SEQ ID NO: 13836 - DNA, 301 bp, Artificial Sequence
  Cdkn2a.3_Arid1b.3
  crRNA array
  misc_feature (148)..(157): n is a, c, g, or t
cttggctttatatatcttgtggaaaggacgaaacaccgtaatttctactaagtgtagattgtaccgctgggaacgtcgctaatttctactaagtgtagatcactcaaaggcgaacaggtataatttctactaagtgtagatttttttnnnnnnnnnnaagcttggcgtggatccgatatcaactagatcttgagacaaatggcagtattcatccacaattttaaaagaaaaggggggattggggggtacagtgcaggggaaagaatagtagacataatagcaacagacatacaaactaaag

SEQ ID NO: 13837 - DNA, 301 bp, Artificial Sequence
  Cdkn2a.3_Arid1b.4
  crRNA array
  misc_feature (148)..(157): n is a, c, g, or t
cttggctttatatatcttgtggaaaggacgaaacaccgtaatttctactaagtgtagattgtaccgctgggaacgtcgctaatttctactaagtgtagatctcctggctccgtagaagcataatttctactaagtgtagatttttttnnnnnnnnnnaagcttggcgtggatccgatatcaactagatcttgagacaaatggcagtattcatccacaattttaaaagaaaaggggggattggggggtacagtgcaggggaaagaatagtagacataatagcaacagacatacaaactaaag

SEQ ID NO: 13838 - DNA, 301 bp, Artificial Sequence
  Cdkn2a.4_Arid1b.1
  crRNA array
  misc_feature (148)..(157): n is a, c, g, or t
cttggctttatatatcttgtggaaaggacgaaacaccgtaatttctactaagtgtagataagccacatgctagacacgctaatttctactaagtgtagatgctgctgctgtagtgcgtggtaatttctactaagtgtagatttttttnnnnnnnnnnaagcttggcgtggatccgatatcaactagatcttgagacaaatggcagtattcatccacaattttaaaagaaaaggggggattggggggtacagtgcaggggaaagaatagtagacataatagcaacagacatacaaactaaag

SEQ ID NO: 13839 - DNA, 301 bp, Artificial Sequence
  Cdkn2a.4_Arid1b.2
  crRNA array
  misc_feature (148)..(157): n is a, c, g, or t
cttggctttatatatcttgtggaaaggacgaaacaccgtaatttctactaagtgtagataagccacatgctagacacgctaatttctactaagtgtagatagtgcaaaactgagcgcgggtaatttctactaagtgtagatttttttnnnnnnnnnnaagcttggcgtggatccgatatcaactagatcttgagacaaatggcagtattcatccacaattttaaaagaaaaggggggattggggggtacagtgcaggggaaagaatagtagacataatagcaacagacatacaaactaaag

SEQ ID NO: 13840 - DNA, 301 bp, Artificial Sequence
  Cdkn2a.4_Arid1b.3
  crRNA array
  misc_feature (148)..(157): n is a, c, g, or t
cttggctttatatatcttgtggaaaggacgaaacaccgtaatttctactaagtgtagataagccacatgctagacacgctaatttctactaagtgtagatcactcaaaggcgaacaggtataatttctactaagtgtagatttttttnnnnnnnnnnaagcttggcgtggatccgatatcaactagatcttgagacaaatggcagtattcatccacaattttaaaagaaaaggggggattggggggtacagtgcaggggaaagaatagtagacataatagcaacagacatacaaactaaag

SEQ ID NO: 13841 - DNA, 301 bp, Artificial Sequence
  Cdkn2a.4_Arid1b.4
  crRNA array
  misc_feature (148)..(157): n is a, c, g, or t
cttggctttatatatcttgtggaaaggacgaaacaccgtaatttctactaagtgtagataagccacatgctagacacgctaatttctactaagtgtagatctcctggctccgtagaagcataatttctactaagtgtagatttttttnnnnnnnnnnaagcttggcgtggatccgatatcaactagatcttgagacaaatggcagtattcatccacaattttaaaagaaaaggggggattggggggtacagtgcaggggaaagaatagtagacataatagcaacagacatacaaactaaag

SEQ ID NO: 13842 - DNA, 301 bp, Artificial Sequence
  Cdkn2a.1_Rb1.1
  crRNA array
  misc_feature (148)..(157): n is a, c, g, or t
cttggctttatatatcttgtggaaaggacgaaacaccgtaatttctactaagtgtagatcaatcacgggagggagcagataatttctactaagtgtagattctgacatgatcgggtaccttaatttctactaagtgtagatttttttnnnnnnnnnnaagcttggcgtggatccgatatcaactagatcttgagacaaatggcagtattcatccacaattttaaaagaaaaggggggattggggggtacagtgcaggggaaagaatagtagacataatagcaacagacatacaaactaaag

SEQ ID NO: 13843 - DNA, 301 bp, Artificial Sequence
  Cdkn2a.1_Rb1.2
  crRNA array
  misc_feature (148)..(157): n is a, c, g, or t
cttggctttatatatcttgtggaaaggacgaaacaccgtaatttctactaagtgtagatcaatcacgggagggagcagataatttctactaagtgtagatgtctctgcatgaaaacggagtaatttctactaagtgtagatttttttnnnnnnnnnnaagcttggcgtggatccgatatcaactagatcttgagacaaatggcagtattcatccacaattttaaaagaaaaggggggattggggggtacagtgcaggggaaagaatagtagacataatagcaacagacatacaaactaaag

SEQ ID NO: 13844 - DNA, 301 bp, Artificial Sequence
  Cdkn2a.1_Rb1.3
  crRNA array
  misc_feature (148)..(157): n is a, c, g, or t
cttggctttatatatcttgtggaaaggacgaaacaccgtaatttctactaagtgtagatcaatcacgggagggagcagataatttctactaagtgtagatagccaatctggtctaataactaatttctactaagtgtagatttttttnnnnnnnnnnaagcttggcgtggatccgatatcaactagatcttgagacaaatggcagtattcatccacaattttaaaagaaaaggggggattggggggtacagtgcaggggaaagaatagtagacataatagcaacagacatacaaactaaag

SEQ ID NO: 13845 - DNA, 301 bp, Artificial Sequence
  Cdkn2a.1_Rb1.4
  crRNA array
  misc_feature (148)..(157): n is a, c, g, or t
cttggctttatatatcttgtggaaaggacgaaacaccgtaatttctactaagtgtagatcaatcacgggagggagcagataatttctactaagtgtagattgtagctcagtaaaagtgaataatttctactaagtgtagatttttttnnnnnnnnnnaagcttggcgtggatccgatatcaactagatcttgagacaaatggcagtattcatccacaattttaaaagaaaaggggggattggggggtacagtgcaggggaaagaatagtagacataatagcaacagacatacaaactaaag

SEQ ID NO: 13846 - DNA, 301 bp, Artificial Sequence
  Cdkn2a.2_Rb1.1
  crRNA array
  misc_feature (148)..(157): n is a, c, g, or t
cttggctttatatatcttgtggaaaggacgaaacaccgtaatttctactaagtgtagatgcccaacgccccgaactctttaatttctactaagtgtagattctgacatgatcgggtaccttaatttctactaagtgtagatttttttnnnnnnnnnnaagcttggcgtggatccgatatcaactagatcttgagacaaatggcagtattcatccacaattttaaaagaaaaggggggattggggggtacagtgcaggggaaagaatagtagacataatagcaacagacatacaaactaaag

SEQ ID NO: 13847 - DNA, 301 bp, Artificial Sequence
  Cdkn2a.2_Rb1.2
  crRNA array
  misc_feature (148)..(157): n is a, c, g, or t
cttggctttatatatcttgtggaaaggacgaaacaccgtaatttctactaagtgtagatgcccaacgccccgaactctttaatttctactaagtgtagatgtctctgcatgaaaacggagtaatttctactaagtgtagatttttttnnnnnnnnnnaagcttggcgtggatccgatatcaactagatcttgagacaaatggcagtattcatccacaattttaaaagaaaaggggggattggggggtacagtgcaggggaaagaatagtagacataatagcaacagacatacaaactaaag

SEQ ID NO: 13848 - DNA, 301 bp, Artificial Sequence
  Cdkn2a.2_Rb1.3
  crRNA array
  misc_feature (148)..(157): n is a, c, g, or t
cttggctttatatatcttgtggaaaggacgaaacaccgtaatttctactaagtgtagatgcccaacgccccgaactctttaatttctactaagtgtagatagccaatctggtctaataactaatttctactaagtgtagatttttttnnnnnnnnnnaagcttggcgtggatccgatatcaactagatcttgagacaaatggcagtattcatccacaattttaaaagaaaaggggggattggggggtacagtgcaggggaaagaatagtagacataatagcaacagacatacaaactaaag

SEQ ID NO: 13849 - DNA, 301 bp, Artificial Sequence
  Cdkn2a.2_Rb1.4
  crRNA array
  misc_feature (148)..(157): n is a, c, g, or t
cttggctttatatatcttgtggaaaggacgaaacaccgtaatttctactaagtgtagatgcccaacgccccgaactctttaatttctactaagtgtagattgtagctcagtaaaagtgaataatttctactaagtgtagatttttttnnnnnnnnnnaagcttggcgtggatccgatatcaactagatcttgagacaaatggcagtattcatccacaattttaaaagaaaaggggggattggggggtacagtgcaggggaaagaatagtagacataatagcaacagacatacaaactaaag

SEQ ID NO: 13850 - DNA, 301 bp, Artificial Sequence
  Cdkn2a.3_Rb1.1
  crRNA array
  misc_feature (148)..(157): n is a, c, g, or t
cttggctttatatatcttgtggaaaggacgaaacaccgtaatttctactaagtgtagattgtaccgctgggaacgtcgctaatttctactaagtgtagattctgacatgatcgggtaccttaatttctactaagtgtagatttttttnnnnnnnnnnaagcttggcgtggatccgatatcaactagatcttgagacaaatggcagtattcatccacaattttaaaagaaaaggggggattggggggtacagtgcaggggaaagaatagtagacataatagcaacagacatacaaactaaag

SEQ ID NO: 13851 - DNA, 301 bp, Artificial Sequence
  Cdkn2a.3_Rb1.2
  crRNA array
  misc_feature (148)..(157): n is a, c, g, or t
cttggctttatatatcttgtggaaaggacgaaacaccgtaatttctactaagtgtagattgtaccgctgggaacgtcgctaatttctactaagtgtagatgtctctgcatgaaaacggagtaatttctactaagtgtagatttttttnnnnnnnnnnaagcttggcgtggatccgatatcaactagatcttgagacaaatggcagtattcatccacaattttaaaagaaaaggggggattggggggtacagtgcaggggaaagaatagtagacataatagcaacagacatacaaactaaag

SEQ ID NO: 13852 - DNA, 301 bp, Artificial Sequence
  Cdkn2a.3_Rb1.3
  crRNA array
  misc_feature (148)..(157): n is a, c, g, or t
cttggctttatatatcttgtggaaaggacgaaacaccgtaatttctactaagtgtagattgtaccgctgggaacgtcgctaatttctactaagtgtagatagccaatctggtctaataactaatttctactaagtgtagatttttttnnnnnnnnnnaagcttggcgtggatccgatatcaactagatcttgagacaaatggcagtattcatccacaattttaaaagaaaaggggggattggggggtacagtgcaggggaaagaatagtagacataatagcaacagacatacaaactaaag

SEQ ID NO: 13853 - DNA, 301 bp, Artificial Sequence
  Cdkn2a.3_Rb1.4
  crRNA array
  misc_feature (148)..(157): n is a, c, g, or t
cttggctttatatatcttgtggaaaggacgaaacaccgtaatttctactaagtgtagattgtaccgctgggaacgtcgctaatttctactaagtgtagattgtagctcagtaaaagtgaataatttctactaagtgtagatttttttnnnnnnnnnnaagcttggcgtggatccgatatcaactagatcttgagacaaatggcagtattcatccacaattttaaaagaaaaggggggattggggggtacagtgcaggggaaagaatagtagacataatagcaacagacatacaaactaaag

SEQ ID NO: 13854 - DNA, 301 bp, Artificial Sequence
  Cdkn2a.4_Rb1.1
  crRNA array
  misc_feature (148)..(157): n is a, c, g, or t
cttggctttatatatcttgtggaaaggacgaaacaccgtaatttctactaagtgtagataagccacatgctagacacgctaatttctactaagtgtagattctgacatgatcgggtaccttaatttctactaagtgtagatttttttnnnnnnnnnnaagcttggcgtggatccgatatcaactagatcttgagacaaatggcagtattcatccacaattttaaaagaaaaggggggattggggggtacagtgcaggggaaagaatagtagacataatagcaacagacatacaaactaaag

SEQ ID NO: 13855 - DNA, 301 bp, Artificial Sequence
  Cdkn2a.4_Rb1.2
  crRNA array
  misc_feature (148)..(157): n is a, c, g, or t
cttggctttatatatcttgtggaaaggacgaaacaccgtaatttctactaagtgtagataagccacatgctagacacgctaatttctactaagtgtagatgtctctgcatgaaaacggagtaatttctactaagtgtagatttttttnnnnnnnnnnaagcttggcgtggatccgatatcaactagatcttgagacaaatggcagtattcatccacaattttaaaagaaaaggggggattggggggtacagtgcaggggaaagaatagtagacataatagcaacagacatacaaactaaag

SEQ ID NO: 13856 - DNA, 301 bp, Artificial Sequence
  Cdkn2a.4_Rb1.3
  crRNA array
  misc_feature (148)..(157): n is a, c, g, or t
cttggctttatatatcttgtggaaaggacgaaacaccgtaatttctactaagtgtagataagccacatgctagacacgctaatttctactaagtgtagatagccaatctggtctaataactaatttctactaagtgtagatttttttnnnnnnnnnnaagcttggcgtggatccgatatcaactagatcttgagacaaatggcagtattcatccacaattttaaaagaaaaggggggattggggggtacagtgcaggggaaagaatagtagacataatagcaacagacatacaaactaaag

SEQ ID NO: 13857 - DNA, 301 bp, Artificial Sequence
  Cdkn2a.4_Rb1.4
  crRNA array
  misc_feature (148)..(157): n is a, c, g, or t
cttggctttatatatcttgtggaaaggacgaaacaccgtaatttctactaagtgtagataagccacatgctagacacgctaatttctactaagtgtagattgtagctcagtaaaagtgaataatttctactaagtgtagatttttttnnnnnnnnnnaagcttggcgtggatccgatatcaactagatcttgagacaaatggcagtattcatccacaattttaaaagaaaaggggggattggggggtacagtgcaggggaaagaatagtagacataatagcaacagacatacaaactaaag

SEQ ID NO: 13858 - DNA, 301 bp, Artificial Sequence
  Cdkn2a.1_Kmt2c.1
  crRNA array
  misc_feature (148)..(157): n is a, c, g, or t
cttggctttatatatcttgtggaaaggacgaaacaccgtaatttctactaagtgtagatcaatcacgggagggagcagataatttctactaagtgtagatactcgacctccacctccctataatttctactaagtgtagatttttttnnnnnnnnnnaagcttggcgtggatccgatatcaactagatcttgagacaaatggcagtattcatccacaattttaaaagaaaaggggggattggggggtacagtgcaggggaaagaatagtagacataatagcaacagacatacaaactaaag

SEQ ID NO: 13859 - DNA, 301 bp, Artificial Sequence
  Cdkn2a.1_Kmt2c.2
  crRNA array
  misc_feature (148)..(157): n is a, c, g, or t
cttggctttatatatcttgtggaaaggacgaaacaccgtaatttctactaagtgtagatcaatcacgggagggagcagataatttctactaagtgtagatcccaaagatcagcgtggacctaatttctactaagtgtagatttttttnnnnnnnnnnaagcttggcgtggatccgatatcaactagatcttgagacaaatggcagtattcatccacaattttaaaagaaaaggggggattggggggtacagtgcaggggaaagaatagtagacataatagcaacagacatacaaactaaag

SEQ ID NO: 13860 - DNA, 301 bp, Artificial Sequence
  Cdkn2a.1_Kmt2c.3
  crRNA array
  misc_feature (148)..(157): n is a, c, g, or t
cttggctttatatatcttgtggaaaggacgaaacaccgtaatttctactaagtgtagatcaatcacgggagggagcagataatttctactaagtgtagataaaagatccgaatcgatgcgtaatttctactaagtgtagatttttttnnnnnnnnnnaagcttggcgtggatccgatatcaactagatcttgagacaaatggcagtattcatccacaattttaaaagaaaaggggggattggggggtacagtgcaggggaaagaatagtagacataatagcaacagacatacaaactaaag

SEQ ID NO: 13861 - DNA, 301 bp, Artificial Sequence
  Cdkn2a.1_Kmt2c.4
  crRNA array
  misc_feature (148)..(157): n is a, c, g, or t
cttggctttatatatcttgtggaaaggacgaaacaccgtaatttctactaagtgtagatcaatcacgggagggagcagataatttctactaagtgtagatctgaggcacatggaagcgattaatttctactaagtgtagatttttttnnnnnnnnnnaagcttggcgtggatccgatatcaactagatcttgagacaaatggcagtattcatccacaattttaaaagaaaaggggggattggggggtacagtgcaggggaaagaatagtagacataatagcaacagacatacaaactaaag

SEQ ID NO: 13862 - DNA, 301 bp, Artificial Sequence
  Cdkn2a.2_Kmt2c.1
  crRNA array
  misc_feature (148)..(157): n is a, c, g, or t
cttggctttatatatcttgtggaaaggacgaaacaccgtaatttctactaagtgtagatgcccaacgccccgaactctttaatttctactaagtgtagatactcgacctccacctccctataatttctactaagtgtagatttttttnnnnnnnnnnaagcttggcgtggatccgatatcaactagatcttgagacaaatggcagtattcatccacaattttaaaagaaaaggggggattggggggtacagtgcaggggaaagaatagtagacataatagcaacagacatacaaactaaag

SEQ ID NO: 13863 - DNA, 301 bp, Artificial Sequence
  Cdkn2a.2_Kmt2c.2
  crRNA array
  misc_feature (148)..(157): n is a, c, g, or t
cttggctttatatatcttgtggaaaggacgaaacaccgtaatttctactaagtgtagatgcccaacgccccgaactctttaatttctactaagtgtagatcccaaagatcagcgtggacctaatttctactaagtgtagatttttttnnnnnnnnnnaagcttggcgtggatccgatatcaactagatcttgagacaaatggcagtattcatccacaattttaaaagaaaaggggggattggggggtacagtgcaggggaaagaatagtagacataatagcaacagacatacaaactaaag

SEQ ID NO: 13864 - DNA, 301 bp, Artificial Sequence
  Cdkn2a.2_Kmt2c.3
  crRNA array
  misc_feature (148)..(157): n is a, c, g, or t
cttggctttatatatcttgtggaaaggacgaaacaccgtaatttctactaagtgtagatgcccaacgccccgaactctttaatttctactaagtgtagataaaagatccgaatcgatgcgtaatttctactaagtgtagatttttttnnnnnnnnnnaagcttggcgtggatccgatatcaactagatcttgagacaaatggcagtattcatccacaattttaaaagaaaaggggggattggggggtacagtgcaggggaaagaatagtagacataatagcaacagacatacaaactaaag

SEQ ID NO: 13865 - DNA, 301 bp, Artificial Sequence
  Cdkn2a.2_Kmt2c.4
  crRNA array
  misc_feature (148)..(157): n is a, c, g, or t
cttggctttatatatcttgtggaaaggacgaaacaccgtaatttctactaagtgtagatgcccaacgccccgaactctttaatttctactaagtgtagatctgaggcacatggaagcgattaatttctactaagtgtagatttttttnnnnnnnnnnaagcttggcgtggatccgatatcaactagatcttgagacaaatggcagtattcatccacaattttaaaagaaaaggggggattggggggtacagtgcaggggaaagaatagtagacataatagcaacagacatacaaactaaag

SEQ ID NO: 13866 - DNA, 301 bp, Artificial Sequence
  Cdkn2a.3_Kmt2c.1
  crRNA array
  misc_feature (148)..(157): n is a, c, g, or t
cttggctttatatatcttgtggaaaggacgaaacaccgtaatttctactaagtgtagattgtaccgctgggaacgtcgctaatttctactaagtgtagatactcgacctccacctccctataatttctactaagtgtagatttttttnnnnnnnnnnaagcttggcgtggatccgatatcaactagatcttgagacaaatggcagtattcatccacaattttaaaagaaaaggggggattggggggtacagtgcaggggaaagaatagtagacataatagcaacagacatacaaactaaag

SEQ ID NO: 13867 - DNA, 301 bp, Artificial Sequence
  Cdkn2a.3_Kmt2c.2
  crRNA array
  misc_feature (148)..(157): n is a, c, g, or t
cttggctttatatatcttgtggaaaggacgaaacaccgtaatttctactaagtgtagattgtaccgctgggaacgtcgctaatttctactaagtgtagatcccaaagatcagcgtggacctaatttctactaagtgtagatttttttnnnnnnnnnnaagcttggcgtggatccgatatcaactagatcttgagacaaatggcagtattcatccacaattttaaaagaaaaggggggattggggggtacagtgcaggggaaagaatagtagacataatagcaacagacatacaaactaaag

SEQ ID NO: 13868 - DNA, 301 bp, Artificial Sequence
  Cdkn2a.3_Kmt2c.3
  crRNA array
  misc_feature (148)..(157): n is a, c, g, or t
cttggctttatatatcttgtggaaaggacgaaacaccgtaatttctactaagtgtagattgtaccgctgggaacgtcgctaatttctactaagtgtagataaaagatccgaatcgatgcgtaatttctactaagtgtagatttttttnnnnnnnnnnaagcttggcgtggatccgatatcaactagatcttgagacaaatggcagtattcatccacaattttaaaagaaaaggggggattggggggtacagtgcaggggaaagaatagtagacataatagcaacagacatacaaactaaag

SEQ ID NO: 13869 - DNA, 301 bp, Artificial Sequence
  Cdkn2a.3_Kmt2c.4
  crRNA array
  misc_feature (148)..(157): n is a, c, g, or t
cttggctttatatatcttgtggaaaggacgaaacaccgtaatttctactaagtgtagattgtaccgctgggaacgtcgctaatttctactaagtgtagatctgaggcacatggaagcgattaatttctactaagtgtagatttttttnnnnnnnnnnaagcttggcgtggatccgatatcaactagatcttgagacaaatggcagtattcatccacaattttaaaagaaaaggggggattggggggtacagtgcaggggaaagaatagtagacataatagcaacagacatacaaactaaag

SEQ ID NO: 13870 - DNA, 301 bp, Artificial Sequence
  Cdkn2a.4_Kmt2c.1
  crRNA array
  misc_feature (148)..(157): n is a, c, g, or t
cttggctttatatatcttgtggaaaggacgaaacaccgtaatttctactaagtgtagataagccacatgctagacacgctaatttctactaagtgtagatactcgacctccacctccctataatttctactaagtgtagatttttttnnnnnnnnnnaagcttggcgtggatccgatatcaactagatcttgagacaaatggcagtattcatccacaattttaaaagaaaaggggggattggggggtacagtgcaggggaaagaatagtagacataatagcaacagacatacaaactaaag

SEQ ID NO: 13871 - DNA, 301 bp, Artificial Sequence
  Cdkn2a.4_Kmt2c.2
  crRNA array
  misc_feature (148)..(157): n is a, c, g, or t
cttggctttatatatcttgtggaaaggacgaaacaccgtaatttctactaagtgtagataagccacatgctagacacgctaatttctactaagtgtagatcccaaagatcagcgtggacctaatttctactaagtgtagatttttttnnnnnnnnnnaagcttggcgtggatccgatatcaactagatcttgagacaaatggcagtattcatccacaattttaaaagaaaaggggggattggggggtacagtgcaggggaaagaatagtagacataatagcaacagacatacaaactaaag

SEQ ID NO: 13872 - DNA, 301 bp, Artificial Sequence
  Cdkn2a.4_Kmt2c.3
  crRNA array
  misc_feature (148)..(157): n is a, c, g, or t
cttggctttatatatcttgtggaaaggacgaaacaccgtaatttctactaagtgtagataagccacatgctagacacgctaatttctactaagtgtagataaaagatccgaatcgatgcgtaatttctactaagtgtagatttttttnnnnnnnnnnaagcttggcgtggatccgatatcaactagatcttgagacaaatggcagtattcatccacaattttaaaagaaaaggggggattggggggtacagtgcaggggaaagaatagtagacataatagcaacagacatacaaactaaag

SEQ ID NO: 13873 - DNA, 301 bp, Artificial Sequence
  Cdkn2a.4_Kmt2c.4
  crRNA array
  misc_feature (148)..(157): n is a, c, g, or t
cttggctttatatatcttgtggaaaggacgaaacaccgtaatttctactaagtgtagataagccacatgctagacacgctaatttctactaagtgtagatctgaggcacatggaagcgattaatttctactaagtgtagatttttttnnnnnnnnnnaagcttggcgtggatccgatatcaactagatcttgagacaaatggcagtattcatccacaattttaaaagaaaaggggggattggggggtacagtgcaggggaaagaatagtagacataatagcaacagacatacaaactaaag

SEQ ID NO: 13874 - DNA, 301 bp, Artificial Sequence
  Cdkn2a.1_Pten.1
  crRNA array
  misc_feature (148)..(157): n is a, c, g, or t
cttggctttatatatcttgtggaaaggacgaaacaccgtaatttctactaagtgtagatcaatcacgggagggagcagataatttctactaagtgtagataagcgtggtgcgtgacgcactaatttctactaagtgtagatttttttnnnnnnnnnnaagcttggcgtggatccgatatcaactagatcttgagacaaatggcagtattcatccacaattttaaaagaaaaggggggattggggggtacagtgcaggggaaagaatagtagacataatagcaacagacatacaaactaaag

SEQ ID NO: 13875 - DNA, 301 bp, Artificial Sequence
  Cdkn2a.1_Pten.2
  crRNA array
  misc_feature (148)..(157): n is a, c, g, or t
cttggctttatatatcttgtggaaaggacgaaacaccgtaatttctactaagtgtagatcaatcacgggagggagcagataatttctactaagtgtagattgtcaccagctgaagtggcttaatttctactaagtgtagatttttttnnnnnnnnnnaagcttggcgtggatccgatatcaactagatcttgagacaaatggcagtattcatccacaattttaaaagaaaaggggggattggggggtacagtgcaggggaaagaatagtagacataatagcaacagacatacaaactaaag

SEQ ID NO: 13876 - DNA, 301 bp, Artificial Sequence
  Cdkn2a.1_Pten.3
  crRNA array
  misc_feature (148)..(157): n is a, c, g, or t
cttggctttatatatcttgtggaaaggacgaaacaccgtaatttctactaagtgtagatcaatcacgggagggagcagataatttctactaagtgtagatggagtcaagaggctgatttttaatttctactaagtgtagatttttttnnnnnnnnnnaagcttggcgtggatccgatatcaactagatcttgagacaaatggcagtattcatccacaattttaaaagaaaaggggggattggggggtacagtgcaggggaaagaatagtagacataatagcaacagacatacaaactaaag

SEQ ID NO: 13877 - DNA, 301 bp, Artificial Sequence
  Cdkn2a.1_Pten.4
  crRNA array
  misc_feature (148)..(157): n is a, c, g, or t
cttggctttatatatcttgtggaaaggacgaaacaccgtaatttctactaagtgtagatcaatcacgggagggagcagataatttctactaagtgtagatctgtaagctaaaccactacataatttctactaagtgtagatttttttnnnnnnnnnnaagcttggcgtggatccgatatcaactagatcttgagacaaatggcagtattcatccacaattttaaaagaaaaggggggattggggggtacagtgcaggggaaagaatagtagacataatagcaacagacatacaaactaaag

SEQ ID NO: 13878 - DNA, 301 bp, Artificial Sequence
  Cdkn2a.2_Pten.1
  crRNA array
  misc_feature (148)..(157): n is a, c, g, or t
cttggctttatatatcttgtggaaaggacgaaacaccgtaatttctactaagtgtagatgcccaacgccccgaactctttaatttctactaagtgtagataagcgtggtgcgtgacgcactaatttctactaagtgtagatttttttnnnnnnnnnnaagcttggcgtggatccgatatcaactagatcttgagacaaatggcagtattcatccacaattttaaaagaaaaggggggattggggggtacagtgcaggggaaagaatagtagacataatagcaacagacatacaaactaaag

SEQ ID NO: 13879 - DNA, 301 bp, Artificial Sequence
  Cdkn2a.2_Pten.2
  crRNA array
  misc_feature (148)..(157): n is a, c, g, or t
cttggctttatatatcttgtggaaaggacgaaacaccgtaatttctactaagtgtagatgcccaacgccccgaactctttaatttctactaagtgtagattgtcaccagctgaagtggcttaatttctactaagtgtagatttttttnnnnnnnnnnaagcttggcgtggatccgatatcaactagatcttgagacaaatggcagtattcatccacaattttaaaagaaaaggggggattggggggtacagtgcaggggaaagaatagtagacataatagcaacagacatacaaactaaag

SEQ ID NO: 13880 - DNA, 301 bp, Artificial Sequence
  Cdkn2a.2_Pten.3
  crRNA array
  misc_feature (148)..(157): n is a, c, g, or t
cttggctttatatatcttgtggaaaggacgaaacaccgtaatttctactaagtgtagatgcccaacgccccgaactctttaatttctactaagtgtagatggagtcaagaggctgatttttaatttctactaagtgtagatttttttnnnnnnnnnnaagcttggcgtggatccgatatcaactagatcttgagacaaatggcagtattcatccacaattttaaaagaaaaggggggattggggggtacagtgcaggggaaagaatagtagacataatagcaacagacatacaaactaaag

SEQ ID NO: 13881 - DNA, 301 bp, Artificial Sequence
  Cdkn2a.2_Pten.4
  crRNA array
  misc_feature (148)..(157): n is a, c, g, or t
cttggctttatatatcttgtggaaaggacgaaacaccgtaatttctactaagtgtagatgcccaacgccccgaactctttaatttctactaagtgtagatctgtaagctaaaccactacataatttctactaagtgtagatttttttnnnnnnnnnnaagcttggcgtggatccgatatcaactagatcttgagacaaatggcagtattcatccacaattttaaaagaaaaggggggattggggggtacagtgcaggggaaagaatagtagacataatagcaacagacatacaaactaaag

SEQ ID NO: 13882 - DNA, 301 bp, Artificial Sequence
  Cdkn2a.3_Pten.1
  crRNA array
  misc_feature (148)..(157): n is a, c, g, or t
cttggctttatatatcttgtggaaaggacgaaacaccgtaatttctactaagtgtagattgtaccgctgggaacgtcgctaatttctactaagtgtagataagcgtggtgcgtgacgcactaatttctactaagtgtagatttttttnnnnnnnnnnaagcttggcgtggatccgatatcaactagatcttgagacaaatggcagtattcatccacaattttaaaagaaaaggggggattggggggtacagtgcaggggaaagaatagtagacataatagcaacagacatacaaactaaag

SEQ ID NO: 13883 - DNA, 301 bp, Artificial Sequence
  Cdkn2a.3_Pten.2
  crRNA array
  misc_feature (148)..(157): n is a, c, g, or t
cttggctttatatatcttgtggaaaggacgaaacaccgtaatttctactaagtgtagattgtaccgctgggaacgtcgctaatttctactaagtgtagattgtcaccagctgaagtggcttaatttctactaagtgtagatttttttnnnnnnnnnnaagcttggcgtggatccgatatcaactagatcttgagacaaatggcagtattcatccacaattttaaaagaaaaggggggattggggggtacagtgcaggggaaagaatagtagacataatagcaacagacatacaaactaaag

SEQ ID NO: 13884 - DNA, 301 bp, Artificial Sequence
  Cdkn2a.3_Pten.3
  crRNA array
  misc_feature (148)..(157): n is a, c, g, or t
cttggctttatatatcttgtggaaaggacgaaacaccgtaatttctactaagtgtagattgtaccgctgggaacgtcgctaatttctactaagtgtagatggagtcaagaggctgatttttaatttctactaagtgtagatttttttnnnnnnnnnnaagcttggcgtggatccgatatcaactagatcttgagacaaatggcagtattcatccacaattttaaaagaaaaggggggattggggggtacagtgcaggggaaagaatagtagacataatagcaacagacatacaaactaaag

SEQ ID NO: 13885 - DNA, 301 bp, Artificial Sequence
  Cdkn2a.3_Pten.4
  crRNA array
  misc_feature (148)..(157): n is a, c, g, or t
cttggctttatatatcttgtggaaaggacgaaacaccgtaatttctactaagtgtagattgtaccgctgggaacgtcgctaatttctactaagtgtagatctgtaagctaaaccactacataatttctactaagtgtagatttttttnnnnnnnnnnaagcttggcgtggatccgatatcaactagatcttgagacaaatggcagtattcatccacaattttaaaagaaaaggggggattggggggtacagtgcaggggaaagaatagtagacataatagcaacagacatacaaactaaag

SEQ ID NO: 13886 - DNA, 301 bp, Artificial Sequence
  Cdkn2a.4_Pten.1
  crRNA array
  misc_feature (148)..(157): n is a, c, g, or t
cttggctttatatatcttgtggaaaggacgaaacaccgtaatttctactaagtgtagataagccacatgctagacacgctaatttctactaagtgtagataagcgtggtgcgtgacgcactaatttctactaagtgtagatttttttnnnnnnnnnnaagcttggcgtggatccgatatcaactagatcttgagacaaatggcagtattcatccacaattttaaaagaaaaggggggattggggggtacagtgcaggggaaagaatagtagacataatagcaacagacatacaaactaaag

SEQ ID NO: 13887 - DNA, 301 bp, Artificial Sequence
  Cdkn2a.4_Pten.2
  crRNA array
  misc_feature (148)..(157): n is a, c, g, or t
cttggctttatatatcttgtggaaaggacgaaacaccgtaatttctactaagtgtagataagccacatgctagacacgctaatttctactaagtgtagattgtcaccagctgaagtggcttaatttctactaagtgtagatttttttnnnnnnnnnnaagcttggcgtggatccgatatcaactagatcttgagacaaatggcagtattcatccacaattttaaaagaaaaggggggattggggggtacagtgcaggggaaagaatagtagacataatagcaacagacatacaaactaaag

SEQ ID NO: 13888 - DNA, 301 bp, Artificial Sequence
  Cdkn2a.4_Pten.3
  crRNA array
  misc_feature (148)..(157): n is a, c, g, or t
cttggctttatatatcttgtggaaaggacgaaacaccgtaatttctactaagtgtagataagccacatgctagacacgctaatttctactaagtgtagatggagtcaagaggctgatttttaatttctactaagtgtagatttttttnnnnnnnnnnaagcttggcgtggatccgatatcaactagatcttgagacaaatggcagtattcatccacaattttaaaagaaaaggggggattggggggtacagtgcaggggaaagaatagtagacataatagcaacagacatacaaactaaag

SEQ ID NO: 13889 - DNA, 301 bp, Artificial Sequence
  Cdkn2a.4_Pten.4
  crRNA array
  misc_feature (148)..(157): n is a, c, g, or t
cttggctttatatatcttgtggaaaggacgaaacaccgtaatttctactaagtgtagataagccacatgctagacacgctaatttctactaagtgtagatctgtaagctaaaccactacataatttctactaagtgtagatttttttnnnnnnnnnnaagcttggcgtggatccgatatcaactagatcttgagacaaatggcagtattcatccacaattttaaaagaaaaggggggattggggggtacagtgcaggggaaagaatagtagacataatagcaacagacatacaaactaaag

SEQ ID NO: 13890 - DNA, 301 bp, Artificial Sequence
  Cdkn2a.1_Atm.1
  crRNA array
  misc_feature (148)..(157): n is a, c, g, or t
cttggctttatatatcttgtggaaaggacgaaacaccgtaatttctactaagtgtagatcaatcacgggagggagcagataatttctactaagtgtagatgagaaagtctccgaatcgtttaatttctactaagtgtagatttttttnnnnnnnnnnaagcttggcgtggatccgatatcaactagatcttgagacaaatggcagtattcatccacaattttaaaagaaaaggggggattggggggtacagtgcaggggaaagaatagtagacataatagcaacagacatacaaactaaag

SEQ ID NO: 13891 - DNA, 301 bp, Artificial Sequence
  Cdkn2a.1_Atm.2
  crRNA array
  misc_feature (148)..(157): n is a, c, g, or t
cttggctttatatatcttgtggaaaggacgaaacaccgtaatttctactaagtgtagatcaatcacgggagggagcagataatttctactaagtgtagatcctacgagggcacgagagactaatttctactaagtgtagatttttttnnnnnnnnnnaagcttggcgtggatccgatatcaactagatcttgagacaaatggcagtattcatccacaattttaaaagaaaaggggggattggggggtacagtgcaggggaaagaatagtagacataatagcaacagacatacaaactaaag

SEQ ID NO: 13892 - DNA, 301 bp, Artificial Sequence
  Cdkn2a.1_Atm.3
  crRNA array
  misc_feature (148)..(157): n is a, c, g, or t
cttggctttatatatcttgtggaaaggacgaaacaccgtaatttctactaagtgtagatcaatcacgggagggagcagataatttctactaagtgtagattgaaagtctccgatatgccataatttctactaagtgtagatttttttnnnnnnnnnnaagcttggcgtggatccgatatcaactagatcttgagacaaatggcagtattcatccacaattttaaaagaaaaggggggattggggggtacagtgcaggggaaagaatagtagacataatagcaacagacatacaaactaaag

SEQ ID NO: 13893 - DNA, 301 bp, Artificial Sequence
  Cdkn2a.1_Atm.4
  crRNA array
  misc_feature (148)..(157): n is a, c, g, or t
cttggctttatatatcttgtggaaaggacgaaacaccgtaatttctactaagtgtagatcaatcacgggagggagcagataatttctactaagtgtagatggtggtgatcagtcaagtagtaatttctactaagtgtagatttttttnnnnnnnnnnaagcttggcgtggatccgatatcaactagatcttgagacaaatggcagtattcatccacaattttaaaagaaaaggggggattggggggtacagtgcaggggaaagaatagtagacataatagcaacagacatacaaactaaag

SEQ ID NO: 13894 - DNA, 301 bp, Artificial Sequence
  Cdkn2a.2_Atm.1
  crRNA array
  misc_feature (148)..(157): n is a, c, g, or t
cttggctttatatatcttgtggaaaggacgaaacaccgtaatttctactaagtgtagatgcccaacgccccgaactctttaatttctactaagtgtagatgagaaagtctccgaatcgtttaatttctactaagtgtagatttttttnnnnnnnnnnaagcttggcgtggatccgatatcaactagatcttgagacaaatggcagtattcatccacaattttaaaagaaaaggggggattggggggtacagtgcaggggaaagaatagtagacataatagcaacagacatacaaactaaag

SEQ ID NO: 13895 - DNA, 301 bp, Artificial Sequence
  Cdkn2a.2_Atm.2
  crRNA array
  misc_feature (148)..(157): n is a, c, g, or t
cttggctttatatatcttgtggaaaggacgaaacaccgtaatttctactaagtgtagatgcccaacgccccgaactctttaatttctactaagtgtagatcctacgagggcacgagagactaatttctactaagtgtagatttttttnnnnnnnnnnaagcttggcgtggatccgatatcaactagatcttgagacaaatggcagtattcatccacaattttaaaagaaaaggggggattggggggtacagtgcaggggaaagaatagtagacataatagcaacagacatacaaactaaag

SEQ ID NO: 13896 - DNA, 301 bp, Artificial Sequence
  Cdkn2a.2_Atm.3
  crRNA array
  misc_feature (148)..(157): n is a, c, g, or t
cttggctttatatatcttgtggaaaggacgaaacaccgtaatttctactaagtgtagatgcccaacgccccgaactctttaatttctactaagtgtagattgaaagtctccgatatgccataatttctactaagtgtagatttttttnnnnnnnnnnaagcttggcgtggatccgatatcaactagatcttgagacaaatggcagtattcatccacaattttaaaagaaaaggggggattggggggtacagtgcaggggaaagaatagtagacataatagcaacagacatacaaactaaag

SEQ ID NO: 13897 - DNA, 301 bp, Artificial Sequence
  Cdkn2a.2_Atm.4
  crRNA array
  misc_feature (148)..(157): n is a, c, g, or t
cttggctttatatatcttgtggaaaggacgaaacaccgtaatttctactaagtgtagatgcccaacgccccgaactctttaatttctactaagtgtagatggtggtgatcagtcaagtagtaatttctactaagtgtagatttttttnnnnnnnnnnaagcttggcgtggatccgatatcaactagatcttgagacaaatggcagtattcatccacaattttaaaagaaaaggggggattggggggtacagtgcaggggaaagaatagtagacataatagcaacagacatacaaactaaag

SEQ ID NO: 13898 - DNA, 301 bp, Artificial Sequence
  Cdkn2a.3_Atm.1
  crRNA array
  misc_feature (148)..(157): n is a, c, g, or t
cttggctttatatatcttgtggaaaggacgaaacaccgtaatttctactaagtgtagattgtaccgctgggaacgtcgctaatttctactaagtgtagatgagaaagtctccgaatcgtttaatttctactaagtgtagatttttttnnnnnnnnnnaagcttggcgtggatccgatatcaactagatcttgagacaaatggcagtattcatccacaattttaaaagaaaaggggggattggggggtacagtgcaggggaaagaatagtagacataatagcaacagacatacaaactaaag

SEQ ID NO: 13899 - DNA, 301 bp, Artificial Sequence
  Cdkn2a.3_Atm.2
  crRNA array
  misc_feature (148)..(157): n is a, c, g, or t
cttggctttatatatcttgtggaaaggacgaaacaccgtaatttctactaagtgtagattgtaccgctgggaacgtcgctaatttctactaagtgtagatcctacgagggcacgagagactaatttctactaagtgtagatttttttnnnnnnnnnnaagcttggcgtggatccgatatcaactagatcttgagacaaatggcagtattcatccacaattttaaaagaaaaggggggattggggggtacagtgcaggggaaagaatagtagacataatagcaacagacatacaaactaaag

SEQ ID NO: 13900 - DNA, 301 bp, Artificial Sequence
  Cdkn2a.3_Atm.3
  crRNA array
  misc_feature (148)..(157): n is a, c, g, or t
cttggctttatatatcttgtggaaaggacgaaacaccgtaatttctactaagtgtagattgtaccgctgggaacgtcgctaatttctactaagtgtagattgaaagtctccgatatgccataatttctactaagtgtagatttttttnnnnnnnnnnaagcttggcgtggatccgatatcaactagatcttgagacaaatggcagtattcatccacaattttaaaagaaaaggggggattggggggtacagtgcaggggaaagaatagtagacataatagcaacagacatacaaactaaag

SEQ ID NO: 13901 - DNA, 301 bp, Artificial Sequence
  Cdkn2a.3_Atm.4
  crRNA array
  misc_feature (148)..(157): n is a, c, g, or t
cttggctttatatatcttgtggaaaggacgaaacaccgtaatttctactaagtgtagattgtaccgctgggaacgtcgctaatttctactaagtgtagatggtggtgatcagtcaagtagtaatttctactaagtgtagatttttttnnnnnnnnnnaagcttggcgtggatccgatatcaactagatcttgagacaaatggcagtattcatccacaattttaaaagaaaaggggggattggggggtacagtgcaggggaaagaatagtagacataatagcaacagacatacaaactaaag

SEQ ID NO: 13902 - DNA, 301 bp, Artificial Sequence
  Cdkn2a.4_Atm.1
  crRNA array
  misc_feature (148)..(157): n is a, c, g, or t
cttggctttatatatcttgtggaaaggacgaaacaccgtaatttctactaagtgtagataagccacatgctagacacgctaatttctactaagtgtagatgagaaagtctccgaatcgtttaatttctactaagtgtagatttttttnnnnnnnnnnaagcttggcgtggatccgatatcaactagatcttgagacaaatggcagtattcatccacaattttaaaagaaaaggggggattggggggtacagtgcaggggaaagaatagtagacataatagcaacagacatacaaactaaag

SEQ ID NO: 13903 - DNA, 301 bp, Artificial Sequence
  Cdkn2a.4_Atm.2
  crRNA array
  misc_feature (148)..(157): n is a, c, g, or t
cttggctttatatatcttgtggaaaggacgaaacaccgtaatttctactaagtgtagataagccacatgctagacacgctaatttctactaagtgtagatcctacgagggcacgagagactaatttctactaagtgtagatttttttnnnnnnnnnnaagcttggcgtggatccgatatcaactagatcttgagacaaatggcagtattcatccacaattttaaaagaaaaggggggattggggggtacagtgcaggggaaagaatagtagacataatagcaacagacatacaaactaaag

SEQ ID NO: 13904 - DNA, 301 bp, Artificial Sequence
  Cdkn2a.4_Atm.3
  crRNA array
  misc_feature (148)..(157): n is a, c, g, or t
cttggctttatatatcttgtggaaaggacgaaacaccgtaatttctactaagtgtagataagccacatgctagacacgctaatttctactaagtgtagattgaaagtctccgatatgccataatttctactaagtgtagatttttttnnnnnnnnnnaagcttggcgtggatccgatatcaactagatcttgagacaaatggcagtattcatccacaattttaaaagaaaaggggggattggggggtacagtgcaggggaaagaatagtagacataatagcaacagacatacaaactaaag

SEQ ID NO: 13905 - DNA, 301 bp, Artificial Sequence
  Cdkn2a.4_Atm.4
  crRNA array
  misc_feature (148)..(157): n is a, c, g, or t
cttggctttatatatcttgtggaaaggacgaaacaccgtaatttctactaagtgtagataagccacatgctagacacgctaatttctactaagtgtagatggtggtgatcagtcaagtagtaatttctactaagtgtagatttttttnnnnnnnnnnaagcttggcgtggatccgatatcaactagatcttgagacaaatggcagtattcatccacaattttaaaagaaaaggggggattggggggtacagtgcaggggaaagaatagtagacataatagcaacagacatacaaactaaag

SEQ ID NO: 13906 - DNA, 301 bp, Artificial Sequence
  Wrn.1_Brca2.1
  crRNA array
  misc_feature (148)..(157): n is a, c, g, or t
cttggctttatatatcttgtggaaaggacgaaacaccgtaatttctactaagtgtagatgcaaaccactcgggtaattttaatttctactaagtgtagatctaagcgtagaaccagaaattaatttctactaagtgtagatttttttnnnnnnnnnnaagcttggcgtggatccgatatcaactagatcttgagacaaatggcagtattcatccacaattttaaaagaaaaggggggattggggggtacagtgcaggggaaagaatagtagacataatagcaacagacatacaaactaaag

SEQ ID NO: 13907 - DNA, 301 bp, Artificial Sequence
  Wrn.1_Brca2.2
  crRNA array
  misc_feature (148)..(157): n is a, c, g, or t
cttggctttatatatcttgtggaaaggacgaaacaccgtaatttctactaagtgtagatgcaaaccactcgggtaattttaatttctactaagtgtagatgatccaggtgtaacaagccataatttctactaagtgtagatttttttnnnnnnnnnnaagcttggcgtggatccgatatcaactagatcttgagacaaatggcagtattcatccacaattttaaaagaaaaggggggattggggggtacagtgcaggggaaagaatagtagacataatagcaacagacatacaaactaaag

SEQ ID NO: 13908 - DNA, 301 bp, Artificial Sequence
  Wrn.1_Brca2.3
  crRNA array
  misc_feature (148)..(157): n is a, c, g, or t
cttggctttatatatcttgtggaaaggacgaaacaccgtaatttctactaagtgtagatgcaaaccactcgggtaattttaatttctactaagtgtagattgaatataaactgggccacttaatttctactaagtgtagatttttttnnnnnnnnnnaagcttggcgtggatccgatatcaactagatcttgagacaaatggcagtattcatccacaattttaaaagaaaaggggggattggggggtacagtgcaggggaaagaatagtagacataatagcaacagacatacaaactaaag

SEQ ID NO: 13909 - DNA, 301 bp, Artificial Sequence
  Wrn.1_Brca2.4
  crRNA array
  misc_feature (148)..(157): n is a, c, g, or t
cttggctttatatatcttgtggaaaggacgaaacaccgtaatttctactaagtgtagatgcaaaccactcgggtaattttaatttctactaagtgtagatgaaacgccgtatatatagagtaatttctactaagtgtagatttttttnnnnnnnnnnaagcttggcgtggatccgatatcaactagatcttgagacaaatggcagtattcatccacaattttaaaagaaaaggggggattggggggtacagtgcaggggaaagaatagtagacataatagcaacagacatacaaactaaag

SEQ ID NO: 13910 - DNA, 301 bp, Artificial Sequence
  Wrn.2_Brca2.1
  crRNA array
  misc_feature (148)..(157): n is a, c, g, or t
cttggctttatatatcttgtggaaaggacgaaacaccgtaatttctactaagtgtagatgccatgtccagcagaacctttaatttctactaagtgtagatctaagcgtagaaccagaaattaatttctactaagtgtagatttttttnnnnnnnnnnaagcttggcgtggatccgatatcaactagatcttgagacaaatggcagtattcatccacaattttaaaagaaaaggggggattggggggtacagtgcaggggaaagaatagtagacataatagcaacagacatacaaactaaag

SEQ ID NO: 13911 - DNA, 301 bp, Artificial Sequence
  Wrn.2_Brca2.2
  crRNA array
  misc_feature (148)..(157): n is a, c, g, or t
cttggctttatatatcttgtggaaaggacgaaacaccgtaatttctactaagtgtagatgccatgtccagcagaacctttaatttctactaagtgtagatgatccaggtgtaacaagccataatttctactaagtgtagatttttttnnnnnnnnnnaagcttggcgtggatccgatatcaactagatcttgagacaaatggcagtattcatccacaattttaaaagaaaaggggggattggggggtacagtgcaggggaaagaatagtagacataatagcaacagacatacaaactaaag

SEQ ID NO: 13912 - DNA, 301 bp, Artificial Sequence
  Wrn.2_Brca2.3
  crRNA array
  misc_feature (148)..(157): n is a, c, g, or t
cttggctttatatatcttgtggaaaggacgaaacaccgtaatttctactaagtgtagatgccatgtccagcagaacctttaatttctactaagtgtagattgaatataaactgggccacttaatttctactaagtgtagatttttttnnnnnnnnnnaagcttggcgtggatccgatatcaactagatcttgagacaaatggcagtattcatccacaattttaaaagaaaaggggggattggggggtacagtgcaggggaaagaatagtagacataatagcaacagacatacaaactaaag

SEQ ID NO: 13913 - DNA, 301 bp, Artificial Sequence
  Wrn.2_Brca2.4
  crRNA array
  misc_feature (148)..(157): n is a, c, g, or t
cttggctttatatatcttgtggaaaggacgaaacaccgtaatttctactaagtgtagatgccatgtccagcagaacctttaatttctactaagtgtagatgaaacgccgtatatatagagtaatttctactaagtgtagatttttttnnnnnnnnnnaagcttggcgtggatccgatatcaactagatcttgagacaaatggcagtattcatccacaattttaaaagaaaaggggggattggggggtacagtgcaggggaaagaatagtagacataatagcaacagacatacaaactaaag

SEQ ID NO: 13914 - DNA, 301 bp, Artificial Sequence
  Wrn.3_Brca2.1
  crRNA array
  misc_feature (148)..(157): n is a, c, g, or t
cttggctttatatatcttgtggaaaggacgaaacaccgtaatttctactaagtgtagatctgcagcaggccaccgcaattaatttctactaagtgtagatctaagcgtagaaccagaaattaatttctactaagtgtagatttttttnnnnnnnnnnaagcttggcgtggatccgatatcaactagatcttgagacaaatggcagtattcatccacaattttaaaagaaaaggggggattggggggtacagtgcaggggaaagaatagtagacataatagcaacagacatacaaactaaag

SEQ ID NO: 13915 - DNA, 301 bp, Artificial Sequence
  Wrn.3_Brca2.2
  crRNA array
  misc_feature (148)..(157): n is a, c, g, or t
cttggctttatatatcttgtggaaaggacgaaacaccgtaatttctactaagtgtagatctgcagcaggccaccgcaattaatttctactaagtgtagatgatccaggtgtaacaagccataatttctactaagtgtagatttttttnnnnnnnnnnaagcttggcgtggatccgatatcaactagatcttgagacaaatggcagtattcatccacaattttaaaagaaaaggggggattggggggtacagtgcaggggaaagaatagtagacataatagcaacagacatacaaactaaag

SEQ ID NO: 13916 - DNA, 301 bp, Artificial Sequence
  Wrn.3_Brca2.3
  crRNA array
  misc_feature (148)..(157): n is a, c, g, or t
cttggctttatatatcttgtggaaaggacgaaacaccgtaatttctactaagtgtagatctgcagcaggccaccgcaattaatttctactaagtgtagattgaatataaactgggccacttaatttctactaagtgtagatttttttnnnnnnnnnnaagcttggcgtggatccgatatcaactagatcttgagacaaatggcagtattcatccacaattttaaaagaaaaggggggattggggggtacagtgcaggggaaagaatagtagacataatagcaacagacatacaaactaaag

SEQ ID NO: 13917 - DNA, 301 bp, Artificial Sequence
  Wrn.3_Brca2.4
  crRNA array
  misc_feature (148)..(157): n is a, c, g, or t
cttggctttatatatcttgtggaaaggacgaaacaccgtaatttctactaagtgtagatctgcagcaggccaccgcaattaatttctactaagtgtagatgaaacgccgtatatatagagtaatttctactaagtgtagatttttttnnnnnnnnnnaagcttggcgtggatccgatatcaactagatcttgagacaaatggcagtattcatccacaattttaaaagaaaaggggggattggggggtacagtgcaggggaaagaatagtagacataatagcaacagacatacaaactaaag

SEQ ID NO: 13918 - DNA, 301 bp, Artificial Sequence
  Wrn.4_Brca2.1
  crRNA array
  misc_feature (148)..(157): n is a, c, g, or t
cttggctttatatatcttgtggaaaggacgaaacaccgtaatttctactaagtgtagattcgaaggacaatagatgatgtaatttctactaagtgtagatctaagcgtagaaccagaaattaatttctactaagtgtagatttttttnnnnnnnnnnaagcttggcgtggatccgatatcaactagatcttgagacaaatggcagtattcatccacaattttaaaagaaaaggggggattggggggtacagtgcaggggaaagaatagtagacataatagcaacagacatacaaactaaag

SEQ ID NO: 13919 - DNA, 301 bp, Artificial Sequence
  Wrn.4_Brca2.2
  crRNA array
  misc_feature (148)..(157): n is a, c, g, or t
cttggctttatatatcttgtggaaaggacgaaacaccgtaatttctactaagtgtagattcgaaggacaatagatgatgtaatttctactaagtgtagatgatccaggtgtaacaagccataatttctactaagtgtagatttttttnnnnnnnnnnaagcttggcgtggatccgatatcaactagatcttgagacaaatggcagtattcatccacaattttaaaagaaaaggggggattggggggtacagtgcaggggaaagaatagtagacataatagcaacagacatacaaactaaag

SEQ ID NO: 13920 - DNA, 301 bp, Artificial Sequence
  Wrn.4_Brca2.3
  crRNA array
  misc_feature (148)..(157): n is a, c, g, or t
cttggctttatatatcttgtggaaaggacgaaacaccgtaatttctactaagtgtagattcgaaggacaatagatgatgtaatttctactaagtgtagattgaatataaactgggccacttaatttctactaagtgtagatttttttnnnnnnnnnnaagcttggcgtggatccgatatcaactagatcttgagacaaatggcagtattcatccacaattttaaaagaaaaggggggattggggggtacagtgcaggggaaagaatagtagacataatagcaacagacatacaaactaaag

SEQ ID NO: 13921 - DNA, 301 bp, Artificial Sequence
  Wrn.4_Brca2.4
  crRNA array
  misc_feature (148)..(157): n is a, c, g, or t
cttggctttatatatcttgtggaaaggacgaaacaccgtaatttctactaagtgtagattcgaaggacaatagatgatgtaatttctactaagtgtagatgaaacgccgtatatatagagtaatttctactaagtgtagatttttttnnnnnnnnnnaagcttggcgtggatccgatatcaactagatcttgagacaaatggcagtattcatccacaattttaaaagaaaaggggggattggggggtacagtgcaggggaaagaatagtagacataatagcaacagacatacaaactaaag

SEQ ID NO: 13922 - DNA, 301 bp, Artificial Sequence
  Wrn.1_Apc.1
  crRNA array
  misc_feature (148)..(157): n is a, c, g, or t
cttggctttatatatcttgtggaaaggacgaaacaccgtaatttctactaagtgtagatgcaaaccactcgggtaattttaatttctactaagtgtagatgtgatccacacgtgtagctgtaatttctactaagtgtagatttttttnnnnnnnnnnaagcttggcgtggatccgatatcaactagatcttgagacaaatggcagtattcatccacaattttaaaagaaaaggggggattggggggtacagtgcaggggaaagaatagtagacataatagcaacagacatacaaactaaag

SEQ ID NO: 13923 - DNA, 301 bp, Artificial Sequence
  Wrn.1_Apc.2
  crRNA array
  misc_feature (148)..(157): n is a, c, g, or t
cttggctttatatatcttgtggaaaggacgaaacaccgtaatttctactaagtgtagatgcaaaccactcgggtaattttaatttctactaagtgtagatcatctgctcgccaagacaaataatttctactaagtgtagatttttttnnnnnnnnnnaagcttggcgtggatccgatatcaactagatcttgagacaaatggcagtattcatccacaattttaaaagaaaaggggggattggggggtacagtgcaggggaaagaatagtagacataatagcaacagacatacaaactaaag

SEQ ID NO: 13924 - DNA, 301 bp, Artificial Sequence
  Wrn.1_Apc.3
  crRNA array
  misc_feature (148)..(157): n is a, c, g, or t
cttggctttatatatcttgtggaaaggacgaaacaccgtaatttctactaagtgtagatgcaaaccactcgggtaattttaatttctactaagtgtagatacgccaatcgacatgatgattaatttctactaagtgtagatttttttnnnnnnnnnnaagcttggcgtggatccgatatcaactagatcttgagacaaatggcagtattcatccacaattttaaaagaaaaggggggattggggggtacagtgcaggggaaagaatagtagacataatagcaacagacatacaaactaaag

SEQ ID NO: 13925 - DNA, 301 bp, Artificial Sequence
  Wrn.1_Apc.4
  crRNA array
  misc_feature (148)..(157): n is a, c, g, or t
cttggctttatatatcttgtggaaaggacgaaacaccgtaatttctactaagtgtagatgcaaaccactcgggtaattttaatttctactaagtgtagatcaccaggggatgatgtgccctaatttctactaagtgtagatttttttnnnnnnnnnnaagcttggcgtggatccgatatcaactagatcttgagacaaatggcagtattcatccacaattttaaaagaaaaggggggattggggggtacagtgcaggggaaagaatagtagacataatagcaacagacatacaaactaaag

SEQ ID NO: 13926 - DNA, 301 bp, Artificial Sequence
  Wrn.2_Apc.1
  crRNA array
  misc_feature (148)..(157): n is a, c, g, or t
cttggctttatatatcttgtggaaaggacgaaacaccgtaatttctactaagtgtagatgccatgtccagcagaacctttaatttctactaagtgtagatgtgatccacacgtgtagctgtaatttctactaagtgtagatttttttnnnnnnnnnnaagcttggcgtggatccgatatcaactagatcttgagacaaatggcagtattcatccacaattttaaaagaaaaggggggattggggggtacagtgcaggggaaagaatagtagacataatagcaacagacatacaaactaaag

SEQ ID NO: 13927 - DNA, 301 bp, Artificial Sequence
  Wrn.2_Apc.2
  crRNA array
  misc_feature (148)..(157): n is a, c, g, or t
cttggctttatatatcttgtggaaaggacgaaacaccgtaatttctactaagtgtagatgccatgtccagcagaacctttaatttctactaagtgtagatcatctgctcgccaagacaaataatttctactaagtgtagatttttttnnnnnnnnnnaagcttggcgtggatccgatatcaactagatcttgagacaaatggcagtattcatccacaattttaaaagaaaaggggggattggggggtacagtgcaggggaaagaatagtagacataatagcaacagacatacaaactaaag

SEQ ID NO: 13928 - DNA, 301 bp, Artificial Sequence
  Wrn.2_Apc.3
  crRNA array
  misc_feature (148)..(157): n is a, c, g, or t
cttggctttatatatcttgtggaaaggacgaaacaccgtaatttctactaagtgtagatgccatgtccagcagaacctttaatttctactaagtgtagatacgccaatcgacatgatgattaatttctactaagtgtagatttttttnnnnnnnnnnaagcttggcgtggatccgatatcaactagatcttgagacaaatggcagtattcatccacaattttaaaagaaaaggggggattggggggtacagtgcaggggaaagaatagtagacataatagcaacagacatacaaactaaag

SEQ ID NO: 13929 - DNA, 301 bp, Artificial Sequence
  Wrn.2_Apc.4
  crRNA array
  misc_feature (148)..(157): n is a, c, g, or t
cttggctttatatatcttgtggaaaggacgaaacaccgtaatttctactaagtgtagatgccatgtccagcagaacctttaatttctactaagtgtagatcaccaggggatgatgtgccctaatttctactaagtgtagatttttttnnnnnnnnnnaagcttggcgtggatccgatatcaactagatcttgagacaaatggcagtattcatccacaattttaaaagaaaaggggggattggggggtacagtgcaggggaaagaatagtagacataatagcaacagacatacaaactaaag

SEQ ID NO: 13930 - DNA, 301 bp, Artificial Sequence
  Wrn.3_Apc.1
  crRNA array
  misc_feature (148)..(157): n is a, c, g, or t
cttggctttatatatcttgtggaaaggacgaaacaccgtaatttctactaagtgtagatctgcagcaggccaccgcaattaatttctactaagtgtagatgtgatccacacgtgtagctgtaatttctactaagtgtagatttttttnnnnnnnnnnaagcttggcgtggatccgatatcaactagatcttgagacaaatggcagtattcatccacaattttaaaagaaaaggggggattggggggtacagtgcaggggaaagaatagtagacataatagcaacagacatacaaactaaag

SEQ ID NO: 13931 - DNA, 301 bp, Artificial Sequence
  Wrn.3_Apc.2
  crRNA array
  misc_feature (148)..(157): n is a, c, g, or t
cttggctttatatatcttgtggaaaggacgaaacaccgtaatttctactaagtgtagatctgcagcaggccaccgcaattaatttctactaagtgtagatcatctgctcgccaagacaaataatttctactaagtgtagatttttttnnnnnnnnnnaagcttggcgtggatccgatatcaactagatcttgagacaaatggcagtattcatccacaattttaaaagaaaaggggggattggggggtacagtgcaggggaaagaatagtagacataatagcaacagacatacaaactaaag

SEQ ID NO: 13932 - DNA, 301 bp, Artificial Sequence
  Wrn.3_Apc.3
  crRNA array
  misc_feature (148)..(157): n is a, c, g, or t
cttggctttatatatcttgtggaaaggacgaaacaccgtaatttctactaagtgtagatctgcagcaggccaccgcaattaatttctactaagtgtagatacgccaatcgacatgatgattaatttctactaagtgtagatttttttnnnnnnnnnnaagcttggcgtggatccgatatcaactagatcttgagacaaatggcagtattcatccacaattttaaaagaaaaggggggattggggggtacagtgcaggggaaagaatagtagacataatagcaacagacatacaaactaaag

SEQ ID NO: 13933 - DNA, 301 bp, Artificial Sequence
  Wrn.3_Apc.4
  crRNA array
  misc_feature (148)..(157): n is a, c, g, or t
cttggctttatatatcttgtggaaaggacgaaacaccgtaatttctactaagtgtagatctgcagcaggccaccgcaattaatttctactaagtgtagatcaccaggggatgatgtgccctaatttctactaagtgtagatttttttnnnnnnnnnnaagcttggcgtggatccgatatcaactagatcttgagacaaatggcagtattcatccacaattttaaaagaaaaggggggattggggggtacagtgcaggggaaagaatagtagacataatagcaacagacatacaaactaaag

SEQ ID NO: 13934 - DNA, 301 bp, Artificial Sequence
  Wrn.4_Apc.1
  crRNA array
  misc_feature (148)..(157): n is a, c, g, or t
cttggctttatatatcttgtggaaaggacgaaacaccgtaatttctactaagtgtagattcgaaggacaatagatgatgtaatttctactaagtgtagatgtgatccacacgtgtagctgtaatttctactaagtgtagatttttttnnnnnnnnnnaagcttggcgtggatccgatatcaactagatcttgagacaaatggcagtattcatccacaattttaaaagaaaaggggggattggggggtacagtgcaggggaaagaatagtagacataatagcaacagacatacaaactaaag

SEQ ID NO: 13935 - DNA, 301 bp, Artificial Sequence
  Wrn.4_Apc.2
  crRNA array
  misc_feature (148)..(157): n is a, c, g, or t
cttggctttatatatcttgtggaaaggacgaaacaccgtaatttctactaagtgtagattcgaaggacaatagatgatgtaatttctactaagtgtagatcatctgctcgccaagacaaataatttctactaagtgtagatttttttnnnnnnnnnnaagcttggcgtggatccgatatcaactagatcttgagacaaatggcagtattcatccacaattttaaaagaaaaggggggattggggggtacagtgcaggggaaagaatagtagacataatagcaacagacatacaaactaaag

SEQ ID NO: 13936 - DNA, 301 bp, Artificial Sequence
  Wrn.4_Apc.3
  crRNA array
  misc_feature (148)..(157): n is a, c, g, or t
cttggctttatatatcttgtggaaaggacgaaacaccgtaatttctactaagtgtagattcgaaggacaatagatgatgtaatttctactaagtgtagatacgccaatcgacatgatgattaatttctactaagtgtagatttttttnnnnnnnnnnaagcttggcgtggatccgatatcaactagatcttgagacaaatggcagtattcatccacaattttaaaagaaaaggggggattggggggtacagtgcaggggaaagaatagtagacataatagcaacagacatacaaactaaag

SEQ ID NO: 13937 - DNA, 301 bp, Artificial Sequence
  Wrn.4_Apc.4
  crRNA array
  misc_feature (148)..(157): n is a, c, g, or t
cttggctttatatatcttgtggaaaggacgaaacaccgtaatttctactaagtgtagattcgaaggacaatagatgatgtaatttctactaagtgtagatcaccaggggatgatgtgccctaatttctactaagtgtagatttttttnnnnnnnnnnaagcttggcgtggatccgatatcaactagatcttgagacaaatggcagtattcatccacaattttaaaagaaaaggggggattggggggtacagtgcaggggaaagaatagtagacataatagcaacagacatacaaactaaag

SEQ ID NO: 13938 - DNA, 301 bp, Artificial Sequence
  Wrn.1_Fanca.1
  crRNA array
  misc_feature (148)..(157): n is a, c, g, or t
cttggctttatatatcttgtggaaaggacgaaacaccgtaatttctactaagtgtagatgcaaaccactcgggtaattttaatttctactaagtgtagatggaggccccggggcccaccataatttctactaagtgtagatttttttnnnnnnnnnnaagcttggcgtggatccgatatcaactagatcttgagacaaatggcagtattcatccacaattttaaaagaaaaggggggattggggggtacagtgcaggggaaagaatagtagacataatagcaacagacatacaaactaaag

SEQ ID NO: 13939 - DNA, 301 bp, Artificial Sequence
  Wrn.1_Fanca.2
  crRNA array
  misc_feature (148)..(157): n is a, c, g, or t
cttggctttatatatcttgtggaaaggacgaaacaccgtaatttctactaagtgtagatgcaaaccactcgggtaattttaatttctactaagtgtagatagagctaccacctagacagctaatttctactaagtgtagatttttttnnnnnnnnnnaagcttggcgtggatccgatatcaactagatcttgagacaaatggcagtattcatccacaattttaaaagaaaaggggggattggggggtacagtgcaggggaaagaatagtagacataatagcaacagacatacaaactaaag

SEQ ID NO: 13940 - DNA, 301 bp, Artificial Sequence
  Wrn.1_Fanca.3
  crRNA array
  misc_feature (148)..(157): n is a, c, g, or t
cttggctttatatatcttgtggaaaggacgaaacaccgtaatttctactaagtgtagatgcaaaccactcgggtaattttaatttctactaagtgtagataccaactgctgtgcctcgggtaatttctactaagtgtagatttttttnnnnnnnnnnaagcttggcgtggatccgatatcaactagatcttgagacaaatggcagtattcatccacaattttaaaagaaaaggggggattggggggtacagtgcaggggaaagaatagtagacataatagcaacagacatacaaactaaag

SEQ ID NO: 13941 - DNA, 301 bp, Artificial Sequence
  Wrn.1_Fanca.4
  crRNA array
  misc_feature (148)..(157): n is a, c, g, or t
cttggctttatatatcttgtggaaaggacgaaacaccgtaatttctactaagtgtagatgcaaaccactcgggtaattttaatttctactaagtgtagatcacccacccctggtgccaagtaatttctactaagtgtagatttttttnnnnnnnnnnaagcttggcgtggatccgatatcaactagatcttgagacaaatggcagtattcatccacaattttaaaagaaaaggggggattggggggtacagtgcaggggaaagaatagtagacataatagcaacagacatacaaactaaag

SEQ ID NO: 13942 - DNA, 301 bp, Artificial Sequence
  Wrn.2_Fanca.1
  crRNA array
  misc_feature (148)..(157): n is a, c, g, or t
cttggctttatatatcttgtggaaaggacgaaacaccgtaatttctactaagtgtagatgccatgtccagcagaacctttaatttctactaagtgtagatggaggccccggggcccaccataatttctactaagtgtagatttttttnnnnnnnnnnaagcttggcgtggatccgatatcaactagatcttgagacaaatggcagtattcatccacaattttaaaagaaaaggggggattggggggtacagtgcaggggaaagaatagtagacataatagcaacagacatacaaactaaag

SEQ ID NO: 13943 - DNA, 301 bp, Artificial Sequence
  Wrn.2_Fanca.2
  crRNA array
  misc_feature (148)..(157): n is a, c, g, or t
cttggctttatatatcttgtggaaaggacgaaacaccgtaatttctactaagtgtagatgccatgtccagcagaacctttaatttctactaagtgtagatagagctaccacctagacagctaatttctactaagtgtagatttttttnnnnnnnnnnaagcttggcgtggatccgatatcaactagatcttgagacaaatggcagtattcatccacaattttaaaagaaaaggggggattggggggtacagtgcaggggaaagaatagtagacataatagcaacagacatacaaactaaag

SEQ ID NO: 13944 - DNA, 301 bp, Artificial Sequence
  Wrn.2_Fanca.3
  crRNA array
  misc_feature (148)..(157): n is a, c, g, or t
cttggctttatatatcttgtggaaaggacgaaacaccgtaatttctactaagtgtagatgccatgtccagcagaacctttaatttctactaagtgtagataccaactgctgtgcctcgggtaatttctactaagtgtagatttttttnnnnnnnnnnaagcttggcgtggatccgatatcaactagatcttgagacaaatggcagtattcatccacaattttaaaagaaaaggggggattggggggtacagtgcaggggaaagaatagtagacataatagcaacagacatacaaactaaag

SEQ ID NO: 13945 - DNA, 301 bp, Artificial Sequence
  Wrn.2_Fanca.4
  crRNA array
  misc_feature (148)..(157): n is a, c, g, or t
cttggctttatatatcttgtggaaaggacgaaacaccgtaatttctactaagtgtagatgccatgtccagcagaacctttaatttctactaagtgtagatcacccacccctggtgccaagtaatttctactaagtgtagatttttttnnnnnnnnnnaagcttggcgtggatccgatatcaactagatcttgagacaaatggcagtattcatccacaattttaaaagaaaaggggggattggggggtacagtgcaggggaaagaatagtagacataatagcaacagacatacaaactaaag

SEQ ID NO: 13946 - DNA, 301 bp, Artificial Sequence
  Wrn.3_Fanca.1
  crRNA array
  misc_feature (148)..(157): n is a, c, g, or t
cttggctttatatatcttgtggaaaggacgaaacaccgtaatttctactaagtgtagatctgcagcaggccaccgcaattaatttctactaagtgtagatggaggccccggggcccaccataatttctactaagtgtagatttttttnnnnnnnnnnaagcttggcgtggatccgatatcaactagatcttgagacaaatggcagtattcatccacaattttaaaagaaaaggggggattggggggtacagtgcaggggaaagaatagtagacataatagcaacagacatacaaactaaag

SEQ ID NO: 13947 - DNA, 301 bp, Artificial Sequence
  Wrn.3_Fanca.2
  crRNA array
  misc_feature (148)..(157): n is a, c, g, or t
cttggctttatatatcttgtggaaaggacgaaacaccgtaatttctactaagtgtagatctgcagcaggccaccgcaattaatttctactaagtgtagatagagctaccacctagacagctaatttctactaagtgtagatttttttnnnnnnnnnnaagcttggcgtggatccgatatcaactagatcttgagacaaatggcagtattcatccacaattttaaaagaaaaggggggattggggggtacagtgcaggggaaagaatagtagacataatagcaacagacatacaaactaaag

SEQ ID NO: 13948 - DNA, 301 bp, Artificial Sequence
  Wrn.3_Fanca.3
  crRNA array
  misc_feature (148)..(157): n is a, c, g, or t
cttggctttatatatcttgtggaaaggacgaaacaccgtaatttctactaagtgtagatctgcagcaggccaccgcaattaatttctactaagtgtagataccaactgctgtgcctcgggtaatttctactaagtgtagatttttttnnnnnnnnnnaagcttggcgtggatccgatatcaactagatcttgagacaaatggcagtattcatccacaattttaaaagaaaaggggggattggggggtacagtgcaggggaaagaatagtagacataatagcaacagacatacaaactaaag

SEQ ID NO: 13949 - DNA, 301 bp, Artificial Sequence
  Wrn.3_Fanca.4
  crRNA array
  misc_feature (148)..(157): n is a, c, g, or t
cttggctttatatatcttgtggaaaggacgaaacaccgtaatttctactaagtgtagatctgcagcaggccaccgcaattaatttctactaagtgtagatcacccacccctggtgccaagtaatttctactaagtgtagatttttttnnnnnnnnnnaagcttggcgtggatccgatatcaactagatcttgagacaaatggcagtattcatccacaattttaaaagaaaaggggggattggggggtacagtgcaggggaaagaatagtagacataatagcaacagacatacaaactaaag

SEQ ID NO: 13950 - DNA, 301 bp, Artificial Sequence
  Wrn.4_Fanca.1
  crRNA array
  misc_feature (148)..(157): n is a, c, g, or t
cttggctttatatatcttgtggaaaggacgaaacaccgtaatttctactaagtgtagattcgaaggacaatagatgatgtaatttctactaagtgtagatggaggccccggggcccaccataatttctactaagtgtagatttttttnnnnnnnnnnaagcttggcgtggatccgatatcaactagatcttgagacaaatggcagtattcatccacaattttaaaagaaaaggggggattggggggtacagtgcaggggaaagaatagtagacataatagcaacagacatacaaactaaag

SEQ ID NO: 13951 - DNA, 301 bp, Artificial Sequence
  Wrn.4_Fanca.2
  crRNA array
  misc_feature (148)..(157): n is a, c, g, or t
cttggctttatatatcttgtggaaaggacgaaacaccgtaatttctactaagtgtagattcgaaggacaatagatgatgtaatttctactaagtgtagatagagctaccacctagacagctaatttctactaagtgtagatttttttnnnnnnnnnnaagcttggcgtggatccgatatcaactagatcttgagacaaatggcagtattcatccacaattttaaaagaaaaggggggattggggggtacagtgcaggggaaagaatagtagacataatagcaacagacatacaaactaaag

SEQ ID NO: 13952 - DNA, 301 bp, Artificial Sequence
  Wrn.4_Fanca.3
  crRNA array
  misc_feature (148)..(157): n is a, c, g, or t
cttggctttatatatcttgtggaaaggacgaaacaccgtaatttctactaagtgtagattcgaaggacaatagatgatgtaatttctactaagtgtagataccaactgctgtgcctcgggtaatttctactaagtgtagatttttttnnnnnnnnnnaagcttggcgtggatccgatatcaactagatcttgagacaaatggcagtattcatccacaattttaaaagaaaaggggggattggggggtacagtgcaggggaaagaatagtagacataatagcaacagacatacaaactaaag

SEQ ID NO: 13953 - DNA, 301 bp, Artificial Sequence
  Wrn.4_Fanca.4
  crRNA array
  misc_feature (148)..(157): n is a, c, g, or t
cttggctttatatatcttgtggaaaggacgaaacaccgtaatttctactaagtgtagattcgaaggacaatagatgatgtaatttctactaagtgtagatcacccacccctggtgccaagtaatttctactaagtgtagatttttttnnnnnnnnnnaagcttggcgtggatccgatatcaactagatcttgagacaaatggcagtattcatccacaattttaaaagaaaaggggggattggggggtacagtgcaggggaaagaatagtagacataatagcaacagacatacaaactaaag

SEQ ID NO: 13954 - DNA, 301 bp, Artificial Sequence
  Wrn.1_Nf1.1
  crRNA array
  misc_feature (148)..(157): n is a, c, g, or t
cttggctttatatatcttgtggaaaggacgaaacaccgtaatttctactaagtgtagatgcaaaccactcgggtaattttaatttctactaagtgtagattggcgatccggaatcctctgtaatttctactaagtgtagatttttttnnnnnnnnnnaagcttggcgtggatccgatatcaactagatcttgagacaaatggcagtattcatccacaattttaaaagaaaaggggggattggggggtacagtgcaggggaaagaatagtagacataatagcaacagacatacaaactaaag

SEQ ID NO: 13955 - DNA, 301 bp, Artificial Sequence
  Wrn.1_Nf1.2
  crRNA array
  misc_feature (148)..(157): n is a, c, g, or t
cttggctttatatatcttgtggaaaggacgaaacaccgtaatttctactaagtgtagatgcaaaccactcgggtaattttaatttctactaagtgtagatggaaacacaacgctggcctctaatttctactaagtgtagatttttttnnnnnnnnnnaagcttggcgtggatccgatatcaactagatcttgagacaaatggcagtattcatccacaattttaaaagaaaaggggggattggggggtacagtgcaggggaaagaatagtagacataatagcaacagacatacaaactaaag

SEQ ID NO: 13956 - DNA, 301 bp, Artificial Sequence
  Wrn.1_Nf1.3
  crRNA array
  misc_feature (148)..(157): n is a, c, g, or t
cttggctttatatatcttgtggaaaggacgaaacaccgtaatttctactaagtgtagatgcaaaccactcgggtaattttaatttctactaagtgtagataatgatggaacgcagtcgcataatttctactaagtgtagatttttttnnnnnnnnnnaagcttggcgtggatccgatatcaactagatcttgagacaaatggcagtattcatccacaattttaaaagaaaaggggggattggggggtacagtgcaggggaaagaatagtagacataatagcaacagacatacaaactaaag

SEQ ID NO: 13957 - DNA, 301 bp, Artificial Sequence
  Wrn.1_Nf1.4
  crRNA array
  misc_feature (148)..(157): n is a, c, g, or t
cttggctttatatatcttgtggaaaggacgaaacaccgtaatttctactaagtgtagatgcaaaccactcgggtaattttaatttctactaagtgtagattgcaaaaccatccaccaagttaatttctactaagtgtagatttttttnnnnnnnnnnaagcttggcgtggatccgatatcaactagatcttgagacaaatggcagtattcatccacaattttaaaagaaaaggggggattggggggtacagtgcaggggaaagaatagtagacataatagcaacagacatacaaactaaag

SEQ ID NO: 13958 - DNA, 301 bp, Artificial Sequence
  Wrn.2_Nf1.1
  crRNA array
  misc_feature (148)..(157): n is a, c, g, or t
cttggctttatatatcttgtggaaaggacgaaacaccgtaatttctactaagtgtagatgccatgtccagcagaacctttaatttctactaagtgtagattggcgatccggaatcctctgtaatttctactaagtgtagatttttttnnnnnnnnnnaagcttggcgtggatccgatatcaactagatcttgagacaaatggcagtattcatccacaattttaaaagaaaaggggggattggggggtacagtgcaggggaaagaatagtagacataatagcaacagacatacaaactaaag

SEQ ID NO: 13959 - DNA, 301 bp, Artificial Sequence
  Wrn.2_Nf1.2
  crRNA array
  misc_feature (148)..(157): n is a, c, g, or t
cttggctttatatatcttgtggaaaggacgaaacaccgtaatttctactaagtgtagatgccatgtccagcagaacctttaatttctactaagtgtagatggaaacacaacgctggcctctaatttctactaagtgtagatttttttnnnnnnnnnnaagcttggcgtggatccgatatcaactagatcttgagacaaatggcagtattcatccacaattttaaaagaaaaggggggattggggggtacagtgcaggggaaagaatagtagacataatagcaacagacatacaaactaaag

SEQ ID NO: 13960 - DNA, 301 bp, Artificial Sequence
  Wrn.2_Nf1.3
  crRNA array
  misc_feature (148)..(157): n is a, c, g, or t
cttggctttatatatcttgtggaaaggacgaaacaccgtaatttctactaagtgtagatgccatgtccagcagaacctttaatttctactaagtgtagataatgatggaacgcagtcgcataatttctactaagtgtagatttttttnnnnnnnnnnaagcttggcgtggatccgatatcaactagatcttgagacaaatggcagtattcatccacaattttaaaagaaaaggggggattggggggtacagtgcaggggaaagaatagtagacataatagcaacagacatacaaactaaag

SEQ ID NO: 13961 - DNA, 301 bp, Artificial Sequence
  Wrn.2_Nf1.4
  crRNA array
  misc_feature (148)..(157): n is a, c, g, or t
cttggctttatatatcttgtggaaaggacgaaacaccgtaatttctactaagtgtagatgccatgtccagcagaacctttaatttctactaagtgtagattgcaaaaccatccaccaagttaatttctactaagtgtagatttttttnnnnnnnnnnaagcttggcgtggatccgatatcaactagatcttgagacaaatggcagtattcatccacaattttaaaagaaaaggggggattggggggtacagtgcaggggaaagaatagtagacataatagcaacagacatacaaactaaag

SEQ ID NO: 13962 - DNA, 301 bp, Artificial Sequence
  Wrn.3_Nf1.1
  crRNA array
  misc_feature (148)..(157): n is a, c, g, or t
cttggctttatatatcttgtggaaaggacgaaacaccgtaatttctactaagtgtagatctgcagcaggccaccgcaattaatttctactaagtgtagattggcgatccggaatcctctgtaatttctactaagtgtagatttttttnnnnnnnnnnaagcttggcgtggatccgatatcaactagatcttgagacaaatggcagtattcatccacaattttaaaagaaaaggggggattggggggtacagtgcaggggaaagaatagtagacataatagcaacagacatacaaactaaag

SEQ ID NO: 13963 - DNA, 301 bp, Artificial Sequence
  Wrn.3_Nf1.2
  crRNA array
  misc_feature (148)..(157): n is a, c, g, or t
cttggctttatatatcttgtggaaaggacgaaacaccgtaatttctactaagtgtagatctgcagcaggccaccgcaattaatttctactaagtgtagatggaaacacaacgctggcctctaatttctactaagtgtagatttttttnnnnnnnnnnaagcttggcgtggatccgatatcaactagatcttgagacaaatggcagtattcatccacaattttaaaagaaaaggggggattggggggtacagtgcaggggaaagaatagtagacataatagcaacagacatacaaactaaag

SEQ ID NO: 13964 - DNA, 301 bp, Artificial Sequence
  Wrn.3_Nf1.3
  crRNA array
  misc_feature (148)..(157): n is a, c, g, or t
cttggctttatatatcttgtggaaaggacgaaacaccgtaatttctactaagtgtagatctgcagcaggccaccgcaattaatttctactaagtgtagataatgatggaacgcagtcgcataatttctactaagtgtagatttttttnnnnnnnnnnaagcttggcgtggatccgatatcaactagatcttgagacaaatggcagtattcatccacaattttaaaagaaaaggggggattggggggtacagtgcaggggaaagaatagtagacataatagcaacagacatacaaactaaag

SEQ ID NO: 13965 - DNA, 301 bp, Artificial Sequence
  Wrn.3_Nf1.4
  crRNA array
  misc_feature (148)..(157): n is a, c, g, or t
cttggctttatatatcttgtggaaaggacgaaacaccgtaatttctactaagtgtagatctgcagcaggccaccgcaattaatttctactaagtgtagattgcaaaaccatccaccaagttaatttctactaagtgtagatttttttnnnnnnnnnnaagcttggcgtggatccgatatcaactagatcttgagacaaatggcagtattcatccacaattttaaaagaaaaggggggattggggggtacagtgcaggggaaagaatagtagacataatagcaacagacatacaaactaaag

SEQ ID NO: 13966 - DNA, 301 bp, Artificial Sequence
  Wrn.4_Nf1.1
  crRNA array
  misc_feature (148)..(157): n is a, c, g, or t
cttggctttatatatcttgtggaaaggacgaaacaccgtaatttctactaagtgtagattcgaaggacaatagatgatgtaatttctactaagtgtagattggcgatccggaatcctctgtaatttctactaagtgtagatttttttnnnnnnnnnnaagcttggcgtggatccgatatcaactagatcttgagacaaatggcagtattcatccacaattttaaaagaaaaggggggattggggggtacagtgcaggggaaagaatagtagacataatagcaacagacatacaaactaaag

SEQ ID NO: 13967 - DNA, 301 bp, Artificial Sequence
  Wrn.4_Nf1.2
  crRNA array
  misc_feature (148)..(157): n is a, c, g, or t
cttggctttatatatcttgtggaaaggacgaaacaccgtaatttctactaagtgtagattcgaaggacaatagatgatgtaatttctactaagtgtagatggaaacacaacgctggcctctaatttctactaagtgtagatttttttnnnnnnnnnnaagcttggcgtggatccgatatcaactagatcttgagacaaatggcagtattcatccacaattttaaaagaaaaggggggattggggggtacagtgcaggggaaagaatagtagacataatagcaacagacatacaaactaaag

SEQ ID NO: 13968 - DNA, 301 bp, Artificial Sequence
  Wrn.4_Nf1.3
  crRNA array
  misc_feature (148)..(157): n is a, c, g, or t
cttggctttatatatcttgtggaaaggacgaaacaccgtaatttctactaagtgtagattcgaaggacaatagatgatgtaatttctactaagtgtagataatgatggaacgcagtcgcataatttctactaagtgtagatttttttnnnnnnnnnnaagcttggcgtggatccgatatcaactagatcttgagacaaatggcagtattcatccacaattttaaaagaaaaggggggattggggggtacagtgcaggggaaagaatagtagacataatagcaacagacatacaaactaaag

SEQ ID NO: 13969 - DNA, 301 bp, Artificial Sequence
  Wrn.4_Nf1.4
  crRNA array
  misc_feature (148)..(157): n is a, c, g, or t
cttggctttatatatcttgtggaaaggacgaaacaccgtaatttctactaagtgtagattcgaaggacaatagatgatgtaatttctactaagtgtagattgcaaaaccatccaccaagttaatttctactaagtgtagatttttttnnnnnnnnnnaagcttggcgtggatccgatatcaactagatcttgagacaaatggcagtattcatccacaattttaaaagaaaaggggggattggggggtacagtgcaggggaaagaatagtagacataatagcaacagacatacaaactaaag

SEQ ID NO: 13970 - DNA, 301 bp, Artificial Sequence
  Wrn.1_Kdm6a.1
  crRNA array
  misc_feature (148)..(157): n is a, c, g, or t
cttggctttatatatcttgtggaaaggacgaaacaccgtaatttctactaagtgtagatgcaaaccactcgggtaattttaatttctactaagtgtagatgctgccgcctctcgcggcagtaatttctactaagtgtagatttttttnnnnnnnnnnaagcttggcgtggatccgatatcaactagatcttgagacaaatggcagtattcatccacaattttaaaagaaaaggggggattggggggtacagtgcaggggaaagaatagtagacataatagcaacagacatacaaactaaag

SEQ ID NO: 13971 - DNA, 301 bp, Artificial Sequence
  Wrn.1_Kdm6a.2
  crRNA array
  misc_feature (148)..(157): n is a, c, g, or t
cttggctttatatatcttgtggaaaggacgaaacaccgtaatttctactaagtgtagatgcaaaccactcgggtaattttaatttctactaagtgtagatgctgcaggtaaggcacgttttaatttctactaagtgtagatttttttnnnnnnnnnnaagcttggcgtggatccgatatcaactagatcttgagacaaatggcagtattcatccacaattttaaaagaaaaggggggattggggggtacagtgcaggggaaagaatagtagacataatagcaacagacatacaaactaaag

SEQ ID NO: 13972 - DNA, 301 bp, Artificial Sequence
  Wrn.1_Kdm6a.3
  crRNA array
  misc_feature (148)..(157): n is a, c, g, or t
cttggctttatatatcttgtggaaaggacgaaacaccgtaatttctactaagtgtagatgcaaaccactcgggtaattttaatttctactaagtgtagattgctggtgccggggaagttttaatttctactaagtgtagatttttttnnnnnnnnnnaagcttggcgtggatccgatatcaactagatcttgagacaaatggcagtattcatccacaattttaaaagaaaaggggggattggggggtacagtgcaggggaaagaatagtagacataatagcaacagacatacaaactaaag

SEQ ID NO: 13973 - DNA, 301 bp, Artificial Sequence
  Wrn.1_Kdm6a.4
  crRNA array
  misc_feature (148)..(157): n is a, c, g, or t
cttggctttatatatcttgtggaaaggacgaaacaccgtaatttctactaagtgtagatgcaaaccactcgggtaattttaatttctactaagtgtagattgtctcctacgaatcccccctaatttctactaagtgtagatttttttnnnnnnnnnnaagcttggcgtggatccgatatcaactagatcttgagacaaatggcagtattcatccacaattttaaaagaaaaggggggattggggggtacagtgcaggggaaagaatagtagacataatagcaacagacatacaaactaaag

SEQ ID NO: 13974 - DNA, 301 bp, Artificial Sequence
  Wrn.2_Kdm6a.1
  crRNA array
  misc_feature (148)..(157): n is a, c, g, or t
cttggctttatatatcttgtggaaaggacgaaacaccgtaatttctactaagtgtagatgccatgtccagcagaacctttaatttctactaagtgtagatgctgccgcctctcgcggcagtaatttctactaagtgtagatttttttnnnnnnnnnnaagcttggcgtggatccgatatcaactagatcttgagacaaatggcagtattcatccacaattttaaaagaaaaggggggattggggggtacagtgcaggggaaagaatagtagacataatagcaacagacatacaaactaaag

SEQ ID NO: 13975 - DNA, 301 bp, Artificial Sequence
  Wrn.2_Kdm6a.2
  crRNA array
  misc_feature (148)..(157): n is a, c, g, or t
cttggctttatatatcttgtggaaaggacgaaacaccgtaatttctactaagtgtagatgccatgtccagcagaacctttaatttctactaagtgtagatgctgcaggtaaggcacgttttaatttctactaagtgtagatttttttnnnnnnnnnnaagcttggcgtggatccgatatcaactagatcttgagacaaatggcagtattcatccacaattttaaaagaaaaggggggattggggggtacagtgcaggggaaagaatagtagacataatagcaacagacatacaaactaaag

SEQ ID NO: 13976 - DNA, 301 bp, Artificial Sequence
  Wrn.2_Kdm6a.3
  crRNA array
  misc_feature (148)..(157): n is a, c, g, or t
cttggctttatatatcttgtggaaaggacgaaacaccgtaatttctactaagtgtagatgccatgtccagcagaacctttaatttctactaagtgtagattgctggtgccggggaagttttaatttctactaagtgtagatttttttnnnnnnnnnnaagcttggcgtggatccgatatcaactagatcttgagacaaatggcagtattcatccacaattttaaaagaaaaggggggattggggggtacagtgcaggggaaagaatagtagacataatagcaacagacatacaaactaaag

SEQ ID NO: 13977 - DNA, 301 bp, Artificial Sequence
  Wrn.2_Kdm6a.4
  crRNA array
  misc_feature (148)..(157): n is a, c, g, or t
cttggctttatatatcttgtggaaaggacgaaacaccgtaatttctactaagtgtagatgccatgtccagcagaacctttaatttctactaagtgtagattgtctcctacgaatcccccctaatttctactaagtgtagatttttttnnnnnnnnnnaagcttggcgtggatccgatatcaactagatcttgagacaaatggcagtattcatccacaattttaaaagaaaaggggggattggggggtacagtgcaggggaaagaatagtagacataatagcaacagacatacaaactaaag

SEQ ID NO: 13978 - DNA, 301 bp, Artificial Sequence
  Wrn.3_Kdm6a.1
  crRNA array
  misc_feature (148)..(157): n is a, c, g, or t
cttggctttatatatcttgtggaaaggacgaaacaccgtaatttctactaagtgtagatctgcagcaggccaccgcaattaatttctactaagtgtagatgctgccgcctctcgcggcagtaatttctactaagtgtagatttttttnnnnnnnnnnaagcttggcgtggatccgatatcaactagatcttgagacaaatggcagtattcatccacaattttaaaagaaaaggggggattggggggtacagtgcaggggaaagaatagtagacataatagcaacagacatacaaactaaag

SEQ ID NO: 13979 - DNA, 301 bp, Artificial Sequence
  Wrn.3_Kdm6a.2
  crRNA array
  misc_feature (148)..(157): n is a, c, g, or t
cttggctttatatatcttgtggaaaggacgaaacaccgtaatttctactaagtgtagatctgcagcaggccaccgcaattaatttctactaagtgtagatgctgcaggtaaggcacgttttaatttctactaagtgtagatttttttnnnnnnnnnnaagcttggcgtggatccgatatcaactagatcttgagacaaatggcagtattcatccacaattttaaaagaaaaggggggattggggggtacagtgcaggggaaagaatagtagacataatagcaacagacatacaaactaaag

SEQ ID NO: 13980 - DNA, 301 bp, Artificial Sequence
  Wrn.3_Kdm6a.3
  crRNA array
  misc_feature (148)..(157): n is a, c, g, or t
cttggctttatatatcttgtggaaaggacgaaacaccgtaatttctactaagtgtagatctgcagcaggccaccgcaattaatttctactaagtgtagattgctggtgccggggaagttttaatttctactaagtgtagatttttttnnnnnnnnnnaagcttggcgtggatccgatatcaactagatcttgagacaaatggcagtattcatccacaattttaaaagaaaaggggggattggggggtacagtgcaggggaaagaatagtagacataatagcaacagacatacaaactaaag

SEQ ID NO: 13981 - DNA, 301 bp, Artificial Sequence
  Wrn.3_Kdm6a.4
  crRNA array
  misc_feature (148)..(157): n is a, c, g, or t
cttggctttatatatcttgtggaaaggacgaaacaccgtaatttctactaagtgtagatctgcagcaggccaccgcaattaatttctactaagtgtagattgtctcctacgaatcccccctaatttctactaagtgtagatttttttnnnnnnnnnnaagcttggcgtggatccgatatcaactagatcttgagacaaatggcagtattcatccacaattttaaaagaaaaggggggattggggggtacagtgcaggggaaagaatagtagacataatagcaacagacatacaaactaaag

SEQ ID NO: 13982 - DNA, 301 bp, Artificial Sequence
  Wrn.4_Kdm6a.1
  crRNA array
  misc_feature (148)..(157): n is a, c, g, or t
cttggctttatatatcttgtggaaaggacgaaacaccgtaatttctactaagtgtagattcgaaggacaatagatgatgtaatttctactaagtgtagatgctgccgcctctcgcggcagtaatttctactaagtgtagatttttttnnnnnnnnnnaagcttggcgtggatccgatatcaactagatcttgagacaaatggcagtattcatccacaattttaaaagaaaaggggggattggggggtacagtgcaggggaaagaatagtagacataatagcaacagacatacaaactaaag

SEQ ID NO: 13983 - DNA, 301 bp, Artificial Sequence
  Wrn.4_Kdm6a.2
  crRNA array
  misc_feature (148)..(157): n is a, c, g, or t
cttggctttatatatcttgtggaaaggacgaaacaccgtaatttctactaagtgtagattcgaaggacaatagatgatgtaatttctactaagtgtagatgctgcaggtaaggcacgttttaatttctactaagtgtagatttttttnnnnnnnnnnaagcttggcgtggatccgatatcaactagatcttgagacaaatggcagtattcatccacaattttaaaagaaaaggggggattggggggtacagtgcaggggaaagaatagtagacataatagcaacagacatacaaactaaag

SEQ ID NO: 13984 - DNA, 301 bp, Artificial Sequence
  Wrn.4_Kdm6a.3
  crRNA array
  misc_feature (148)..(157): n is a, c, g, or t
cttggctttatatatcttgtggaaaggacgaaacaccgtaatttctactaagtgtagattcgaaggacaatagatgatgtaatttctactaagtgtagattgctggtgccggggaagttttaatttctactaagtgtagatttttttnnnnnnnnnnaagcttggcgtggatccgatatcaactagatcttgagacaaatggcagtattcatccacaattttaaaagaaaaggggggattggggggtacagtgcaggggaaagaatagtagacataatagcaacagacatacaaactaaag

SEQ ID NO: 13985 - DNA, 301 bp, Artificial Sequence
  Wrn.4_Kdm6a.4
  crRNA array
  misc_feature (148)..(157): n is a, c, g, or t
cttggctttatatatcttgtggaaaggacgaaacaccgtaatttctactaagtgtagattcgaaggacaatagatgatgtaatttctactaagtgtagattgtctcctacgaatcccccctaatttctactaagtgtagatttttttnnnnnnnnnnaagcttggcgtggatccgatatcaactagatcttgagacaaatggcagtattcatccacaattttaaaagaaaaggggggattggggggtacagtgcaggggaaagaatagtagacataatagcaacagacatacaaactaaag

SEQ ID NO: 13986 - DNA, 301 bp, Artificial Sequence
  Wrn.1_Ercc5.1
  crRNA array
  misc_feature (148)..(157): n is a, c, g, or t
cttggctttatatatcttgtggaaaggacgaaacaccgtaatttctactaagtgtagatgcaaaccactcgggtaattttaatttctactaagtgtagatacggcacgagcaagagacactaatttctactaagtgtagatttttttnnnnnnnnnnaagcttggcgtggatccgatatcaactagatcttgagacaaatggcagtattcatccacaattttaaaagaaaaggggggattggggggtacagtgcaggggaaagaatagtagacataatagcaacagacatacaaactaaag

SEQ ID NO: 13987 - DNA, 301 bp, Artificial Sequence
  Wrn.1_Ercc5.2
  crRNA array
  misc_feature (148)..(157): n is a, c, g, or t
cttggctttatatatcttgtggaaaggacgaaacaccgtaatttctactaagtgtagatgcaaaccactcgggtaattttaatttctactaagtgtagatgagtatcacatcggtgactctaatttctactaagtgtagatttttttnnnnnnnnnnaagcttggcgtggatccgatatcaactagatcttgagacaaatggcagtattcatccacaattttaaaagaaaaggggggattggggggtacagtgcaggggaaagaatagtagacataatagcaacagacatacaaactaaag

SEQ ID NO: 13988 - DNA, 301 bp, Artificial Sequence
  Wrn.1_Ercc5.3
  crRNA array
  misc_feature (148)..(157): n is a, c, g, or t
cttggctttatatatcttgtggaaaggacgaaacaccgtaatttctactaagtgtagatgcaaaccactcgggtaattttaatttctactaagtgtagatggagtgggtccaggcctcgttaatttctactaagtgtagatttttttnnnnnnnnnnaagcttggcgtggatccgatatcaactagatcttgagacaaatggcagtattcatccacaattttaaaagaaaaggggggattggggggtacagtgcaggggaaagaatagtagacataatagcaacagacatacaaactaaag

SEQ ID NO: 13989 - DNA, 301 bp, Artificial Sequence
  Wrn.1_Ercc5.4
  crRNA array
  misc_feature (148)..(157): n is a, c, g, or t
cttggctttatatatcttgtggaaaggacgaaacaccgtaatttctactaagtgtagatgcaaaccactcgggtaattttaatttctactaagtgtagatcagagccggtggaataatgttaatttctactaagtgtagatttttttnnnnnnnnnnaagcttggcgtggatccgatatcaactagatcttgagacaaatggcagtattcatccacaattttaaaagaaaaggggggattggggggtacagtgcaggggaaagaatagtagacataatagcaacagacatacaaactaaag

SEQ ID NO: 13990 - DNA, 301 bp, Artificial Sequence
  Wrn.2_Ercc5.1
  crRNA array
  misc_feature (148)..(157): n is a, c, g, or t
cttggctttatatatcttgtggaaaggacgaaacaccgtaatttctactaagtgtagatgccatgtccagcagaacctttaatttctactaagtgtagatacggcacgagcaagagacactaatttctactaagtgtagatttttttnnnnnnnnnnaagcttggcgtggatccgatatcaactagatcttgagacaaatggcagtattcatccacaattttaaaagaaaaggggggattggggggtacagtgcaggggaaagaatagtagacataatagcaacagacatacaaactaaag

SEQ ID NO: 13991 - DNA, 301 bp, Artificial Sequence
  Wrn.2_Ercc5.2
  crRNA array
  misc_feature (148)..(157): n is a, c, g, or t
cttggctttatatatcttgtggaaaggacgaaacaccgtaatttctactaagtgtagatgccatgtccagcagaacctttaatttctactaagtgtagatgagtatcacatcggtgactctaatttctactaagtgtagatttttttnnnnnnnnnnaagcttggcgtggatccgatatcaactagatcttgagacaaatggcagtattcatccacaattttaaaagaaaaggggggattggggggtacagtgcaggggaaagaatagtagacataatagcaacagacatacaaactaaag

SEQ ID NO: 13992 - DNA, 301 bp, Artificial Sequence
  Wrn.2_Ercc5.3
  crRNA array
  misc_feature (148)..(157): n is a, c, g, or t
cttggctttatatatcttgtggaaaggacgaaacaccgtaatttctactaagtgtagatgccatgtccagcagaacctttaatttctactaagtgtagatggagtgggtccaggcctcgttaatttctactaagtgtagatttttttnnnnnnnnnnaagcttggcgtggatccgatatcaactagatcttgagacaaatggcagtattcatccacaattttaaaagaaaaggggggattggggggtacagtgcaggggaaagaatagtagacataatagcaacagacatacaaactaaag

SEQ ID NO: 13993 - DNA, 301 bp, Artificial Sequence
  Wrn.2_Ercc5.4
  crRNA array
  misc_feature (148)..(157): n is a, c, g, or t
cttggctttatatatcttgtggaaaggacgaaacaccgtaatttctactaagtgtagatgccatgtccagcagaacctttaatttctactaagtgtagatcagagccggtggaataatgttaatttctactaagtgtagatttttttnnnnnnnnnnaagcttggcgtggatccgatatcaactagatcttgagacaaatggcagtattcatccacaattttaaaagaaaaggggggattggggggtacagtgcaggggaaagaatagtagacataatagcaacagacatacaaactaaag

SEQ ID NO: 13994 - DNA, 301 bp, Artificial Sequence
  Wrn.3_Ercc5.1
  crRNA array
  misc_feature (148)..(157): n is a, c, g, or t
cttggctttatatatcttgtggaaaggacgaaacaccgtaatttctactaagtgtagatctgcagcaggccaccgcaattaatttctactaagtgtagatacggcacgagcaagagacactaatttctactaagtgtagatttttttnnnnnnnnnnaagcttggcgtggatccgatatcaactagatcttgagacaaatggcagtattcatccacaattttaaaagaaaaggggggattggggggtacagtgcaggggaaagaatagtagacataatagcaacagacatacaaactaaag

SEQ ID NO: 13995 - DNA, 301 bp, Artificial Sequence
  Wrn.3_Ercc5.2
  crRNA array
  misc_feature (148)..(157): n is a, c, g, or t
cttggctttatatatcttgtggaaaggacgaaacaccgtaatttctactaagtgtagatctgcagcaggccaccgcaattaatttctactaagtgtagatgagtatcacatcggtgactctaatttctactaagtgtagatttttttnnnnnnnnnnaagcttggcgtggatccgatatcaactagatcttgagacaaatggcagtattcatccacaattttaaaagaaaaggggggattggggggtacagtgcaggggaaagaatagtagacataatagcaacagacatacaaactaaag

SEQ ID NO: 13996 - DNA, 301 bp, Artificial Sequence
  Wrn.3_Ercc5.3
  crRNA array
  misc_feature (148)..(157): n is a, c, g, or t
cttggctttatatatcttgtggaaaggacgaaacaccgtaatttctactaagtgtagatctgcagcaggccaccgcaattaatttctactaagtgtagatggagtgggtccaggcctcgttaatttctactaagtgtagatttttttnnnnnnnnnnaagcttggcgtggatccgatatcaactagatcttgagacaaatggcagtattcatccacaattttaaaagaaaaggggggattggggggtacagtgcaggggaaagaatagtagacataatagcaacagacatacaaactaaag

SEQ ID NO: 13997 - DNA, 301 bp, Artificial Sequence
  Wrn.3_Ercc5.4
  crRNA array
  misc_feature (148)..(157): n is a, c, g, or t
cttggctttatatatcttgtggaaaggacgaaacaccgtaatttctactaagtgtagatctgcagcaggccaccgcaattaatttctactaagtgtagatcagagccggtggaataatgttaatttctactaagtgtagatttttttnnnnnnnnnnaagcttggcgtggatccgatatcaactagatcttgagacaaatggcagtattcatccacaattttaaaagaaaaggggggattggggggtacagtgcaggggaaagaatagtagacataatagcaacagacatacaaactaaag

SEQ ID NO: 13998 - DNA, 301 bp, Artificial Sequence
  Wrn.4_Ercc5.1
  crRNA array
  misc_feature (148)..(157): n is a, c, g, or t
cttggctttatatatcttgtggaaaggacgaaacaccgtaatttctactaagtgtagattcgaaggacaatagatgatgtaatttctactaagtgtagatacggcacgagcaagagacactaatttctactaagtgtagatttttttnnnnnnnnnnaagcttggcgtggatccgatatcaactagatcttgagacaaatggcagtattcatccacaattttaaaagaaaaggggggattggggggtacagtgcaggggaaagaatagtagacataatagcaacagacatacaaactaaag

SEQ ID NO: 13999 - DNA, 301 bp, Artificial Sequence
  Wrn.4_Ercc5.2
  crRNA array
  misc_feature (148)..(157): n is a, c, g, or t
cttggctttatatatcttgtggaaaggacgaaacaccgtaatttctactaagtgtagattcgaaggacaatagatgatgtaatttctactaagtgtagatgagtatcacatcggtgactctaatttctactaagtgtagatttttttnnnnnnnnnnaagcttggcgtggatccgatatcaactagatcttgagacaaatggcagtattcatccacaattttaaaagaaaaggggggattggggggtacagtgcaggggaaagaatagtagacataatagcaacagacatacaaactaaag

SEQ ID NO: 14000 - DNA, 301 bp, Artificial Sequence
  Wrn.4_Ercc5.3
  crRNA array
  misc_feature (148)..(157): n is a, c, g, or t
cttggctttatatatcttgtggaaaggacgaaacaccgtaatttctactaagtgtagattcgaaggacaatagatgatgtaatttctactaagtgtagatggagtgggtccaggcctcgttaatttctactaagtgtagatttttttnnnnnnnnnnaagcttggcgtggatccgatatcaactagatcttgagacaaatggcagtattcatccacaattttaaaagaaaaggggggattggggggtacagtgcaggggaaagaatagtagacataatagcaacagacatacaaactaaag

SEQ ID NO: 14001 - DNA, 301 bp, Artificial Sequence
  Wrn.4_Ercc5.4
  crRNA array
  misc_feature (148)..(157): n is a, c, g, or t
cttggctttatatatcttgtggaaaggacgaaacaccgtaatttctactaagtgtagattcgaaggacaatagatgatgtaatttctactaagtgtagatcagagccggtggaataatgttaatttctactaagtgtagatttttttnnnnnnnnnnaagcttggcgtggatccgatatcaactagatcttgagacaaatggcagtattcatccacaattttaaaagaaaaggggggattggggggtacagtgcaggggaaagaatagtagacataatagcaacagacatacaaactaaag

SEQ ID NO: 14002 - DNA, 301 bp, Artificial Sequence
  Wrn.1_Arid1b.1
  crRNA array
  misc_feature (148)..(157): n is a, c, g, or t
cttggctttatatatcttgtggaaaggacgaaacaccgtaatttctactaagtgtagatgcaaaccactcgggtaattttaatttctactaagtgtagatgctgctgctgtagtgcgtggtaatttctactaagtgtagatttttttnnnnnnnnnnaagcttggcgtggatccgatatcaactagatcttgagacaaatggcagtattcatccacaattttaaaagaaaaggggggattggggggtacagtgcaggggaaagaatagtagacataatagcaacagacatacaaactaaag

SEQ ID NO: 14003 - DNA, 301 bp, Artificial Sequence
  Wrn.1_Arid1b.2
  crRNA array
  misc_feature (148)..(157): n is a, c, g, or t
cttggctttatatatcttgtggaaaggacgaaacaccgtaatttctactaagtgtagatgcaaaccactcgggtaattttaatttctactaagtgtagatagtgcaaaactgagcgcgggtaatttctactaagtgtagatttttttnnnnnnnnnnaagcttggcgtggatccgatatcaactagatcttgagacaaatggcagtattcatccacaattttaaaagaaaaggggggattggggggtacagtgcaggggaaagaatagtagacataatagcaacagacatacaaactaaag

SEQ ID NO: 14004 - DNA, 301 bp, Artificial Sequence
  Wrn.1_Arid1b.3
  crRNA array
  misc_feature (148)..(157): n is a, c, g, or t
cttggctttatatatcttgtggaaaggacgaaacaccgtaatttctactaagtgtagatgcaaaccactcgggtaattttaatttctactaagtgtagatcactcaaaggcgaacaggtataatttctactaagtgtagatttttttnnnnnnnnnnaagcttggcgtggatccgatatcaactagatcttgagacaaatggcagtattcatccacaattttaaaagaaaaggggggattggggggtacagtgcaggggaaagaatagtagacataatagcaacagacatacaaactaaag

SEQ ID NO: 14005 - DNA, 301 bp, Artificial Sequence
  Wrn.1_Arid1b.4
  crRNA array
  misc_feature (148)..(157): n is a, c, g, or t
cttggctttatatatcttgtggaaaggacgaaacaccgtaatttctactaagtgtagatgcaaaccactcgggtaattttaatttctactaagtgtagatctcctggctccgtagaagcataatttctactaagtgtagatttttttnnnnnnnnnnaagcttggcgtggatccgatatcaactagatcttgagacaaatggcagtattcatccacaattttaaaagaaaaggggggattggggggtacagtgcaggggaaagaatagtagacataatagcaacagacatacaaactaaag

SEQ ID NO: 14006 - DNA, 301 bp, Artificial Sequence
  Wrn.2_Arid1b.1
  crRNA array
  misc_feature (148)..(157): n is a, c, g, or t
cttggctttatatatcttgtggaaaggacgaaacaccgtaatttctactaagtgtagatgccatgtccagcagaacctttaatttctactaagtgtagatgctgctgctgtagtgcgtggtaatttctactaagtgtagatttttttnnnnnnnnnnaagcttggcgtggatccgatatcaactagatcttgagacaaatggcagtattcatccacaattttaaaagaaaaggggggattggggggtacagtgcaggggaaagaatagtagacataatagcaacagacatacaaactaaag

SEQ ID NO: 14007 - DNA, 301 bp, Artificial Sequence
  Wrn.2_Arid1b.2
  crRNA array
  misc_feature (148)..(157): n is a, c, g, or t
cttggctttatatatcttgtggaaaggacgaaacaccgtaatttctactaagtgtagatgccatgtccagcagaacctttaatttctactaagtgtagatagtgcaaaactgagcgcgggtaatttctactaagtgtagatttttttnnnnnnnnnnaagcttggcgtggatccgatatcaactagatcttgagacaaatggcagtattcatccacaattttaaaagaaaaggggggattggggggtacagtgcaggggaaagaatagtagacataatagcaacagacatacaaactaaag

SEQ ID NO: 14008 - DNA, 301 bp, Artificial Sequence
  Wrn.2_Arid1b.3
  crRNA array
  misc_feature (148)..(157): n is a, c, g, or t
cttggctttatatatcttgtggaaaggacgaaacaccgtaatttctactaagtgtagatgccatgtccagcagaacctttaatttctactaagtgtagatcactcaaaggcgaacaggtataatttctactaagtgtagatttttttnnnnnnnnnnaagcttggcgtggatccgatatcaactagatcttgagacaaatggcagtattcatccacaattttaaaagaaaaggggggattggggggtacagtgcaggggaaagaatagtagacataatagcaacagacatacaaactaaag

SEQ ID NO: 14009 - DNA, 301 bp, Artificial Sequence
  Wrn.2_Arid1b.4
  crRNA array
  misc_feature (148)..(157): n is a, c, g, or t
cttggctttatatatcttgtggaaaggacgaaacaccgtaatttctactaagtgtagatgccatgtccagcagaacctttaatttctactaagtgtagatctcctggctccgtagaagcataatttctactaagtgtagatttttttnnnnnnnnnnaagcttggcgtggatccgatatcaactagatcttgagacaaatggcagtattcatccacaattttaaaagaaaaggggggattggggggtacagtgcaggggaaagaatagtagacataatagcaacagacatacaaactaaag

SEQ ID NO: 14010 - DNA, 301 bp, Artificial Sequence
  Wrn.3_Arid1b.1
  crRNA array
  misc_feature (148)..(157): n is a, c, g, or t
cttggctttatatatcttgtggaaaggacgaaacaccgtaatttctactaagtgtagatctgcagcaggccaccgcaattaatttctactaagtgtagatgctgctgctgtagtgcgtggtaatttctactaagtgtagatttttttnnnnnnnnnnaagcttggcgtggatccgatatcaactagatcttgagacaaatggcagtattcatccacaattttaaaagaaaaggggggattggggggtacagtgcaggggaaagaatagtagacataatagcaacagacatacaaactaaag

SEQ ID NO: 14011 - DNA, 301 bp, Artificial Sequence
  Wrn.3_Arid1b.2
  crRNA array
  misc_feature (148)..(157): n is a, c, g, or t
cttggctttatatatcttgtggaaaggacgaaacaccgtaatttctactaagtgtagatctgcagcaggccaccgcaattaatttctactaagtgtagatagtgcaaaactgagcgcgggtaatttctactaagtgtagatttttttnnnnnnnnnnaagcttggcgtggatccgatatcaactagatcttgagacaaatggcagtattcatccacaattttaaaagaaaaggggggattggggggtacagtgcaggggaaagaatagtagacataatagcaacagacatacaaactaaag

SEQ ID NO: 14012 - DNA, 301 bp, Artificial Sequence
  Wrn.3_Arid1b.3
  crRNA array
  misc_feature (148)..(157): n is a, c, g, or t
cttggctttatatatcttgtggaaaggacgaaacaccgtaatttctactaagtgtagatctgcagcaggccaccgcaattaatttctactaagtgtagatcactcaaaggcgaacaggtataatttctactaagtgtagatttttttnnnnnnnnnnaagcttggcgtggatccgatatcaactagatcttgagacaaatggcagtattcatccacaattttaaaagaaaaggggggattggggggtacagtgcaggggaaagaatagtagacataatagcaacagacatacaaactaaag

SEQ ID NO: 14013 - DNA, 301 bp, Artificial Sequence
  Wrn.3_Arid1b.4
  crRNA array
  misc_feature (148)..(157): n is a, c, g, or t
cttggctttatatatcttgtggaaaggacgaaacaccgtaatttctactaagtgtagatctgcagcaggccaccgcaattaatttctactaagtgtagatctcctggctccgtagaagcataatttctactaagtgtagatttttttnnnnnnnnnnaagcttggcgtggatccgatatcaactagatcttgagacaaatggcagtattcatccacaattttaaaagaaaaggggggattggggggtacagtgcaggggaaagaatagtagacataatagcaacagacatacaaactaaag

SEQ ID NO: 14014 - DNA, 301 bp, Artificial Sequence
  Wrn.4_Arid1b.1
  crRNA array
  misc_feature (148)..(157): n is a, c, g, or t
cttggctttatatatcttgtggaaaggacgaaacaccgtaatttctactaagtgtagattcgaaggacaatagatgatgtaatttctactaagtgtagatgctgctgctgtagtgcgtggtaatttctactaagtgtagatttttttnnnnnnnnnnaagcttggcgtggatccgatatcaactagatcttgagacaaatggcagtattcatccacaattttaaaagaaaaggggggattggggggtacagtgcaggggaaagaatagtagacataatagcaacagacatacaaactaaag

SEQ ID NO: 14015 - DNA, 301 bp, Artificial Sequence
  Wrn.4_Arid1b.2
  crRNA array
  misc_feature (148)..(157): n is a, c, g, or t
cttggctttatatatcttgtggaaaggacgaaacaccgtaatttctactaagtgtagattcgaaggacaatagatgatgtaatttctactaagtgtagatagtgcaaaactgagcgcgggtaatttctactaagtgtagatttttttnnnnnnnnnnaagcttggcgtggatccgatatcaactagatcttgagacaaatggcagtattcatccacaattttaaaagaaaaggggggattggggggtacagtgcaggggaaagaatagtagacataatagcaacagacatacaaactaaag

SEQ ID NO: 14016 - DNA, 301 bp, Artificial Sequence
  Wrn.4_Arid1b.3
  crRNA array
  misc_feature (148)..(157): n is a, c, g, or t
cttggctttatatatcttgtggaaaggacgaaacaccgtaatttctactaagtgtagattcgaaggacaatagatgatgtaatttctactaagtgtagatcactcaaaggcgaacaggtataatttctactaagtgtagatttttttnnnnnnnnnnaagcttggcgtggatccgatatcaactagatcttgagacaaatggcagtattcatccacaattttaaaagaaaaggggggattggggggtacagtgcaggggaaagaatagtagacataatagcaacagacatacaaactaaag

SEQ ID NO: 14017 - DNA, 301 bp, Artificial Sequence
  Wrn.4_Arid1b.4
  crRNA array
  misc_feature (148)..(157): n is a, c, g, or t
cttggctttatatatcttgtggaaaggacgaaacaccgtaatttctactaagtgtagattcgaaggacaatagatgatgtaatttctactaagtgtagatctcctggctccgtagaagcataatttctactaagtgtagatttttttnnnnnnnnnnaagcttggcgtggatccgatatcaactagatcttgagacaaatggcagtattcatccacaattttaaaagaaaaggggggattggggggtacagtgcaggggaaagaatagtagacataatagcaacagacatacaaactaaag

SEQ ID NO: 14018 - DNA, 301 bp, Artificial Sequence
  Wrn.1_Rb1.1
  crRNA array
  misc_feature (148)..(157): n is a, c, g, or t
cttggctttatatatcttgtggaaaggacgaaacaccgtaatttctactaagtgtagatgcaaaccactcgggtaattttaatttctactaagtgtagattctgacatgatcgggtaccttaatttctactaagtgtagatttttttnnnnnnnnnnaagcttggcgtggatccgatatcaactagatcttgagacaaatggcagtattcatccacaattttaaaagaaaaggggggattggggggtacagtgcaggggaaagaatagtagacataatagcaacagacatacaaactaaag

SEQ ID NO: 14019 - DNA, 301 bp, Artificial Sequence
  Wrn.1_Rb1.2
  crRNA array
  misc_feature (148)..(157): n is a, c, g, or t
cttggctttatatatcttgtggaaaggacgaaacaccgtaatttctactaagtgtagatgcaaaccactcgggtaattttaatttctactaagtgtagatgtctctgcatgaaaacggagtaatttctactaagtgtagatttttttnnnnnnnnnnaagcttggcgtggatccgatatcaactagatcttgagacaaatggcagtattcatccacaattttaaaagaaaaggggggattggggggtacagtgcaggggaaagaatagtagacataatagcaacagacatacaaactaaag

SEQ ID NO: 14020 - DNA, 301 bp, Artificial Sequence
  Wrn.1_Rb1.3
  crRNA array
  misc_feature (148)..(157): n is a, c, g, or t
cttggctttatatatcttgtggaaaggacgaaacaccgtaatttctactaagtgtagatgcaaaccactcgggtaattttaatttctactaagtgtagatagccaatctggtctaataactaatttctactaagtgtagatttttttnnnnnnnnnnaagcttggcgtggatccgatatcaactagatcttgagacaaatggcagtattcatccacaattttaaaagaaaaggggggattggggggtacagtgcaggggaaagaatagtagacataatagcaacagacatacaaactaaag

SEQ ID NO: 14021 - DNA, 301 bp, Artificial Sequence
  Wrn.1_Rb1.4
  crRNA array
  misc_feature (148)..(157): n is a, c, g, or t
cttggctttatatatcttgtggaaaggacgaaacaccgtaatttctactaagtgtagatgcaaaccactcgggtaattttaatttctactaagtgtagattgtagctcagtaaaagtgaataatttctactaagtgtagatttttttnnnnnnnnnnaagcttggcgtggatccgatatcaactagatcttgagacaaatggcagtattcatccacaattttaaaagaaaaggggggattggggggtacagtgcaggggaaagaatagtagacataatagcaacagacatacaaactaaag

SEQ ID NO: 14022 - DNA, 301 bp, Artificial Sequence
  Wrn.2_Rb1.1
  crRNA array
  misc_feature (148)..(157): n is a, c, g, or t
cttggctttatatatcttgtggaaaggacgaaacaccgtaatttctactaagtgtagatgccatgtccagcagaacctttaatttctactaagtgtagattctgacatgatcgggtaccttaatttctactaagtgtagatttttttnnnnnnnnnnaagcttggcgtggatccgatatcaactagatcttgagacaaatggcagtattcatccacaattttaaaagaaaaggggggattggggggtacagtgcaggggaaagaatagtagacataatagcaacagacatacaaactaaag

SEQ ID NO: 14023 - DNA, 301 bp, Artificial Sequence
  Wrn.2_Rb1.2
  crRNA array
  misc_feature (148)..(157): n is a, c, g, or t
cttggctttatatatcttgtggaaaggacgaaacaccgtaatttctactaagtgtagatgccatgtccagcagaacctttaatttctactaagtgtagatgtctctgcatgaaaacggagtaatttctactaagtgtagatttttttnnnnnnnnnnaagcttggcgtggatccgatatcaactagatcttgagacaaatggcagtattcatccacaattttaaaagaaaaggggggattggggggtacagtgcaggggaaagaatagtagacataatagcaacagacatacaaactaaag

SEQ ID NO: 14024 - DNA, 301 bp, Artificial Sequence
  Wrn.2_Rb1.3
  crRNA array
  misc_feature (148)..(157): n is a, c, g, or t
cttggctttatatatcttgtggaaaggacgaaacaccgtaatttctactaagtgtagatgccatgtccagcagaacctttaatttctactaagtgtagatagccaatctggtctaataactaatttctactaagtgtagatttttttnnnnnnnnnnaagcttggcgtggatccgatatcaactagatcttgagacaaatggcagtattcatccacaattttaaaagaaaaggggggattggggggtacagtgcaggggaaagaatagtagacataatagcaacagacatacaaactaaag

SEQ ID NO: 14025 - DNA, 301 bp, Artificial Sequence
  Wrn.2_Rb1.4
  crRNA array
  misc_feature (148)..(157): n is a, c, g, or t
cttggctttatatatcttgtggaaaggacgaaacaccgtaatttctactaagtgtagatgccatgtccagcagaacctttaatttctactaagtgtagattgtagctcagtaaaagtgaataatttctactaagtgtagatttttttnnnnnnnnnnaagcttggcgtggatccgatatcaactagatcttgagacaaatggcagtattcatccacaattttaaaagaaaaggggggattggggggtacagtgcaggggaaagaatagtagacataatagcaacagacatacaaactaaag

SEQ ID NO: 14026 - DNA, 301 bp, Artificial Sequence
  Wrn.3_Rb1.1
  crRNA array
  misc_feature (148)..(157): n is a, c, g, or t
cttggctttatatatcttgtggaaaggacgaaacaccgtaatttctactaagtgtagatctgcagcaggccaccgcaattaatttctactaagtgtagattctgacatgatcgggtaccttaatttctactaagtgtagatttttttnnnnnnnnnnaagcttggcgtggatccgatatcaactagatcttgagacaaatggcagtattcatccacaattttaaaagaaaaggggggattggggggtacagtgcaggggaaagaatagtagacataatagcaacagacatacaaactaaag

SEQ ID NO: 14027 - DNA, 301 bp, Artificial Sequence
  Wrn.3_Rb1.2
  crRNA array
  misc_feature (148)..(157): n is a, c, g, or t
cttggctttatatatcttgtggaaaggacgaaacaccgtaatttctactaagtgtagatctgcagcaggccaccgcaattaatttctactaagtgtagatgtctctgcatgaaaacggagtaatttctactaagtgtagatttttttnnnnnnnnnnaagcttggcgtggatccgatatcaactagatcttgagacaaatggcagtattcatccacaattttaaaagaaaaggggggattggggggtacagtgcaggggaaagaatagtagacataatagcaacagacatacaaactaaag

SEQ ID NO: 14028 - DNA, 301 bp, Artificial Sequence
  Wrn.3_Rb1.3
  crRNA array
  misc_feature (148)..(157): n is a, c, g, or t
cttggctttatatatcttgtggaaaggacgaaacaccgtaatttctactaagtgtagatctgcagcaggccaccgcaattaatttctactaagtgtagatagccaatctggtctaataactaatttctactaagtgtagatttttttnnnnnnnnnnaagcttggcgtggatccgatatcaactagatcttgagacaaatggcagtattcatccacaattttaaaagaaaaggggggattggggggtacagtgcaggggaaagaatagtagacataatagcaacagacatacaaactaaag

SEQ ID NO: 14029 - DNA, 301 bp, Artificial Sequence
  Wrn.3_Rb1.4
  crRNA array
  misc_feature (148)..(157): n is a, c, g, or t
cttggctttatatatcttgtggaaaggacgaaacaccgtaatttctactaagtgtagatctgcagcaggccaccgcaattaatttctactaagtgtagattgtagctcagtaaaagtgaataatttctactaagtgtagatttttttnnnnnnnnnnaagcttggcgtggatccgatatcaactagatcttgagacaaatggcagtattcatccacaattttaaaagaaaaggggggattggggggtacagtgcaggggaaagaatagtagacataatagcaacagacatacaaactaaag

SEQ ID NO: 14030 - DNA, 301 bp, Artificial Sequence
  Wrn.4_Rb1.1
  crRNA array
  misc_feature (148)..(157): n is a, c, g, or t
cttggctttatatatcttgtggaaaggacgaaacaccgtaatttctactaagtgtagattcgaaggacaatagatgatgtaatttctactaagtgtagattctgacatgatcgggtaccttaatttctactaagtgtagatttttttnnnnnnnnnnaagcttggcgtggatccgatatcaactagatcttgagacaaatggcagtattcatccacaattttaaaagaaaaggggggattggggggtacagtgcaggggaaagaatagtagacataatagcaacagacatacaaactaaag

SEQ ID NO: 14031 - DNA, 301 bp, Artificial Sequence
  Wrn.4_Rb1.2
  crRNA array
  misc_feature (148)..(157): n is a, c, g, or t
cttggctttatatatcttgtggaaaggacgaaacaccgtaatttctactaagtgtagattcgaaggacaatagatgatgtaatttctactaagtgtagatgtctctgcatgaaaacggagtaatttctactaagtgtagatttttttnnnnnnnnnnaagcttggcgtggatccgatatcaactagatcttgagacaaatggcagtattcatccacaattttaaaagaaaaggggggattggggggtacagtgcaggggaaagaatagtagacataatagcaacagacatacaaactaaag

SEQ ID NO: 14032 - DNA, 301 bp, Artificial Sequence
  Wrn.4_Rb1.3
  crRNA array
  misc_feature (148)..(157): n is a, c, g, or t
cttggctttatatatcttgtggaaaggacgaaacaccgtaatttctactaagtgtagattcgaaggacaatagatgatgtaatttctactaagtgtagatagccaatctggtctaataactaatttctactaagtgtagatttttttnnnnnnnnnnaagcttggcgtggatccgatatcaactagatcttgagacaaatggcagtattcatccacaattttaaaagaaaaggggggattggggggtacagtgcaggggaaagaatagtagacataatagcaacagacatacaaactaaag

SEQ ID NO: 14033 - DNA, 301 bp, Artificial Sequence
  Wrn.4_Rb1.4
  crRNA array
  misc_feature (148)..(157): n is a, c, g, or t
cttggctttatatatcttgtggaaaggacgaaacaccgtaatttctactaagtgtagattcgaaggacaatagatgatgtaatttctactaagtgtagattgtagctcagtaaaagtgaataatttctactaagtgtagatttttttnnnnnnnnnnaagcttggcgtggatccgatatcaactagatcttgagacaaatggcagtattcatccacaattttaaaagaaaaggggggattggggggtacagtgcaggggaaagaatagtagacataatagcaacagacatacaaactaaag

SEQ ID NO: 14034 - DNA, 301 bp, Artificial Sequence
  Wrn.1_Kmt2c.1
  crRNA array
  misc_feature (148)..(157): n is a, c, g, or t
cttggctttatatatcttgtggaaaggacgaaacaccgtaatttctactaagtgtagatgcaaaccactcgggtaattttaatttctactaagtgtagatactcgacctccacctccctataatttctactaagtgtagatttttttnnnnnnnnnnaagcttggcgtggatccgatatcaactagatcttgagacaaatggcagtattcatccacaattttaaaagaaaaggggggattggggggtacagtgcaggggaaagaatagtagacataatagcaacagacatacaaactaaag

SEQ ID NO: 14035 - DNA, 301 bp, Artificial Sequence
  Wrn.1_Kmt2c.2
  crRNA array
  misc_feature (148)..(157): n is a, c, g, or t
cttggctttatatatcttgtggaaaggacgaaacaccgtaatttctactaagtgtagatgcaaaccactcgggtaattttaatttctactaagtgtagatcccaaagatcagcgtggacctaatttctactaagtgtagatttttttnnnnnnnnnnaagcttggcgtggatccgatatcaactagatcttgagacaaatggcagtattcatccacaattttaaaagaaaaggggggattggggggtacagtgcaggggaaagaatagtagacataatagcaacagacatacaaactaaag

SEQ ID NO: 14036 - DNA, 301 bp, Artificial Sequence
  Wrn.1_Kmt2c.3
  crRNA array
  misc_feature (148)..(157): n is a, c, g, or t
cttggctttatatatcttgtggaaaggacgaaacaccgtaatttctactaagtgtagatgcaaaccactcgggtaattttaatttctactaagtgtagataaaagatccgaatcgatgcgtaatttctactaagtgtagatttttttnnnnnnnnnnaagcttggcgtggatccgatatcaactagatcttgagacaaatggcagtattcatccacaattttaaaagaaaaggggggattggggggtacagtgcaggggaaagaatagtagacataatagcaacagacatacaaactaaag

SEQ ID NO: 14037 - DNA, 301 bp, Artificial Sequence
  Wrn.1_Kmt2c.4
  crRNA array
  misc_feature (148)..(157): n is a, c, g, or t
cttggctttatatatcttgtggaaaggacgaaacaccgtaatttctactaagtgtagatgcaaaccactcgggtaattttaatttctactaagtgtagatctgaggcacatggaagcgattaatttctactaagtgtagatttttttnnnnnnnnnnaagcttggcgtggatccgatatcaactagatcttgagacaaatggcagtattcatccacaattttaaaagaaaaggggggattggggggtacagtgcaggggaaagaatagtagacataatagcaacagacatacaaactaaag

SEQ ID NO: 14038 - DNA, 301 bp, Artificial Sequence
  Wrn.2_Kmt2c.1
  crRNA array
  misc_feature (148)..(157): n is a, c, g, or t
cttggctttatatatcttgtggaaaggacgaaacaccgtaatttctactaagtgtagatgccatgtccagcagaacctttaatttctactaagtgtagatactcgacctccacctccctataatttctactaagtgtagatttttttnnnnnnnnnnaagcttggcgtggatccgatatcaactagatcttgagacaaatggcagtattcatccacaattttaaaagaaaaggggggattggggggtacagtgcaggggaaagaatagtagacataatagcaacagacatacaaactaaag

SEQ ID NO: 14039 - DNA, 301 bp, Artificial Sequence
  Wrn.2_Kmt2c.2
  crRNA array
  misc_feature (148)..(157): n is a, c, g, or t
cttggctttatatatcttgtggaaaggacgaaacaccgtaatttctactaagtgtagatgccatgtccagcagaacctttaatttctactaagtgtagatcccaaagatcagcgtggacctaatttctactaagtgtagatttttttnnnnnnnnnnaagcttggcgtggatccgatatcaactagatcttgagacaaatggcagtattcatccacaattttaaaagaaaaggggggattggggggtacagtgcaggggaaagaatagtagacataatagcaacagacatacaaactaaag

SEQ ID NO: 14040 - DNA, 301 bp, Artificial Sequence
  Wrn.2_Kmt2c.3
  crRNA array
  misc_feature (148)..(157): n is a, c, g, or t
cttggctttatatatcttgtggaaaggacgaaacaccgtaatttctactaagtgtagatgccatgtccagcagaacctttaatttctactaagtgtagataaaagatccgaatcgatgcgtaatttctactaagtgtagatttttttnnnnnnnnnnaagcttggcgtggatccgatatcaactagatcttgagacaaatggcagtattcatccacaattttaaaagaaaaggggggattggggggtacagtgcaggggaaagaatagtagacataatagcaacagacatacaaactaaag

SEQ ID NO: 14041 - DNA, 301 bp, Artificial Sequence
  Wrn.2_Kmt2c.4
  crRNA array
  misc_feature (148)..(157): n is a, c, g, or t
cttggctttatatatcttgtggaaaggacgaaacaccgtaatttctactaagtgtagatgccatgtccagcagaacctttaatttctactaagtgtagatctgaggcacatggaagcgattaatttctactaagtgtagatttttttnnnnnnnnnnaagcttggcgtggatccgatatcaactagatcttgagacaaatggcagtattcatccacaattttaaaagaaaaggggggattggggggtacagtgcaggggaaagaatagtagacataatagcaacagacatacaaactaaag

SEQ ID NO: 14042 - DNA, 301 bp, Artificial Sequence
  Wrn.3_Kmt2c.1
  crRNA array
  misc_feature (148)..(157): n is a, c, g, or t
cttggctttatatatcttgtggaaaggacgaaacaccgtaatttctactaagtgtagatctgcagcaggccaccgcaattaatttctactaagtgtagatactcgacctccacctccctataatttctactaagtgtagatttttttnnnnnnnnnnaagcttggcgtggatccgatatcaactagatcttgagacaaatggcagtattcatccacaattttaaaagaaaaggggggattggggggtacagtgcaggggaaagaatagtagacataatagcaacagacatacaaactaaag

SEQ ID NO: 14043 - DNA, 301 bp, Artificial Sequence
  Wrn.3_Kmt2c.2
  crRNA array
  misc_feature (148)..(157): n is a, c, g, or t
cttggctttatatatcttgtggaaaggacgaaacaccgtaatttctactaagtgtagatctgcagcaggccaccgcaattaatttctactaagtgtagatcccaaagatcagcgtggacctaatttctactaagtgtagatttttttnnnnnnnnnnaagcttggcgtggatccgatatcaactagatcttgagacaaatggcagtattcatccacaattttaaaagaaaaggggggattggggggtacagtgcaggggaaagaatagtagacataatagcaacagacatacaaactaaag

SEQ ID NO: 14044 - DNA, 301 bp, Artificial Sequence
  Wrn.3_Kmt2c.3
  crRNA array
  misc_feature (148)..(157): n is a, c, g, or t
cttggctttatatatcttgtggaaaggacgaaacaccgtaatttctactaagtgtagatctgcagcaggccaccgcaattaatttctactaagtgtagataaaagatccgaatcgatgcgtaatttctactaagtgtagatttttttnnnnnnnnnnaagcttggcgtggatccgatatcaactagatcttgagacaaatggcagtattcatccacaattttaaaagaaaaggggggattggggggtacagtgcaggggaaagaatagtagacataatagcaacagacatacaaactaaag

SEQ ID NO: 14045 - DNA, 301 bp, Artificial Sequence
  Wrn.3_Kmt2c.4
  crRNA array
  misc_feature (148)..(157): n is a, c, g, or t
cttggctttatatatcttgtggaaaggacgaaacaccgtaatttctactaagtgtagatctgcagcaggccaccgcaattaatttctactaagtgtagatctgaggcacatggaagcgattaatttctactaagtgtagatttttttnnnnnnnnnnaagcttggcgtggatccgatatcaactagatcttgagacaaatggcagtattcatccacaattttaaaagaaaaggggggattggggggtacagtgcaggggaaagaatagtagacataatagcaacagacatacaaactaaag

SEQ ID NO: 14046 - DNA, 301 bp, Artificial Sequence
  Wrn.4_Kmt2c.1
  crRNA array
  misc_feature (148)..(157): n is a, c, g, or t
cttggctttatatatcttgtggaaaggacgaaacaccgtaatttctactaagtgtagattcgaaggacaatagatgatgtaatttctactaagtgtagatactcgacctccacctccctataatttctactaagtgtagatttttttnnnnnnnnnnaagcttggcgtggatccgatatcaactagatcttgagacaaatggcagtattcatccacaattttaaaagaaaaggggggattggggggtacagtgcaggggaaagaatagtagacataatagcaacagacatacaaactaaag

SEQ ID NO: 14047 - DNA, 301 bp, Artificial Sequence
  Wrn.4_Kmt2c.2
  crRNA array
  misc_feature (148)..(157): n is a, c, g, or t
cttggctttatatatcttgtggaaaggacgaaacaccgtaatttctactaagtgtagattcgaaggacaatagatgatgtaatttctactaagtgtagatcccaaagatcagcgtggacctaatttctactaagtgtagatttttttnnnnnnnnnnaagcttggcgtggatccgatatcaactagatcttgagacaaatggcagtattcatccacaattttaaaagaaaaggggggattggggggtacagtgcaggggaaagaatagtagacataatagcaacagacatacaaactaaag

SEQ ID NO: 14048 - DNA, 301 bp, Artificial Sequence
  Wrn.4_Kmt2c.3
  crRNA array
  misc_feature (148)..(157): n is a, c, g, or t
cttggctttatatatcttgtggaaaggacgaaacaccgtaatttctactaagtgtagattcgaaggacaatagatgatgtaatttctactaagtgtagataaaagatccgaatcgatgcgtaatttctactaagtgtagatttttttnnnnnnnnnnaagcttggcgtggatccgatatcaactagatcttgagacaaatggcagtattcatccacaattttaaaagaaaaggggggattggggggtacagtgcaggggaaagaatagtagacataatagcaacagacatacaaactaaag

SEQ ID NO: 14049 - DNA, 301 bp, Artificial Sequence
  Wrn.4_Kmt2c.4
  crRNA array
  misc_feature (148)..(157): n is a, c, g, or t
cttggctttatatatcttgtggaaaggacgaaacaccgtaatttctactaagtgtagattcgaaggacaatagatgatgtaatttctactaagtgtagatctgaggcacatggaagcgattaatttctactaagtgtagatttttttnnnnnnnnnnaagcttggcgtggatccgatatcaactagatcttgagacaaatggcagtattcatccacaattttaaaagaaaaggggggattggggggtacagtgcaggggaaagaatagtagacataatagcaacagacatacaaactaaag

SEQ ID NO: 14050 - DNA, 301 bp, Artificial Sequence
  Wrn.1_Pten.1
  crRNA array
  misc_feature (148)..(157): n is a, c, g, or t
cttggctttatatatcttgtggaaaggacgaaacaccgtaatttctactaagtgtagatgcaaaccactcgggtaattttaatttctactaagtgtagataagcgtggtgcgtgacgcactaatttctactaagtgtagatttttttnnnnnnnnnnaagcttggcgtggatccgatatcaactagatcttgagacaaatggcagtattcatccacaattttaaaagaaaaggggggattggggggtacagtgcaggggaaagaatagtagacataatagcaacagacatacaaactaaag

SEQ ID NO: 14051 - DNA, 301 bp, Artificial Sequence
  Wrn.1_Pten.2
  crRNA array
  misc_feature (148)..(157): n is a, c, g, or t
cttggctttatatatcttgtggaaaggacgaaacaccgtaatttctactaagtgtagatgcaaaccactcgggtaattttaatttctactaagtgtagattgtcaccagctgaagtggcttaatttctactaagtgtagatttttttnnnnnnnnnnaagcttggcgtggatccgatatcaactagatcttgagacaaatggcagtattcatccacaattttaaaagaaaaggggggattggggggtacagtgcaggggaaagaatagtagacataatagcaacagacatacaaactaaag

SEQ ID NO: 14052 - DNA, 301 bp, Artificial Sequence
  Wrn.1_Pten.3
  crRNA array
  misc_feature (148)..(157): n is a, c, g, or t
cttggctttatatatcttgtggaaaggacgaaacaccgtaatttctactaagtgtagatgcaaaccactcgggtaattttaatttctactaagtgtagatggagtcaagaggctgatttttaatttctactaagtgtagatttttttnnnnnnnnnnaagcttggcgtggatccgatatcaactagatcttgagacaaatggcagtattcatccacaattttaaaagaaaaggggggattggggggtacagtgcaggggaaagaatagtagacataatagcaacagacatacaaactaaag

SEQ ID NO: 14053 - DNA, 301 bp, Artificial Sequence
  Wrn.1_Pten.4
  crRNA array
  misc_feature (148)..(157): n is a, c, g, or t
cttggctttatatatcttgtggaaaggacgaaacaccgtaatttctactaagtgtagatgcaaaccactcgggtaattttaatttctactaagtgtagatctgtaagctaaaccactacataatttctactaagtgtagatttttttnnnnnnnnnnaagcttggcgtggatccgatatcaactagatcttgagacaaatggcagtattcatccacaattttaaaagaaaaggggggattggggggtacagtgcaggggaaagaatagtagacataatagcaacagacatacaaactaaag

SEQ ID NO: 14054 - DNA, 301 bp, Artificial Sequence
  Wrn.2_Pten.1
  crRNA array
  misc_feature (148)..(157): n is a, c, g, or t
cttggctttatatatcttgtggaaaggacgaaacaccgtaatttctactaagtgtagatgccatgtccagcagaacctttaatttctactaagtgtagataagcgtggtgcgtgacgcactaatttctactaagtgtagatttttttnnnnnnnnnnaagcttggcgtggatccgatatcaactagatcttgagacaaatggcagtattcatccacaattttaaaagaaaaggggggattggggggtacagtgcaggggaaagaatagtagacataatagcaacagacatacaaactaaag

SEQ ID NO: 14055 - DNA, 301 bp, Artificial Sequence
  Wrn.2_Pten.2
  crRNA array
  misc_feature (148)..(157): n is a, c, g, or t
cttggctttatatatcttgtggaaaggacgaaacaccgtaatttctactaagtgtagatgccatgtccagcagaacctttaatttctactaagtgtagattgtcaccagctgaagtggcttaatttctactaagtgtagatttttttnnnnnnnnnnaagcttggcgtggatccgatatcaactagatcttgagacaaatggcagtattcatccacaattttaaaagaaaaggggggattggggggtacagtgcaggggaaagaatagtagacataatagcaacagacatacaaactaaag

SEQ ID NO: 14056 - DNA, 301 bp, Artificial Sequence
  Wrn.2_Pten.3
  crRNA array
  misc_feature (148)..(157): n is a, c, g, or t
cttggctttatatatcttgtggaaaggacgaaacaccgtaatttctactaagtgtagatgccatgtccagcagaacctttaatttctactaagtgtagatggagtcaagaggctgatttttaatttctactaagtgtagatttttttnnnnnnnnnnaagcttggcgtggatccgatatcaactagatcttgagacaaatggcagtattcatccacaattttaaaagaaaaggggggattggggggtacagtgcaggggaaagaatagtagacataatagcaacagacatacaaactaaag

SEQ ID NO: 14057 - DNA, 301 bp, Artificial Sequence
  Wrn.2_Pten.4
  crRNA array
  misc_feature (148)..(157): n is a, c, g, or t
cttggctttatatatcttgtggaaaggacgaaacaccgtaatttctactaagtgtagatgccatgtccagcagaacctttaatttctactaagtgtagatctgtaagctaaaccactacataatttctactaagtgtagatttttttnnnnnnnnnnaagcttggcgtggatccgatatcaactagatcttgagacaaatggcagtattcatccacaattttaaaagaaaaggggggattggggggtacagtgcaggggaaagaatagtagacataatagcaacagacatacaaactaaag

SEQ ID NO: 14058 - DNA, 301 bp, Artificial Sequence
  Wrn.3_Pten.1
  crRNA array
  misc_feature (148)..(157): n is a, c, g, or t
cttggctttatatatcttgtggaaaggacgaaacaccgtaatttctactaagtgtagatctgcagcaggccaccgcaattaatttctactaagtgtagataagcgtggtgcgtgacgcactaatttctactaagtgtagatttttttnnnnnnnnnnaagcttggcgtggatccgatatcaactagatcttgagacaaatggcagtattcatccacaattttaaaagaaaaggggggattggggggtacagtgcaggggaaagaatagtagacataatagcaacagacatacaaactaaag

SEQ ID NO: 14059 - DNA, 301 bp, Artificial Sequence
  Wrn.3_Pten.2
  crRNA array
  misc_feature (148)..(157): n is a, c, g, or t
cttggctttatatatcttgtggaaaggacgaaacaccgtaatttctactaagtgtagatctgcagcaggccaccgcaattaatttctactaagtgtagattgtcaccagctgaagtggcttaatttctactaagtgtagatttttttnnnnnnnnnnaagcttggcgtggatccgatatcaactagatcttgagacaaatggcagtattcatccacaattttaaaagaaaaggggggattggggggtacagtgcaggggaaagaatagtagacataatagcaacagacatacaaactaaag

SEQ ID NO: 14060 - DNA, 301 bp, Artificial Sequence
  Wrn.3_Pten.3
  crRNA array
  misc_feature (148)..(157): n is a, c, g, or t
cttggctttatatatcttgtggaaaggacgaaacaccgtaatttctactaagtgtagatctgcagcaggccaccgcaattaatttctactaagtgtagatggagtcaagaggctgatttttaatttctactaagtgtagatttttttnnnnnnnnnnaagcttggcgtggatccgatatcaactagatcttgagacaaatggcagtattcatccacaattttaaaagaaaaggggggattggggggtacagtgcaggggaaagaatagtagacataatagcaacagacatacaaactaaag

SEQ ID NO: 14061 - DNA, 301 bp, Artificial Sequence
  Wrn.3_Pten.4
  crRNA array
  misc_feature (148)..(157): n is a, c, g, or t
cttggctttatatatcttgtggaaaggacgaaacaccgtaatttctactaagtgtagatctgcagcaggccaccgcaattaatttctactaagtgtagatctgtaagctaaaccactacataatttctactaagtgtagatttttttnnnnnnnnnnaagcttggcgtggatccgatatcaactagatcttgagacaaatggcagtattcatccacaattttaaaagaaaaggggggattggggggtacagtgcaggggaaagaatagtagacataatagcaacagacatacaaactaaag

SEQ ID NO: 14062 - DNA, 301 bp, Artificial Sequence
  Wrn.4_Pten.1
  crRNA array
  misc_feature (148)..(157): n is a, c, g, or t
cttggctttatatatcttgtggaaaggacgaaacaccgtaatttctactaagtgtagattcgaaggacaatagatgatgtaatttctactaagtgtagataagcgtggtgcgtgacgcactaatttctactaagtgtagatttttttnnnnnnnnnnaagcttggcgtggatccgatatcaactagatcttgagacaaatggcagtattcatccacaattttaaaagaaaaggggggattggggggtacagtgcaggggaaagaatagtagacataatagcaacagacatacaaactaaag

SEQ ID NO: 14063 - DNA, 301 bp, Artificial Sequence
  Wrn.4_Pten.2
  crRNA array
  misc_feature (148)..(157): n is a, c, g, or t
cttggctttatatatcttgtggaaaggacgaaacaccgtaatttctactaagtgtagattcgaaggacaatagatgatgtaatttctactaagtgtagattgtcaccagctgaagtggcttaatttctactaagtgtagatttttttnnnnnnnnnnaagcttggcgtggatccgatatcaactagatcttgagacaaatggcagtattcatccacaattttaaaagaaaaggggggattggggggtacagtgcaggggaaagaatagtagacataatagcaacagacatacaaactaaag

SEQ ID NO: 14064 - DNA, 301 bp, Artificial Sequence
  Wrn.4_Pten.3
  crRNA array
  misc_feature (148)..(157): n is a, c, g, or t
cttggctttatatatcttgtggaaaggacgaaacaccgtaatttctactaagtgtagattcgaaggacaatagatgatgtaatttctactaagtgtagatggagtcaagaggctgatttttaatttctactaagtgtagatttttttnnnnnnnnnnaagcttggcgtggatccgatatcaactagatcttgagacaaatggcagtattcatccacaattttaaaagaaaaggggggattggggggtacagtgcaggggaaagaatagtagacataatagcaacagacatacaaactaaag

SEQ ID NO: 14065 - DNA, 301 bp, Artificial Sequence
  Wrn.4_Pten.4
  crRNA array
  misc_feature (148)..(157): n is a, c, g, or t
cttggctttatatatcttgtggaaaggacgaaacaccgtaatttctactaagtgtagattcgaaggacaatagatgatgtaatttctactaagtgtagatctgtaagctaaaccactacataatttctactaagtgtagatttttttnnnnnnnnnnaagcttggcgtggatccgatatcaactagatcttgagacaaatggcagtattcatccacaattttaaaagaaaaggggggattggggggtacagtgcaggggaaagaatagtagacataatagcaacagacatacaaactaaag

SEQ ID NO: 14066 - DNA, 301 bp, Artificial Sequence
  Wrn.1_Atm.1
  crRNA array
  misc_feature (148)..(157): n is a, c, g, or t
cttggctttatatatcttgtggaaaggacgaaacaccgtaatttctactaagtgtagatgcaaaccactcgggtaattttaatttctactaagtgtagatgagaaagtctccgaatcgtttaatttctactaagtgtagatttttttnnnnnnnnnnaagcttggcgtggatccgatatcaactagatcttgagacaaatggcagtattcatccacaattttaaaagaaaaggggggattggggggtacagtgcaggggaaagaatagtagacataatagcaacagacatacaaactaaag

SEQ ID NO: 14067 - DNA, 301 bp, Artificial Sequence
  Wrn.1_Atm.2
  crRNA array
  misc_feature (148)..(157): n is a, c, g, or t
cttggctttatatatcttgtggaaaggacgaaacaccgtaatttctactaagtgtagatgcaaaccactcgggtaattttaatttctactaagtgtagatcctacgagggcacgagagactaatttctactaagtgtagatttttttnnnnnnnnnnaagcttggcgtggatccgatatcaactagatcttgagacaaatggcagtattcatccacaattttaaaagaaaaggggggattggggggtacagtgcaggggaaagaatagtagacataatagcaacagacatacaaactaaag

SEQ ID NO: 14068 - DNA, 301 bp, Artificial Sequence
  Wrn.1_Atm.3
  crRNA array
  misc_feature (148)..(157): n is a, c, g, or t
cttggctttatatatcttgtggaaaggacgaaacaccgtaatttctactaagtgtagatgcaaaccactcgggtaattttaatttctactaagtgtagattgaaagtctccgatatgccataatttctactaagtgtagatttttttnnnnnnnnnnaagcttggcgtggatccgatatcaactagatcttgagacaaatggcagtattcatccacaattttaaaagaaaaggggggattggggggtacagtgcaggggaaagaatagtagacataatagcaacagacatacaaactaaag

SEQ ID NO: 14069 - DNA, 301 bp, Artificial Sequence
  Wrn.1_Atm.4
  crRNA array
  misc_feature (148)..(157): n is a, c, g, or t
cttggctttatatatcttgtggaaaggacgaaacaccgtaatttctactaagtgtagatgcaaaccactcgggtaattttaatttctactaagtgtagatggtggtgatcagtcaagtagtaatttctactaagtgtagatttttttnnnnnnnnnnaagcttggcgtggatccgatatcaactagatcttgagacaaatggcagtattcatccacaattttaaaagaaaaggggggattggggggtacagtgcaggggaaagaatagtagacataatagcaacagacatacaaactaaag

SEQ ID NO: 14070 - DNA, 301 bp, Artificial Sequence
  Wrn.2_Atm.1
  crRNA array
  misc_feature (148)..(157): n is a, c, g, or t
cttggctttatatatcttgtggaaaggacgaaacaccgtaatttctactaagtgtagatgccatgtccagcagaacctttaatttctactaagtgtagatgagaaagtctccgaatcgtttaatttctactaagtgtagatttttttnnnnnnnnnnaagcttggcgtggatccgatatcaactagatcttgagacaaatggcagtattcatccacaattttaaaagaaaaggggggattggggggtacagtgcaggggaaagaatagtagacataatagcaacagacatacaaactaaag

SEQ ID NO: 14071 - DNA, 301 bp, Artificial Sequence
  Wrn.2_Atm.2
  crRNA array
  misc_feature (148)..(157): n is a, c, g, or t
cttggctttatatatcttgtggaaaggacgaaacaccgtaatttctactaagtgtagatgccatgtccagcagaacctttaatttctactaagtgtagatcctacgagggcacgagagactaatttctactaagtgtagatttttttnnnnnnnnnnaagcttggcgtggatccgatatcaactagatcttgagacaaatggcagtattcatccacaattttaaaagaaaaggggggattggggggtacagtgcaggggaaagaatagtagacataatagcaacagacatacaaactaaag

SEQ ID NO: 14072 - DNA, 301 bp, Artificial Sequence
  Wrn.2_Atm.3
  crRNA array
  misc_feature (148)..(157): n is a, c, g, or t
cttggctttatatatcttgtggaaaggacgaaacaccgtaatttctactaagtgtagatgccatgtccagcagaacctttaatttctactaagtgtagattgaaagtctccgatatgccataatttctactaagtgtagatttttttnnnnnnnnnnaagcttggcgtggatccgatatcaactagatcttgagacaaatggcagtattcatccacaattttaaaagaaaaggggggattggggggtacagtgcaggggaaagaatagtagacataatagcaacagacatacaaactaaag

SEQ ID NO: 14073 - DNA, 301 bp, Artificial Sequence
  Wrn.2_Atm.4
  crRNA array
  misc_feature (148)..(157): n is a, c, g, or t
cttggctttatatatcttgtggaaaggacgaaacaccgtaatttctactaagtgtagatgccatgtccagcagaacctttaatttctactaagtgtagatggtggtgatcagtcaagtagtaatttctactaagtgtagatttttttnnnnnnnnnnaagcttggcgtggatccgatatcaactagatcttgagacaaatggcagtattcatccacaattttaaaagaaaaggggggattggggggtacagtgcaggggaaagaatagtagacataatagcaacagacatacaaactaaag

SEQ ID NO: 14074 - DNA, 301 bp, Artificial Sequence
  Wrn.3_Atm.1
  crRNA array
  misc_feature (148)..(157): n is a, c, g, or t
cttggctttatatatcttgtggaaaggacgaaacaccgtaatttctactaagtgtagatctgcagcaggccaccgcaattaatttctactaagtgtagatgagaaagtctccgaatcgtttaatttctactaagtgtagatttttttnnnnnnnnnnaagcttggcgtggatccgatatcaactagatcttgagacaaatggcagtattcatccacaattttaaaagaaaaggggggattggggggtacagtgcaggggaaagaatagtagacataatagcaacagacatacaaactaaag

SEQ ID NO: 14075 - DNA, 301 bp, Artificial Sequence
  Wrn.3_Atm.2
  crRNA array
  misc_feature (148)..(157): n is a, c, g, or t
cttggctttatatatcttgtggaaaggacgaaacaccgtaatttctactaagtgtagatctgcagcaggccaccgcaattaatttctactaagtgtagatcctacgagggcacgagagactaatttctactaagtgtagatttttttnnnnnnnnnnaagcttggcgtggatccgatatcaactagatcttgagacaaatggcagtattcatccacaattttaaaagaaaaggggggattggggggtacagtgcaggggaaagaatagtagacataatagcaacagacatacaaactaaag

SEQ ID NO: 14076 - DNA, 301 bp, Artificial Sequence
  Wrn.3_Atm.3
  crRNA array
  misc_feature (148)..(157): n is a, c, g, or t
cttggctttatatatcttgtggaaaggacgaaacaccgtaatttctactaagtgtagatctgcagcaggccaccgcaattaatttctactaagtgtagattgaaagtctccgatatgccataatttctactaagtgtagatttttttnnnnnnnnnnaagcttggcgtggatccgatatcaactagatcttgagacaaatggcagtattcatccacaattttaaaagaaaaggggggattggggggtacagtgcaggggaaagaatagtagacataatagcaacagacatacaaactaaag

SEQ ID NO: 14077 - DNA, 301 bp, Artificial Sequence
  Wrn.3_Atm.4
  crRNA array
  misc_feature (148)..(157): n is a, c, g, or t
cttggctttatatatcttgtggaaaggacgaaacaccgtaatttctactaagtgtagatctgcagcaggccaccgcaattaatttctactaagtgtagatggtggtgatcagtcaagtagtaatttctactaagtgtagatttttttnnnnnnnnnnaagcttggcgtggatccgatatcaactagatcttgagacaaatggcagtattcatccacaattttaaaagaaaaggggggattggggggtacagtgcaggggaaagaatagtagacataatagcaacagacatacaaactaaag

SEQ ID NO: 14078 - DNA, 301 bp, Artificial Sequence
  Wrn.4_Atm.1
  crRNA array
  misc_feature (148)..(157): n is a, c, g, or t
cttggctttatatatcttgtggaaaggacgaaacaccgtaatttctactaagtgtagattcgaaggacaatagatgatgtaatttctactaagtgtagatgagaaagtctccgaatcgtttaatttctactaagtgtagatttttttnnnnnnnnnnaagcttggcgtggatccgatatcaactagatcttgagacaaatggcagtattcatccacaattttaaaagaaaaggggggattggggggtacagtgcaggggaaagaatagtagacataatagcaacagacatacaaactaaag

SEQ ID NO: 14079 - DNA, 301 bp, Artificial Sequence
  Wrn.4_Atm.2
  crRNA array
  misc_feature (148)..(157): n is a, c, g, or t
cttggctttatatatcttgtggaaaggacgaaacaccgtaatttctactaagtgtagattcgaaggacaatagatgatgtaatttctactaagtgtagatcctacgagggcacgagagactaatttctactaagtgtagatttttttnnnnnnnnnnaagcttggcgtggatccgatatcaactagatcttgagacaaatggcagtattcatccacaattttaaaagaaaaggggggattggggggtacagtgcaggggaaagaatagtagacataatagcaacagacatacaaactaaag

SEQ ID NO: 14080 - DNA, 301 bp, Artificial Sequence
  Wrn.4_Atm.3
  crRNA array
  misc_feature (148)..(157): n is a, c, g, or t
cttggctttatatatcttgtggaaaggacgaaacaccgtaatttctactaagtgtagattcgaaggacaatagatgatgtaatttctactaagtgtagattgaaagtctccgatatgccataatttctactaagtgtagatttttttnnnnnnnnnnaagcttggcgtggatccgatatcaactagatcttgagacaaatggcagtattcatccacaattttaaaagaaaaggggggattggggggtacagtgcaggggaaagaatagtagacataatagcaacagacatacaaactaaag

SEQ ID NO: 14081 - DNA, 301 bp, Artificial Sequence
  Wrn.4_Atm.4
  crRNA array
  misc_feature (148)..(157): n is a, c, g, or t
cttggctttatatatcttgtggaaaggacgaaacaccgtaatttctactaagtgtagattcgaaggacaatagatgatgtaatttctactaagtgtagatggtggtgatcagtcaagtagtaatttctactaagtgtagatttttttnnnnnnnnnnaagcttggcgtggatccgatatcaactagatcttgagacaaatggcagtattcatccacaattttaaaagaaaaggggggattggggggtacagtgcaggggaaagaatagtagacataatagcaacagacatacaaactaaag

SEQ ID NO: 14082 - DNA, 301 bp, Artificial Sequence
  Brca2.1_Apc.1
  crRNA array
  misc_feature (148)..(157): n is a, c, g, or t
cttggctttatatatcttgtggaaaggacgaaacaccgtaatttctactaagtgtagatctaagcgtagaaccagaaattaatttctactaagtgtagatgtgatccacacgtgtagctgtaatttctactaagtgtagatttttttnnnnnnnnnnaagcttggcgtggatccgatatcaactagatcttgagacaaatggcagtattcatccacaattttaaaagaaaaggggggattggggggtacagtgcaggggaaagaatagtagacataatagcaacagacatacaaactaaag

SEQ ID NO: 14083 - DNA, 301 bp, Artificial Sequence
  Brca2.1_Apc.2
  crRNA array
  misc_feature (148)..(157): n is a, c, g, or t
cttggctttatatatcttgtggaaaggacgaaacaccgtaatttctactaagtgtagatctaagcgtagaaccagaaattaatttctactaagtgtagatcatctgctcgccaagacaaataatttctactaagtgtagatttttttnnnnnnnnnnaagcttggcgtggatccgatatcaactagatcttgagacaaatggcagtattcatccacaattttaaaagaaaaggggggattggggggtacagtgcaggggaaagaatagtagacataatagcaacagacatacaaactaaag

SEQ ID NO: 14084 - DNA, 301 bp, Artificial Sequence
  Brca2.1_Apc.3
  crRNA array
  misc_feature (148)..(157): n is a, c, g, or t
cttggctttatatatcttgtggaaaggacgaaacaccgtaatttctactaagtgtagatctaagcgtagaaccagaaattaatttctactaagtgtagatacgccaatcgacatgatgattaatttctactaagtgtagatttttttnnnnnnnnnnaagcttggcgtggatccgatatcaactagatcttgagacaaatggcagtattcatccacaattttaaaagaaaaggggggattggggggtacagtgcaggggaaagaatagtagacataatagcaacagacatacaaactaaag

SEQ ID NO: 14085 - DNA, 301 bp, Artificial Sequence
  Brca2.1_Apc.4
  crRNA array
  misc_feature (148)..(157): n is a, c, g, or t
cttggctttatatatcttgtggaaaggacgaaacaccgtaatttctactaagtgtagatctaagcgtagaaccagaaattaatttctactaagtgtagatcaccaggggatgatgtgccctaatttctactaagtgtagatttttttnnnnnnnnnnaagcttggcgtggatccgatatcaactagatcttgagacaaatggcagtattcatccacaattttaaaagaaaaggggggattggggggtacagtgcaggggaaagaatagtagacataatagcaacagacatacaaactaaag

SEQ ID NO: 14086 - DNA, 301 bp, Artificial Sequence
  Brca2.2_Apc.1
  crRNA array
  misc_feature (148)..(157): n is a, c, g, or t
cttggctttatatatcttgtggaaaggacgaaacaccgtaatttctactaagtgtagatgatccaggtgtaacaagccataatttctactaagtgtagatgtgatccacacgtgtagctgtaatttctactaagtgtagatttttttnnnnnnnnnnaagcttggcgtggatccgatatcaactagatcttgagacaaatggcagtattcatccacaattttaaaagaaaaggggggattggggggtacagtgcaggggaaagaatagtagacataatagcaacagacatacaaactaaag

SEQ ID NO: 14087 - DNA, 301 bp, Artificial Sequence
  Brca2.2_Apc.2
  crRNA array
  misc_feature (148)..(157): n is a, c, g, or t
cttggctttatatatcttgtggaaaggacgaaacaccgtaatttctactaagtgtagatgatccaggtgtaacaagccataatttctactaagtgtagatcatctgctcgccaagacaaataatttctactaagtgtagatttttttnnnnnnnnnnaagcttggcgtggatccgatatcaactagatcttgagacaaatggcagtattcatccacaattttaaaagaaaaggggggattggggggtacagtgcaggggaaagaatagtagacataatagcaacagacatacaaactaaag

SEQ ID NO: 14088 - DNA, 301 bp, Artificial Sequence
  Brca2.2_Apc.3
  crRNA array
  misc_feature (148)..(157): n is a, c, g, or t
cttggctttatatatcttgtggaaaggacgaaacaccgtaatttctactaagtgtagatgatccaggtgtaacaagccataatttctactaagtgtagatacgccaatcgacatgatgattaatttctactaagtgtagatttttttnnnnnnnnnnaagcttggcgtggatccgatatcaactagatcttgagacaaatggcagtattcatccacaattttaaaagaaaaggggggattggggggtacagtgcaggggaaagaatagtagacataatagcaacagacatacaaactaaag

SEQ ID NO: 14089 - DNA, 301 bp, Artificial Sequence
  Brca2.2_Apc.4
  crRNA array
  misc_feature (148)..(157): n is a, c, g, or t
cttggctttatatatcttgtggaaaggacgaaacaccgtaatttctactaagtgtagatgatccaggtgtaacaagccataatttctactaagtgtagatcaccaggggatgatgtgccctaatttctactaagtgtagatttttttnnnnnnnnnnaagcttggcgtggatccgatatcaactagatcttgagacaaatggcagtattcatccacaattttaaaagaaaaggggggattggggggtacagtgcaggggaaagaatagtagacataatagcaacagacatacaaactaaag

SEQ ID NO: 14090 - DNA, 301 bp, Artificial Sequence
  Brca2.3_Apc.1
  crRNA array
  misc_feature (148)..(157): n is a, c, g, or t
cttggctttatatatcttgtggaaaggacgaaacaccgtaatttctactaagtgtagattgaatataaactgggccacttaatttctactaagtgtagatgtgatccacacgtgtagctgtaatttctactaagtgtagatttttttnnnnnnnnnnaagcttggcgtggatccgatatcaactagatcttgagacaaatggcagtattcatccacaattttaaaagaaaaggggggattggggggtacagtgcaggggaaagaatagtagacataatagcaacagacatacaaactaaag

SEQ ID NO: 14091 - DNA, 301 bp, Artificial Sequence
  Brca2.3_Apc.2
  crRNA array
  misc_feature (148)..(157): n is a, c, g, or t
cttggctttatatatcttgtggaaaggacgaaacaccgtaatttctactaagtgtagattgaatataaactgggccacttaatttctactaagtgtagatcatctgctcgccaagacaaataatttctactaagtgtagatttttttnnnnnnnnnnaagcttggcgtggatccgatatcaactagatcttgagacaaatggcagtattcatccacaattttaaaagaaaaggggggattggggggtacagtgcaggggaaagaatagtagacataatagcaacagacatacaaactaaag

SEQ ID NO: 14092 - DNA, 301 bp, Artificial Sequence
  Brca2.3_Apc.3
  crRNA array
  misc_feature (148)..(157): n is a, c, g, or t
cttggctttatatatcttgtggaaaggacgaaacaccgtaatttctactaagtgtagattgaatataaactgggccacttaatttctactaagtgtagatacgccaatcgacatgatgattaatttctactaagtgtagatttttttnnnnnnnnnnaagcttggcgtggatccgatatcaactagatcttgagacaaatggcagtattcatccacaattttaaaagaaaaggggggattggggggtacagtgcaggggaaagaatagtagacataatagcaacagacatacaaactaaag

SEQ ID NO: 14093 - DNA, 301 bp, Artificial Sequence
  Brca2.3_Apc.4
  crRNA array
  misc_feature (148)..(157): n is a, c, g, or t
cttggctttatatatcttgtggaaaggacgaaacaccgtaatttctactaagtgtagattgaatataaactgggccacttaatttctactaagtgtagatcaccaggggatgatgtgccctaatttctactaagtgtagatttttttnnnnnnnnnnaagcttggcgtggatccgatatcaactagatcttgagacaaatggcagtattcatccacaattttaaaagaaaaggggggattggggggtacagtgcaggggaaagaatagtagacataatagcaacagacatacaaactaaag

SEQ ID NO: 14094 - DNA, 301 bp, Artificial Sequence
  Brca2.4_Apc.1
  crRNA array
  misc_feature (148)..(157): n is a, c, g, or t
cttggctttatatatcttgtggaaaggacgaaacaccgtaatttctactaagtgtagatgaaacgccgtatatatagagtaatttctactaagtgtagatgtgatccacacgtgtagctgtaatttctactaagtgtagatttttttnnnnnnnnnnaagcttggcgtggatccgatatcaactagatcttgagacaaatggcagtattcatccacaattttaaaagaaaaggggggattggggggtacagtgcaggggaaagaatagtagacataatagcaacagacatacaaactaaag

SEQ ID NO: 14095 - DNA, 301 bp, Artificial Sequence
  Brca2.4_Apc.2
  crRNA array
  misc_feature (148)..(157): n is a, c, g, or t
cttggctttatatatcttgtggaaaggacgaaacaccgtaatttctactaagtgtagatgaaacgccgtatatatagagtaatttctactaagtgtagatcatctgctcgccaagacaaataatttctactaagtgtagatttttttnnnnnnnnnnaagcttggcgtggatccgatatcaactagatcttgagacaaatggcagtattcatccacaattttaaaagaaaaggggggattggggggtacagtgcaggggaaagaatagtagacataatagcaacagacatacaaactaaag

SEQ ID NO: 14096 - DNA, 301 bp, Artificial Sequence
  Brca2.4_Apc.3
  crRNA array
  misc_feature (148)..(157): n is a, c, g, or t
cttggctttatatatcttgtggaaaggacgaaacaccgtaatttctactaagtgtagatgaaacgccgtatatatagagtaatttctactaagtgtagatacgccaatcgacatgatgattaatttctactaagtgtagatttttttnnnnnnnnnnaagcttggcgtggatccgatatcaactagatcttgagacaaatggcagtattcatccacaattttaaaagaaaaggggggattggggggtacagtgcaggggaaagaatagtagacataatagcaacagacatacaaactaaag

SEQ ID NO: 14097 - DNA, 301 bp, Artificial Sequence
  Brca2.4_Apc.4
  crRNA array
  misc_feature (148)..(157): n is a, c, g, or t
cttggctttatatatcttgtggaaaggacgaaacaccgtaatttctactaagtgtagatgaaacgccgtatatatagagtaatttctactaagtgtagatcaccaggggatgatgtgccctaatttctactaagtgtagatttttttnnnnnnnnnnaagcttggcgtggatccgatatcaactagatcttgagacaaatggcagtattcatccacaattttaaaagaaaaggggggattggggggtacagtgcaggggaaagaatagtagacataatagcaacagacatacaaactaaag

SEQ ID NO: 14098 - DNA, 301 bp, Artificial Sequence
  Brca2.1_Fanca.1
  crRNA array
  misc_feature (148)..(157): n is a, c, g, or t
cttggctttatatatcttgtggaaaggacgaaacaccgtaatttctactaagtgtagatctaagcgtagaaccagaaattaatttctactaagtgtagatggaggccccggggcccaccataatttctactaagtgtagatttttttnnnnnnnnnnaagcttggcgtggatccgatatcaactagatcttgagacaaatggcagtattcatccacaattttaaaagaaaaggggggattggggggtacagtgcaggggaaagaatagtagacataatagcaacagacatacaaactaaag

SEQ ID NO: 14099 - DNA, 301 bp, Artificial Sequence
  Brca2.1_Fanca.2
  crRNA array
  misc_feature (148)..(157): n is a, c, g, or t
cttggctttatatatcttgtggaaaggacgaaacaccgtaatttctactaagtgtagatctaagcgtagaaccagaaattaatttctactaagtgtagatagagctaccacctagacagctaatttctactaagtgtagatttttttnnnnnnnnnnaagcttggcgtggatccgatatcaactagatcttgagacaaatggcagtattcatccacaattttaaaagaaaaggggggattggggggtacagtgcaggggaaagaatagtagacataatagcaacagacatacaaactaaag

SEQ ID NO: 14100 - DNA, 301 bp, Artificial Sequence
  Brca2.1_Fanca.3
  crRNA array
  misc_feature (148)..(157): n is a, c, g, or t
cttggctttatatatcttgtggaaaggacgaaacaccgtaatttctactaagtgtagatctaagcgtagaaccagaaattaatttctactaagtgtagataccaactgctgtgcctcgggtaatttctactaagtgtagatttttttnnnnnnnnnnaagcttggcgtggatccgatatcaactagatcttgagacaaatggcagtattcatccacaattttaaaagaaaaggggggattggggggtacagtgcaggggaaagaatagtagacataatagcaacagacatacaaactaaag

SEQ ID NO: 14101 - DNA, 301 bp, Artificial Sequence
  Brca2.1_Fanca.4
  crRNA array
  misc_feature (148)..(157): n is a, c, g, or t
cttggctttatatatcttgtggaaaggacgaaacaccgtaatttctactaagtgtagatctaagcgtagaaccagaaattaatttctactaagtgtagatcacccacccctggtgccaagtaatttctactaagtgtagatttttttnnnnnnnnnnaagcttggcgtggatccgatatcaactagatcttgagacaaatggcagtattcatccacaattttaaaagaaaaggggggattggggggtacagtgcaggggaaagaatagtagacataatagcaacagacatacaaactaaag

SEQ ID NO: 14102 - DNA, 301 bp, Artificial Sequence
  Brca2.2_Fanca.1
  crRNA array
  misc_feature (148)..(157): n is a, c, g, or t
cttggctttatatatcttgtggaaaggacgaaacaccgtaatttctactaagtgtagatgatccaggtgtaacaagccataatttctactaagtgtagatggaggccccggggcccaccataatttctactaagtgtagatttttttnnnnnnnnnnaagcttggcgtggatccgatatcaactagatcttgagacaaatggcagtattcatccacaattttaaaagaaaaggggggattggggggtacagtgcaggggaaagaatagtagacataatagcaacagacatacaaactaaag

SEQ ID NO: 14103 - DNA, 301 bp, Artificial Sequence
  Brca2.2_Fanca.2
  crRNA array
  misc_feature (148)..(157): n is a, c, g, or t
cttggctttatatatcttgtggaaaggacgaaacaccgtaatttctactaagtgtagatgatccaggtgtaacaagccataatttctactaagtgtagatagagctaccacctagacagctaatttctactaagtgtagatttttttnnnnnnnnnnaagcttggcgtggatccgatatcaactagatcttgagacaaatggcagtattcatccacaattttaaaagaaaaggggggattggggggtacagtgcaggggaaagaatagtagacataatagcaacagacatacaaactaaag

SEQ ID NO: 14104 - DNA, 301 bp, Artificial Sequence
  Brca2.2_Fanca.3
  crRNA array
  misc_feature (148)..(157): n is a, c, g, or t
cttggctttatatatcttgtggaaaggacgaaacaccgtaatttctactaagtgtagatgatccaggtgtaacaagccataatttctactaagtgtagataccaactgctgtgcctcgggtaatttctactaagtgtagatttttttnnnnnnnnnnaagcttggcgtggatccgatatcaactagatcttgagacaaatggcagtattcatccacaattttaaaagaaaaggggggattggggggtacagtgcaggggaaagaatagtagacataatagcaacagacatacaaactaaag

SEQ ID NO: 14105 - DNA, 301 bp, Artificial Sequence
  Brca2.2_Fanca.4
  crRNA array
  misc_feature (148)..(157): n is a, c, g, or t
cttggctttatatatcttgtggaaaggacgaaacaccgtaatttctactaagtgtagatgatccaggtgtaacaagccataatttctactaagtgtagatcacccacccctggtgccaagtaatttctactaagtgtagatttttttnnnnnnnnnnaagcttggcgtggatccgatatcaactagatcttgagacaaatggcagtattcatccacaattttaaaagaaaaggggggattggggggtacagtgcaggggaaagaatagtagacataatagcaacagacatacaaactaaag

SEQ ID NO: 14106 - DNA, 301 bp, Artificial Sequence
  Brca2.3_Fanca.1
  crRNA array
  misc_feature (148)..(157): n is a, c, g, or t
cttggctttatatatcttgtggaaaggacgaaacaccgtaatttctactaagtgtagattgaatataaactgggccacttaatttctactaagtgtagatggaggccccggggcccaccataatttctactaagtgtagatttttttnnnnnnnnnnaagcttggcgtggatccgatatcaactagatcttgagacaaatggcagtattcatccacaattttaaaagaaaaggggggattggggggtacagtgcaggggaaagaatagtagacataatagcaacagacatacaaactaaag

SEQ ID NO: 14107 - DNA, 301 bp, Artificial Sequence
  Brca2.3_Fanca.2
  crRNA array
  misc_feature (148)..(157): n is a, c, g, or t
cttggctttatatatcttgtggaaaggacgaaacaccgtaatttctactaagtgtagattgaatataaactgggccacttaatttctactaagtgtagatagagctaccacctagacagctaatttctactaagtgtagatttttttnnnnnnnnnnaagcttggcgtggatccgatatcaactagatcttgagacaaatggcagtattcatccacaattttaaaagaaaaggggggattggggggtacagtgcaggggaaagaatagtagacataatagcaacagacatacaaactaaag

SEQ ID NO: 14108 - DNA, 301 bp, Artificial Sequence
  Brca2.3_Fanca.3
  crRNA array
  misc_feature (148)..(157): n is a, c, g, or t
cttggctttatatatcttgtggaaaggacgaaacaccgtaatttctactaagtgtagattgaatataaactgggccacttaatttctactaagtgtagataccaactgctgtgcctcgggtaatttctactaagtgtagatttttttnnnnnnnnnnaagcttggcgtggatccgatatcaactagatcttgagacaaatggcagtattcatccacaattttaaaagaaaaggggggattggggggtacagtgcaggggaaagaatagtagacataatagcaacagacatacaaactaaag

SEQ ID NO: 14109 - DNA, 301 bp, Artificial Sequence
  Brca2.3_Fanca.4
  crRNA array
  misc_feature (148)..(157): n is a, c, g, or t
cttggctttatatatcttgtggaaaggacgaaacaccgtaatttctactaagtgtagattgaatataaactgggccacttaatttctactaagtgtagatcacccacccctggtgccaagtaatttctactaagtgtagatttttttnnnnnnnnnnaagcttggcgtggatccgatatcaactagatcttgagacaaatggcagtattcatccacaattttaaaagaaaaggggggattggggggtacagtgcaggggaaagaatagtagacataatagcaacagacatacaaactaaag

SEQ ID NO: 14110 - DNA, 301 bp, Artificial Sequence
  Brca2.4_Fanca.1
  crRNA array
  misc_feature (148)..(157): n is a, c, g, or t
cttggctttatatatcttgtggaaaggacgaaacaccgtaatttctactaagtgtagatgaaacgccgtatatatagagtaatttctactaagtgtagatggaggccccggggcccaccataatttctactaagtgtagatttttttnnnnnnnnnnaagcttggcgtggatccgatatcaactagatcttgagacaaatggcagtattcatccacaattttaaaagaaaaggggggattggggggtacagtgcaggggaaagaatagtagacataatagcaacagacatacaaactaaag

SEQ ID NO: 14111 - DNA, 301 bp, Artificial Sequence
  Brca2.4_Fanca.2
  crRNA array
  misc_feature (148)..(157): n is a, c, g, or t
cttggctttatatatcttgtggaaaggacgaaacaccgtaatttctactaagtgtagatgaaacgccgtatatatagagtaatttctactaagtgtagatagagctaccacctagacagctaatttctactaagtgtagatttttttnnnnnnnnnnaagcttggcgtggatccgatatcaactagatcttgagacaaatggcagtattcatccacaattttaaaagaaaaggggggattggggggtacagtgcaggggaaagaatagtagacataatagcaacagacatacaaactaaag

SEQ ID NO: 14112 - DNA, 301 bp, Artificial Sequence
  Brca2.4_Fanca.3
  crRNA array
  misc_feature (148)..(157): n is a, c, g, or t
cttggctttatatatcttgtggaaaggacgaaacaccgtaatttctactaagtgtagatgaaacgccgtatatatagagtaatttctactaagtgtagataccaactgctgtgcctcgggtaatttctactaagtgtagatttttttnnnnnnnnnnaagcttggcgtggatccgatatcaactagatcttgagacaaatggcagtattcatccacaattttaaaagaaaaggggggattggggggtacagtgcaggggaaagaatagtagacataatagcaacagacatacaaactaaag

SEQ ID NO: 14113 - DNA, 301 bp, Artificial Sequence
  Brca2.4_Fanca.4
  crRNA array
  misc_feature (148)..(157): n is a, c, g, or t
cttggctttatatatcttgtggaaaggacgaaacaccgtaatttctactaagtgtagatgaaacgccgtatatatagagtaatttctactaagtgtagatcacccacccctggtgccaagtaatttctactaagtgtagatttttttnnnnnnnnnnaagcttggcgtggatccgatatcaactagatcttgagacaaatggcagtattcatccacaattttaaaagaaaaggggggattggggggtacagtgcaggggaaagaatagtagacataatagcaacagacatacaaactaaag

SEQ ID NO: 14114 - DNA, 301 bp, Artificial Sequence
  Brca2.1_Nf1.1
  crRNA array
  misc_feature (148)..(157): n is a, c, g, or t
cttggctttatatatcttgtggaaaggacgaaacaccgtaatttctactaagtgtagatctaagcgtagaaccagaaattaatttctactaagtgtagattggcgatccggaatcctctgtaatttctactaagtgtagatttttttnnnnnnnnnnaagcttggcgtggatccgatatcaactagatcttgagacaaatggcagtattcatccacaattttaaaagaaaaggggggattggggggtacagtgcaggggaaagaatagtagacataatagcaacagacatacaaactaaag

SEQ ID NO: 14115 - DNA, 301 bp, Artificial Sequence
  Brca2.1_Nf1.2
  crRNA array
  misc_feature (148)..(157): n is a, c, g, or t
cttggctttatatatcttgtggaaaggacgaaacaccgtaatttctactaagtgtagatctaagcgtagaaccagaaattaatttctactaagtgtagatggaaacacaacgctggcctctaatttctactaagtgtagatttttttnnnnnnnnnnaagcttggcgtggatccgatatcaactagatcttgagacaaatggcagtattcatccacaattttaaaagaaaaggggggattggggggtacagtgcaggggaaagaatagtagacataatagcaacagacatacaaactaaag

SEQ ID NO: 14116 - DNA, 301 bp, Artificial Sequence
  Brca2.1_Nf1.3
  crRNA array
  misc_feature (148)..(157): n is a, c, g, or t
cttggctttatatatcttgtggaaaggacgaaacaccgtaatttctactaagtgtagatctaagcgtagaaccagaaattaatttctactaagtgtagataatgatggaacgcagtcgcataatttctactaagtgtagatttttttnnnnnnnnnnaagcttggcgtggatccgatatcaactagatcttgagacaaatggcagtattcatccacaattttaaaagaaaaggggggattggggggtacagtgcaggggaaagaatagtagacataatagcaacagacatacaaactaaag

SEQ ID NO: 14117 - DNA, 301 bp, Artificial Sequence
  Brca2.1_Nf1.4
  crRNA array
  misc_feature (148)..(157): n is a, c, g, or t
cttggctttatatatcttgtggaaaggacgaaacaccgtaatttctactaagtgtagatctaagcgtagaaccagaaattaatttctactaagtgtagattgcaaaaccatccaccaagttaatttctactaagtgtagatttttttnnnnnnnnnnaagcttggcgtggatccgatatcaactagatcttgagacaaatggcagtattcatccacaattttaaaagaaaaggggggattggggggtacagtgcaggggaaagaatagtagacataatagcaacagacatacaaactaaag

SEQ ID NO: 14118 - DNA, 301 bp, Artificial Sequence
  Brca2.2_Nf1.1
  crRNA array
  misc_feature (148)..(157): n is a, c, g, or t
cttggctttatatatcttgtggaaaggacgaaacaccgtaatttctactaagtgtagatgatccaggtgtaacaagccataatttctactaagtgtagattggcgatccggaatcctctgtaatttctactaagtgtagatttttttnnnnnnnnnnaagcttggcgtggatccgatatcaactagatcttgagacaaatggcagtattcatccacaattttaaaagaaaaggggggattggggggtacagtgcaggggaaagaatagtagacataatagcaacagacatacaaactaaag

SEQ ID NO: 14119 - DNA, 301 bp, Artificial Sequence
  Brca2.2_Nf1.2
  crRNA array
  misc_feature (148)..(157): n is a, c, g, or t
cttggctttatatatcttgtggaaaggacgaaacaccgtaatttctactaagtgtagatgatccaggtgtaacaagccataatttctactaagtgtagatggaaacacaacgctggcctctaatttctactaagtgtagatttttttnnnnnnnnnnaagcttggcgtggatccgatatcaactagatcttgagacaaatggcagtattcatccacaattttaaaagaaaaggggggattggggggtacagtgcaggggaaagaatagtagacataatagcaacagacatacaaactaaag

SEQ ID NO: 14120 - DNA, 301 bp, Artificial Sequence
  Brca2.2_Nf1.3
  crRNA array
  misc_feature (148)..(157): n is a, c, g, or t
cttggctttatatatcttgtggaaaggacgaaacaccgtaatttctactaagtgtagatgatccaggtgtaacaagccataatttctactaagtgtagataatgatggaacgcagtcgcataatttctactaagtgtagatttttttnnnnnnnnnnaagcttggcgtggatccgatatcaactagatcttgagacaaatggcagtattcatccacaattttaaaagaaaaggggggattggggggtacagtgcaggggaaagaatagtagacataatagcaacagacatacaaactaaag

SEQ ID NO: 14121 - DNA, 301 bp, Artificial Sequence
  Brca2.2_Nf1.4
  crRNA array
  misc_feature (148)..(157): n is a, c, g, or t
cttggctttatatatcttgtggaaaggacgaaacaccgtaatttctactaagtgtagatgatccaggtgtaacaagccataatttctactaagtgtagattgcaaaaccatccaccaagttaatttctactaagtgtagatttttttnnnnnnnnnnaagcttggcgtggatccgatatcaactagatcttgagacaaatggcagtattcatccacaattttaaaagaaaaggggggattggggggtacagtgcaggggaaagaatagtagacataatagcaacagacatacaaactaaag

SEQ ID NO: 14122 - DNA, 301 bp, Artificial Sequence
  Brca2.3_Nf1.1
  crRNA array
  misc_feature (148)..(157): n is a, c, g, or t
cttggctttatatatcttgtggaaaggacgaaacaccgtaatttctactaagtgtagattgaatataaactgggccacttaatttctactaagtgtagattggcgatccggaatcctctgtaatttctactaagtgtagatttttttnnnnnnnnnnaagcttggcgtggatccgatatcaactagatcttgagacaaatggcagtattcatccacaattttaaaagaaaaggggggattggggggtacagtgcaggggaaagaatagtagacataatagcaacagacatacaaactaaag

SEQ ID NO: 14123 - DNA, 301 bp, Artificial Sequence
  Brca2.3_Nf1.2
  crRNA array
  misc_feature (148)..(157): n is a, c, g, or t
cttggctttatatatcttgtggaaaggacgaaacaccgtaatttctactaagtgtagattgaatataaactgggccacttaatttctactaagtgtagatggaaacacaacgctggcctctaatttctactaagtgtagatttttttnnnnnnnnnnaagcttggcgtggatccgatatcaactagatcttgagacaaatggcagtattcatccacaattttaaaagaaaaggggggattggggggtacagtgcaggggaaagaatagtagacataatagcaacagacatacaaactaaag

SEQ ID NO: 14124 - DNA, 301 bp, Artificial Sequence
  Brca2.3_Nf1.3
  crRNA array
  misc_feature (148)..(157): n is a, c, g, or t
cttggctttatatatcttgtggaaaggacgaaacaccgtaatttctactaagtgtagattgaatataaactgggccacttaatttctactaagtgtagataatgatggaacgcagtcgcataatttctactaagtgtagatttttttnnnnnnnnnnaagcttggcgtggatccgatatcaactagatcttgagacaaatggcagtattcatccacaattttaaaagaaaaggggggattggggggtacagtgcaggggaaagaatagtagacataatagcaacagacatacaaactaaag

SEQ ID NO: 14125 - DNA, 301 bp, Artificial Sequence
  Brca2.3_Nf1.4
  crRNA array
  misc_feature (148)..(157): n is a, c, g, or t
cttggctttatatatcttgtggaaaggacgaaacaccgtaatttctactaagtgtagattgaatataaactgggccacttaatttctactaagtgtagattgcaaaaccatccaccaagttaatttctactaagtgtagatttttttnnnnnnnnnnaagcttggcgtggatccgatatcaactagatcttgagacaaatggcagtattcatccacaattttaaaagaaaaggggggattggggggtacagtgcaggggaaagaatagtagacataatagcaacagacatacaaactaaag

SEQ ID NO: 14126 - DNA, 301 bp, Artificial Sequence
  Brca2.4_Nf1.1
  crRNA array
  misc_feature (148)..(157): n is a, c, g, or t
cttggctttatatatcttgtggaaaggacgaaacaccgtaatttctactaagtgtagatgaaacgccgtatatatagagtaatttctactaagtgtagattggcgatccggaatcctctgtaatttctactaagtgtagatttttttnnnnnnnnnnaagcttggcgtggatccgatatcaactagatcttgagacaaatggcagtattcatccacaattttaaaagaaaaggggggattggggggtacagtgcaggggaaagaatagtagacataatagcaacagacatacaaactaaag

SEQ ID NO: 14127 - DNA, 301 bp, Artificial Sequence
  Brca2.4_Nf1.2
  crRNA array
  misc_feature (148)..(157): n is a, c, g, or t
cttggctttatatatcttgtggaaaggacgaaacaccgtaatttctactaagtgtagatgaaacgccgtatatatagagtaatttctactaagtgtagatggaaacacaacgctggcctctaatttctactaagtgtagatttttttnnnnnnnnnnaagcttggcgtggatccgatatcaactagatcttgagacaaatggcagtattcatccacaattttaaaagaaaaggggggattggggggtacagtgcaggggaaagaatagtagacataatagcaacagacatacaaactaaag

SEQ ID NO: 14128 - DNA, 301 bp, Artificial Sequence
  Brca2.4_Nf1.3
  crRNA array
  misc_feature (148)..(157): n is a, c, g, or t
cttggctttatatatcttgtggaaaggacgaaacaccgtaatttctactaagtgtagatgaaacgccgtatatatagagtaatttctactaagtgtagataatgatggaacgcagtcgcataatttctactaagtgtagatttttttnnnnnnnnnnaagcttggcgtggatccgatatcaactagatcttgagacaaatggcagtattcatccacaattttaaaagaaaaggggggattggggggtacagtgcaggggaaagaatagtagacataatagcaacagacatacaaactaaag

SEQ ID NO: 14129 - DNA, 301 bp, Artificial Sequence
  Brca2.4_Nf1.4
  crRNA array
  misc_feature (148)..(157): n is a, c, g, or t
cttggctttatatatcttgtggaaaggacgaaacaccgtaatttctactaagtgtagatgaaacgccgtatatatagagtaatttctactaagtgtagattgcaaaaccatccaccaagttaatttctactaagtgtagatttttttnnnnnnnnnnaagcttggcgtggatccgatatcaactagatcttgagacaaatggcagtattcatccacaattttaaaagaaaaggggggattggggggtacagtgcaggggaaagaatagtagacataatagcaacagacatacaaactaaag

SEQ ID NO: 14130 - DNA, 301 bp, Artificial Sequence
  Brca2.1_Kdm6a.1
  crRNA array
  misc_feature (148)..(157): n is a, c, g, or t
cttggctttatatatcttgtggaaaggacgaaacaccgtaatttctactaagtgtagatctaagcgtagaaccagaaattaatttctactaagtgtagatgctgccgcctctcgcggcagtaatttctactaagtgtagatttttttnnnnnnnnnnaagcttggcgtggatccgatatcaactagatcttgagacaaatggcagtattcatccacaattttaaaagaaaaggggggattggggggtacagtgcaggggaaagaatagtagacataatagcaacagacatacaaactaaag

SEQ ID NO: 14131 - DNA, 301 bp, Artificial Sequence
  Brca2.1_Kdm6a.2
  crRNA array
  misc_feature (148)..(157): n is a, c, g, or t
cttggctttatatatcttgtggaaaggacgaaacaccgtaatttctactaagtgtagatctaagcgtagaaccagaaattaatttctactaagtgtagatgctgcaggtaaggcacgttttaatttctactaagtgtagatttttttnnnnnnnnnnaagcttggcgtggatccgatatcaactagatcttgagacaaatggcagtattcatccacaattttaaaagaaaaggggggattggggggtacagtgcaggggaaagaatagtagacataatagcaacagacatacaaactaaag

SEQ ID NO: 14132 - DNA, 301 bp, Artificial Sequence
  Brca2.1_Kdm6a.3
  crRNA array
  misc_feature (148)..(157): n is a, c, g, or t
cttggctttatatatcttgtggaaaggacgaaacaccgtaatttctactaagtgtagatctaagcgtagaaccagaaattaatttctactaagtgtagattgctggtgccggggaagttttaatttctactaagtgtagatttttttnnnnnnnnnnaagcttggcgtggatccgatatcaactagatcttgagacaaatggcagtattcatccacaattttaaaagaaaaggggggattggggggtacagtgcaggggaaagaatagtagacataatagcaacagacatacaaactaaag

SEQ ID NO: 14133 - DNA, 301 bp, Artificial Sequence
  Brca2.1_Kdm6a.4
  crRNA array
  misc_feature (148)..(157): n is a, c, g, or t
cttggctttatatatcttgtggaaaggacgaaacaccgtaatttctactaagtgtagatctaagcgtagaaccagaaattaatttctactaagtgtagattgtctcctacgaatcccccctaatttctactaagtgtagatttttttnnnnnnnnnnaagcttggcgtggatccgatatcaactagatcttgagacaaatggcagtattcatccacaattttaaaagaaaaggggggattggggggtacagtgcaggggaaagaatagtagacataatagcaacagacatacaaactaaag

SEQ ID NO: 14134 - DNA, 301 bp, Artificial Sequence
  Brca2.2_Kdm6a.1
  crRNA array
  misc_feature (148)..(157): n is a, c, g, or t
cttggctttatatatcttgtggaaaggacgaaacaccgtaatttctactaagtgtagatgatccaggtgtaacaagccataatttctactaagtgtagatgctgccgcctctcgcggcagtaatttctactaagtgtagatttttttnnnnnnnnnnaagcttggcgtggatccgatatcaactagatcttgagacaaatggcagtattcatccacaattttaaaagaaaaggggggattggggggtacagtgcaggggaaagaatagtagacataatagcaacagacatacaaactaaag

SEQ ID NO: 14135 - DNA, 301 bp, Artificial Sequence
  Brca2.2_Kdm6a.2
  crRNA array
  misc_feature (148)..(157): n is a, c, g, or t
cttggctttatatatcttgtggaaaggacgaaacaccgtaatttctactaagtgtagatgatccaggtgtaacaagccataatttctactaagtgtagatgctgcaggtaaggcacgttttaatttctactaagtgtagatttttttnnnnnnnnnnaagcttggcgtggatccgatatcaactagatcttgagacaaatggcagtattcatccacaattttaaaagaaaaggggggattggggggtacagtgcaggggaaagaatagtagacataatagcaacagacatacaaactaaag

SEQ ID NO: 14136 - DNA, 301 bp, Artificial Sequence
  Brca2.2_Kdm6a.3
  crRNA array
  misc_feature (148)..(157): n is a, c, g, or t
cttggctttatatatcttgtggaaaggacgaaacaccgtaatttctactaagtgtagatgatccaggtgtaacaagccataatttctactaagtgtagattgctggtgccggggaagttttaatttctactaagtgtagatttttttnnnnnnnnnnaagcttggcgtggatccgatatcaactagatcttgagacaaatggcagtattcatccacaattttaaaagaaaaggggggattggggggtacagtgcaggggaaagaatagtagacataatagcaacagacatacaaactaaag

SEQ ID NO: 14137 - DNA, 301 bp, Artificial Sequence
  Brca2.2_Kdm6a.4
  crRNA array
  misc_feature (148)..(157): n is a, c, g, or t
cttggctttatatatcttgtggaaaggacgaaacaccgtaatttctactaagtgtagatgatccaggtgtaacaagccataatttctactaagtgtagattgtctcctacgaatcccccctaatttctactaagtgtagatttttttnnnnnnnnnnaagcttggcgtggatccgatatcaactagatcttgagacaaatggcagtattcatccacaattttaaaagaaaaggggggattggggggtacagtgcaggggaaagaatagtagacataatagcaacagacatacaaactaaag

SEQ ID NO: 14138 - DNA, 301 bp, Artificial Sequence
  Brca2.3_Kdm6a.1
  crRNA array
  misc_feature (148)..(157): n is a, c, g, or t
cttggctttatatatcttgtggaaaggacgaaacaccgtaatttctactaagtgtagattgaatataaactgggccacttaatttctactaagtgtagatgctgccgcctctcgcggcagtaatttctactaagtgtagatttttttnnnnnnnnnnaagcttggcgtggatccgatatcaactagatcttgagacaaatggcagtattcatccacaattttaaaagaaaaggggggattggggggtacagtgcaggggaaagaatagtagacataatagcaacagacatacaaactaaag

SEQ ID NO: 14139 - DNA, 301 bp, Artificial Sequence
  Brca2.3_Kdm6a.2
  crRNA array
  misc_feature (148)..(157): n is a, c, g, or t
cttggctttatatatcttgtggaaaggacgaaacaccgtaatttctactaagtgtagattgaatataaactgggccacttaatttctactaagtgtagatgctgcaggtaaggcacgttttaatttctactaagtgtagatttttttnnnnnnnnnnaagcttggcgtggatccgatatcaactagatcttgagacaaatggcagtattcatccacaattttaaaagaaaaggggggattggggggtacagtgcaggggaaagaatagtagacataatagcaacagacatacaaactaaag

SEQ ID NO: 14140 - DNA, 301 bp, Artificial Sequence
  Brca2.3_Kdm6a.3
  crRNA array
  misc_feature (148)..(157): n is a, c, g, or t
cttggctttatatatcttgtggaaaggacgaaacaccgtaatttctactaagtgtagattgaatataaactgggccacttaatttctactaagtgtagattgctggtgccggggaagttttaatttctactaagtgtagatttttttnnnnnnnnnnaagcttggcgtggatccgatatcaactagatcttgagacaaatggcagtattcatccacaattttaaaagaaaaggggggattggggggtacagtgcaggggaaagaatagtagacataatagcaacagacatacaaactaaag

SEQ ID NO: 14141 - DNA, 301 bp, Artificial Sequence
  Brca2.3_Kdm6a.4
  crRNA array
  misc_feature (148)..(157): n is a, c, g, or t
cttggctttatatatcttgtggaaaggacgaaacaccgtaatttctactaagtgtagattgaatataaactgggccacttaatttctactaagtgtagattgtctcctacgaatcccccctaatttctactaagtgtagatttttttnnnnnnnnnnaagcttggcgtggatccgatatcaactagatcttgagacaaatggcagtattcatccacaattttaaaagaaaaggggggattggggggtacagtgcaggggaaagaatagtagacataatagcaacagacatacaaactaaag

SEQ ID NO: 14142 - DNA, 301 bp, Artificial Sequence
  Brca2.4_Kdm6a.1
  crRNA array
  misc_feature (148)..(157): n is a, c, g, or t
cttggctttatatatcttgtggaaaggacgaaacaccgtaatttctactaagtgtagatgaaacgccgtatatatagagtaatttctactaagtgtagatgctgccgcctctcgcggcagtaatttctactaagtgtagatttttttnnnnnnnnnnaagcttggcgtggatccgatatcaactagatcttgagacaaatggcagtattcatccacaattttaaaagaaaaggggggattggggggtacagtgcaggggaaagaatagtagacataatagcaacagacatacaaactaaag

SEQ ID NO: 14143 - DNA, 301 bp, Artificial Sequence
  Brca2.4_Kdm6a.2
  crRNA array
  misc_feature (148)..(157): n is a, c, g, or t
cttggctttatatatcttgtggaaaggacgaaacaccgtaatttctactaagtgtagatgaaacgccgtatatatagagtaatttctactaagtgtagatgctgcaggtaaggcacgttttaatttctactaagtgtagatttttttnnnnnnnnnnaagcttggcgtggatccgatatcaactagatcttgagacaaatggcagtattcatccacaattttaaaagaaaaggggggattggggggtacagtgcaggggaaagaatagtagacataatagcaacagacatacaaactaaag

SEQ ID NO: 14144 - DNA, 301 bp, Artificial Sequence
  Brca2.4_Kdm6a.3
  crRNA array
  misc_feature (148)..(157): n is a, c, g, or t
cttggctttatatatcttgtggaaaggacgaaacaccgtaatttctactaagtgtagatgaaacgccgtatatatagagtaatttctactaagtgtagattgctggtgccggggaagttttaatttctactaagtgtagatttttttnnnnnnnnnnaagcttggcgtggatccgatatcaactagatcttgagacaaatggcagtattcatccacaattttaaaagaaaaggggggattggggggtacagtgcaggggaaagaatagtagacataatagcaacagacatacaaactaaag

SEQ ID NO: 14145 - DNA, 301 bp, Artificial Sequence
  Brca2.4_Kdm6a.4
  crRNA array
  misc_feature (148)..(157): n is a, c, g, or t
cttggctttatatatcttgtggaaaggacgaaacaccgtaatttctactaagtgtagatgaaacgccgtatatatagagtaatttctactaagtgtagattgtctcctacgaatcccccctaatttctactaagtgtagatttttttnnnnnnnnnnaagcttggcgtggatccgatatcaactagatcttgagacaaatggcagtattcatccacaattttaaaagaaaaggggggattggggggtacagtgcaggggaaagaatagtagacataatagcaacagacatacaaactaaag

SEQ ID NO: 14146 - DNA, 301 bp, Artificial Sequence
  Brca2.1_Ercc5.1
  crRNA array
  misc_feature (148)..(157): n is a, c, g, or t
cttggctttatatatcttgtggaaaggacgaaacaccgtaatttctactaagtgtagatctaagcgtagaaccagaaattaatttctactaagtgtagatacggcacgagcaagagacactaatttctactaagtgtagatttttttnnnnnnnnnnaagcttggcgtggatccgatatcaactagatcttgagacaaatggcagtattcatccacaattttaaaagaaaaggggggattggggggtacagtgcaggggaaagaatagtagacataatagcaacagacatacaaactaaag

SEQ ID NO: 14147 - DNA, 301 bp, Artificial Sequence
  Brca2.1_Ercc5.2
  crRNA array
  misc_feature (148)..(157): n is a, c, g, or t
cttggctttatatatcttgtggaaaggacgaaacaccgtaatttctactaagtgtagatctaagcgtagaaccagaaattaatttctactaagtgtagatgagtatcacatcggtgactctaatttctactaagtgtagatttttttnnnnnnnnnnaagcttggcgtggatccgatatcaactagatcttgagacaaatggcagtattcatccacaattttaaaagaaaaggggggattggggggtacagtgcaggggaaagaatagtagacataatagcaacagacatacaaactaaag

SEQ ID NO: 14148 - DNA, 301 bp, Artificial Sequence
  Brca2.1_Ercc5.3
  crRNA array
  misc_feature (148)..(157): n is a, c, g, or t
cttggctttatatatcttgtggaaaggacgaaacaccgtaatttctactaagtgtagatctaagcgtagaaccagaaattaatttctactaagtgtagatggagtgggtccaggcctcgttaatttctactaagtgtagatttttttnnnnnnnnnnaagcttggcgtggatccgatatcaactagatcttgagacaaatggcagtattcatccacaattttaaaagaaaaggggggattggggggtacagtgcaggggaaagaatagtagacataatagcaacagacatacaaactaaag

SEQ ID NO: 14149 - DNA, 301 bp, Artificial Sequence
  Brca2.1_Ercc5.4
  crRNA array
  misc_feature (148)..(157): n is a, c, g, or t
cttggctttatatatcttgtggaaaggacgaaacaccgtaatttctactaagtgtagatctaagcgtagaaccagaaattaatttctactaagtgtagatcagagccggtggaataatgttaatttctactaagtgtagatttttttnnnnnnnnnnaagcttggcgtggatccgatatcaactagatcttgagacaaatggcagtattcatccacaattttaaaagaaaaggggggattggggggtacagtgcaggggaaagaatagtagacataatagcaacagacatacaaactaaag

SEQ ID NO: 14150 - DNA, 301 bp, Artificial Sequence
  Brca2.2_Ercc5.1
  crRNA array
  misc_feature (148)..(157): n is a, c, g, or t
cttggctttatatatcttgtggaaaggacgaaacaccgtaatttctactaagtgtagatgatccaggtgtaacaagccataatttctactaagtgtagatacggcacgagcaagagacactaatttctactaagtgtagatttttttnnnnnnnnnnaagcttggcgtggatccgatatcaactagatcttgagacaaatggcagtattcatccacaattttaaaagaaaaggggggattggggggtacagtgcaggggaaagaatagtagacataatagcaacagacatacaaactaaag

SEQ ID NO: 14151 - DNA, 301 bp, Artificial Sequence
  Brca2.2_Ercc5.2
  crRNA array
  misc_feature (148)..(157): n is a, c, g, or t
cttggctttatatatcttgtggaaaggacgaaacaccgtaatttctactaagtgtagatgatccaggtgtaacaagccataatttctactaagtgtagatgagtatcacatcggtgactctaatttctactaagtgtagatttttttnnnnnnnnnnaagcttggcgtggatccgatatcaactagatcttgagacaaatggcagtattcatccacaattttaaaagaaaaggggggattggggggtacagtgcaggggaaagaatagtagacataatagcaacagacatacaaactaaag

SEQ ID NO: 14152 - DNA, 301 bp, Artificial Sequence
  Brca2.2_Ercc5.3
  crRNA array
  misc_feature (148)..(157): n is a, c, g, or t
cttggctttatatatcttgtggaaaggacgaaacaccgtaatttctactaagtgtagatgatccaggtgtaacaagccataatttctactaagtgtagatggagtgggtccaggcctcgttaatttctactaagtgtagatttttttnnnnnnnnnnaagcttggcgtggatccgatatcaactagatcttgagacaaatggcagtattcatccacaattttaaaagaaaaggggggattggggggtacagtgcaggggaaagaatagtagacataatagcaacagacatacaaactaaag

SEQ ID NO: 14153 - DNA, 301 bp, Artificial Sequence
  Brca2.2_Ercc5.4
  crRNA array
  misc_feature (148)..(157): n is a, c, g, or t
cttggctttatatatcttgtggaaaggacgaaacaccgtaatttctactaagtgtagatgatccaggtgtaacaagccataatttctactaagtgtagatcagagccggtggaataatgttaatttctactaagtgtagatttttttnnnnnnnnnnaagcttggcgtggatccgatatcaactagatcttgagacaaatggcagtattcatccacaattttaaaagaaaaggggggattggggggtacagtgcaggggaaagaatagtagacataatagcaacagacatacaaactaaag

SEQ ID NO: 14154 - DNA, 301 bp, Artificial Sequence
  Brca2.3_Ercc5.1
  crRNA array
  misc_feature (148)..(157): n is a, c, g, or t
cttggctttatatatcttgtggaaaggacgaaacaccgtaatttctactaagtgtagattgaatataaactgggccacttaatttctactaagtgtagatacggcacgagcaagagacactaatttctactaagtgtagatttttttnnnnnnnnnnaagcttggcgtggatccgatatcaactagatcttgagacaaatggcagtattcatccacaattttaaaagaaaaggggggattggggggtacagtgcaggggaaagaatagtagacataatagcaacagacatacaaactaaag

SEQ ID NO: 14155 - DNA, 301 bp, Artificial Sequence
  Brca2.3_Ercc5.2
  crRNA array
  misc_feature (148)..(157): n is a, c, g, or t
cttggctttatatatcttgtggaaaggacgaaacaccgtaatttctactaagtgtagattgaatataaactgggccacttaatttctactaagtgtagatgagtatcacatcggtgactctaatttctactaagtgtagatttttttnnnnnnnnnnaagcttggcgtggatccgatatcaactagatcttgagacaaatggcagtattcatccacaattttaaaagaaaaggggggattggggggtacagtgcaggggaaagaatagtagacataatagcaacagacatacaaactaaag

SEQ ID NO: 14156 - DNA, 301 bp, Artificial Sequence
  Brca2.3_Ercc5.3
  crRNA array
  misc_feature (148)..(157): n is a, c, g, or t
cttggctttatatatcttgtggaaaggacgaaacaccgtaatttctactaagtgtagattgaatataaactgggccacttaatttctactaagtgtagatggagtgggtccaggcctcgttaatttctactaagtgtagatttttttnnnnnnnnnnaagcttggcgtggatccgatatcaactagatcttgagacaaatggcagtattcatccacaattttaaaagaaaaggggggattggggggtacagtgcaggggaaagaatagtagacataatagcaacagacatacaaactaaag

SEQ ID NO: 14157 - DNA, 301 bp, Artificial Sequence
  Brca2.3_Ercc5.4
  crRNA array
  misc_feature (148)..(157): n is a, c, g, or t
cttggctttatatatcttgtggaaaggacgaaacaccgtaatttctactaagtgtagattgaatataaactgggccacttaatttctactaagtgtagatcagagccggtggaataatgttaatttctactaagtgtagatttttttnnnnnnnnnnaagcttggcgtggatccgatatcaactagatcttgagacaaatggcagtattcatccacaattttaaaagaaaaggggggattggggggtacagtgcaggggaaagaatagtagacataatagcaacagacatacaaactaaag

SEQ ID NO: 14158 - DNA, 301 bp, Artificial Sequence
  Brca2.4_Ercc5.1
  crRNA array
  misc_feature (148)..(157): n is a, c, g, or t
cttggctttatatatcttgtggaaaggacgaaacaccgtaatttctactaagtgtagatgaaacgccgtatatatagagtaatttctactaagtgtagatacggcacgagcaagagacactaatttctactaagtgtagatttttttnnnnnnnnnnaagcttggcgtggatccgatatcaactagatcttgagacaaatggcagtattcatccacaattttaaaagaaaaggggggattggggggtacagtgcaggggaaagaatagtagacataatagcaacagacatacaaactaaag

SEQ ID NO: 14159 - DNA, 301 bp, Artificial Sequence
  Brca2.4_Ercc5.2
  crRNA array
  misc_feature (148)..(157): n is a, c, g, or t
cttggctttatatatcttgtggaaaggacgaaacaccgtaatttctactaagtgtagatgaaacgccgtatatatagagtaatttctactaagtgtagatgagtatcacatcggtgactctaatttctactaagtgtagatttttttnnnnnnnnnnaagcttggcgtggatccgatatcaactagatcttgagacaaatggcagtattcatccacaattttaaaagaaaaggggggattggggggtacagtgcaggggaaagaatagtagacataatagcaacagacatacaaactaaag

SEQ ID NO: 14160 - DNA, 301 bp, Artificial Sequence
  Brca2.4_Ercc5.3
  crRNA array
  misc_feature (148)..(157): n is a, c, g, or t
cttggctttatatatcttgtggaaaggacgaaacaccgtaatttctactaagtgtagatgaaacgccgtatatatagagtaatttctactaagtgtagatggagtgggtccaggcctcgttaatttctactaagtgtagatttttttnnnnnnnnnnaagcttggcgtggatccgatatcaactagatcttgagacaaatggcagtattcatccacaattttaaaagaaaaggggggattggggggtacagtgcaggggaaagaatagtagacataatagcaacagacatacaaactaaag

SEQ ID NO: 14161 - DNA, 301 bp, Artificial Sequence
  Brca2.4_Ercc5.4
  crRNA array
  misc_feature (148)..(157): n is a, c, g, or t
cttggctttatatatcttgtggaaaggacgaaacaccgtaatttctactaagtgtagatgaaacgccgtatatatagagtaatttctactaagtgtagatcagagccggtggaataatgttaatttctactaagtgtagatttttttnnnnnnnnnnaagcttggcgtggatccgatatcaactagatcttgagacaaatggcagtattcatccacaattttaaaagaaaaggggggattggggggtacagtgcaggggaaagaatagtagacataatagcaacagacatacaaactaaag

SEQ ID NO: 14162 - DNA, 301 bp, Artificial Sequence
  Brca2.1_Arid1b.1
  crRNA array
  misc_feature (148)..(157): n is a, c, g, or t
cttggctttatatatcttgtggaaaggacgaaacaccgtaatttctactaagtgtagatctaagcgtagaaccagaaattaatttctactaagtgtagatgctgctgctgtagtgcgtggtaatttctactaagtgtagatttttttnnnnnnnnnnaagcttggcgtggatccgatatcaactagatcttgagacaaatggcagtattcatccacaattttaaaagaaaaggggggattggggggtacagtgcaggggaaagaatagtagacataatagcaacagacatacaaactaaag

SEQ ID NO: 14163 - DNA, 301 bp, Artificial Sequence
  Brca2.1_Arid1b.2
  crRNA array
  misc_feature (148)..(157): n is a, c, g, or t
cttggctttatatatcttgtggaaaggacgaaacaccgtaatttctactaagtgtagatctaagcgtagaaccagaaattaatttctactaagtgtagatagtgcaaaactgagcgcgggtaatttctactaagtgtagatttttttnnnnnnnnnnaagcttggcgtggatccgatatcaactagatcttgagacaaatggcagtattcatccacaattttaaaagaaaaggggggattggggggtacagtgcaggggaaagaatagtagacataatagcaacagacatacaaactaaag

SEQ ID NO: 14164 - DNA, 301 bp, Artificial Sequence
  Brca2.1_Arid1b.3
  crRNA array
  misc_feature (148)..(157): n is a, c, g, or t
cttggctttatatatcttgtggaaaggacgaaacaccgtaatttctactaagtgtagatctaagcgtagaaccagaaattaatttctactaagtgtagatcactcaaaggcgaacaggtataatttctactaagtgtagatttttttnnnnnnnnnnaagcttggcgtggatccgatatcaactagatcttgagacaaatggcagtattcatccacaattttaaaagaaaaggggggattggggggtacagtgcaggggaaagaatagtagacataatagcaacagacatacaaactaaag

SEQ ID NO: 14165 - DNA, 301 bp, Artificial Sequence
  Brca2.1_Arid1b.4
  crRNA array
  misc_feature (148)..(157): n is a, c, g, or t
cttggctttatatatcttgtggaaaggacgaaacaccgtaatttctactaagtgtagatctaagcgtagaaccagaaattaatttctactaagtgtagatctcctggctccgtagaagcataatttctactaagtgtagatttttttnnnnnnnnnnaagcttggcgtggatccgatatcaactagatcttgagacaaatggcagtattcatccacaattttaaaagaaaaggggggattggggggtacagtgcaggggaaagaatagtagacataatagcaacagacatacaaactaaag

SEQ ID NO: 14166 - DNA, 301 bp, Artificial Sequence
  Brca2.2_Arid1b.1
  crRNA array
  misc_feature (148)..(157): n is a, c, g, or t
cttggctttatatatcttgtggaaaggacgaaacaccgtaatttctactaagtgtagatgatccaggtgtaacaagccataatttctactaagtgtagatgctgctgctgtagtgcgtggtaatttctactaagtgtagatttttttnnnnnnnnnnaagcttggcgtggatccgatatcaactagatcttgagacaaatggcagtattcatccacaattttaaaagaaaaggggggattggggggtacagtgcaggggaaagaatagtagacataatagcaacagacatacaaactaaag

SEQ ID NO: 14167 - DNA, 301 bp, Artificial Sequence
  Brca2.2_Arid1b.2
  crRNA array
  misc_feature (148)..(157): n is a, c, g, or t
cttggctttatatatcttgtggaaaggacgaaacaccgtaatttctactaagtgtagatgatccaggtgtaacaagccataatttctactaagtgtagatagtgcaaaactgagcgcgggtaatttctactaagtgtagatttttttnnnnnnnnnnaagcttggcgtggatccgatatcaactagatcttgagacaaatggcagtattcatccacaattttaaaagaaaaggggggattggggggtacagtgcaggggaaagaatagtagacataatagcaacagacatacaaactaaag

SEQ ID NO: 14168 - DNA, 301 bp, Artificial Sequence
  Brca2.2_Arid1b.3
  crRNA array
  misc_feature (148)..(157): n is a, c, g, or t
cttggctttatatatcttgtggaaaggacgaaacaccgtaatttctactaagtgtagatgatccaggtgtaacaagccataatttctactaagtgtagatcactcaaaggcgaacaggtataatttctactaagtgtagatttttttnnnnnnnnnnaagcttggcgtggatccgatatcaactagatcttgagacaaatggcagtattcatccacaattttaaaagaaaaggggggattggggggtacagtgcaggggaaagaatagtagacataatagcaacagacatacaaactaaag

SEQ ID NO: 14169 - DNA, 301 bp, Artificial Sequence
  Brca2.2_Arid1b.4
  crRNA array
  misc_feature (148)..(157): n is a, c, g, or t
cttggctttatatatcttgtggaaaggacgaaacaccgtaatttctactaagtgtagatgatccaggtgtaacaagccataatttctactaagtgtagatctcctggctccgtagaagcataatttctactaagtgtagatttttttnnnnnnnnnnaagcttggcgtggatccgatatcaactagatcttgagacaaatggcagtattcatccacaattttaaaagaaaaggggggattggggggtacagtgcaggggaaagaatagtagacataatagcaacagacatacaaactaaag

SEQ ID NO: 14170 - DNA, 301 bp, Artificial Sequence
  Brca2.3_Arid1b.1
  crRNA array
  misc_feature (148)..(157): n is a, c, g, or t
cttggctttatatatcttgtggaaaggacgaaacaccgtaatttctactaagtgtagattgaatataaactgggccacttaatttctactaagtgtagatgctgctgctgtagtgcgtggtaatttctactaagtgtagatttttttnnnnnnnnnnaagcttggcgtggatccgatatcaactagatcttgagacaaatggcagtattcatccacaattttaaaagaaaaggggggattggggggtacagtgcaggggaaagaatagtagacataatagcaacagacatacaaactaaag

SEQ ID NO: 14171 - DNA, 301 bp, Artificial Sequence
  Brca2.3_Arid1b.2
  crRNA array
  misc_feature (148)..(157): n is a, c, g, or t
cttggctttatatatcttgtggaaaggacgaaacaccgtaatttctactaagtgtagattgaatataaactgggccacttaatttctactaagtgtagatagtgcaaaactgagcgcgggtaatttctactaagtgtagatttttttnnnnnnnnnnaagcttggcgtggatccgatatcaactagatcttgagacaaatggcagtattcatccacaattttaaaagaaaaggggggattggggggtacagtgcaggggaaagaatagtagacataatagcaacagacatacaaactaaag

SEQ ID NO: 14172 - DNA, 301 bp, Artificial Sequence
  Brca2.3_Arid1b.3
  crRNA array
  misc_feature (148)..(157): n is a, c, g, or t
cttggctttatatatcttgtggaaaggacgaaacaccgtaatttctactaagtgtagattgaatataaactgggccacttaatttctactaagtgtagatcactcaaaggcgaacaggtataatttctactaagtgtagatttttttnnnnnnnnnnaagcttggcgtggatccgatatcaactagatcttgagacaaatggcagtattcatccacaattttaaaagaaaaggggggattggggggtacagtgcaggggaaagaatagtagacataatagcaacagacatacaaactaaag

SEQ ID NO: 14173 - DNA, 301 bp, Artificial Sequence
  Brca2.3_Arid1b.4
  crRNA array
  misc_feature (148)..(157): n is a, c, g, or t
cttggctttatatatcttgtggaaaggacgaaacaccgtaatttctactaagtgtagattgaatataaactgggccacttaatttctactaagtgtagatctcctggctccgtagaagcataatttctactaagtgtagatttttttnnnnnnnnnnaagcttggcgtggatccgatatcaactagatcttgagacaaatggcagtattcatccacaattttaaaagaaaaggggggattggggggtacagtgcaggggaaagaatagtagacataatagcaacagacatacaaactaaag

SEQ ID NO: 14174 - DNA, 301 bp, Artificial Sequence
  Brca2.4_Arid1b.1
  crRNA array
  misc_feature (148)..(157): n is a, c, g, or t
cttggctttatatatcttgtggaaaggacgaaacaccgtaatttctactaagtgtagatgaaacgccgtatatatagagtaatttctactaagtgtagatgctgctgctgtagtgcgtggtaatttctactaagtgtagatttttttnnnnnnnnnnaagcttggcgtggatccgatatcaactagatcttgagacaaatggcagtattcatccacaattttaaaagaaaaggggggattggggggtacagtgcaggggaaagaatagtagacataatagcaacagacatacaaactaaag

SEQ ID NO: 14175 - DNA, 301 bp, Artificial Sequence
  Brca2.4_Arid1b.2
  crRNA array
  misc_feature (148)..(157): n is a, c, g, or t
cttggctttatatatcttgtggaaaggacgaaacaccgtaatttctactaagtgtagatgaaacgccgtatatatagagtaatttctactaagtgtagatagtgcaaaactgagcgcgggtaatttctactaagtgtagatttttttnnnnnnnnnnaagcttggcgtggatccgatatcaactagatcttgagacaaatggcagtattcatccacaattttaaaagaaaaggggggattggggggtacagtgcaggggaaagaatagtagacataatagcaacagacatacaaactaaag

SEQ ID NO: 14176 - DNA, 301 bp, Artificial Sequence
  Brca2.4_Arid1b.3
  crRNA array
  misc_feature (148)..(157): n is a, c, g, or t
cttggctttatatatcttgtggaaaggacgaaacaccgtaatttctactaagtgtagatgaaacgccgtatatatagagtaatttctactaagtgtagatcactcaaaggcgaacaggtataatttctactaagtgtagatttttttnnnnnnnnnnaagcttggcgtggatccgatatcaactagatcttgagacaaatggcagtattcatccacaattttaaaagaaaaggggggattggggggtacagtgcaggggaaagaatagtagacataatagcaacagacatacaaactaaag

SEQ ID NO: 14177 - DNA, 301 bp, Artificial Sequence
  Brca2.4_Arid1b.4
  crRNA array
  misc_feature (148)..(157): n is a, c, g, or t
cttggctttatatatcttgtggaaaggacgaaacaccgtaatttctactaagtgtagatgaaacgccgtatatatagagtaatttctactaagtgtagatctcctggctccgtagaagcataatttctactaagtgtagatttttttnnnnnnnnnnaagcttggcgtggatccgatatcaactagatcttgagacaaatggcagtattcatccacaattttaaaagaaaaggggggattggggggtacagtgcaggggaaagaatagtagacataatagcaacagacatacaaactaaag

SEQ ID NO: 14178 - DNA, 301 bp, Artificial Sequence
  Brca2.1_Rb1.1
  crRNA array
  misc_feature (148)..(157): n is a, c, g, or t
cttggctttatatatcttgtggaaaggacgaaacaccgtaatttctactaagtgtagatctaagcgtagaaccagaaattaatttctactaagtgtagattctgacatgatcgggtaccttaatttctactaagtgtagatttttttnnnnnnnnnnaagcttggcgtggatccgatatcaactagatcttgagacaaatggcagtattcatccacaattttaaaagaaaaggggggattggggggtacagtgcaggggaaagaatagtagacataatagcaacagacatacaaactaaag

SEQ ID NO: 14179 - DNA, 301 bp, Artificial Sequence
  Brca2.1_Rb1.2
  crRNA array
  misc_feature (148)..(157): n is a, c, g, or t
cttggctttatatatcttgtggaaaggacgaaacaccgtaatttctactaagtgtagatctaagcgtagaaccagaaattaatttctactaagtgtagatgtctctgcatgaaaacggagtaatttctactaagtgtagatttttttnnnnnnnnnnaagcttggcgtggatccgatatcaactagatcttgagacaaatggcagtattcatccacaattttaaaagaaaaggggggattggggggtacagtgcaggggaaagaatagtagacataatagcaacagacatacaaactaaag

SEQ ID NO: 14180 - DNA, 301 bp, Artificial Sequence
  Brca2.1_Rb1.3
  crRNA array
  misc_feature (148)..(157): n is a, c, g, or t
cttggctttatatatcttgtggaaaggacgaaacaccgtaatttctactaagtgtagatctaagcgtagaaccagaaattaatttctactaagtgtagatagccaatctggtctaataactaatttctactaagtgtagatttttttnnnnnnnnnnaagcttggcgtggatccgatatcaactagatcttgagacaaatggcagtattcatccacaattttaaaagaaaaggggggattggggggtacagtgcaggggaaagaatagtagacataatagcaacagacatacaaactaaag

SEQ ID NO: 14181 - DNA, 301 bp, Artificial Sequence
  Brca2.1_Rb1.4
  crRNA array
  misc_feature (148)..(157): n is a, c, g, or t
cttggctttatatatcttgtggaaaggacgaaacaccgtaatttctactaagtgtagatctaagcgtagaaccagaaattaatttctactaagtgtagattgtagctcagtaaaagtgaataatttctactaagtgtagatttttttnnnnnnnnnnaagcttggcgtggatccgatatcaactagatcttgagacaaatggcagtattcatccacaattttaaaagaaaaggggggattggggggtacagtgcaggggaaagaatagtagacataatagcaacagacatacaaactaaag

SEQ ID NO: 14182 - DNA, 301 bp, Artificial Sequence
  Brca2.2_Rb1.1
  crRNA array
  misc_feature (148)..(157): n is a, c, g, or t
cttggctttatatatcttgtggaaaggacgaaacaccgtaatttctactaagtgtagatgatccaggtgtaacaagccataatttctactaagtgtagattctgacatgatcgggtaccttaatttctactaagtgtagatttttttnnnnnnnnnnaagcttggcgtggatccgatatcaactagatcttgagacaaatggcagtattcatccacaattttaaaagaaaaggggggattggggggtacagtgcaggggaaagaatagtagacataatagcaacagacatacaaactaaag

SEQ ID NO: 14183 - DNA, 301 bp, Artificial Sequence
  Brca2.2_Rb1.2
  crRNA array
  misc_feature (148)..(157): n is a, c, g, or t
cttggctttatatatcttgtggaaaggacgaaacaccgtaatttctactaagtgtagatgatccaggtgtaacaagccataatttctactaagtgtagatgtctctgcatgaaaacggagtaatttctactaagtgtagatttttttnnnnnnnnnnaagcttggcgtggatccgatatcaactagatcttgagacaaatggcagtattcatccacaattttaaaagaaaaggggggattggggggtacagtgcaggggaaagaatagtagacataatagcaacagacatacaaactaaag

SEQ ID NO: 14184 - DNA, 301 bp, Artificial Sequence
  Brca2.2_Rb1.3
  crRNA array
  misc_feature (148)..(157): n is a, c, g, or t
cttggctttatatatcttgtggaaaggacgaaacaccgtaatttctactaagtgtagatgatccaggtgtaacaagccataatttctactaagtgtagatagccaatctggtctaataactaatttctactaagtgtagatttttttnnnnnnnnnnaagcttggcgtggatccgatatcaactagatcttgagacaaatggcagtattcatccacaattttaaaagaaaaggggggattggggggtacagtgcaggggaaagaatagtagacataatagcaacagacatacaaactaaag

SEQ ID NO: 14185 - DNA, 301 bp, Artificial Sequence
  Brca2.2_Rb1.4
  crRNA array
  misc_feature (148)..(157): n is a, c, g, or t
cttggctttatatatcttgtggaaaggacgaaacaccgtaatttctactaagtgtagatgatccaggtgtaacaagccataatttctactaagtgtagattgtagctcagtaaaagtgaataatttctactaagtgtagatttttttnnnnnnnnnnaagcttggcgtggatccgatatcaactagatcttgagacaaatggcagtattcatccacaattttaaaagaaaaggggggattggggggtacagtgcaggggaaagaatagtagacataatagcaacagacatacaaactaaag

SEQ ID NO: 14186 - DNA, 301 bp, Artificial Sequence
  Brca2.3_Rb1.1
  crRNA array
  misc_feature (148)..(157): n is a, c, g, or t
cttggctttatatatcttgtggaaaggacgaaacaccgtaatttctactaagtgtagattgaatataaactgggccacttaatttctactaagtgtagattctgacatgatcgggtaccttaatttctactaagtgtagatttttttnnnnnnnnnnaagcttggcgtggatccgatatcaactagatcttgagacaaatggcagtattcatccacaattttaaaagaaaaggggggattggggggtacagtgcaggggaaagaatagtagacataatagcaacagacatacaaactaaag

SEQ ID NO: 14187 - DNA, 301 bp, Artificial Sequence
  Brca2.3_Rb1.2
  crRNA array
  misc_feature (148)..(157): n is a, c, g, or t
cttggctttatatatcttgtggaaaggacgaaacaccgtaatttctactaagtgtagattgaatataaactgggccacttaatttctactaagtgtagatgtctctgcatgaaaacggagtaatttctactaagtgtagatttttttnnnnnnnnnnaagcttggcgtggatccgatatcaactagatcttgagacaaatggcagtattcatccacaattttaaaagaaaaggggggattggggggtacagtgcaggggaaagaatagtagacataatagcaacagacatacaaactaaag

SEQ ID NO: 14188 - DNA, 301 bp, Artificial Sequence
  Brca2.3_Rb1.3
  crRNA array
  misc_feature (148)..(157): n is a, c, g, or t
cttggctttatatatcttgtggaaaggacgaaacaccgtaatttctactaagtgtagattgaatataaactgggccacttaatttctactaagtgtagatagccaatctggtctaataactaatttctactaagtgtagatttttttnnnnnnnnnnaagcttggcgtggatccgatatcaactagatcttgagacaaatggcagtattcatccacaattttaaaagaaaaggggggattggggggtacagtgcaggggaaagaatagtagacataatagcaacagacatacaaactaaag

SEQ ID NO: 14189 - DNA, 301 bp, Artificial Sequence
  Brca2.3_Rb1.4
  crRNA array
  misc_feature (148)..(157): n is a, c, g, or t
cttggctttatatatcttgtggaaaggacgaaacaccgtaatttctactaagtgtagattgaatataaactgggccacttaatttctactaagtgtagattgtagctcagtaaaagtgaataatttctactaagtgtagatttttttnnnnnnnnnnaagcttggcgtggatccgatatcaactagatcttgagacaaatggcagtattcatccacaattttaaaagaaaaggggggattggggggtacagtgcaggggaaagaatagtagacataatagcaacagacatacaaactaaag

SEQ ID NO: 14190 - DNA, 301 bp, Artificial Sequence
  Brca2.4_Rb1.1
  crRNA array
  misc_feature (148)..(157): n is a, c, g, or t
cttggctttatatatcttgtggaaaggacgaaacaccgtaatttctactaagtgtagatgaaacgccgtatatatagagtaatttctactaagtgtagattctgacatgatcgggtaccttaatttctactaagtgtagatttttttnnnnnnnnnnaagcttggcgtggatccgatatcaactagatcttgagacaaatggcagtattcatccacaattttaaaagaaaaggggggattggggggtacagtgcaggggaaagaatagtagacataatagcaacagacatacaaactaaag

SEQ ID NO: 14191 - DNA, 301 bp, Artificial Sequence
  Brca2.4_Rb1.2
  crRNA array
  misc_feature (148)..(157): n is a, c, g, or t
cttggctttatatatcttgtggaaaggacgaaacaccgtaatttctactaagtgtagatgaaacgccgtatatatagagtaatttctactaagtgtagatgtctctgcatgaaaacggagtaatttctactaagtgtagatttttttnnnnnnnnnnaagcttggcgtggatccgatatcaactagatcttgagacaaatggcagtattcatccacaattttaaaagaaaaggggggattggggggtacagtgcaggggaaagaatagtagacataatagcaacagacatacaaactaaag

SEQ ID NO: 14192 - DNA, 301 bp, Artificial Sequence
  Brca2.4_Rb1.3
  crRNA array
  misc_feature (148)..(157): n is a, c, g, or t
cttggctttatatatcttgtggaaaggacgaaacaccgtaatttctactaagtgtagatgaaacgccgtatatatagagtaatttctactaagtgtagatagccaatctggtctaataactaatttctactaagtgtagatttttttnnnnnnnnnnaagcttggcgtggatccgatatcaactagatcttgagacaaatggcagtattcatccacaattttaaaagaaaaggggggattggggggtacagtgcaggggaaagaatagtagacataatagcaacagacatacaaactaaag

SEQ ID NO: 14193 - DNA, 301 bp, Artificial Sequence
  Brca2.4_Rb1.4
  crRNA array
  misc_feature (148)..(157): n is a, c, g, or t
cttggctttatatatcttgtggaaaggacgaaacaccgtaatttctactaagtgtagatgaaacgccgtatatatagagtaatttctactaagtgtagattgtagctcagtaaaagtgaataatttctactaagtgtagatttttttnnnnnnnnnnaagcttggcgtggatccgatatcaactagatcttgagacaaatggcagtattcatccacaattttaaaagaaaaggggggattggggggtacagtgcaggggaaagaatagtagacataatagcaacagacatacaaactaaag

SEQ ID NO: 14194 - DNA, 301 bp, Artificial Sequence
  Brca2.1_Kmt2c.1
  crRNA array
  misc_feature (148)..(157): n is a, c, g, or t
cttggctttatatatcttgtggaaaggacgaaacaccgtaatttctactaagtgtagatctaagcgtagaaccagaaattaatttctactaagtgtagatactcgacctccacctccctataatttctactaagtgtagatttttttnnnnnnnnnnaagcttggcgtggatccgatatcaactagatcttgagacaaatggcagtattcatccacaattttaaaagaaaaggggggattggggggtacagtgcaggggaaagaatagtagacataatagcaacagacatacaaactaaag

SEQ ID NO: 14195 - DNA, 301 bp, Artificial Sequence
  Brca2.1_Kmt2c.2
  crRNA array
  misc_feature (148)..(157): n is a, c, g, or t
cttggctttatatatcttgtggaaaggacgaaacaccgtaatttctactaagtgtagatctaagcgtagaaccagaaattaatttctactaagtgtagatcccaaagatcagcgtggacctaatttctactaagtgtagatttttttnnnnnnnnnnaagcttggcgtggatccgatatcaactagatcttgagacaaatggcagtattcatccacaattttaaaagaaaaggggggattggggggtacagtgcaggggaaagaatagtagacataatagcaacagacatacaaactaaag

SEQ ID NO: 14196 - DNA, 301 bp, Artificial Sequence
  Brca2.1_Kmt2c.3
  crRNA array
  misc_feature (148)..(157): n is a, c, g, or t
cttggctttatatatcttgtggaaaggacgaaacaccgtaatttctactaagtgtagatctaagcgtagaaccagaaattaatttctactaagtgtagataaaagatccgaatcgatgcgtaatttctactaagtgtagatttttttnnnnnnnnnnaagcttggcgtggatccgatatcaactagatcttgagacaaatggcagtattcatccacaattttaaaagaaaaggggggattggggggtacagtgcaggggaaagaatagtagacataatagcaacagacatacaaactaaag

SEQ ID NO: 14197 - DNA, 301 bp, Artificial Sequence
  Brca2.1_Kmt2c.4
  crRNA array
  misc_feature (148)..(157): n is a, c, g, or t
cttggctttatatatcttgtggaaaggacgaaacaccgtaatttctactaagtgtagatctaagcgtagaaccagaaattaatttctactaagtgtagatctgaggcacatggaagcgattaatttctactaagtgtagatttttttnnnnnnnnnnaagcttggcgtggatccgatatcaactagatcttgagacaaatggcagtattcatccacaattttaaaagaaaaggggggattggggggtacagtgcaggggaaagaatagtagacataatagcaacagacatacaaactaaag

SEQ ID NO: 14198 - DNA, 301 bp, Artificial Sequence
  Brca2.2_Kmt2c.1
  crRNA array
  misc_feature (148)..(157): n is a, c, g, or t
cttggctttatatatcttgtggaaaggacgaaacaccgtaatttctactaagtgtagatgatccaggtgtaacaagccataatttctactaagtgtagatactcgacctccacctccctataatttctactaagtgtagatttttttnnnnnnnnnnaagcttggcgtggatccgatatcaactagatcttgagacaaatggcagtattcatccacaattttaaaagaaaaggggggattggggggtacagtgcaggggaaagaatagtagacataatagcaacagacatacaaactaaag

SEQ ID NO: 14199 - DNA, 301 bp, Artificial Sequence
  Brca2.2_Kmt2c.2
  crRNA array
  misc_feature (148)..(157): n is a, c, g, or t
cttggctttatatatcttgtggaaaggacgaaacaccgtaatttctactaagtgtagatgatccaggtgtaacaagccataatttctactaagtgtagatcccaaagatcagcgtggacctaatttctactaagtgtagatttttttnnnnnnnnnnaagcttggcgtggatccgatatcaactagatcttgagacaaatggcagtattcatccacaattttaaaagaaaaggggggattggggggtacagtgcaggggaaagaatagtagacataatagcaacagacatacaaactaaag

SEQ ID NO: 14200 - DNA, 301 bp, Artificial Sequence
  Brca2.2_Kmt2c.3
  crRNA array
  misc_feature (148)..(157): n is a, c, g, or t
cttggctttatatatcttgtggaaaggacgaaacaccgtaatttctactaagtgtagatgatccaggtgtaacaagccataatttctactaagtgtagataaaagatccgaatcgatgcgtaatttctactaagtgtagatttttttnnnnnnnnnnaagcttggcgtggatccgatatcaactagatcttgagacaaatggcagtattcatccacaattttaaaagaaaaggggggattggggggtacagtgcaggggaaagaatagtagacataatagcaacagacatacaaactaaag

SEQ ID NO: 14201 - DNA, 301 bp, Artificial Sequence
  Brca2.2_Kmt2c.4
  crRNA array
  misc_feature (148)..(157): n is a, c, g, or t
cttggctttatatatcttgtggaaaggacgaaacaccgtaatttctactaagtgtagatgatccaggtgtaacaagccataatttctactaagtgtagatctgaggcacatggaagcgattaatttctactaagtgtagatttttttnnnnnnnnnnaagcttggcgtggatccgatatcaactagatcttgagacaaatggcagtattcatccacaattttaaaagaaaaggggggattggggggtacagtgcaggggaaagaatagtagacataatagcaacagacatacaaactaaag

SEQ ID NO: 14202 - DNA, 301 bp, Artificial Sequence
  Brca2.3_Kmt2c.1
  crRNA array
  misc_feature (148)..(157): n is a, c, g, or t
cttggctttatatatcttgtggaaaggacgaaacaccgtaatttctactaagtgtagattgaatataaactgggccacttaatttctactaagtgtagatactcgacctccacctccctataatttctactaagtgtagatttttttnnnnnnnnnnaagcttggcgtggatccgatatcaactagatcttgagacaaatggcagtattcatccacaattttaaaagaaaaggggggattggggggtacagtgcaggggaaagaatagtagacataatagcaacagacatacaaactaaag

SEQ ID NO: 14203 - DNA, 301 bp, Artificial Sequence
  Brca2.3_Kmt2c.2
  crRNA array
  misc_feature (148)..(157): n is a, c, g, or t
cttggctttatatatcttgtggaaaggacgaaacaccgtaatttctactaagtgtagattgaatataaactgggccacttaatttctactaagtgtagatcccaaagatcagcgtggacctaatttctactaagtgtagatttttttnnnnnnnnnnaagcttggcgtggatccgatatcaactagatcttgagacaaatggcagtattcatccacaattttaaaagaaaaggggggattggggggtacagtgcaggggaaagaatagtagacataatagcaacagacatacaaactaaag

SEQ ID NO: 14204 - DNA, 301 bp, Artificial Sequence
  Brca2.3_Kmt2c.3
  crRNA array
  misc_feature (148)..(157): n is a, c, g, or t
cttggctttatatatcttgtggaaaggacgaaacaccgtaatttctactaagtgtagattgaatataaactgggccacttaatttctactaagtgtagataaaagatccgaatcgatgcgtaatttctactaagtgtagatttttttnnnnnnnnnnaagcttggcgtggatccgatatcaactagatcttgagacaaatggcagtattcatccacaattttaaaagaaaaggggggattggggggtacagtgcaggggaaagaatagtagacataatagcaacagacatacaaactaaag

SEQ ID NO: 14205 - DNA, 301 bp, Artificial Sequence
  Brca2.3_Kmt2c.4
  crRNA array
  misc_feature (148)..(157): n is a, c, g, or t
cttggctttatatatcttgtggaaaggacgaaacaccgtaatttctactaagtgtagattgaatataaactgggccacttaatttctactaagtgtagatctgaggcacatggaagcgattaatttctactaagtgtagatttttttnnnnnnnnnnaagcttggcgtggatccgatatcaactagatcttgagacaaatggcagtattcatccacaattttaaaagaaaaggggggattggggggtacagtgcaggggaaagaatagtagacataatagcaacagacatacaaactaaag

SEQ ID NO: 14206 - DNA, 301 bp, Artificial Sequence
  Brca2.4_Kmt2c.1
  crRNA array
  misc_feature (148)..(157): n is a, c, g, or t
cttggctttatatatcttgtggaaaggacgaaacaccgtaatttctactaagtgtagatgaaacgccgtatatatagagtaatttctactaagtgtagatactcgacctccacctccctataatttctactaagtgtagatttttttnnnnnnnnnnaagcttggcgtggatccgatatcaactagatcttgagacaaatggcagtattcatccacaattttaaaagaaaaggggggattggggggtacagtgcaggggaaagaatagtagacataatagcaacagacatacaaactaaag

SEQ ID NO: 14207 - DNA, 301 bp, Artificial Sequence
  Brca2.4_Kmt2c.2
  crRNA array
  misc_feature (148)..(157): n is a, c, g, or t
cttggctttatatatcttgtggaaaggacgaaacaccgtaatttctactaagtgtagatgaaacgccgtatatatagagtaatttctactaagtgtagatcccaaagatcagcgtggacctaatttctactaagtgtagatttttttnnnnnnnnnnaagcttggcgtggatccgatatcaactagatcttgagacaaatggcagtattcatccacaattttaaaagaaaaggggggattggggggtacagtgcaggggaaagaatagtagacataatagcaacagacatacaaactaaag

SEQ ID NO: 14208 - DNA, 301 bp, Artificial Sequence
  Brca2.4_Kmt2c.3
  crRNA array
  misc_feature (148)..(157): n is a, c, g, or t
cttggctttatatatcttgtggaaaggacgaaacaccgtaatttctactaagtgtagatgaaacgccgtatatatagagtaatttctactaagtgtagataaaagatccgaatcgatgcgtaatttctactaagtgtagatttttttnnnnnnnnnnaagcttggcgtggatccgatatcaactagatcttgagacaaatggcagtattcatccacaattttaaaagaaaaggggggattggggggtacagtgcaggggaaagaatagtagacataatagcaacagacatacaaactaaag

SEQ ID NO: 14209 - DNA, 301 bp, Artificial Sequence
  Brca2.4_Kmt2c.4
  crRNA array
  misc_feature (148)..(157): n is a, c, g, or t
cttggctttatatatcttgtggaaaggacgaaacaccgtaatttctactaagtgtagatgaaacgccgtatatatagagtaatttctactaagtgtagatctgaggcacatggaagcgattaatttctactaagtgtagatttttttnnnnnnnnnnaagcttggcgtggatccgatatcaactagatcttgagacaaatggcagtattcatccacaattttaaaagaaaaggggggattggggggtacagtgcaggggaaagaatagtagacataatagcaacagacatacaaactaaag

SEQ ID NO: 14210 - DNA, 301 bp, Artificial Sequence
  Brca2.1_Pten.1
  crRNA array
  misc_feature (148)..(157): n is a, c, g, or t
cttggctttatatatcttgtggaaaggacgaaacaccgtaatttctactaagtgtagatctaagcgtagaaccagaaattaatttctactaagtgtagataagcgtggtgcgtgacgcactaatttctactaagtgtagatttttttnnnnnnnnnnaagcttggcgtggatccgatatcaactagatcttgagacaaatggcagtattcatccacaattttaaaagaaaaggggggattggggggtacagtgcaggggaaagaatagtagacataatagcaacagacatacaaactaaag

SEQ ID NO: 14211 - DNA, 301 bp, Artificial Sequence
  Brca2.1_Pten.2
  crRNA array
  misc_feature (148)..(157): n is a, c, g, or t
cttggctttatatatcttgtggaaaggacgaaacaccgtaatttctactaagtgtagatctaagcgtagaaccagaaattaatttctactaagtgtagattgtcaccagctgaagtggcttaatttctactaagtgtagatttttttnnnnnnnnnnaagcttggcgtggatccgatatcaactagatcttgagacaaatggcagtattcatccacaattttaaaagaaaaggggggattggggggtacagtgcaggggaaagaatagtagacataatagcaacagacatacaaactaaag

SEQ ID NO: 14212 - DNA, 301 bp, Artificial Sequence
  Brca2.1_Pten.3
  crRNA array
  misc_feature (148)..(157): n is a, c, g, or t
cttggctttatatatcttgtggaaaggacgaaacaccgtaatttctactaagtgtagatctaagcgtagaaccagaaattaatttctactaagtgtagatggagtcaagaggctgatttttaatttctactaagtgtagatttttttnnnnnnnnnnaagcttggcgtggatccgatatcaactagatcttgagacaaatggcagtattcatccacaattttaaaagaaaaggggggattggggggtacagtgcaggggaaagaatagtagacataatagcaacagacatacaaactaaag

SEQ ID NO: 14213 - DNA, 301 bp, Artificial Sequence
  Brca2.1_Pten.4
  crRNA array
  misc_feature (148)..(157): n is a, c, g, or t
cttggctttatatatcttgtggaaaggacgaaacaccgtaatttctactaagtgtagatctaagcgtagaaccagaaattaatttctactaagtgtagatctgtaagctaaaccactacataatttctactaagtgtagatttttttnnnnnnnnnnaagcttggcgtggatccgatatcaactagatcttgagacaaatggcagtattcatccacaattttaaaagaaaaggggggattggggggtacagtgcaggggaaagaatagtagacataatagcaacagacatacaaactaaag

SEQ ID NO: 14214 - DNA, 301 bp, Artificial Sequence
  Brca2.2_Pten.1
  crRNA array
  misc_feature (148)..(157): n is a, c, g, or t
cttggctttatatatcttgtggaaaggacgaaacaccgtaatttctactaagtgtagatgatccaggtgtaacaagccataatttctactaagtgtagataagcgtggtgcgtgacgcactaatttctactaagtgtagatttttttnnnnnnnnnnaagcttggcgtggatccgatatcaactagatcttgagacaaatggcagtattcatccacaattttaaaagaaaaggggggattggggggtacagtgcaggggaaagaatagtagacataatagcaacagacatacaaactaaag

SEQ ID NO: 14215 - DNA, 301 bp, Artificial Sequence
  Brca2.2_Pten.2
  crRNA array
  misc_feature (148)..(157): n is a, c, g, or t
cttggctttatatatcttgtggaaaggacgaaacaccgtaatttctactaagtgtagatgatccaggtgtaacaagccataatttctactaagtgtagattgtcaccagctgaagtggcttaatttctactaagtgtagatttttttnnnnnnnnnnaagcttggcgtggatccgatatcaactagatcttgagacaaatggcagtattcatccacaattttaaaagaaaaggggggattggggggtacagtgcaggggaaagaatagtagacataatagcaacagacatacaaactaaag

SEQ ID NO: 14216 - DNA, 301 bp, Artificial Sequence
  Brca2.2_Pten.3
  crRNA array
  misc_feature (148)..(157): n is a, c, g, or t
cttggctttatatatcttgtggaaaggacgaaacaccgtaatttctactaagtgtagatgatccaggtgtaacaagccataatttctactaagtgtagatggagtcaagaggctgatttttaatttctactaagtgtagatttttttnnnnnnnnnnaagcttggcgtggatccgatatcaactagatcttgagacaaatggcagtattcatccacaattttaaaagaaaaggggggattggggggtacagtgcaggggaaagaatagtagacataatagcaacagacatacaaactaaag

SEQ ID NO: 14217 - DNA, 301 bp, Artificial Sequence
  Brca2.2_Pten.4
  crRNA array
  misc_feature (148)..(157): n is a, c, g, or t
cttggctttatatatcttgtggaaaggacgaaacaccgtaatttctactaagtgtagatgatccaggtgtaacaagccataatttctactaagtgtagatctgtaagctaaaccactacataatttctactaagtgtagatttttttnnnnnnnnnnaagcttggcgtggatccgatatcaactagatcttgagacaaatggcagtattcatccacaattttaaaagaaaaggggggattggggggtacagtgcaggggaaagaatagtagacataatagcaacagacatacaaactaaag

SEQ ID NO: 14218 - DNA, 301 bp, Artificial Sequence
  Brca2.3_Pten.1
  crRNA array
  misc_feature (148)..(157): n is a, c, g, or t
cttggctttatatatcttgtggaaaggacgaaacaccgtaatttctactaagtgtagattgaatataaactgggccacttaatttctactaagtgtagataagcgtggtgcgtgacgcactaatttctactaagtgtagatttttttnnnnnnnnnnaagcttggcgtggatccgatatcaactagatcttgagacaaatggcagtattcatccacaattttaaaagaaaaggggggattggggggtacagtgcaggggaaagaatagtagacataatagcaacagacatacaaactaaag

SEQ ID NO: 14219 - DNA, 301 bp, Artificial Sequence
  Brca2.3_Pten.2
  crRNA array
  misc_feature (148)..(157): n is a, c, g, or t
cttggctttatatatcttgtggaaaggacgaaacaccgtaatttctactaagtgtagattgaatataaactgggccacttaatttctactaagtgtagattgtcaccagctgaagtggcttaatttctactaagtgtagatttttttnnnnnnnnnnaagcttggcgtggatccgatatcaactagatcttgagacaaatggcagtattcatccacaattttaaaagaaaaggggggattggggggtacagtgcaggggaaagaatagtagacataatagcaacagacatacaaactaaag

SEQ ID NO: 14220 - DNA, 301 bp, Artificial Sequence
  Brca2.3_Pten.3
  crRNA array
  misc_feature (148)..(157): n is a, c, g, or t
cttggctttatatatcttgtggaaaggacgaaacaccgtaatttctactaagtgtagattgaatataaactgggccacttaatttctactaagtgtagatggagtcaagaggctgatttttaatttctactaagtgtagatttttttnnnnnnnnnnaagcttggcgtggatccgatatcaactagatcttgagacaaatggcagtattcatccacaattttaaaagaaaaggggggattggggggtacagtgcaggggaaagaatagtagacataatagcaacagacatacaaactaaag

SEQ ID NO: 14221 - DNA, 301 bp, Artificial Sequence
  Brca2.3_Pten.4
  crRNA array
  misc_feature (148)..(157): n is a, c, g, or t
cttggctttatatatcttgtggaaaggacgaaacaccgtaatttctactaagtgtagattgaatataaactgggccacttaatttctactaagtgtagatctgtaagctaaaccactacataatttctactaagtgtagatttttttnnnnnnnnnnaagcttggcgtggatccgatatcaactagatcttgagacaaatggcagtattcatccacaattttaaaagaaaaggggggattggggggtacagtgcaggggaaagaatagtagacataatagcaacagacatacaaactaaag

SEQ ID NO: 14222 - DNA, 301 bp, Artificial Sequence
  Brca2.4_Pten.1
  crRNA array
  misc_feature (148)..(157): n is a, c, g, or t
cttggctttatatatcttgtggaaaggacgaaacaccgtaatttctactaagtgtagatgaaacgccgtatatatagagtaatttctactaagtgtagataagcgtggtgcgtgacgcactaatttctactaagtgtagatttttttnnnnnnnnnnaagcttggcgtggatccgatatcaactagatcttgagacaaatggcagtattcatccacaattttaaaagaaaaggggggattggggggtacagtgcaggggaaagaatagtagacataatagcaacagacatacaaactaaag

SEQ ID NO: 14223 - DNA, 301 bp, Artificial Sequence
  Brca2.4_Pten.2
  crRNA array
  misc_feature (148)..(157): n is a, c, g, or t
cttggctttatatatcttgtggaaaggacgaaacaccgtaatttctactaagtgtagatgaaacgccgtatatatagagtaatttctactaagtgtagattgtcaccagctgaagtggcttaatttctactaagtgtagatttttttnnnnnnnnnnaagcttggcgtggatccgatatcaactagatcttgagacaaatggcagtattcatccacaattttaaaagaaaaggggggattggggggtacagtgcaggggaaagaatagtagacataatagcaacagacatacaaactaaag

SEQ ID NO: 14224 - DNA, 301 bp, Artificial Sequence
  Brca2.4_Pten.3
  crRNA array
  misc_feature (148)..(157): n is a, c, g, or t
cttggctttatatatcttgtggaaaggacgaaacaccgtaatttctactaagtgtagatgaaacgccgtatatatagagtaatttctactaagtgtagatggagtcaagaggctgatttttaatttctactaagtgtagatttttttnnnnnnnnnnaagcttggcgtggatccgatatcaactagatcttgagacaaatggcagtattcatccacaattttaaaagaaaaggggggattggggggtacagtgcaggggaaagaatagtagacataatagcaacagacatacaaactaaag

SEQ ID NO: 14225 - DNA, 301 bp, Artificial Sequence
  Brca2.4_Pten.4
  crRNA array
  misc_feature (148)..(157): n is a, c, g, or t
cttggctttatatatcttgtggaaaggacgaaacaccgtaatttctactaagtgtagatgaaacgccgtatatatagagtaatttctactaagtgtagatctgtaagctaaaccactacataatttctactaagtgtagatttttttnnnnnnnnnnaagcttggcgtggatccgatatcaactagatcttgagacaaatggcagtattcatccacaattttaaaagaaaaggggggattggggggtacagtgcaggggaaagaatagtagacataatagcaacagacatacaaactaaag

SEQ ID NO: 14226 - DNA, 301 bp, Artificial Sequence
  Brca2.1_Atm.1
  crRNA array
  misc_feature (148)..(157): n is a, c, g, or t
cttggctttatatatcttgtggaaaggacgaaacaccgtaatttctactaagtgtagatctaagcgtagaaccagaaattaatttctactaagtgtagatgagaaagtctccgaatcgtttaatttctactaagtgtagatttttttnnnnnnnnnnaagcttggcgtggatccgatatcaactagatcttgagacaaatggcagtattcatccacaattttaaaagaaaaggggggattggggggtacagtgcaggggaaagaatagtagacataatagcaacagacatacaaactaaag

SEQ ID NO: 14227 - DNA, 301 bp, Artificial Sequence
  Brca2.1_Atm.2
  crRNA array
  misc_feature (148)..(157): n is a, c, g, or t
cttggctttatatatcttgtggaaaggacgaaacaccgtaatttctactaagtgtagatctaagcgtagaaccagaaattaatttctactaagtgtagatcctacgagggcacgagagactaatttctactaagtgtagatttttttnnnnnnnnnnaagcttggcgtggatccgatatcaactagatcttgagacaaatggcagtattcatccacaattttaaaagaaaaggggggattggggggtacagtgcaggggaaagaatagtagacataatagcaacagacatacaaactaaag

SEQ ID NO: 14228 - DNA, 301 bp, Artificial Sequence
  Brca2.1_Atm.3
  crRNA array
  misc_feature (148)..(157): n is a, c, g, or t
cttggctttatatatcttgtggaaaggacgaaacaccgtaatttctactaagtgtagatctaagcgtagaaccagaaattaatttctactaagtgtagattgaaagtctccgatatgccataatttctactaagtgtagatttttttnnnnnnnnnnaagcttggcgtggatccgatatcaactagatcttgagacaaatggcagtattcatccacaattttaaaagaaaaggggggattggggggtacagtgcaggggaaagaatagtagacataatagcaacagacatacaaactaaag

SEQ ID NO: 14229 - DNA, 301 bp, Artificial Sequence
  Brca2.1_Atm.4
  crRNA array
  misc_feature (148)..(157): n is a, c, g, or t
cttggctttatatatcttgtggaaaggacgaaacaccgtaatttctactaagtgtagatctaagcgtagaaccagaaattaatttctactaagtgtagatggtggtgatcagtcaagtagtaatttctactaagtgtagatttttttnnnnnnnnnnaagcttggcgtggatccgatatcaactagatcttgagacaaatggcagtattcatccacaattttaaaagaaaaggggggattggggggtacagtgcaggggaaagaatagtagacataatagcaacagacatacaaactaaag

SEQ ID NO: 14230 - DNA, 301 bp, Artificial Sequence
  Brca2.2_Atm.1
  crRNA array
  misc_feature (148)..(157): n is a, c, g, or t
cttggctttatatatcttgtggaaaggacgaaacaccgtaatttctactaagtgtagatgatccaggtgtaacaagccataatttctactaagtgtagatgagaaagtctccgaatcgtttaatttctactaagtgtagatttttttnnnnnnnnnnaagcttggcgtggatccgatatcaactagatcttgagacaaatggcagtattcatccacaattttaaaagaaaaggggggattggggggtacagtgcaggggaaagaatagtagacataatagcaacagacatacaaactaaag

SEQ ID NO: 14231 - DNA, 301 bp, Artificial Sequence
  Brca2.2_Atm.2
  crRNA array
  misc_feature (148)..(157): n is a, c, g, or t
cttggctttatatatcttgtggaaaggacgaaacaccgtaatttctactaagtgtagatgatccaggtgtaacaagccataatttctactaagtgtagatcctacgagggcacgagagactaatttctactaagtgtagatttttttnnnnnnnnnnaagcttggcgtggatccgatatcaactagatcttgagacaaatggcagtattcatccacaattttaaaagaaaaggggggattggggggtacagtgcaggggaaagaatagtagacataatagcaacagacatacaaactaaag

SEQ ID NO: 14232 - DNA, 301 bp, Artificial Sequence
  Brca2.2_Atm.3
  crRNA array
  misc_feature (148)..(157): n is a, c, g, or t
cttggctttatatatcttgtggaaaggacgaaacaccgtaatttctactaagtgtagatgatccaggtgtaacaagccataatttctactaagtgtagattgaaagtctccgatatgccataatttctactaagtgtagatttttttnnnnnnnnnnaagcttggcgtggatccgatatcaactagatcttgagacaaatggcagtattcatccacaattttaaaagaaaaggggggattggggggtacagtgcaggggaaagaatagtagacataatagcaacagacatacaaactaaag

SEQ ID NO: 14233 - DNA, 301 bp, Artificial Sequence
  Brca2.2_Atm.4
  crRNA array
  misc_feature (148)..(157): n is a, c, g, or t
cttggctttatatatcttgtggaaaggacgaaacaccgtaatttctactaagtgtagatgatccaggtgtaacaagccataatttctactaagtgtagatggtggtgatcagtcaagtagtaatttctactaagtgtagatttttttnnnnnnnnnnaagcttggcgtggatccgatatcaactagatcttgagacaaatggcagtattcatccacaattttaaaagaaaaggggggattggggggtacagtgcaggggaaagaatagtagacataatagcaacagacatacaaactaaag

SEQ ID NO: 14234 - DNA, 301 bp, Artificial Sequence
  Brca2.3_Atm.1
  crRNA array
  misc_feature (148)..(157): n is a, c, g, or t
cttggctttatatatcttgtggaaaggacgaaacaccgtaatttctactaagtgtagattgaatataaactgggccacttaatttctactaagtgtagatgagaaagtctccgaatcgtttaatttctactaagtgtagatttttttnnnnnnnnnnaagcttggcgtggatccgatatcaactagatcttgagacaaatggcagtattcatccacaattttaaaagaaaaggggggattggggggtacagtgcaggggaaagaatagtagacataatagcaacagacatacaaactaaag

SEQ ID NO: 14235 - DNA, 301 bp, Artificial Sequence
  Brca2.3_Atm.2
  crRNA array
  misc_feature (148)..(157): n is a, c, g, or t
cttggctttatatatcttgtggaaaggacgaaacaccgtaatttctactaagtgtagattgaatataaactgggccacttaatttctactaagtgtagatcctacgagggcacgagagactaatttctactaagtgtagatttttttnnnnnnnnnnaagcttggcgtggatccgatatcaactagatcttgagacaaatggcagtattcatccacaattttaaaagaaaaggggggattggggggtacagtgcaggggaaagaatagtagacataatagcaacagacatacaaactaaag

SEQ ID NO: 14236 - DNA, 301 bp, Artificial Sequence
  Brca2.3_Atm.3
  crRNA array
  misc_feature (148)..(157): n is a, c, g, or t
cttggctttatatatcttgtggaaaggacgaaacaccgtaatttctactaagtgtagattgaatataaactgggccacttaatttctactaagtgtagattgaaagtctccgatatgccataatttctactaagtgtagatttttttnnnnnnnnnnaagcttggcgtggatccgatatcaactagatcttgagacaaatggcagtattcatccacaattttaaaagaaaaggggggattggggggtacagtgcaggggaaagaatagtagacataatagcaacagacatacaaactaaag

SEQ ID NO: 14237 - DNA, 301 bp, Artificial Sequence
  Brca2.3_Atm.4
  crRNA array
  misc_feature (148)..(157): n is a, c, g, or t
cttggctttatatatcttgtggaaaggacgaaacaccgtaatttctactaagtgtagattgaatataaactgggccacttaatttctactaagtgtagatggtggtgatcagtcaagtagtaatttctactaagtgtagatttttttnnnnnnnnnnaagcttggcgtggatccgatatcaactagatcttgagacaaatggcagtattcatccacaattttaaaagaaaaggggggattggggggtacagtgcaggggaaagaatagtagacataatagcaacagacatacaaactaaag

SEQ ID NO: 14238 - DNA, 301 bp, Artificial Sequence
  Brca2.4_Atm.1
  crRNA array
  misc_feature (148)..(157): n is a, c, g, or t
cttggctttatatatcttgtggaaaggacgaaacaccgtaatttctactaagtgtagatgaaacgccgtatatatagagtaatttctactaagtgtagatgagaaagtctccgaatcgtttaatttctactaagtgtagatttttttnnnnnnnnnnaagcttggcgtggatccgatatcaactagatcttgagacaaatggcagtattcatccacaattttaaaagaaaaggggggattggggggtacagtgcaggggaaagaatagtagacataatagcaacagacatacaaactaaag

SEQ ID NO: 14239 - DNA, 301 bp, Artificial Sequence
  Brca2.4_Atm.2
  crRNA array
  misc_feature (148)..(157): n is a, c, g, or t
cttggctttatatatcttgtggaaaggacgaaacaccgtaatttctactaagtgtagatgaaacgccgtatatatagagtaatttctactaagtgtagatcctacgagggcacgagagactaatttctactaagtgtagatttttttnnnnnnnnnnaagcttggcgtggatccgatatcaactagatcttgagacaaatggcagtattcatccacaattttaaaagaaaaggggggattggggggtacagtgcaggggaaagaatagtagacataatagcaacagacatacaaactaaag

SEQ ID NO: 14240 - DNA, 301 bp, Artificial Sequence
  Brca2.4_Atm.3
  crRNA array
  misc_feature (148)..(157): n is a, c, g, or t
cttggctttatatatcttgtggaaaggacgaaacaccgtaatttctactaagtgtagatgaaacgccgtatatatagagtaatttctactaagtgtagattgaaagtctccgatatgccataatttctactaagtgtagatttttttnnnnnnnnnnaagcttggcgtggatccgatatcaactagatcttgagacaaatggcagtattcatccacaattttaaaagaaaaggggggattggggggtacagtgcaggggaaagaatagtagacataatagcaacagacatacaaactaaag

SEQ ID NO: 14241 - DNA, 301 bp, Artificial Sequence
  Brca2.4_Atm.4
  crRNA array
  misc_feature (148)..(157): n is a, c, g, or t
cttggctttatatatcttgtggaaaggacgaaacaccgtaatttctactaagtgtagatgaaacgccgtatatatagagtaatttctactaagtgtagatggtggtgatcagtcaagtagtaatttctactaagtgtagatttttttnnnnnnnnnnaagcttggcgtggatccgatatcaactagatcttgagacaaatggcagtattcatccacaattttaaaagaaaaggggggattggggggtacagtgcaggggaaagaatagtagacataatagcaacagacatacaaactaaag

SEQ ID NO: 14242 - DNA, 301 bp, Artificial Sequence
  Apc.1_Fanca.1
  crRNA array
  misc_feature (148)..(157): n is a, c, g, or t
cttggctttatatatcttgtggaaaggacgaaacaccgtaatttctactaagtgtagatgtgatccacacgtgtagctgtaatttctactaagtgtagatggaggccccggggcccaccataatttctactaagtgtagatttttttnnnnnnnnnnaagcttggcgtggatccgatatcaactagatcttgagacaaatggcagtattcatccacaattttaaaagaaaaggggggattggggggtacagtgcaggggaaagaatagtagacataatagcaacagacatacaaactaaag

SEQ ID NO: 14243 - DNA, 301 bp, Artificial Sequence
  Apc.1_Fanca.2
  crRNA array
  misc_feature (148)..(157): n is a, c, g, or t
cttggctttatatatcttgtggaaaggacgaaacaccgtaatttctactaagtgtagatgtgatccacacgtgtagctgtaatttctactaagtgtagatagagctaccacctagacagctaatttctactaagtgtagatttttttnnnnnnnnnnaagcttggcgtggatccgatatcaactagatcttgagacaaatggcagtattcatccacaattttaaaagaaaaggggggattggggggtacagtgcaggggaaagaatagtagacataatagcaacagacatacaaactaaag

SEQ ID NO: 14244 - DNA, 301 bp, Artificial Sequence
  Apc.1_Fanca.3
  crRNA array
  misc_feature (148)..(157): n is a, c, g, or t
cttggctttatatatcttgtggaaaggacgaaacaccgtaatttctactaagtgtagatgtgatccacacgtgtagctgtaatttctactaagtgtagataccaactgctgtgcctcgggtaatttctactaagtgtagatttttttnnnnnnnnnnaagcttggcgtggatccgatatcaactagatcttgagacaaatggcagtattcatccacaattttaaaagaaaaggggggattggggggtacagtgcaggggaaagaatagtagacataatagcaacagacatacaaactaaag

SEQ ID NO: 14245 - DNA, 301 bp, Artificial Sequence
  Apc.1_Fanca.4
  crRNA array
  misc_feature (148)..(157): n is a, c, g, or t
cttggctttatatatcttgtggaaaggacgaaacaccgtaatttctactaagtgtagatgtgatccacacgtgtagctgtaatttctactaagtgtagatcacccacccctggtgccaagtaatttctactaagtgtagatttttttnnnnnnnnnnaagcttggcgtggatccgatatcaactagatcttgagacaaatggcagtattcatccacaattttaaaagaaaaggggggattggggggtacagtgcaggggaaagaatagtagacataatagcaacagacatacaaactaaag

SEQ ID NO: 14246 - DNA, 301 bp, Artificial Sequence
  Apc.2_Fanca.1
  crRNA array
  misc_feature (148)..(157): n is a, c, g, or t
cttggctttatatatcttgtggaaaggacgaaacaccgtaatttctactaagtgtagatcatctgctcgccaagacaaataatttctactaagtgtagatggaggccccggggcccaccataatttctactaagtgtagatttttttnnnnnnnnnnaagcttggcgtggatccgatatcaactagatcttgagacaaatggcagtattcatccacaattttaaaagaaaaggggggattggggggtacagtgcaggggaaagaatagtagacataatagcaacagacatacaaactaaag

SEQ ID NO: 14247 - DNA, 301 bp, Artificial Sequence
  Apc.2_Fanca.2
  crRNA array
  misc_feature (148)..(157): n is a, c, g, or t
cttggctttatatatcttgtggaaaggacgaaacaccgtaatttctactaagtgtagatcatctgctcgccaagacaaataatttctactaagtgtagatagagctaccacctagacagctaatttctactaagtgtagatttttttnnnnnnnnnnaagcttggcgtggatccgatatcaactagatcttgagacaaatggcagtattcatccacaattttaaaagaaaaggggggattggggggtacagtgcaggggaaagaatagtagacataatagcaacagacatacaaactaaag

SEQ ID NO: 14248 - DNA, 301 bp, Artificial Sequence
  Apc.2_Fanca.3
  crRNA array
  misc_feature (148)..(157): n is a, c, g, or t
cttggctttatatatcttgtggaaaggacgaaacaccgtaatttctactaagtgtagatcatctgctcgccaagacaaataatttctactaagtgtagataccaactgctgtgcctcgggtaatttctactaagtgtagatttttttnnnnnnnnnnaagcttggcgtggatccgatatcaactagatcttgagacaaatggcagtattcatccacaattttaaaagaaaaggggggattggggggtacagtgcaggggaaagaatagtagacataatagcaacagacatacaaactaaag

SEQ ID NO: 14249 - DNA, 301 bp, Artificial Sequence
  Apc.2_Fanca.4
  crRNA array
  misc_feature (148)..(157): n is a, c, g, or t
cttggctttatatatcttgtggaaaggacgaaacaccgtaatttctactaagtgtagatcatctgctcgccaagacaaataatttctactaagtgtagatcacccacccctggtgccaagtaatttctactaagtgtagatttttttnnnnnnnnnnaagcttggcgtggatccgatatcaactagatcttgagacaaatggcagtattcatccacaattttaaaagaaaaggggggattggggggtacagtgcaggggaaagaatagtagacataatagcaacagacatacaaactaaag

SEQ ID NO: 14250 - DNA, 301 bp, Artificial Sequence
  Apc.3_Fanca.1
  crRNA array
  misc_feature (148)..(157): n is a, c, g, or t
cttggctttatatatcttgtggaaaggacgaaacaccgtaatttctactaagtgtagatacgccaatcgacatgatgattaatttctactaagtgtagatggaggccccggggcccaccataatttctactaagtgtagatttttttnnnnnnnnnnaagcttggcgtggatccgatatcaactagatcttgagacaaatggcagtattcatccacaattttaaaagaaaaggggggattggggggtacagtgcaggggaaagaatagtagacataatagcaacagacatacaaactaaag

SEQ ID NO: 14251 - DNA, 301 bp, Artificial Sequence
  Apc.3_Fanca.2
  crRNA array
  misc_feature (148)..(157): n is a, c, g, or t
cttggctttatatatcttgtggaaaggacgaaacaccgtaatttctactaagtgtagatacgccaatcgacatgatgattaatttctactaagtgtagatagagctaccacctagacagctaatttctactaagtgtagatttttttnnnnnnnnnnaagcttggcgtggatccgatatcaactagatcttgagacaaatggcagtattcatccacaattttaaaagaaaaggggggattggggggtacagtgcaggggaaagaatagtagacataatagcaacagacatacaaactaaag

SEQ ID NO: 14252 - DNA, 301 bp, Artificial Sequence
  Apc.3_Fanca.3
  crRNA array
  misc_feature (148)..(157): n is a, c, g, or t
cttggctttatatatcttgtggaaaggacgaaacaccgtaatttctactaagtgtagatacgccaatcgacatgatgattaatttctactaagtgtagataccaactgctgtgcctcgggtaatttctactaagtgtagatttttttnnnnnnnnnnaagcttggcgtggatccgatatcaactagatcttgagacaaatggcagtattcatccacaattttaaaagaaaaggggggattggggggtacagtgcaggggaaagaatagtagacataatagcaacagacatacaaactaaag

SEQ ID NO: 14253 - DNA, 301 bp, Artificial Sequence
  Apc.3_Fanca.4
  crRNA array
  misc_feature (148)..(157): n is a, c, g, or t
cttggctttatatatcttgtggaaaggacgaaacaccgtaatttctactaagtgtagatacgccaatcgacatgatgattaatttctactaagtgtagatcacccacccctggtgccaagtaatttctactaagtgtagatttttttnnnnnnnnnnaagcttggcgtggatccgatatcaactagatcttgagacaaatggcagtattcatccacaattttaaaagaaaaggggggattggggggtacagtgcaggggaaagaatagtagacataatagcaacagacatacaaactaaag

SEQ ID NO: 14254 - DNA, 301 bp, Artificial Sequence
  Apc.4_Fanca.1
  crRNA array
  misc_feature (148)..(157): n is a, c, g, or t
cttggctttatatatcttgtggaaaggacgaaacaccgtaatttctactaagtgtagatcaccaggggatgatgtgccctaatttctactaagtgtagatggaggccccggggcccaccataatttctactaagtgtagatttttttnnnnnnnnnnaagcttggcgtggatccgatatcaactagatcttgagacaaatggcagtattcatccacaattttaaaagaaaaggggggattggggggtacagtgcaggggaaagaatagtagacataatagcaacagacatacaaactaaag

SEQ ID NO: 14255 - DNA, 301 bp, Artificial Sequence
  Apc.4_Fanca.2
  crRNA array
  misc_feature (148)..(157): n is a, c, g, or t
cttggctttatatatcttgtggaaaggacgaaacaccgtaatttctactaagtgtagatcaccaggggatgatgtgccctaatttctactaagtgtagatagagctaccacctagacagctaatttctactaagtgtagatttttttnnnnnnnnnnaagcttggcgtggatccgatatcaactagatcttgagacaaatggcagtattcatccacaattttaaaagaaaaggggggattggggggtacagtgcaggggaaagaatagtagacataatagcaacagacatacaaactaaag

SEQ ID NO: 14256 - DNA, 301 bp, Artificial Sequence
  Apc.4_Fanca.3
  crRNA array
  misc_feature (148)..(157): n is a, c, g, or t
cttggctttatatatcttgtggaaaggacgaaacaccgtaatttctactaagtgtagatcaccaggggatgatgtgccctaatttctactaagtgtagataccaactgctgtgcctcgggtaatttctactaagtgtagatttttttnnnnnnnnnnaagcttggcgtggatccgatatcaactagatcttgagacaaatggcagtattcatccacaattttaaaagaaaaggggggattggggggtacagtgcaggggaaagaatagtagacataatagcaacagacatacaaactaaag

SEQ ID NO: 14257 - DNA, 301 bp, Artificial Sequence
  Apc.4_Fanca.4
  crRNA array
  misc_feature (148)..(157): n is a, c, g, or t
cttggctttatatatcttgtggaaaggacgaaacaccgtaatttctactaagtgtagatcaccaggggatgatgtgccctaatttctactaagtgtagatcacccacccctggtgccaagtaatttctactaagtgtagatttttttnnnnnnnnnnaagcttggcgtggatccgatatcaactagatcttgagacaaatggcagtattcatccacaattttaaaagaaaaggggggattggggggtacagtgcaggggaaagaatagtagacataatagcaacagacatacaaactaaag

SEQ ID NO: 14258 - DNA, 301 bp, Artificial Sequence
  Apc.1_Nf1.1
  crRNA array
  misc_feature (148)..(157): n is a, c, g, or t
cttggctttatatatcttgtggaaaggacgaaacaccgtaatttctactaagtgtagatgtgatccacacgtgtagctgtaatttctactaagtgtagattggcgatccggaatcctctgtaatttctactaagtgtagatttttttnnnnnnnnnnaagcttggcgtggatccgatatcaactagatcttgagacaaatggcagtattcatccacaattttaaaagaaaaggggggattggggggtacagtgcaggggaaagaatagtagacataatagcaacagacatacaaactaaag

SEQ ID NO: 14259 - DNA, 301 bp, Artificial Sequence
  Apc.1_Nf1.2
  crRNA array
  misc_feature (148)..(157): n is a, c, g, or t
cttggctttatatatcttgtggaaaggacgaaacaccgtaatttctactaagtgtagatgtgatccacacgtgtagctgtaatttctactaagtgtagatggaaacacaacgctggcctctaatttctactaagtgtagatttttttnnnnnnnnnnaagcttggcgtggatccgatatcaactagatcttgagacaaatggcagtattcatccacaattttaaaagaaaaggggggattggggggtacagtgcaggggaaagaatagtagacataatagcaacagacatacaaactaaag

SEQ ID NO: 14260 - DNA, 301 bp, Artificial Sequence
  Apc.1_Nf1.3
  crRNA array
  misc_feature (148)..(157): n is a, c, g, or t
cttggctttatatatcttgtggaaaggacgaaacaccgtaatttctactaagtgtagatgtgatccacacgtgtagctgtaatttctactaagtgtagataatgatggaacgcagtcgcataatttctactaagtgtagatttttttnnnnnnnnnnaagcttggcgtggatccgatatcaactagatcttgagacaaatggcagtattcatccacaattttaaaagaaaaggggggattggggggtacagtgcaggggaaagaatagtagacataatagcaacagacatacaaactaaag

SEQ ID NO: 14261 - DNA, 301 bp, Artificial Sequence
  Apc.1_Nf1.4
  crRNA array
  misc_feature (148)..(157): n is a, c, g, or t
cttggctttatatatcttgtggaaaggacgaaacaccgtaatttctactaagtgtagatgtgatccacacgtgtagctgtaatttctactaagtgtagattgcaaaaccatccaccaagttaatttctactaagtgtagatttttttnnnnnnnnnnaagcttggcgtggatccgatatcaactagatcttgagacaaatggcagtattcatccacaattttaaaagaaaaggggggattggggggtacagtgcaggggaaagaatagtagacataatagcaacagacatacaaactaaag

SEQ ID NO: 14262 - DNA, 301 bp, Artificial Sequence
  Apc.2_Nf1.1
  crRNA array
  misc_feature (148)..(157): n is a, c, g, or t
cttggctttatatatcttgtggaaaggacgaaacaccgtaatttctactaagtgtagatcatctgctcgccaagacaaataatttctactaagtgtagattggcgatccggaatcctctgtaatttctactaagtgtagatttttttnnnnnnnnnnaagcttggcgtggatccgatatcaactagatcttgagacaaatggcagtattcatccacaattttaaaagaaaaggggggattggggggtacagtgcaggggaaagaatagtagacataatagcaacagacatacaaactaaag

SEQ ID NO: 14263 - DNA, 301 bp, Artificial Sequence
  Apc.2_Nf1.2
  crRNA array
  misc_feature (148)..(157): n is a, c, g, or t
cttggctttatatatcttgtggaaaggacgaaacaccgtaatttctactaagtgtagatcatctgctcgccaagacaaataatttctactaagtgtagatggaaacacaacgctggcctctaatttctactaagtgtagatttttttnnnnnnnnnnaagcttggcgtggatccgatatcaactagatcttgagacaaatggcagtattcatccacaattttaaaagaaaaggggggattggggggtacagtgcaggggaaagaatagtagacataatagcaacagacatacaaactaaag

SEQ ID NO: 14264 - DNA, 301 bp, Artificial Sequence
  Apc.2_Nf1.3
  crRNA array
  misc_feature (148)..(157): n is a, c, g, or t
cttggctttatatatcttgtggaaaggacgaaacaccgtaatttctactaagtgtagatcatctgctcgccaagacaaataatttctactaagtgtagataatgatggaacgcagtcgcataatttctactaagtgtagatttttttnnnnnnnnnnaagcttggcgtggatccgatatcaactagatcttgagacaaatggcagtattcatccacaattttaaaagaaaaggggggattggggggtacagtgcaggggaaagaatagtagacataatagcaacagacatacaaactaaag

SEQ ID NO: 14265 - DNA, 301 bp, Artificial Sequence
  Apc.2_Nf1.4
  crRNA array
  misc_feature (148)..(157): n is a, c, g, or t
cttggctttatatatcttgtggaaaggacgaaacaccgtaatttctactaagtgtagatcatctgctcgccaagacaaataatttctactaagtgtagattgcaaaaccatccaccaagttaatttctactaagtgtagatttttttnnnnnnnnnnaagcttggcgtggatccgatatcaactagatcttgagacaaatggcagtattcatccacaattttaaaagaaaaggggggattggggggtacagtgcaggggaaagaatagtagacataatagcaacagacatacaaactaaag

SEQ ID NO: 14266 - DNA, 301 bp, Artificial Sequence
  Apc.3_Nf1.1
  crRNA array
  misc_feature (148)..(157): n is a, c, g, or t
cttggctttatatatcttgtggaaaggacgaaacaccgtaatttctactaagtgtagatacgccaatcgacatgatgattaatttctactaagtgtagattggcgatccggaatcctctgtaatttctactaagtgtagatttttttnnnnnnnnnnaagcttggcgtggatccgatatcaactagatcttgagacaaatggcagtattcatccacaattttaaaagaaaaggggggattggggggtacagtgcaggggaaagaatagtagacataatagcaacagacatacaaactaaag

SEQ ID NO: 14267 - DNA, 301 bp, Artificial Sequence
  Apc.3_Nf1.2
  crRNA array
  misc_feature (148)..(157): n is a, c, g, or t
cttggctttatatatcttgtggaaaggacgaaacaccgtaatttctactaagtgtagatacgccaatcgacatgatgattaatttctactaagtgtagatggaaacacaacgctggcctctaatttctactaagtgtagatttttttnnnnnnnnnnaagcttggcgtggatccgatatcaactagatcttgagacaaatggcagtattcatccacaattttaaaagaaaaggggggattggggggtacagtgcaggggaaagaatagtagacataatagcaacagacatacaaactaaag

SEQ ID NO: 14268 - DNA, 301 bp, Artificial Sequence
  Apc.3_Nf1.3
  crRNA array
  misc_feature (148)..(157): n is a, c, g, or t
cttggctttatatatcttgtggaaaggacgaaacaccgtaatttctactaagtgtagatacgccaatcgacatgatgattaatttctactaagtgtagataatgatggaacgcagtcgcataatttctactaagtgtagatttttttnnnnnnnnnnaagcttggcgtggatccgatatcaactagatcttgagacaaatggcagtattcatccacaattttaaaagaaaaggggggattggggggtacagtgcaggggaaagaatagtagacataatagcaacagacatacaaactaaag

SEQ ID NO: 14269 - DNA, 301 bp, Artificial Sequence
  Apc.3_Nf1.4
  crRNA array
  misc_feature (148)..(157): n is a, c, g, or t
cttggctttatatatcttgtggaaaggacgaaacaccgtaatttctactaagtgtagatacgccaatcgacatgatgattaatttctactaagtgtagattgcaaaaccatccaccaagttaatttctactaagtgtagatttttttnnnnnnnnnnaagcttggcgtggatccgatatcaactagatcttgagacaaatggcagtattcatccacaattttaaaagaaaaggggggattggggggtacagtgcaggggaaagaatagtagacataatagcaacagacatacaaactaaag

SEQ ID NO: 14270 - DNA, 301 bp, Artificial Sequence
  Apc.4_Nf1.1
  crRNA array
  misc_feature (148)..(157): n is a, c, g, or t
cttggctttatatatcttgtggaaaggacgaaacaccgtaatttctactaagtgtagatcaccaggggatgatgtgccctaatttctactaagtgtagattggcgatccggaatcctctgtaatttctactaagtgtagatttttttnnnnnnnnnnaagcttggcgtggatccgatatcaactagatcttgagacaaatggcagtattcatccacaattttaaaagaaaaggggggattggggggtacagtgcaggggaaagaatagtagacataatagcaacagacatacaaactaaag

SEQ ID NO: 14271 - DNA, 301 bp, Artificial Sequence
  Apc.4_Nf1.2
  crRNA array
  misc_feature (148)..(157): n is a, c, g, or t
cttggctttatatatcttgtggaaaggacgaaacaccgtaatttctactaagtgtagatcaccaggggatgatgtgccctaatttctactaagtgtagatggaaacacaacgctggcctctaatttctactaagtgtagatttttttnnnnnnnnnnaagcttggcgtggatccgatatcaactagatcttgagacaaatggcagtattcatccacaattttaaaagaaaaggggggattggggggtacagtgcaggggaaagaatagtagacataatagcaacagacatacaaactaaag

SEQ ID NO: 14272 - DNA, 301 bp, Artificial Sequence
  Apc.4_Nf1.3
  crRNA array
  misc_feature (148)..(157): n is a, c, g, or t
cttggctttatatatcttgtggaaaggacgaaacaccgtaatttctactaagtgtagatcaccaggggatgatgtgccctaatttctactaagtgtagataatgatggaacgcagtcgcataatttctactaagtgtagatttttttnnnnnnnnnnaagcttggcgtggatccgatatcaactagatcttgagacaaatggcagtattcatccacaattttaaaagaaaaggggggattggggggtacagtgcaggggaaagaatagtagacataatagcaacagacatacaaactaaag

SEQ ID NO: 14273 - DNA, 301 bp, Artificial Sequence
  Apc.4_Nf1.4
  crRNA array
  misc_feature (148)..(157): n is a, c, g, or t
cttggctttatatatcttgtggaaaggacgaaacaccgtaatttctactaagtgtagatcaccaggggatgatgtgccctaatttctactaagtgtagattgcaaaaccatccaccaagttaatttctactaagtgtagatttttttnnnnnnnnnnaagcttggcgtggatccgatatcaactagatcttgagacaaatggcagtattcatccacaattttaaaagaaaaggggggattggggggtacagtgcaggggaaagaatagtagacataatagcaacagacatacaaactaaag

SEQ ID NO: 14274 - DNA, 301 bp, Artificial Sequence
  Apc.1_Kdm6a.1
  crRNA array
  misc_feature (148)..(157): n is a, c, g, or t
cttggctttatatatcttgtggaaaggacgaaacaccgtaatttctactaagtgtagatgtgatccacacgtgtagctgtaatttctactaagtgtagatgctgccgcctctcgcggcagtaatttctactaagtgtagatttttttnnnnnnnnnnaagcttggcgtggatccgatatcaactagatcttgagacaaatggcagtattcatccacaattttaaaagaaaaggggggattggggggtacagtgcaggggaaagaatagtagacataatagcaacagacatacaaactaaag

SEQ ID NO: 14275 - DNA, 301 bp, Artificial Sequence
  Apc.1_Kdm6a.2
  crRNA array
  misc_feature (148)..(157): n is a, c, g, or t
cttggctttatatatcttgtggaaaggacgaaacaccgtaatttctactaagtgtagatgtgatccacacgtgtagctgtaatttctactaagtgtagatgctgcaggtaaggcacgttttaatttctactaagtgtagatttttttnnnnnnnnnnaagcttggcgtggatccgatatcaactagatcttgagacaaatggcagtattcatccacaattttaaaagaaaaggggggattggggggtacagtgcaggggaaagaatagtagacataatagcaacagacatacaaactaaag

SEQ ID NO: 14276 - DNA, 301 bp, Artificial Sequence
  Apc.1_Kdm6a.3
  crRNA array
  misc_feature (148)..(157): n is a, c, g, or t
cttggctttatatatcttgtggaaaggacgaaacaccgtaatttctactaagtgtagatgtgatccacacgtgtagctgtaatttctactaagtgtagattgctggtgccggggaagttttaatttctactaagtgtagatttttttnnnnnnnnnnaagcttggcgtggatccgatatcaactagatcttgagacaaatggcagtattcatccacaattttaaaagaaaaggggggattggggggtacagtgcaggggaaagaatagtagacataatagcaacagacatacaaactaaag

SEQ ID NO: 14277 - DNA, 301 bp, Artificial Sequence
  Apc.1_Kdm6a.4
  crRNA array
  misc_feature (148)..(157): n is a, c, g, or t
cttggctttatatatcttgtggaaaggacgaaacaccgtaatttctactaagtgtagatgtgatccacacgtgtagctgtaatttctactaagtgtagattgtctcctacgaatcccccctaatttctactaagtgtagatttttttnnnnnnnnnnaagcttggcgtggatccgatatcaactagatcttgagacaaatggcagtattcatccacaattttaaaagaaaaggggggattggggggtacagtgcaggggaaagaatagtagacataatagcaacagacatacaaactaaag

SEQ ID NO: 14278 - DNA, 301 bp, Artificial Sequence
  Apc.2_Kdm6a.1
  crRNA array
  misc_feature (148)..(157): n is a, c, g, or t
cttggctttatatatcttgtggaaaggacgaaacaccgtaatttctactaagtgtagatcatctgctcgccaagacaaataatttctactaagtgtagatgctgccgcctctcgcggcagtaatttctactaagtgtagatttttttnnnnnnnnnnaagcttggcgtggatccgatatcaactagatcttgagacaaatggcagtattcatccacaattttaaaagaaaaggggggattggggggtacagtgcaggggaaagaatagtagacataatagcaacagacatacaaactaaag

SEQ ID NO: 14279 - DNA, 301 bp, Artificial Sequence
  Apc.2_Kdm6a.2
  crRNA array
  misc_feature (148)..(157): n is a, c, g, or t
cttggctttatatatcttgtggaaaggacgaaacaccgtaatttctactaagtgtagatcatctgctcgccaagacaaataatttctactaagtgtagatgctgcaggtaaggcacgttttaatttctactaagtgtagatttttttnnnnnnnnnnaagcttggcgtggatccgatatcaactagatcttgagacaaatggcagtattcatccacaattttaaaagaaaaggggggattggggggtacagtgcaggggaaagaatagtagacataatagcaacagacatacaaactaaag

SEQ ID NO: 14280 - DNA, 301 bp, Artificial Sequence
  Apc.2_Kdm6a.3
  crRNA array
  misc_feature (148)..(157): n is a, c, g, or t
cttggctttatatatcttgtggaaaggacgaaacaccgtaatttctactaagtgtagatcatctgctcgccaagacaaataatttctactaagtgtagattgctggtgccggggaagttttaatttctactaagtgtagatttttttnnnnnnnnnnaagcttggcgtggatccgatatcaactagatcttgagacaaatggcagtattcatccacaattttaaaagaaaaggggggattggggggtacagtgcaggggaaagaatagtagacataatagcaacagacatacaaactaaag

SEQ ID NO: 14281 - DNA, 301 bp, Artificial Sequence
  Apc.2_Kdm6a.4
  crRNA array
  misc_feature (148)..(157): n is a, c, g, or t
cttggctttatatatcttgtggaaaggacgaaacaccgtaatttctactaagtgtagatcatctgctcgccaagacaaataatttctactaagtgtagattgtctcctacgaatcccccctaatttctactaagtgtagatttttttnnnnnnnnnnaagcttggcgtggatccgatatcaactagatcttgagacaaatggcagtattcatccacaattttaaaagaaaaggggggattggggggtacagtgcaggggaaagaatagtagacataatagcaacagacatacaaactaaag

SEQ ID NO: 14282 - DNA, 301 bp, Artificial Sequence
  Apc.3_Kdm6a.1
  crRNA array
  misc_feature (148)..(157): n is a, c, g, or t
cttggctttatatatcttgtggaaaggacgaaacaccgtaatttctactaagtgtagatacgccaatcgacatgatgattaatttctactaagtgtagatgctgccgcctctcgcggcagtaatttctactaagtgtagatttttttnnnnnnnnnnaagcttggcgtggatccgatatcaactagatcttgagacaaatggcagtattcatccacaattttaaaagaaaaggggggattggggggtacagtgcaggggaaagaatagtagacataatagcaacagacatacaaactaaag

SEQ ID NO: 14283 - DNA, 301 bp, Artificial Sequence
  Apc.3_Kdm6a.2
  crRNA array
  misc_feature (148)..(157): n is a, c, g, or t
cttggctttatatatcttgtggaaaggacgaaacaccgtaatttctactaagtgtagatacgccaatcgacatgatgattaatttctactaagtgtagatgctgcaggtaaggcacgttttaatttctactaagtgtagatttttttnnnnnnnnnnaagcttggcgtggatccgatatcaactagatcttgagacaaatggcagtattcatccacaattttaaaagaaaaggggggattggggggtacagtgcaggggaaagaatagtagacataatagcaacagacatacaaactaaag

SEQ ID NO: 14284 - DNA, 301 bp, Artificial Sequence
  Apc.3_Kdm6a.3
  crRNA array
  misc_feature (148)..(157): n is a, c, g, or t
cttggctttatatatcttgtggaaaggacgaaacaccgtaatttctactaagtgtagatacgccaatcgacatgatgattaatttctactaagtgtagattgctggtgccggggaagttttaatttctactaagtgtagatttttttnnnnnnnnnnaagcttggcgtggatccgatatcaactagatcttgagacaaatggcagtattcatccacaattttaaaagaaaaggggggattggggggtacagtgcaggggaaagaatagtagacataatagcaacagacatacaaactaaag

SEQ ID NO: 14285 - DNA, 301 bp, Artificial Sequence
  Apc.3_Kdm6a.4
  crRNA array
  misc_feature (148)..(157): n is a, c, g, or t
cttggctttatatatcttgtggaaaggacgaaacaccgtaatttctactaagtgtagatacgccaatcgacatgatgattaatttctactaagtgtagattgtctcctacgaatcccccctaatttctactaagtgtagatttttttnnnnnnnnnnaagcttggcgtggatccgatatcaactagatcttgagacaaatggcagtattcatccacaattttaaaagaaaaggggggattggggggtacagtgcaggggaaagaatagtagacataatagcaacagacatacaaactaaag

SEQ ID NO: 14286 - DNA, 301 bp, Artificial Sequence
  Apc.4_Kdm6a.1
  crRNA array
  misc_feature (148)..(157): n is a, c, g, or t
cttggctttatatatcttgtggaaaggacgaaacaccgtaatttctactaagtgtagatcaccaggggatgatgtgccctaatttctactaagtgtagatgctgccgcctctcgcggcagtaatttctactaagtgtagatttttttnnnnnnnnnnaagcttggcgtggatccgatatcaactagatcttgagacaaatggcagtattcatccacaattttaaaagaaaaggggggattggggggtacagtgcaggggaaagaatagtagacataatagcaacagacatacaaactaaag

SEQ ID NO: 14287 - DNA, 301 bp, Artificial Sequence
  Apc.4_Kdm6a.2
  crRNA array
  misc_feature (148)..(157): n is a, c, g, or t
cttggctttatatatcttgtggaaaggacgaaacaccgtaatttctactaagtgtagatcaccaggggatgatgtgccctaatttctactaagtgtagatgctgcaggtaaggcacgttttaatttctactaagtgtagatttttttnnnnnnnnnnaagcttggcgtggatccgatatcaactagatcttgagacaaatggcagtattcatccacaattttaaaagaaaaggggggattggggggtacagtgcaggggaaagaatagtagacataatagcaacagacatacaaactaaag

SEQ ID NO: 14288 - DNA, 301 bp, Artificial Sequence
  Apc.4_Kdm6a.3
  crRNA array
  misc_feature (148)..(157): n is a, c, g, or t
cttggctttatatatcttgtggaaaggacgaaacaccgtaatttctactaagtgtagatcaccaggggatgatgtgccctaatttctactaagtgtagattgctggtgccggggaagttttaatttctactaagtgtagatttttttnnnnnnnnnnaagcttggcgtggatccgatatcaactagatcttgagacaaatggcagtattcatccacaattttaaaagaaaaggggggattggggggtacagtgcaggggaaagaatagtagacataatagcaacagacatacaaactaaag

SEQ ID NO: 14289 - DNA, 301 bp, Artificial Sequence
  Apc.4_Kdm6a.4
  crRNA array
  misc_feature (148)..(157): n is a, c, g, or t
cttggctttatatatcttgtggaaaggacgaaacaccgtaatttctactaagtgtagatcaccaggggatgatgtgccctaatttctactaagtgtagattgtctcctacgaatcccccctaatttctactaagtgtagatttttttnnnnnnnnnnaagcttggcgtggatccgatatcaactagatcttgagacaaatggcagtattcatccacaattttaaaagaaaaggggggattggggggtacagtgcaggggaaagaatagtagacataatagcaacagacatacaaactaaag

SEQ ID NO: 14290 - DNA, 301 bp, Artificial Sequence
  Apc.1_Ercc5.1
  crRNA array
  misc_feature (148)..(157): n is a, c, g, or t
cttggctttatatatcttgtggaaaggacgaaacaccgtaatttctactaagtgtagatgtgatccacacgtgtagctgtaatttctactaagtgtagatacggcacgagcaagagacactaatttctactaagtgtagatttttttnnnnnnnnnnaagcttggcgtggatccgatatcaactagatcttgagacaaatggcagtattcatccacaattttaaaagaaaaggggggattggggggtacagtgcaggggaaagaatagtagacataatagcaacagacatacaaactaaag

SEQ ID NO: 14291 - DNA, 301 bp, Artificial Sequence
  Apc.1_Ercc5.2
  crRNA array
  misc_feature (148)..(157): n is a, c, g, or t
cttggctttatatatcttgtggaaaggacgaaacaccgtaatttctactaagtgtagatgtgatccacacgtgtagctgtaatttctactaagtgtagatgagtatcacatcggtgactctaatttctactaagtgtagatttttttnnnnnnnnnnaagcttggcgtggatccgatatcaactagatcttgagacaaatggcagtattcatccacaattttaaaagaaaaggggggattggggggtacagtgcaggggaaagaatagtagacataatagcaacagacatacaaactaaag

SEQ ID NO: 14292 - DNA, 301 bp, Artificial Sequence
  Apc.1_Ercc5.3
  crRNA array
  misc_feature (148)..(157): n is a, c, g, or t
cttggctttatatatcttgtggaaaggacgaaacaccgtaatttctactaagtgtagatgtgatccacacgtgtagctgtaatttctactaagtgtagatggagtgggtccaggcctcgttaatttctactaagtgtagatttttttnnnnnnnnnnaagcttggcgtggatccgatatcaactagatcttgagacaaatggcagtattcatccacaattttaaaagaaaaggggggattggggggtacagtgcaggggaaagaatagtagacataatagcaacagacatacaaactaaag

SEQ ID NO: 14293 - DNA, 301 bp, Artificial Sequence
  Apc.1_Ercc5.4
  crRNA array
  misc_feature (148)..(157): n is a, c, g, or t
cttggctttatatatcttgtggaaaggacgaaacaccgtaatttctactaagtgtagatgtgatccacacgtgtagctgtaatttctactaagtgtagatcagagccggtggaataatgttaatttctactaagtgtagatttttttnnnnnnnnnnaagcttggcgtggatccgatatcaactagatcttgagacaaatggcagtattcatccacaattttaaaagaaaaggggggattggggggtacagtgcaggggaaagaatagtagacataatagcaacagacatacaaactaaag

SEQ ID NO: 14294 - DNA, 301 bp, Artificial Sequence
  Apc.2_Ercc5.1
  crRNA array
  misc_feature (148)..(157): n is a, c, g, or t
cttggctttatatatcttgtggaaaggacgaaacaccgtaatttctactaagtgtagatcatctgctcgccaagacaaataatttctactaagtgtagatacggcacgagcaagagacactaatttctactaagtgtagatttttttnnnnnnnnnnaagcttggcgtggatccgatatcaactagatcttgagacaaatggcagtattcatccacaattttaaaagaaaaggggggattggggggtacagtgcaggggaaagaatagtagacataatagcaacagacatacaaactaaag

SEQ ID NO: 14295 - DNA, 301 bp, Artificial Sequence
  Apc.2_Ercc5.2
  crRNA array
  misc_feature (148)..(157): n is a, c, g, or t
cttggctttatatatcttgtggaaaggacgaaacaccgtaatttctactaagtgtagatcatctgctcgccaagacaaataatttctactaagtgtagatgagtatcacatcggtgactctaatttctactaagtgtagatttttttnnnnnnnnnnaagcttggcgtggatccgatatcaactagatcttgagacaaatggcagtattcatccacaattttaaaagaaaaggggggattggggggtacagtgcaggggaaagaatagtagacataatagcaacagacatacaaactaaag

SEQ ID NO: 14296 - DNA, 301 bp, Artificial Sequence
  Apc.2_Ercc5.3
  crRNA array
  misc_feature (148)..(157): n is a, c, g, or t
cttggctttatatatcttgtggaaaggacgaaacaccgtaatttctactaagtgtagatcatctgctcgccaagacaaataatttctactaagtgtagatggagtgggtccaggcctcgttaatttctactaagtgtagatttttttnnnnnnnnnnaagcttggcgtggatccgatatcaactagatcttgagacaaatggcagtattcatccacaattttaaaagaaaaggggggattggggggtacagtgcaggggaaagaatagtagacataatagcaacagacatacaaactaaag

SEQ ID NO: 14297 - DNA, 301 bp, Artificial Sequence
  Apc.2_Ercc5.4
  crRNA array
  misc_feature (148)..(157): n is a, c, g, or t
cttggctttatatatcttgtggaaaggacgaaacaccgtaatttctactaagtgtagatcatctgctcgccaagacaaataatttctactaagtgtagatcagagccggtggaataatgttaatttctactaagtgtagatttttttnnnnnnnnnnaagcttggcgtggatccgatatcaactagatcttgagacaaatggcagtattcatccacaattttaaaagaaaaggggggattggggggtacagtgcaggggaaagaatagtagacataatagcaacagacatacaaactaaag

SEQ ID NO: 14298 - DNA, 301 bp, Artificial Sequence
  Apc.3_Ercc5.1
  crRNA array
  misc_feature (148)..(157): n is a, c, g, or t
cttggctttatatatcttgtggaaaggacgaaacaccgtaatttctactaagtgtagatacgccaatcgacatgatgattaatttctactaagtgtagatacggcacgagcaagagacactaatttctactaagtgtagatttttttnnnnnnnnnnaagcttggcgtggatccgatatcaactagatcttgagacaaatggcagtattcatccacaattttaaaagaaaaggggggattggggggtacagtgcaggggaaagaatagtagacataatagcaacagacatacaaactaaag

SEQ ID NO: 14299 - DNA, 301 bp, Artificial Sequence
  Apc.3_Ercc5.2
  crRNA array
  misc_feature (148)..(157): n is a, c, g, or t
cttggctttatatatcttgtggaaaggacgaaacaccgtaatttctactaagtgtagatacgccaatcgacatgatgattaatttctactaagtgtagatgagtatcacatcggtgactctaatttctactaagtgtagatttttttnnnnnnnnnnaagcttggcgtggatccgatatcaactagatcttgagacaaatggcagtattcatccacaattttaaaagaaaaggggggattggggggtacagtgcaggggaaagaatagtagacataatagcaacagacatacaaactaaag

SEQ ID NO: 14300 - DNA, 301 bp, Artificial Sequence
  Apc.3_Ercc5.3
  crRNA array
  misc_feature (148)..(157): n is a, c, g, or t
cttggctttatatatcttgtggaaaggacgaaacaccgtaatttctactaagtgtagatacgccaatcgacatgatgattaatttctactaagtgtagatggagtgggtccaggcctcgttaatttctactaagtgtagatttttttnnnnnnnnnnaagcttggcgtggatccgatatcaactagatcttgagacaaatggcagtattcatccacaattttaaaagaaaaggggggattggggggtacagtgcaggggaaagaatagtagacataatagcaacagacatacaaactaaag

SEQ ID NO: 14301 - DNA, 301 bp, Artificial Sequence
  Apc.3_Ercc5.4
  crRNA array
  misc_feature (148)..(157): n is a, c, g, or t
cttggctttatatatcttgtggaaaggacgaaacaccgtaatttctactaagtgtagatacgccaatcgacatgatgattaatttctactaagtgtagatcagagccggtggaataatgttaatttctactaagtgtagatttttttnnnnnnnnnnaagcttggcgtggatccgatatcaactagatcttgagacaaatggcagtattcatccacaattttaaaagaaaaggggggattggggggtacagtgcaggggaaagaatagtagacataatagcaacagacatacaaactaaag

SEQ ID NO: 14302 - DNA, 301 bp, Artificial Sequence
  Apc.4_Ercc5.1
  crRNA array
  misc_feature (148)..(157): n is a, c, g, or t
cttggctttatatatcttgtggaaaggacgaaacaccgtaatttctactaagtgtagatcaccaggggatgatgtgccctaatttctactaagtgtagatacggcacgagcaagagacactaatttctactaagtgtagatttttttnnnnnnnnnnaagcttggcgtggatccgatatcaactagatcttgagacaaatggcagtattcatccacaattttaaaagaaaaggggggattggggggtacagtgcaggggaaagaatagtagacataatagcaacagacatacaaactaaag

SEQ ID NO: 14303 - DNA, 301 bp, Artificial Sequence
  Apc.4_Ercc5.2
  crRNA array
  misc_feature (148)..(157): n is a, c, g, or t
cttggctttatatatcttgtggaaaggacgaaacaccgtaatttctactaagtgtagatcaccaggggatgatgtgccctaatttctactaagtgtagatgagtatcacatcggtgactctaatttctactaagtgtagatttttttnnnnnnnnnnaagcttggcgtggatccgatatcaactagatcttgagacaaatggcagtattcatccacaattttaaaagaaaaggggggattggggggtacagtgcaggggaaagaatagtagacataatagcaacagacatacaaactaaag

SEQ ID NO: 14304 - DNA, 301 bp, Artificial Sequence
  Apc.4_Ercc5.3
  crRNA array
  misc_feature (148)..(157): n is a, c, g, or t
cttggctttatatatcttgtggaaaggacgaaacaccgtaatttctactaagtgtagatcaccaggggatgatgtgccctaatttctactaagtgtagatggagtgggtccaggcctcgttaatttctactaagtgtagatttttttnnnnnnnnnnaagcttggcgtggatccgatatcaactagatcttgagacaaatggcagtattcatccacaattttaaaagaaaaggggggattggggggtacagtgcaggggaaagaatagtagacataatagcaacagacatacaaactaaag

SEQ ID NO: 14305 - DNA, 301 bp, Artificial Sequence
  Apc.4_Ercc5.4
  crRNA array
  misc_feature (148)..(157): n is a, c, g, or t
cttggctttatatatcttgtggaaaggacgaaacaccgtaatttctactaagtgtagatcaccaggggatgatgtgccctaatttctactaagtgtagatcagagccggtggaataatgttaatttctactaagtgtagatttttttnnnnnnnnnnaagcttggcgtggatccgatatcaactagatcttgagacaaatggcagtattcatccacaattttaaaagaaaaggggggattggggggtacagtgcaggggaaagaatagtagacataatagcaacagacatacaaactaaag

SEQ ID NO: 14306 - DNA, 301 bp, Artificial Sequence
  Apc.1_Arid1b.1
  crRNA array
  misc_feature (148)..(157): n is a, c, g, or t
cttggctttatatatcttgtggaaaggacgaaacaccgtaatttctactaagtgtagatgtgatccacacgtgtagctgtaatttctactaagtgtagatgctgctgctgtagtgcgtggtaatttctactaagtgtagatttttttnnnnnnnnnnaagcttggcgtggatccgatatcaactagatcttgagacaaatggcagtattcatccacaattttaaaagaaaaggggggattggggggtacagtgcaggggaaagaatagtagacataatagcaacagacatacaaactaaag

SEQ ID NO: 14307 - DNA, 301 bp, Artificial Sequence
  Apc.1_Arid1b.2
  crRNA array
  misc_feature (148)..(157): n is a, c, g, or t
cttggctttatatatcttgtggaaaggacgaaacaccgtaatttctactaagtgtagatgtgatccacacgtgtagctgtaatttctactaagtgtagatagtgcaaaactgagcgcgggtaatttctactaagtgtagatttttttnnnnnnnnnnaagcttggcgtggatccgatatcaactagatcttgagacaaatggcagtattcatccacaattttaaaagaaaaggggggattggggggtacagtgcaggggaaagaatagtagacataatagcaacagacatacaaactaaag

SEQ ID NO: 14308 - DNA, 301 bp, Artificial Sequence
  Apc.1_Arid1b.3
  crRNA array
  misc_feature (148)..(157): n is a, c, g, or t
cttggctttatatatcttgtggaaaggacgaaacaccgtaatttctactaagtgtagatgtgatccacacgtgtagctgtaatttctactaagtgtagatcactcaaaggcgaacaggtataatttctactaagtgtagatttttttnnnnnnnnnnaagcttggcgtggatccgatatcaactagatcttgagacaaatggcagtattcatccacaattttaaaagaaaaggggggattggggggtacagtgcaggggaaagaatagtagacataatagcaacagacatacaaactaaag

SEQ ID NO: 14309 - DNA, 301 bp, Artificial Sequence
  Apc.1_Arid1b.4
  crRNA array
  misc_feature (148)..(157): n is a, c, g, or t
cttggctttatatatcttgtggaaaggacgaaacaccgtaatttctactaagtgtagatgtgatccacacgtgtagctgtaatttctactaagtgtagatctcctggctccgtagaagcataatttctactaagtgtagatttttttnnnnnnnnnnaagcttggcgtggatccgatatcaactagatcttgagacaaatggcagtattcatccacaattttaaaagaaaaggggggattggggggtacagtgcaggggaaagaatagtagacataatagcaacagacatacaaactaaag

SEQ ID NO: 14310 - DNA, 301 bp, Artificial Sequence
  Apc.2_Arid1b.1
  crRNA array
  misc_feature (148)..(157): n is a, c, g, or t
cttggctttatatatcttgtggaaaggacgaaacaccgtaatttctactaagtgtagatcatctgctcgccaagacaaataatttctactaagtgtagatgctgctgctgtagtgcgtggtaatttctactaagtgtagatttttttnnnnnnnnnnaagcttggcgtggatccgatatcaactagatcttgagacaaatggcagtattcatccacaattttaaaagaaaaggggggattggggggtacagtgcaggggaaagaatagtagacataatagcaacagacatacaaactaaag

SEQ ID NO: 14311 - DNA, 301 bp, Artificial Sequence
  Apc.2_Arid1b.2
  crRNA array
  misc_feature (148)..(157): n is a, c, g, or t
cttggctttatatatcttgtggaaaggacgaaacaccgtaatttctactaagtgtagatcatctgctcgccaagacaaataatttctactaagtgtagatagtgcaaaactgagcgcgggtaatttctactaagtgtagatttttttnnnnnnnnnnaagcttggcgtggatccgatatcaactagatcttgagacaaatggcagtattcatccacaattttaaaagaaaaggggggattggggggtacagtgcaggggaaagaatagtagacataatagcaacagacatacaaactaaag

SEQ ID NO: 14312 - DNA, 301 bp, Artificial Sequence
  Apc.2_Arid1b.3
  crRNA array
  misc_feature (148)..(157): n is a, c, g, or t
cttggctttatatatcttgtggaaaggacgaaacaccgtaatttctactaagtgtagatcatctgctcgccaagacaaataatttctactaagtgtagatcactcaaaggcgaacaggtataatttctactaagtgtagatttttttnnnnnnnnnnaagcttggcgtggatccgatatcaactagatcttgagacaaatggcagtattcatccacaattttaaaagaaaaggggggattggggggtacagtgcaggggaaagaatagtagacataatagcaacagacatacaaactaaag

SEQ ID NO: 14313 - DNA, 301 bp, Artificial Sequence
  Apc.2_Arid1b.4
  crRNA array
  misc_feature (148)..(157): n is a, c, g, or t
cttggctttatatatcttgtggaaaggacgaaacaccgtaatttctactaagtgtagatcatctgctcgccaagacaaataatttctactaagtgtagatctcctggctccgtagaagcataatttctactaagtgtagatttttttnnnnnnnnnnaagcttggcgtggatccgatatcaactagatcttgagacaaatggcagtattcatccacaattttaaaagaaaaggggggattggggggtacagtgcaggggaaagaatagtagacataatagcaacagacatacaaactaaag

SEQ ID NO: 14314 - DNA, 301 bp, Artificial Sequence
  Apc.3_Arid1b.1
  crRNA array
  misc_feature (148)..(157): n is a, c, g, or t
cttggctttatatatcttgtggaaaggacgaaacaccgtaatttctactaagtgtagatacgccaatcgacatgatgattaatttctactaagtgtagatgctgctgctgtagtgcgtggtaatttctactaagtgtagatttttttnnnnnnnnnnaagcttggcgtggatccgatatcaactagatcttgagacaaatggcagtattcatccacaattttaaaagaaaaggggggattggggggtacagtgcaggggaaagaatagtagacataatagcaacagacatacaaactaaag

SEQ ID NO: 14315 - DNA, 301 bp, Artificial Sequence
  Apc.3_Arid1b.2
  crRNA array
  misc_feature (148)..(157): n is a, c, g, or t
cttggctttatatatcttgtggaaaggacgaaacaccgtaatttctactaagtgtagatacgccaatcgacatgatgattaatttctactaagtgtagatagtgcaaaactgagcgcgggtaatttctactaagtgtagatttttttnnnnnnnnnnaagcttggcgtggatccgatatcaactagatcttgagacaaatggcagtattcatccacaattttaaaagaaaaggggggattggggggtacagtgcaggggaaagaatagtagacataatagcaacagacatacaaactaaag

SEQ ID NO: 14316 - DNA, 301 bp, Artificial Sequence
  Apc.3_Arid1b.3
  crRNA array
  misc_feature (148)..(157): n is a, c, g, or t
cttggctttatatatcttgtggaaaggacgaaacaccgtaatttctactaagtgtagatacgccaatcgacatgatgattaatttctactaagtgtagatcactcaaaggcgaacaggtataatttctactaagtgtagatttttttnnnnnnnnnnaagcttggcgtggatccgatatcaactagatcttgagacaaatggcagtattcatccacaattttaaaagaaaaggggggattggggggtacagtgcaggggaaagaatagtagacataatagcaacagacatacaaactaaag

SEQ ID NO: 14317 - DNA, 301 bp, Artificial Sequence
  Apc.3_Arid1b.4
  crRNA array
  misc_feature (148)..(157): n is a, c, g, or t
cttggctttatatatcttgtggaaaggacgaaacaccgtaatttctactaagtgtagatacgccaatcgacatgatgattaatttctactaagtgtagatctcctggctccgtagaagcataatttctactaagtgtagatttttttnnnnnnnnnnaagcttggcgtggatccgatatcaactagatcttgagacaaatggcagtattcatccacaattttaaaagaaaaggggggattggggggtacagtgcaggggaaagaatagtagacataatagcaacagacatacaaactaaag

SEQ ID NO: 14318 - DNA, 301 bp, Artificial Sequence
  Apc.4_Arid1b.1
  crRNA array
  misc_feature (148)..(157): n is a, c, g, or t
cttggctttatatatcttgtggaaaggacgaaacaccgtaatttctactaagtgtagatcaccaggggatgatgtgccctaatttctactaagtgtagatgctgctgctgtagtgcgtggtaatttctactaagtgtagatttttttnnnnnnnnnnaagcttggcgtggatccgatatcaactagatcttgagacaaatggcagtattcatccacaattttaaaagaaaaggggggattggggggtacagtgcaggggaaagaatagtagacataatagcaacagacatacaaactaaag

SEQ ID NO: 14319 - DNA, 301 bp, Artificial Sequence
  Apc.4_Arid1b.2
  crRNA array
  misc_feature (148)..(157): n is a, c, g, or t
cttggctttatatatcttgtggaaaggacgaaacaccgtaatttctactaagtgtagatcaccaggggatgatgtgccctaatttctactaagtgtagatagtgcaaaactgagcgcgggtaatttctactaagtgtagatttttttnnnnnnnnnnaagcttggcgtggatccgatatcaactagatcttgagacaaatggcagtattcatccacaattttaaaagaaaaggggggattggggggtacagtgcaggggaaagaatagtagacataatagcaacagacatacaaactaaag

SEQ ID NO: 14320 - DNA, 301 bp, Artificial Sequence
  Apc.4_Arid1b.3
  crRNA array
  misc_feature (148)..(157): n is a, c, g, or t
cttggctttatatatcttgtggaaaggacgaaacaccgtaatttctactaagtgtagatcaccaggggatgatgtgccctaatttctactaagtgtagatcactcaaaggcgaacaggtataatttctactaagtgtagatttttttnnnnnnnnnnaagcttggcgtggatccgatatcaactagatcttgagacaaatggcagtattcatccacaattttaaaagaaaaggggggattggggggtacagtgcaggggaaagaatagtagacataatagcaacagacatacaaactaaag

SEQ ID NO: 14321 - DNA, 301 bp, Artificial Sequence
  Apc.4_Arid1b.4
  crRNA array
  misc_feature (148)..(157): n is a, c, g, or t
cttggctttatatatcttgtggaaaggacgaaacaccgtaatttctactaagtgtagatcaccaggggatgatgtgccctaatttctactaagtgtagatctcctggctccgtagaagcataatttctactaagtgtagatttttttnnnnnnnnnnaagcttggcgtggatccgatatcaactagatcttgagacaaatggcagtattcatccacaattttaaaagaaaaggggggattggggggtacagtgcaggggaaagaatagtagacataatagcaacagacatacaaactaaag

SEQ ID NO: 14322 - DNA, 301 bp, Artificial Sequence
  Apc.1_Rb1.1
  crRNA array
  misc_feature (148)..(157): n is a, c, g, or t
cttggctttatatatcttgtggaaaggacgaaacaccgtaatttctactaagtgtagatgtgatccacacgtgtagctgtaatttctactaagtgtagattctgacatgatcgggtaccttaatttctactaagtgtagatttttttnnnnnnnnnnaagcttggcgtggatccgatatcaactagatcttgagacaaatggcagtattcatccacaattttaaaagaaaaggggggattggggggtacagtgcaggggaaagaatagtagacataatagcaacagacatacaaactaaag

SEQ ID NO: 14323 - DNA, 301 bp, Artificial Sequence
  Apc.1_Rb1.2
  crRNA array
  misc_feature (148)..(157): n is a, c, g, or t
cttggctttatatatcttgtggaaaggacgaaacaccgtaatttctactaagtgtagatgtgatccacacgtgtagctgtaatttctactaagtgtagatgtctctgcatgaaaacggagtaatttctactaagtgtagatttttttnnnnnnnnnnaagcttggcgtggatccgatatcaactagatcttgagacaaatggcagtattcatccacaattttaaaagaaaaggggggattggggggtacagtgcaggggaaagaatagtagacataatagcaacagacatacaaactaaag

SEQ ID NO: 14324 - DNA, 301 bp, Artificial Sequence
  Apc.1_Rb1.3
  crRNA array
  misc_feature (148)..(157): n is a, c, g, or t
cttggctttatatatcttgtggaaaggacgaaacaccgtaatttctactaagtgtagatgtgatccacacgtgtagctgtaatttctactaagtgtagatagccaatctggtctaataactaatttctactaagtgtagatttttttnnnnnnnnnnaagcttggcgtggatccgatatcaactagatcttgagacaaatggcagtattcatccacaattttaaaagaaaaggggggattggggggtacagtgcaggggaaagaatagtagacataatagcaacagacatacaaactaaag

SEQ ID NO: 14325 - DNA, 301 bp, Artificial Sequence
  Apc.1_Rb1.4
  crRNA array
  misc_feature (148)..(157): n is a, c, g, or t
cttggctttatatatcttgtggaaaggacgaaacaccgtaatttctactaagtgtagatgtgatccacacgtgtagctgtaatttctactaagtgtagattgtagctcagtaaaagtgaataatttctactaagtgtagatttttttnnnnnnnnnnaagcttggcgtggatccgatatcaactagatcttgagacaaatggcagtattcatccacaattttaaaagaaaaggggggattggggggtacagtgcaggggaaagaatagtagacataatagcaacagacatacaaactaaag

SEQ ID NO: 14326 - DNA, 301 bp, Artificial Sequence
  Apc.2_Rb1.1
  crRNA array
  misc_feature (148)..(157): n is a, c, g, or t
cttggctttatatatcttgtggaaaggacgaaacaccgtaatttctactaagtgtagatcatctgctcgccaagacaaataatttctactaagtgtagattctgacatgatcgggtaccttaatttctactaagtgtagatttttttnnnnnnnnnnaagcttggcgtggatccgatatcaactagatcttgagacaaatggcagtattcatccacaattttaaaagaaaaggggggattggggggtacagtgcaggggaaagaatagtagacataatagcaacagacatacaaactaaag

SEQ ID NO: 14327 - DNA, 301 bp, Artificial Sequence
  Apc.2_Rb1.2
  crRNA array
  misc_feature (148)..(157): n is a, c, g, or t
cttggctttatatatcttgtggaaaggacgaaacaccgtaatttctactaagtgtagatcatctgctcgccaagacaaataatttctactaagtgtagatgtctctgcatgaaaacggagtaatttctactaagtgtagatttttttnnnnnnnnnnaagcttggcgtggatccgatatcaactagatcttgagacaaatggcagtattcatccacaattttaaaagaaaaggggggattggggggtacagtgcaggggaaagaatagtagacataatagcaacagacatacaaactaaag

SEQ ID NO: 14328 - DNA, 301 bp, Artificial Sequence
  Apc.2_Rb1.3
  crRNA array
  misc_feature (148)..(157): n is a, c, g, or t
cttggctttatatatcttgtggaaaggacgaaacaccgtaatttctactaagtgtagatcatctgctcgccaagacaaataatttctactaagtgtagatagccaatctggtctaataactaatttctactaagtgtagatttttttnnnnnnnnnnaagcttggcgtggatccgatatcaactagatcttgagacaaatggcagtattcatccacaattttaaaagaaaaggggggattggggggtacagtgcaggggaaagaatagtagacataatagcaacagacatacaaactaaag

SEQ ID NO: 14329 - DNA, 301 bp, Artificial Sequence
  Apc.2_Rb1.4
  crRNA array
  misc_feature (148)..(157): n is a, c, g, or t
cttggctttatatatcttgtggaaaggacgaaacaccgtaatttctactaagtgtagatcatctgctcgccaagacaaataatttctactaagtgtagattgtagctcagtaaaagtgaataatttctactaagtgtagatttttttnnnnnnnnnnaagcttggcgtggatccgatatcaactagatcttgagacaaatggcagtattcatccacaattttaaaagaaaaggggggattggggggtacagtgcaggggaaagaatagtagacataatagcaacagacatacaaactaaag

SEQ ID NO: 14330 - DNA, 301 bp, Artificial Sequence
  Apc.3_Rb1.1
  crRNA array
  misc_feature (148)..(157): n is a, c, g, or t
cttggctttatatatcttgtggaaaggacgaaacaccgtaatttctactaagtgtagatacgccaatcgacatgatgattaatttctactaagtgtagattctgacatgatcgggtaccttaatttctactaagtgtagatttttttnnnnnnnnnnaagcttggcgtggatccgatatcaactagatcttgagacaaatggcagtattcatccacaattttaaaagaaaaggggggattggggggtacagtgcaggggaaagaatagtagacataatagcaacagacatacaaactaaag

SEQ ID NO: 14331 - DNA, 301 bp, Artificial Sequence
  Apc.3_Rb1.2
  crRNA array
  misc_feature (148)..(157): n is a, c, g, or t
cttggctttatatatcttgtggaaaggacgaaacaccgtaatttctactaagtgtagatacgccaatcgacatgatgattaatttctactaagtgtagatgtctctgcatgaaaacggagtaatttctactaagtgtagatttttttnnnnnnnnnnaagcttggcgtggatccgatatcaactagatcttgagacaaatggcagtattcatccacaattttaaaagaaaaggggggattggggggtacagtgcaggggaaagaatagtagacataatagcaacagacatacaaactaaag

SEQ ID NO: 14332 - DNA, 301 bp, Artificial Sequence
  Apc.3_Rb1.3
  crRNA array
  misc_feature (148)..(157): n is a, c, g, or t
cttggctttatatatcttgtggaaaggacgaaacaccgtaatttctactaagtgtagatacgccaatcgacatgatgattaatttctactaagtgtagatagccaatctggtctaataactaatttctactaagtgtagatttttttnnnnnnnnnnaagcttggcgtggatccgatatcaactagatcttgagacaaatggcagtattcatccacaattttaaaagaaaaggggggattggggggtacagtgcaggggaaagaatagtagacataatagcaacagacatacaaactaaag

SEQ ID NO: 14333 - DNA, 301 bp, Artificial Sequence
  Apc.3_Rb1.4
  crRNA array
  misc_feature (148)..(157): n is a, c, g, or t
cttggctttatatatcttgtggaaaggacgaaacaccgtaatttctactaagtgtagatacgccaatcgacatgatgattaatttctactaagtgtagattgtagctcagtaaaagtgaataatttctactaagtgtagatttttttnnnnnnnnnnaagcttggcgtggatccgatatcaactagatcttgagacaaatggcagtattcatccacaattttaaaagaaaaggggggattggggggtacagtgcaggggaaagaatagtagacataatagcaacagacatacaaactaaag

SEQ ID NO: 14334 - DNA, 301 bp, Artificial Sequence
  Apc.4_Rb1.1
  crRNA array
  misc_feature (148)..(157): n is a, c, g, or t
cttggctttatatatcttgtggaaaggacgaaacaccgtaatttctactaagtgtagatcaccaggggatgatgtgccctaatttctactaagtgtagattctgacatgatcgggtaccttaatttctactaagtgtagatttttttnnnnnnnnnnaagcttggcgtggatccgatatcaactagatcttgagacaaatggcagtattcatccacaattttaaaagaaaaggggggattggggggtacagtgcaggggaaagaatagtagacataatagcaacagacatacaaactaaag

SEQ ID NO: 14335 - DNA, 301 bp, Artificial Sequence
  Apc.4_Rb1.2
  crRNA array
  misc_feature (148)..(157): n is a, c, g, or t
cttggctttatatatcttgtggaaaggacgaaacaccgtaatttctactaagtgtagatcaccaggggatgatgtgccctaatttctactaagtgtagatgtctctgcatgaaaacggagtaatttctactaagtgtagatttttttnnnnnnnnnnaagcttggcgtggatccgatatcaactagatcttgagacaaatggcagtattcatccacaattttaaaagaaaaggggggattggggggtacagtgcaggggaaagaatagtagacataatagcaacagacatacaaactaaag

SEQ ID NO: 14336 - DNA, 301 bp, Artificial Sequence
  Apc.4_Rb1.3
  crRNA array
  misc_feature (148)..(157): n is a, c, g, or t
cttggctttatatatcttgtggaaaggacgaaacaccgtaatttctactaagtgtagatcaccaggggatgatgtgccctaatttctactaagtgtagatagccaatctggtctaataactaatttctactaagtgtagatttttttnnnnnnnnnnaagcttggcgtggatccgatatcaactagatcttgagacaaatggcagtattcatccacaattttaaaagaaaaggggggattggggggtacagtgcaggggaaagaatagtagacataatagcaacagacatacaaactaaag

SEQ ID NO: 14337 - DNA, 301 bp, Artificial Sequence
  Apc.4_Rb1.4
  crRNA array
  misc_feature (148)..(157): n is a, c, g, or t
cttggctttatatatcttgtggaaaggacgaaacaccgtaatttctactaagtgtagatcaccaggggatgatgtgccctaatttctactaagtgtagattgtagctcagtaaaagtgaataatttctactaagtgtagatttttttnnnnnnnnnnaagcttggcgtggatccgatatcaactagatcttgagacaaatggcagtattcatccacaattttaaaagaaaaggggggattggggggtacagtgcaggggaaagaatagtagacataatagcaacagacatacaaactaaag

SEQ ID NO: 14338 - DNA, 301 bp, Artificial Sequence
  Apc.1_Kmt2c.1
  crRNA array
  misc_feature (148)..(157): n is a, c, g, or t
cttggctttatatatcttgtggaaaggacgaaacaccgtaatttctactaagtgtagatgtgatccacacgtgtagctgtaatttctactaagtgtagatactcgacctccacctccctataatttctactaagtgtagatttttttnnnnnnnnnnaagcttggcgtggatccgatatcaactagatcttgagacaaatggcagtattcatccacaattttaaaagaaaaggggggattggggggtacagtgcaggggaaagaatagtagacataatagcaacagacatacaaactaaag

SEQ ID NO: 14339 - DNA, 301 bp, Artificial Sequence
  Apc.1_Kmt2c.2
  crRNA array
  misc_feature (148)..(157): n is a, c, g, or t
cttggctttatatatcttgtggaaaggacgaaacaccgtaatttctactaagtgtagatgtgatccacacgtgtagctgtaatttctactaagtgtagatcccaaagatcagcgtggacctaatttctactaagtgtagatttttttnnnnnnnnnnaagcttggcgtggatccgatatcaactagatcttgagacaaatggcagtattcatccacaattttaaaagaaaaggggggattggggggtacagtgcaggggaaagaatagtagacataatagcaacagacatacaaactaaag

SEQ ID NO: 14340 - DNA, 301 bp, Artificial Sequence
  Apc.1_Kmt2c.3
  crRNA array
  misc_feature (148)..(157): n is a, c, g, or t
cttggctttatatatcttgtggaaaggacgaaacaccgtaatttctactaagtgtagatgtgatccacacgtgtagctgtaatttctactaagtgtagataaaagatccgaatcgatgcgtaatttctactaagtgtagatttttttnnnnnnnnnnaagcttggcgtggatccgatatcaactagatcttgagacaaatggcagtattcatccacaattttaaaagaaaaggggggattggggggtacagtgcaggggaaagaatagtagacataatagcaacagacatacaaactaaag

SEQ ID NO: 14341 - DNA, 301 bp, Artificial Sequence
  Apc.1_Kmt2c.4
  crRNA array
  misc_feature (148)..(157): n is a, c, g, or t
cttggctttatatatcttgtggaaaggacgaaacaccgtaatttctactaagtgtagatgtgatccacacgtgtagctgtaatttctactaagtgtagatctgaggcacatggaagcgattaatttctactaagtgtagatttttttnnnnnnnnnnaagcttggcgtggatccgatatcaactagatcttgagacaaatggcagtattcatccacaattttaaaagaaaaggggggattggggggtacagtgcaggggaaagaatagtagacataatagcaacagacatacaaactaaag

SEQ ID NO: 14342 - DNA, 301 bp, Artificial Sequence
  Apc.2_Kmt2c.1
  crRNA array
  misc_feature (148)..(157): n is a, c, g, or t
cttggctttatatatcttgtggaaaggacgaaacaccgtaatttctactaagtgtagatcatctgctcgccaagacaaataatttctactaagtgtagatactcgacctccacctccctataatttctactaagtgtagatttttttnnnnnnnnnnaagcttggcgtggatccgatatcaactagatcttgagacaaatggcagtattcatccacaattttaaaagaaaaggggggattggggggtacagtgcaggggaaagaatagtagacataatagcaacagacatacaaactaaag

SEQ ID NO: 14343 - DNA, 301 bp, Artificial Sequence
  Apc.2_Kmt2c.2
  crRNA array
  misc_feature (148)..(157): n is a, c, g, or t
cttggctttatatatcttgtggaaaggacgaaacaccgtaatttctactaagtgtagatcatctgctcgccaagacaaataatttctactaagtgtagatcccaaagatcagcgtggacctaatttctactaagtgtagatttttttnnnnnnnnnnaagcttggcgtggatccgatatcaactagatcttgagacaaatggcagtattcatccacaattttaaaagaaaaggggggattggggggtacagtgcaggggaaagaatagtagacataatagcaacagacatacaaactaaag

SEQ ID NO: 14344 - DNA, 301 bp, Artificial Sequence
  Apc.2_Kmt2c.3
  crRNA array
  misc_feature (148)..(157): n is a, c, g, or t
cttggctttatatatcttgtggaaaggacgaaacaccgtaatttctactaagtgtagatcatctgctcgccaagacaaataatttctactaagtgtagataaaagatccgaatcgatgcgtaatttctactaagtgtagatttttttnnnnnnnnnnaagcttggcgtggatccgatatcaactagatcttgagacaaatggcagtattcatccacaattttaaaagaaaaggggggattggggggtacagtgcaggggaaagaatagtagacataatagcaacagacatacaaactaaag

SEQ ID NO: 14345 - DNA, 301 bp, Artificial Sequence
  Apc.2_Kmt2c.4
  crRNA array
  misc_feature (148)..(157): n is a, c, g, or t
cttggctttatatatcttgtggaaaggacgaaacaccgtaatttctactaagtgtagatcatctgctcgccaagacaaataatttctactaagtgtagatctgaggcacatggaagcgattaatttctactaagtgtagatttttttnnnnnnnnnnaagcttggcgtggatccgatatcaactagatcttgagacaaatggcagtattcatccacaattttaaaagaaaaggggggattggggggtacagtgcaggggaaagaatagtagacataatagcaacagacatacaaactaaag

SEQ ID NO: 14346 - DNA, 301 bp, Artificial Sequence
  Apc.3_Kmt2c.1
  crRNA array
  misc_feature (148)..(157): n is a, c, g, or t
cttggctttatatatcttgtggaaaggacgaaacaccgtaatttctactaagtgtagatacgccaatcgacatgatgattaatttctactaagtgtagatactcgacctccacctccctataatttctactaagtgtagatttttttnnnnnnnnnnaagcttggcgtggatccgatatcaactagatcttgagacaaatggcagtattcatccacaattttaaaagaaaaggggggattggggggtacagtgcaggggaaagaatagtagacataatagcaacagacatacaaactaaag

SEQ ID NO: 14347 - DNA, 301 bp, Artificial Sequence
  Apc.3_Kmt2c.2
  crRNA array
  misc_feature (148)..(157): n is a, c, g, or t
cttggctttatatatcttgtggaaaggacgaaacaccgtaatttctactaagtgtagatacgccaatcgacatgatgattaatttctactaagtgtagatcccaaagatcagcgtggacctaatttctactaagtgtagatttttttnnnnnnnnnnaagcttggcgtggatccgatatcaactagatcttgagacaaatggcagtattcatccacaattttaaaagaaaaggggggattggggggtacagtgcaggggaaagaatagtagacataatagcaacagacatacaaactaaag

SEQ ID NO: 14348 - DNA, 301 bp, Artificial Sequence
  Apc.3_Kmt2c.3
  crRNA array
  misc_feature (148)..(157): n is a, c, g, or t
cttggctttatatatcttgtggaaaggacgaaacaccgtaatttctactaagtgtagatacgccaatcgacatgatgattaatttctactaagtgtagataaaagatccgaatcgatgcgtaatttctactaagtgtagatttttttnnnnnnnnnnaagcttggcgtggatccgatatcaactagatcttgagacaaatggcagtattcatccacaattttaaaagaaaaggggggattggggggtacagtgcaggggaaagaatagtagacataatagcaacagacatacaaactaaag

SEQ ID NO: 14349 - DNA, 301 bp, Artificial Sequence
  Apc.3_Kmt2c.4
  crRNA array
  misc_feature (148)..(157): n is a, c, g, or t
cttggctttatatatcttgtggaaaggacgaaacaccgtaatttctactaagtgtagatacgccaatcgacatgatgattaatttctactaagtgtagatctgaggcacatggaagcgattaatttctactaagtgtagatttttttnnnnnnnnnnaagcttggcgtggatccgatatcaactagatcttgagacaaatggcagtattcatccacaattttaaaagaaaaggggggattggggggtacagtgcaggggaaagaatagtagacataatagcaacagacatacaaactaaag

SEQ ID NO: 14350 - DNA, 301 bp, Artificial Sequence
  Apc.4_Kmt2c.1
  crRNA array
  misc_feature (148)..(157): n is a, c, g, or t
cttggctttatatatcttgtggaaaggacgaaacaccgtaatttctactaagtgtagatcaccaggggatgatgtgccctaatttctactaagtgtagatactcgacctccacctccctataatttctactaagtgtagatttttttnnnnnnnnnnaagcttggcgtggatccgatatcaactagatcttgagacaaatggcagtattcatccacaattttaaaagaaaaggggggattggggggtacagtgcaggggaaagaatagtagacataatagcaacagacatacaaactaaag

SEQ ID NO: 14351 - DNA, 301 bp, Artificial Sequence
  Apc.4_Kmt2c.2
  crRNA array
  misc_feature (148)..(157): n is a, c, g, or t
cttggctttatatatcttgtggaaaggacgaaacaccgtaatttctactaagtgtagatcaccaggggatgatgtgccctaatttctactaagtgtagatcccaaagatcagcgtggacctaatttctactaagtgtagatttttttnnnnnnnnnnaagcttggcgtggatccgatatcaactagatcttgagacaaatggcagtattcatccacaattttaaaagaaaaggggggattggggggtacagtgcaggggaaagaatagtagacataatagcaacagacatacaaactaaag

SEQ ID NO: 14352 - DNA, 301 bp, Artificial Sequence
  Apc.4_Kmt2c.3
  crRNA array
  misc_feature (148)..(157): n is a, c, g, or t
cttggctttatatatcttgtggaaaggacgaaacaccgtaatttctactaagtgtagatcaccaggggatgatgtgccctaatttctactaagtgtagataaaagatccgaatcgatgcgtaatttctactaagtgtagatttttttnnnnnnnnnnaagcttggcgtggatccgatatcaactagatcttgagacaaatggcagtattcatccacaattttaaaagaaaaggggggattggggggtacagtgcaggggaaagaatagtagacataatagcaacagacatacaaactaaag

SEQ ID NO: 14353 - DNA, 301 bp, Artificial Sequence
  Apc.4_Kmt2c.4
  crRNA array
  misc_feature (148)..(157): n is a, c, g, or t
cttggctttatatatcttgtggaaaggacgaaacaccgtaatttctactaagtgtagatcaccaggggatgatgtgccctaatttctactaagtgtagatctgaggcacatggaagcgattaatttctactaagtgtagatttttttnnnnnnnnnnaagcttggcgtggatccgatatcaactagatcttgagacaaatggcagtattcatccacaattttaaaagaaaaggggggattggggggtacagtgcaggggaaagaatagtagacataatagcaacagacatacaaactaaag

SEQ ID NO: 14354 - DNA, 301 bp, Artificial Sequence
  Apc.1_Pten.1
  crRNA array
  misc_feature (148)..(157): n is a, c, g, or t
cttggctttatatatcttgtggaaaggacgaaacaccgtaatttctactaagtgtagatgtgatccacacgtgtagctgtaatttctactaagtgtagataagcgtggtgcgtgacgcactaatttctactaagtgtagatttttttnnnnnnnnnnaagcttggcgtggatccgatatcaactagatcttgagacaaatggcagtattcatccacaattttaaaagaaaaggggggattggggggtacagtgcaggggaaagaatagtagacataatagcaacagacatacaaactaaag

SEQ ID NO: 14355 - DNA, 301 bp, Artificial Sequence
  Apc.1_Pten.2
  crRNA array
  misc_feature (148)..(157): n is a, c, g, or t
cttggctttatatatcttgtggaaaggacgaaacaccgtaatttctactaagtgtagatgtgatccacacgtgtagctgtaatttctactaagtgtagattgtcaccagctgaagtggcttaatttctactaagtgtagatttttttnnnnnnnnnnaagcttggcgtggatccgatatcaactagatcttgagacaaatggcagtattcatccacaattttaaaagaaaaggggggattggggggtacagtgcaggggaaagaatagtagacataatagcaacagacatacaaactaaag

SEQ ID NO: 14356 - DNA, 301 bp, Artificial Sequence
  Apc.1_Pten.3
  crRNA array
  misc_feature (148)..(157): n is a, c, g, or t
cttggctttatatatcttgtggaaaggacgaaacaccgtaatttctactaagtgtagatgtgatccacacgtgtagctgtaatttctactaagtgtagatggagtcaagaggctgatttttaatttctactaagtgtagatttttttnnnnnnnnnnaagcttggcgtggatccgatatcaactagatcttgagacaaatggcagtattcatccacaattttaaaagaaaaggggggattggggggtacagtgcaggggaaagaatagtagacataatagcaacagacatacaaactaaag

SEQ ID NO: 14357 - DNA, 301 bp, Artificial Sequence
  Apc.1_Pten.4
  crRNA array
  misc_feature (148)..(157): n is a, c, g, or t
cttggctttatatatcttgtggaaaggacgaaacaccgtaatttctactaagtgtagatgtgatccacacgtgtagctgtaatttctactaagtgtagatctgtaagctaaaccactacataatttctactaagtgtagatttttttnnnnnnnnnnaagcttggcgtggatccgatatcaactagatcttgagacaaatggcagtattcatccacaattttaaaagaaaaggggggattggggggtacagtgcaggggaaagaatagtagacataatagcaacagacatacaaactaaag

SEQ ID NO: 14358 - DNA, 301 bp, Artificial Sequence
  Apc.2_Pten.1
  crRNA array
  misc_feature (148)..(157): n is a, c, g, or t
cttggctttatatatcttgtggaaaggacgaaacaccgtaatttctactaagtgtagatcatctgctcgccaagacaaataatttctactaagtgtagataagcgtggtgcgtgacgcactaatttctactaagtgtagatttttttnnnnnnnnnnaagcttggcgtggatccgatatcaactagatcttgagacaaatggcagtattcatccacaattttaaaagaaaaggggggattggggggtacagtgcaggggaaagaatagtagacataatagcaacagacatacaaactaaag

SEQ ID NO: 14359 - DNA, 301 bp, Artificial Sequence
  Apc.2_Pten.2
  crRNA array
  misc_feature (148)..(157): n is a, c, g, or t
cttggctttatatatcttgtggaaaggacgaaacaccgtaatttctactaagtgtagatcatctgctcgccaagacaaataatttctactaagtgtagattgtcaccagctgaagtggcttaatttctactaagtgtagatttttttnnnnnnnnnnaagcttggcgtggatccgatatcaactagatcttgagacaaatggcagtattcatccacaattttaaaagaaaaggggggattggggggtacagtgcaggggaaagaatagtagacataatagcaacagacatacaaactaaag

SEQ ID NO: 14360 - DNA, 301 bp, Artificial Sequence
  Apc.2_Pten.3
  crRNA array
  misc_feature (148)..(157): n is a, c, g, or t
cttggctttatatatcttgtggaaaggacgaaacaccgtaatttctactaagtgtagatcatctgctcgccaagacaaataatttctactaagtgtagatggagtcaagaggctgatttttaatttctactaagtgtagatttttttnnnnnnnnnnaagcttggcgtggatccgatatcaactagatcttgagacaaatggcagtattcatccacaattttaaaagaaaaggggggattggggggtacagtgcaggggaaagaatagtagacataatagcaacagacatacaaactaaag

SEQ ID NO: 14361 - DNA, 301 bp, Artificial Sequence
  Apc.2_Pten.4
  crRNA array
  misc_feature (148)..(157): n is a, c, g, or t
cttggctttatatatcttgtggaaaggacgaaacaccgtaatttctactaagtgtagatcatctgctcgccaagacaaataatttctactaagtgtagatctgtaagctaaaccactacataatttctactaagtgtagatttttttnnnnnnnnnnaagcttggcgtggatccgatatcaactagatcttgagacaaatggcagtattcatccacaattttaaaagaaaaggggggattggggggtacagtgcaggggaaagaatagtagacataatagcaacagacatacaaactaaag

SEQ ID NO: 14362 - DNA, 301 bp, Artificial Sequence
  Apc.3_Pten.1
  crRNA array
  misc_feature (148)..(157): n is a, c, g, or t
cttggctttatatatcttgtggaaaggacgaaacaccgtaatttctactaagtgtagatacgccaatcgacatgatgattaatttctactaagtgtagataagcgtggtgcgtgacgcactaatttctactaagtgtagatttttttnnnnnnnnnnaagcttggcgtggatccgatatcaactagatcttgagacaaatggcagtattcatccacaattttaaaagaaaaggggggattggggggtacagtgcaggggaaagaatagtagacataatagcaacagacatacaaactaaag

SEQ ID NO: 14363 - DNA, 301 bp, Artificial Sequence
  Apc.3_Pten.2
  crRNA array
  misc_feature (148)..(157): n is a, c, g, or t
cttggctttatatatcttgtggaaaggacgaaacaccgtaatttctactaagtgtagatacgccaatcgacatgatgattaatttctactaagtgtagattgtcaccagctgaagtggcttaatttctactaagtgtagatttttttnnnnnnnnnnaagcttggcgtggatccgatatcaactagatcttgagacaaatggcagtattcatccacaattttaaaagaaaaggggggattggggggtacagtgcaggggaaagaatagtagacataatagcaacagacatacaaactaaag

SEQ ID NO: 14364 - DNA, 301 bp, Artificial Sequence
  Apc.3_Pten.3
  crRNA array
  misc_feature (148)..(157): n is a, c, g, or t
cttggctttatatatcttgtggaaaggacgaaacaccgtaatttctactaagtgtagatacgccaatcgacatgatgattaatttctactaagtgtagatggagtcaagaggctgatttttaatttctactaagtgtagatttttttnnnnnnnnnnaagcttggcgtggatccgatatcaactagatcttgagacaaatggcagtattcatccacaattttaaaagaaaaggggggattggggggtacagtgcaggggaaagaatagtagacataatagcaacagacatacaaactaaag

SEQ ID NO: 14365 - DNA, 301 bp, Artificial Sequence
  Apc.3_Pten.4
  crRNA array
  misc_feature (148)..(157): n is a, c, g, or t
cttggctttatatatcttgtggaaaggacgaaacaccgtaatttctactaagtgtagatacgccaatcgacatgatgattaatttctactaagtgtagatctgtaagctaaaccactacataatttctactaagtgtagatttttttnnnnnnnnnnaagcttggcgtggatccgatatcaactagatcttgagacaaatggcagtattcatccacaattttaaaagaaaaggggggattggggggtacagtgcaggggaaagaatagtagacataatagcaacagacatacaaactaaag

SEQ ID NO: 14366 - DNA, 301 bp, Artificial Sequence
  Apc.4_Pten.1
  crRNA array
  misc_feature (148)..(157): n is a, c, g, or t
cttggctttatatatcttgtggaaaggacgaaacaccgtaatttctactaagtgtagatcaccaggggatgatgtgccctaatttctactaagtgtagataagcgtggtgcgtgacgcactaatttctactaagtgtagatttttttnnnnnnnnnnaagcttggcgtggatccgatatcaactagatcttgagacaaatggcagtattcatccacaattttaaaagaaaaggggggattggggggtacagtgcaggggaaagaatagtagacataatagcaacagacatacaaactaaag

SEQ ID NO: 14367 - DNA, 301 bp, Artificial Sequence
  Apc.4_Pten.2
  crRNA array
  misc_feature (148)..(157): n is a, c, g, or t
cttggctttatatatcttgtggaaaggacgaaacaccgtaatttctactaagtgtagatcaccaggggatgatgtgccctaatttctactaagtgtagattgtcaccagctgaagtggcttaatttctactaagtgtagatttttttnnnnnnnnnnaagcttggcgtggatccgatatcaactagatcttgagacaaatggcagtattcatccacaattttaaaagaaaaggggggattggggggtacagtgcaggggaaagaatagtagacataatagcaacagacatacaaactaaag

SEQ ID NO: 14368 - DNA, 301 bp, Artificial Sequence
  Apc.4_Pten.3
  crRNA array
  misc_feature (148)..(157): n is a, c, g, or t
cttggctttatatatcttgtggaaaggacgaaacaccgtaatttctactaagtgtagatcaccaggggatgatgtgccctaatttctactaagtgtagatggagtcaagaggctgatttttaatttctactaagtgtagatttttttnnnnnnnnnnaagcttggcgtggatccgatatcaactagatcttgagacaaatggcagtattcatccacaattttaaaagaaaaggggggattggggggtacagtgcaggggaaagaatagtagacataatagcaacagacatacaaactaaag

SEQ ID NO: 14369 - DNA, 301 bp, Artificial Sequence
  Apc.4_Pten.4
  crRNA array
  misc_feature (148)..(157): n is a, c, g, or t
cttggctttatatatcttgtggaaaggacgaaacaccgtaatttctactaagtgtagatcaccaggggatgatgtgccctaatttctactaagtgtagatctgtaagctaaaccactacataatttctactaagtgtagatttttttnnnnnnnnnnaagcttggcgtggatccgatatcaactagatcttgagacaaatggcagtattcatccacaattttaaaagaaaaggggggattggggggtacagtgcaggggaaagaatagtagacataatagcaacagacatacaaactaaag

SEQ ID NO: 14370 - DNA, 301 bp, Artificial Sequence
  Apc.1_Atm.1
  crRNA array
  misc_feature (148)..(157): n is a, c, g, or t
cttggctttatatatcttgtggaaaggacgaaacaccgtaatttctactaagtgtagatgtgatccacacgtgtagctgtaatttctactaagtgtagatgagaaagtctccgaatcgtttaatttctactaagtgtagatttttttnnnnnnnnnnaagcttggcgtggatccgatatcaactagatcttgagacaaatggcagtattcatccacaattttaaaagaaaaggggggattggggggtacagtgcaggggaaagaatagtagacataatagcaacagacatacaaactaaag

SEQ ID NO: 14371 - DNA, 301 bp, Artificial Sequence
  Apc.1_Atm.2
  crRNA array
  misc_feature (148)..(157): n is a, c, g, or t
cttggctttatatatcttgtggaaaggacgaaacaccgtaatttctactaagtgtagatgtgatccacacgtgtagctgtaatttctactaagtgtagatcctacgagggcacgagagactaatttctactaagtgtagatttttttnnnnnnnnnnaagcttggcgtggatccgatatcaactagatcttgagacaaatggcagtattcatccacaattttaaaagaaaaggggggattggggggtacagtgcaggggaaagaatagtagacataatagcaacagacatacaaactaaag

SEQ ID NO: 14372 - DNA, 301 bp, Artificial Sequence
  Apc.1_Atm.3
  crRNA array
  misc_feature (148)..(157): n is a, c, g, or t
cttggctttatatatcttgtggaaaggacgaaacaccgtaatttctactaagtgtagatgtgatccacacgtgtagctgtaatttctactaagtgtagattgaaagtctccgatatgccataatttctactaagtgtagatttttttnnnnnnnnnnaagcttggcgtggatccgatatcaactagatcttgagacaaatggcagtattcatccacaattttaaaagaaaaggggggattggggggtacagtgcaggggaaagaatagtagacataatagcaacagacatacaaactaaag

SEQ ID NO: 14373 - DNA, 301 bp, Artificial Sequence
  Apc.1_Atm.4
  crRNA array
  misc_feature (148)..(157): n is a, c, g, or t
cttggctttatatatcttgtggaaaggacgaaacaccgtaatttctactaagtgtagatgtgatccacacgtgtagctgtaatttctactaagtgtagatggtggtgatcagtcaagtagtaatttctactaagtgtagatttttttnnnnnnnnnnaagcttggcgtggatccgatatcaactagatcttgagacaaatggcagtattcatccacaattttaaaagaaaaggggggattggggggtacagtgcaggggaaagaatagtagacataatagcaacagacatacaaactaaag

SEQ ID NO: 14374 - DNA, 301 bp, Artificial Sequence
  Apc.2_Atm.1
  crRNA array
  misc_feature (148)..(157): n is a, c, g, or t
cttggctttatatatcttgtggaaaggacgaaacaccgtaatttctactaagtgtagatcatctgctcgccaagacaaataatttctactaagtgtagatgagaaagtctccgaatcgtttaatttctactaagtgtagatttttttnnnnnnnnnnaagcttggcgtggatccgatatcaactagatcttgagacaaatggcagtattcatccacaattttaaaagaaaaggggggattggggggtacagtgcaggggaaagaatagtagacataatagcaacagacatacaaactaaag

SEQ ID NO: 14375 - DNA, 301 bp, Artificial Sequence
  Apc.2_Atm.2
  crRNA array
  misc_feature (148)..(157): n is a, c, g, or t
cttggctttatatatcttgtggaaaggacgaaacaccgtaatttctactaagtgtagatcatctgctcgccaagacaaataatttctactaagtgtagatcctacgagggcacgagagactaatttctactaagtgtagatttttttnnnnnnnnnnaagcttggcgtggatccgatatcaactagatcttgagacaaatggcagtattcatccacaattttaaaagaaaaggggggattggggggtacagtgcaggggaaagaatagtagacataatagcaacagacatacaaactaaag

SEQ ID NO: 14376 - DNA, 301 bp, Artificial Sequence
  Apc.2_Atm.3
  crRNA array
  misc_feature (148)..(157): n is a, c, g, or t
cttggctttatatatcttgtggaaaggacgaaacaccgtaatttctactaagtgtagatcatctgctcgccaagacaaataatttctactaagtgtagattgaaagtctccgatatgccataatttctactaagtgtagatttttttnnnnnnnnnnaagcttggcgtggatccgatatcaactagatcttgagacaaatggcagtattcatccacaattttaaaagaaaaggggggattggggggtacagtgcaggggaaagaatagtagacataatagcaacagacatacaaactaaag

SEQ ID NO: 14377 - DNA, 301 bp, Artificial Sequence
  Apc.2_Atm.4
  crRNA array
  misc_feature (148)..(157): n is a, c, g, or t
cttggctttatatatcttgtggaaaggacgaaacaccgtaatttctactaagtgtagatcatctgctcgccaagacaaataatttctactaagtgtagatggtggtgatcagtcaagtagtaatttctactaagtgtagatttttttnnnnnnnnnnaagcttggcgtggatccgatatcaactagatcttgagacaaatggcagtattcatccacaattttaaaagaaaaggggggattggggggtacagtgcaggggaaagaatagtagacataatagcaacagacatacaaactaaag

SEQ ID NO: 14378 - DNA, 301 bp, Artificial Sequence
  Apc.3_Atm.1
  crRNA array
  misc_feature (148)..(157): n is a, c, g, or t
cttggctttatatatcttgtggaaaggacgaaacaccgtaatttctactaagtgtagatacgccaatcgacatgatgattaatttctactaagtgtagatgagaaagtctccgaatcgtttaatttctactaagtgtagatttttttnnnnnnnnnnaagcttggcgtggatccgatatcaactagatcttgagacaaatggcagtattcatccacaattttaaaagaaaaggggggattggggggtacagtgcaggggaaagaatagtagacataatagcaacagacatacaaactaaag

SEQ ID NO: 14379 - DNA, 301 bp, Artificial Sequence
  Apc.3_Atm.2
  crRNA array
  misc_feature (148)..(157): n is a, c, g, or t
cttggctttatatatcttgtggaaaggacgaaacaccgtaatttctactaagtgtagatacgccaatcgacatgatgattaatttctactaagtgtagatcctacgagggcacgagagactaatttctactaagtgtagatttttttnnnnnnnnnnaagcttggcgtggatccgatatcaactagatcttgagacaaatggcagtattcatccacaattttaaaagaaaaggggggattggggggtacagtgcaggggaaagaatagtagacataatagcaacagacatacaaactaaag

SEQ ID NO: 14380 - DNA, 301 bp, Artificial Sequence
  Apc.3_Atm.3
  crRNA array
  misc_feature (148)..(157): n is a, c, g, or t
cttggctttatatatcttgtggaaaggacgaaacaccgtaatttctactaagtgtagatacgccaatcgacatgatgattaatttctactaagtgtagattgaaagtctccgatatgccataatttctactaagtgtagatttttttnnnnnnnnnnaagcttggcgtggatccgatatcaactagatcttgagacaaatggcagtattcatccacaattttaaaagaaaaggggggattggggggtacagtgcaggggaaagaatagtagacataatagcaacagacatacaaactaaag

SEQ ID NO: 14381 - DNA, 301 bp, Artificial Sequence
  Apc.3_Atm.4
  crRNA array
  misc_feature (148)..(157): n is a, c, g, or t
cttggctttatatatcttgtggaaaggacgaaacaccgtaatttctactaagtgtagatacgccaatcgacatgatgattaatttctactaagtgtagatggtggtgatcagtcaagtagtaatttctactaagtgtagatttttttnnnnnnnnnnaagcttggcgtggatccgatatcaactagatcttgagacaaatggcagtattcatccacaattttaaaagaaaaggggggattggggggtacagtgcaggggaaagaatagtagacataatagcaacagacatacaaactaaag

SEQ ID NO: 14382 - DNA, 301 bp, Artificial Sequence
  Apc.4_Atm.1
  crRNA array
  misc_feature (148)..(157): n is a, c, g, or t
cttggctttatatatcttgtggaaaggacgaaacaccgtaatttctactaagtgtagatcaccaggggatgatgtgccctaatttctactaagtgtagatgagaaagtctccgaatcgtttaatttctactaagtgtagatttttttnnnnnnnnnnaagcttggcgtggatccgatatcaactagatcttgagacaaatggcagtattcatccacaattttaaaagaaaaggggggattggggggtacagtgcaggggaaagaatagtagacataatagcaacagacatacaaactaaag

SEQ ID NO: 14383 - DNA, 301 bp, Artificial Sequence
  Apc.4_Atm.2
  crRNA array
  misc_feature (148)..(157): n is a, c, g, or t
cttggctttatatatcttgtggaaaggacgaaacaccgtaatttctactaagtgtagatcaccaggggatgatgtgccctaatttctactaagtgtagatcctacgagggcacgagagactaatttctactaagtgtagatttttttnnnnnnnnnnaagcttggcgtggatccgatatcaactagatcttgagacaaatggcagtattcatccacaattttaaaagaaaaggggggattggggggtacagtgcaggggaaagaatagtagacataatagcaacagacatacaaactaaag

SEQ ID NO: 14384 - DNA, 301 bp, Artificial Sequence
  Apc.4_Atm.3
  crRNA array
  misc_feature (148)..(157): n is a, c, g, or t
cttggctttatatatcttgtggaaaggacgaaacaccgtaatttctactaagtgtagatcaccaggggatgatgtgccctaatttctactaagtgtagattgaaagtctccgatatgccataatttctactaagtgtagatttttttnnnnnnnnnnaagcttggcgtggatccgatatcaactagatcttgagacaaatggcagtattcatccacaattttaaaagaaaaggggggattggggggtacagtgcaggggaaagaatagtagacataatagcaacagacatacaaactaaag

SEQ ID NO: 14385 - DNA, 301 bp, Artificial Sequence
  Apc.4_Atm.4
  crRNA array
  misc_feature (148)..(157): n is a, c, g, or t
cttggctttatatatcttgtggaaaggacgaaacaccgtaatttctactaagtgtagatcaccaggggatgatgtgccctaatttctactaagtgtagatggtggtgatcagtcaagtagtaatttctactaagtgtagatttttttnnnnnnnnnnaagcttggcgtggatccgatatcaactagatcttgagacaaatggcagtattcatccacaattttaaaagaaaaggggggattggggggtacagtgcaggggaaagaatagtagacataatagcaacagacatacaaactaaag

SEQ ID NO: 14386 - DNA, 301 bp, Artificial Sequence
  Fanca.1_Nf1.1
  crRNA array
  misc_feature (148)..(157): n is a, c, g, or t
cttggctttatatatcttgtggaaaggacgaaacaccgtaatttctactaagtgtagatggaggccccggggcccaccataatttctactaagtgtagattggcgatccggaatcctctgtaatttctactaagtgtagatttttttnnnnnnnnnnaagcttggcgtggatccgatatcaactagatcttgagacaaatggcagtattcatccacaattttaaaagaaaaggggggattggggggtacagtgcaggggaaagaatagtagacataatagcaacagacatacaaactaaag

SEQ ID NO: 14387 - DNA, 301 bp, Artificial Sequence
  Fanca.1_Nf1.2
  crRNA array
  misc_feature (148)..(157): n is a, c, g, or t
cttggctttatatatcttgtggaaaggacgaaacaccgtaatttctactaagtgtagatggaggccccggggcccaccataatttctactaagtgtagatggaaacacaacgctggcctctaatttctactaagtgtagatttttttnnnnnnnnnnaagcttggcgtggatccgatatcaactagatcttgagacaaatggcagtattcatccacaattttaaaagaaaaggggggattggggggtacagtgcaggggaaagaatagtagacataatagcaacagacatacaaactaaag

SEQ ID NO: 14388 - DNA, 301 bp, Artificial Sequence
  Fanca.1_Nf1.3
  crRNA array
  misc_feature (148)..(157): n is a, c, g, or t
cttggctttatatatcttgtggaaaggacgaaacaccgtaatttctactaagtgtagatggaggccccggggcccaccataatttctactaagtgtagataatgatggaacgcagtcgcataatttctactaagtgtagatttttttnnnnnnnnnnaagcttggcgtggatccgatatcaactagatcttgagacaaatggcagtattcatccacaattttaaaagaaaaggggggattggggggtacagtgcaggggaaagaatagtagacataatagcaacagacatacaaactaaag

SEQ ID NO: 14389 - DNA, 301 bp, Artificial Sequence
  Fanca.1_Nf1.4
  crRNA array
  misc_feature (148)..(157): n is a, c, g, or t
cttggctttatatatcttgtggaaaggacgaaacaccgtaatttctactaagtgtagatggaggccccggggcccaccataatttctactaagtgtagattgcaaaaccatccaccaagttaatttctactaagtgtagatttttttnnnnnnnnnnaagcttggcgtggatccgatatcaactagatcttgagacaaatggcagtattcatccacaattttaaaagaaaaggggggattggggggtacagtgcaggggaaagaatagtagacataatagcaacagacatacaaactaaag

SEQ ID NO: 14390 - DNA, 301 bp, Artificial Sequence
  Fanca.2_Nf1.1
  crRNA array
  misc_feature (148)..(157): n is a, c, g, or t
cttggctttatatatcttgtggaaaggacgaaacaccgtaatttctactaagtgtagatagagctaccacctagacagctaatttctactaagtgtagattggcgatccggaatcctctgtaatttctactaagtgtagatttttttnnnnnnnnnnaagcttggcgtggatccgatatcaactagatcttgagacaaatggcagtattcatccacaattttaaaagaaaaggggggattggggggtacagtgcaggggaaagaatagtagacataatagcaacagacatacaaactaaag

SEQ ID NO: 14391 - DNA, 301 bp, Artificial Sequence
  Fanca.2_Nf1.2
  crRNA array
  misc_feature (148)..(157): n is a, c, g, or t
cttggctttatatatcttgtggaaaggacgaaacaccgtaatttctactaagtgtagatagagctaccacctagacagctaatttctactaagtgtagatggaaacacaacgctggcctctaatttctactaagtgtagatttttttnnnnnnnnnnaagcttggcgtggatccgatatcaactagatcttgagacaaatggcagtattcatccacaattttaaaagaaaaggggggattggggggtacagtgcaggggaaagaatagtagacataatagcaacagacatacaaactaaag

SEQ ID NO: 14392 - DNA, 301 bp, Artificial Sequence
  Fanca.2_Nf1.3
  crRNA array
  misc_feature (148)..(157): n is a, c, g, or t
cttggctttatatatcttgtggaaaggacgaaacaccgtaatttctactaagtgtagatagagctaccacctagacagctaatttctactaagtgtagataatgatggaacgcagtcgcataatttctactaagtgtagatttttttnnnnnnnnnnaagcttggcgtggatccgatatcaactagatcttgagacaaatggcagtattcatccacaattttaaaagaaaaggggggattggggggtacagtgcaggggaaagaatagtagacataatagcaacagacatacaaactaaag

SEQ ID NO: 14393 - DNA, 301 bp, Artificial Sequence
  Fanca.2_Nf1.4
  crRNA array
  misc_feature (148)..(157): n is a, c, g, or t
cttggctttatatatcttgtggaaaggacgaaacaccgtaatttctactaagtgtagatagagctaccacctagacagctaatttctactaagtgtagattgcaaaaccatccaccaagttaatttctactaagtgtagatttttttnnnnnnnnnnaagcttggcgtggatccgatatcaactagatcttgagacaaatggcagtattcatccacaattttaaaagaaaaggggggattggggggtacagtgcaggggaaagaatagtagacataatagcaacagacatacaaactaaag

SEQ ID NO: 14394 - DNA, 301 bp, Artificial Sequence
  Fanca.3_Nf1.1
  crRNA array
  misc_feature (148)..(157): n is a, c, g, or t
cttggctttatatatcttgtggaaaggacgaaacaccgtaatttctactaagtgtagataccaactgctgtgcctcgggtaatttctactaagtgtagattggcgatccggaatcctctgtaatttctactaagtgtagatttttttnnnnnnnnnnaagcttggcgtggatccgatatcaactagatcttgagacaaatggcagtattcatccacaattttaaaagaaaaggggggattggggggtacagtgcaggggaaagaatagtagacataatagcaacagacatacaaactaaag

SEQ ID NO: 14395 - DNA, 301 bp, Artificial Sequence
  Fanca.3_Nf1.2
  crRNA array
  misc_feature (148)..(157): n is a, c, g, or t
cttggctttatatatcttgtggaaaggacgaaacaccgtaatttctactaagtgtagataccaactgctgtgcctcgggtaatttctactaagtgtagatggaaacacaacgctggcctctaatttctactaagtgtagatttttttnnnnnnnnnnaagcttggcgtggatccgatatcaactagatcttgagacaaatggcagtattcatccacaattttaaaagaaaaggggggattggggggtacagtgcaggggaaagaatagtagacataatagcaacagacatacaaactaaag

SEQ ID NO: 14396 - DNA, 301 bp, Artificial Sequence
  Fanca.3_Nf1.3
  crRNA array
  misc_feature (148)..(157): n is a, c, g, or t
cttggctttatatatcttgtggaaaggacgaaacaccgtaatttctactaagtgtagataccaactgctgtgcctcgggtaatttctactaagtgtagataatgatggaacgcagtcgcataatttctactaagtgtagatttttttnnnnnnnnnnaagcttggcgtggatccgatatcaactagatcttgagacaaatggcagtattcatccacaattttaaaagaaaaggggggattggggggtacagtgcaggggaaagaatagtagacataatagcaacagacatacaaactaaag

SEQ ID NO: 14397 - DNA, 301 bp, Artificial Sequence
  Fanca.3_Nf1.4
  crRNA array
  misc_feature (148)..(157): n is a, c, g, or t
cttggctttatatatcttgtggaaaggacgaaacaccgtaatttctactaagtgtagataccaactgctgtgcctcgggtaatttctactaagtgtagattgcaaaaccatccaccaagttaatttctactaagtgtagatttttttnnnnnnnnnnaagcttggcgtggatccgatatcaactagatcttgagacaaatggcagtattcatccacaattttaaaagaaaaggggggattggggggtacagtgcaggggaaagaatagtagacataatagcaacagacatacaaactaaag

SEQ ID NO: 14398 - DNA, 301 bp, Artificial Sequence
  Fanca.4_Nf1.1
  crRNA array
  misc_feature (148)..(157): n is a, c, g, or t
cttggctttatatatcttgtggaaaggacgaaacaccgtaatttctactaagtgtagatcacccacccctggtgccaagtaatttctactaagtgtagattggcgatccggaatcctctgtaatttctactaagtgtagatttttttnnnnnnnnnnaagcttggcgtggatccgatatcaactagatcttgagacaaatggcagtattcatccacaattttaaaagaaaaggggggattggggggtacagtgcaggggaaagaatagtagacataatagcaacagacatacaaactaaag

SEQ ID NO: 14399 - DNA, 301 bp, Artificial Sequence
  Fanca.4_Nf1.2
  crRNA array
  misc_feature (148)..(157): n is a, c, g, or t
cttggctttatatatcttgtggaaaggacgaaacaccgtaatttctactaagtgtagatcacccacccctggtgccaagtaatttctactaagtgtagatggaaacacaacgctggcctctaatttctactaagtgtagatttttttnnnnnnnnnnaagcttggcgtggatccgatatcaactagatcttgagacaaatggcagtattcatccacaattttaaaagaaaaggggggattggggggtacagtgcaggggaaagaatagtagacataatagcaacagacatacaaactaaag

SEQ ID NO: 14400 - DNA, 301 bp, Artificial Sequence
  Fanca.4_Nf1.3
  crRNA array
  misc_feature (148)..(157): n is a, c, g, or t
cttggctttatatatcttgtggaaaggacgaaacaccgtaatttctactaagtgtagatcacccacccctggtgccaagtaatttctactaagtgtagataatgatggaacgcagtcgcataatttctactaagtgtagatttttttnnnnnnnnnnaagcttggcgtggatccgatatcaactagatcttgagacaaatggcagtattcatccacaattttaaaagaaaaggggggattggggggtacagtgcaggggaaagaatagtagacataatagcaacagacatacaaactaaag

SEQ ID NO: 14401 - DNA, 301 bp, Artificial Sequence
  Fanca.4_Nf1.4
  crRNA array
  misc_feature (148)..(157): n is a, c, g, or t
cttggctttatatatcttgtggaaaggacgaaacaccgtaatttctactaagtgtagatcacccacccctggtgccaagtaatttctactaagtgtagattgcaaaaccatccaccaagttaatttctactaagtgtagatttttttnnnnnnnnnnaagcttggcgtggatccgatatcaactagatcttgagacaaatggcagtattcatccacaattttaaaagaaaaggggggattggggggtacagtgcaggggaaagaatagtagacataatagcaacagacatacaaactaaag

SEQ ID NO: 14402 - DNA, 301 bp, Artificial Sequence
  Fanca.1_Kdm6a.1
  crRNA array
  misc_feature (148)..(157): n is a, c, g, or t
cttggctttatatatcttgtggaaaggacgaaacaccgtaatttctactaagtgtagatggaggccccggggcccaccataatttctactaagtgtagatgctgccgcctctcgcggcagtaatttctactaagtgtagatttttttnnnnnnnnnnaagcttggcgtggatccgatatcaactagatcttgagacaaatggcagtattcatccacaattttaaaagaaaaggggggattggggggtacagtgcaggggaaagaatagtagacataatagcaacagacatacaaactaaag

SEQ ID NO: 14403 - DNA, 301 bp, Artificial Sequence
  Fanca.1_Kdm6a.2
  crRNA array
  misc_feature (148)..(157): n is a, c, g, or t
cttggctttatatatcttgtggaaaggacgaaacaccgtaatttctactaagtgtagatggaggccccggggcccaccataatttctactaagtgtagatgctgcaggtaaggcacgttttaatttctactaagtgtagatttttttnnnnnnnnnnaagcttggcgtggatccgatatcaactagatcttgagacaaatggcagtattcatccacaattttaaaagaaaaggggggattggggggtacagtgcaggggaaagaatagtagacataatagcaacagacatacaaactaaag

SEQ ID NO: 14404 - DNA, 301 bp, Artificial Sequence
  Fanca.1_Kdm6a.3
  crRNA array
  misc_feature (148)..(157): n is a, c, g, or t
cttggctttatatatcttgtggaaaggacgaaacaccgtaatttctactaagtgtagatggaggccccggggcccaccataatttctactaagtgtagattgctggtgccggggaagttttaatttctactaagtgtagatttttttnnnnnnnnnnaagcttggcgtggatccgatatcaactagatcttgagacaaatggcagtattcatccacaattttaaaagaaaaggggggattggggggtacagtgcaggggaaagaatagtagacataatagcaacagacatacaaactaaag

SEQ ID NO: 14405 - DNA, 301 bp, Artificial Sequence
  Fanca.1_Kdm6a.4
  crRNA array
  misc_feature (148)..(157): n is a, c, g, or t
cttggctttatatatcttgtggaaaggacgaaacaccgtaatttctactaagtgtagatggaggccccggggcccaccataatttctactaagtgtagattgtctcctacgaatcccccctaatttctactaagtgtagatttttttnnnnnnnnnnaagcttggcgtggatccgatatcaactagatcttgagacaaatggcagtattcatccacaattttaaaagaaaaggggggattggggggtacagtgcaggggaaagaatagtagacataatagcaacagacatacaaactaaag

SEQ ID NO: 14406 - DNA, 301 bp, Artificial Sequence
  Fanca.2_Kdm6a.1
  crRNA array
  misc_feature (148)..(157): n is a, c, g, or t
cttggctttatatatcttgtggaaaggacgaaacaccgtaatttctactaagtgtagatagagctaccacctagacagctaatttctactaagtgtagatgctgccgcctctcgcggcagtaatttctactaagtgtagatttttttnnnnnnnnnnaagcttggcgtggatccgatatcaactagatcttgagacaaatggcagtattcatccacaattttaaaagaaaaggggggattggggggtacagtgcaggggaaagaatagtagacataatagcaacagacatacaaactaaag

SEQ ID NO: 14407 - DNA, 301 bp, Artificial Sequence
  Fanca.2_Kdm6a.2
  crRNA array
  misc_feature (148)..(157): n is a, c, g, or t
cttggctttatatatcttgtggaaaggacgaaacaccgtaatttctactaagtgtagatagagctaccacctagacagctaatttctactaagtgtagatgctgcaggtaaggcacgttttaatttctactaagtgtagatttttttnnnnnnnnnnaagcttggcgtggatccgatatcaactagatcttgagacaaatggcagtattcatccacaattttaaaagaaaaggggggattggggggtacagtgcaggggaaagaatagtagacataatagcaacagacatacaaactaaag

SEQ ID NO: 14408 - DNA, 301 bp, Artificial Sequence
  Fanca.2_Kdm6a.3
  crRNA array
  misc_feature (148)..(157): n is a, c, g, or t
cttggctttatatatcttgtggaaaggacgaaacaccgtaatttctactaagtgtagatagagctaccacctagacagctaatttctactaagtgtagattgctggtgccggggaagttttaatttctactaagtgtagatttttttnnnnnnnnnnaagcttggcgtggatccgatatcaactagatcttgagacaaatggcagtattcatccacaattttaaaagaaaaggggggattggggggtacagtgcaggggaaagaatagtagacataatagcaacagacatacaaactaaag

SEQ ID NO: 14409 - DNA, 301 bp, Artificial Sequence
  Fanca.2_Kdm6a.4
  crRNA array
  misc_feature (148)..(157): n is a, c, g, or t
cttggctttatatatcttgtggaaaggacgaaacaccgtaatttctactaagtgtagatagagctaccacctagacagctaatttctactaagtgtagattgtctcctacgaatcccccctaatttctactaagtgtagatttttttnnnnnnnnnnaagcttggcgtggatccgatatcaactagatcttgagacaaatggcagtattcatccacaattttaaaagaaaaggggggattggggggtacagtgcaggggaaagaatagtagacataatagcaacagacatacaaactaaag

SEQ ID NO: 14410 - DNA, 301 bp, Artificial Sequence
  Fanca.3_Kdm6a.1
  crRNA array
  misc_feature (148)..(157): n is a, c, g, or t
cttggctttatatatcttgtggaaaggacgaaacaccgtaatttctactaagtgtagataccaactgctgtgcctcgggtaatttctactaagtgtagatgctgccgcctctcgcggcagtaatttctactaagtgtagatttttttnnnnnnnnnnaagcttggcgtggatccgatatcaactagatcttgagacaaatggcagtattcatccacaattttaaaagaaaaggggggattggggggtacagtgcaggggaaagaatagtagacataatagcaacagacatacaaactaaag

SEQ ID NO: 14411 - DNA, 301 bp, Artificial Sequence
  Fanca.3_Kdm6a.2
  crRNA array
  misc_feature (148)..(157): n is a, c, g, or t
cttggctttatatatcttgtggaaaggacgaaacaccgtaatttctactaagtgtagataccaactgctgtgcctcgggtaatttctactaagtgtagatgctgcaggtaaggcacgttttaatttctactaagtgtagatttttttnnnnnnnnnnaagcttggcgtggatccgatatcaactagatcttgagacaaatggcagtattcatccacaattttaaaagaaaaggggggattggggggtacagtgcaggggaaagaatagtagacataatagcaacagacatacaaactaaag

SEQ ID NO: 14412 - DNA, 301 bp, Artificial Sequence
  Fanca.3_Kdm6a.3
  crRNA array
  misc_feature (148)..(157): n is a, c, g, or t
cttggctttatatatcttgtggaaaggacgaaacaccgtaatttctactaagtgtagataccaactgctgtgcctcgggtaatttctactaagtgtagattgctggtgccggggaagttttaatttctactaagtgtagatttttttnnnnnnnnnnaagcttggcgtggatccgatatcaactagatcttgagacaaatggcagtattcatccacaattttaaaagaaaaggggggattggggggtacagtgcaggggaaagaatagtagacataatagcaacagacatacaaactaaag

SEQ ID NO: 14413 - DNA, 301 bp, Artificial Sequence
  Fanca.3_Kdm6a.4
  crRNA array
  misc_feature (148)..(157): n is a, c, g, or t
cttggctttatatatcttgtggaaaggacgaaacaccgtaatttctactaagtgtagataccaactgctgtgcctcgggtaatttctactaagtgtagattgtctcctacgaatcccccctaatttctactaagtgtagatttttttnnnnnnnnnnaagcttggcgtggatccgatatcaactagatcttgagacaaatggcagtattcatccacaattttaaaagaaaaggggggattggggggtacagtgcaggggaaagaatagtagacataatagcaacagacatacaaactaaag

SEQ ID NO: 14414 - DNA, 301 bp, Artificial Sequence
  Fanca.4_Kdm6a.1
  crRNA array
  misc_feature (148)..(157): n is a, c, g, or t
cttggctttatatatcttgtggaaaggacgaaacaccgtaatttctactaagtgtagatcacccacccctggtgccaagtaatttctactaagtgtagatgctgccgcctctcgcggcagtaatttctactaagtgtagatttttttnnnnnnnnnnaagcttggcgtggatccgatatcaactagatcttgagacaaatggcagtattcatccacaattttaaaagaaaaggggggattggggggtacagtgcaggggaaagaatagtagacataatagcaacagacatacaaactaaag

SEQ ID NO: 14415 - DNA, 301 bp, Artificial Sequence
  Fanca.4_Kdm6a.2
  crRNA array
  misc_feature (148)..(157): n is a, c, g, or t
cttggctttatatatcttgtggaaaggacgaaacaccgtaatttctactaagtgtagatcacccacccctggtgccaagtaatttctactaagtgtagatgctgcaggtaaggcacgttttaatttctactaagtgtagatttttttnnnnnnnnnnaagcttggcgtggatccgatatcaactagatcttgagacaaatggcagtattcatccacaattttaaaagaaaaggggggattggggggtacagtgcaggggaaagaatagtagacataatagcaacagacatacaaactaaag

SEQ ID NO: 14416 - DNA, 301 bp, Artificial Sequence
  Fanca.4_Kdm6a.3
  crRNA array
  misc_feature (148)..(157): n is a, c, g, or t
cttggctttatatatcttgtggaaaggacgaaacaccgtaatttctactaagtgtagatcacccacccctggtgccaagtaatttctactaagtgtagattgctggtgccggggaagttttaatttctactaagtgtagatttttttnnnnnnnnnnaagcttggcgtggatccgatatcaactagatcttgagacaaatggcagtattcatccacaattttaaaagaaaaggggggattggggggtacagtgcaggggaaagaatagtagacataatagcaacagacatacaaactaaag

SEQ ID NO: 14417 - DNA, 301 bp, Artificial Sequence
  Fanca.4_Kdm6a.4
  crRNA array
  misc_feature (148)..(157): n is a, c, g, or t
cttggctttatatatcttgtggaaaggacgaaacaccgtaatttctactaagtgtagatcacccacccctggtgccaagtaatttctactaagtgtagattgtctcctacgaatcccccctaatttctactaagtgtagatttttttnnnnnnnnnnaagcttggcgtggatccgatatcaactagatcttgagacaaatggcagtattcatccacaattttaaaagaaaaggggggattggggggtacagtgcaggggaaagaatagtagacataatagcaacagacatacaaactaaag

SEQ ID NO: 14418 - DNA, 301 bp, Artificial Sequence
  Fanca.1_Ercc5.1
  crRNA array
  misc_feature (148)..(157): n is a, c, g, or t
cttggctttatatatcttgtggaaaggacgaaacaccgtaatttctactaagtgtagatggaggccccggggcccaccataatttctactaagtgtagatacggcacgagcaagagacactaatttctactaagtgtagatttttttnnnnnnnnnnaagcttggcgtggatccgatatcaactagatcttgagacaaatggcagtattcatccacaattttaaaagaaaaggggggattggggggtacagtgcaggggaaagaatagtagacataatagcaacagacatacaaactaaag

SEQ ID NO: 14419 - DNA, 301 bp, Artificial Sequence
  Fanca.1_Ercc5.2
  crRNA array
  misc_feature (148)..(157): n is a, c, g, or t
cttggctttatatatcttgtggaaaggacgaaacaccgtaatttctactaagtgtagatggaggccccggggcccaccataatttctactaagtgtagatgagtatcacatcggtgactctaatttctactaagtgtagatttttttnnnnnnnnnnaagcttggcgtggatccgatatcaactagatcttgagacaaatggcagtattcatccacaattttaaaagaaaaggggggattggggggtacagtgcaggggaaagaatagtagacataatagcaacagacatacaaactaaag

SEQ ID NO: 14420 - DNA, 301 bp, Artificial Sequence
  Fanca.1_Ercc5.3
  crRNA array
  misc_feature (148)..(157): n is a, c, g, or t
cttggctttatatatcttgtggaaaggacgaaacaccgtaatttctactaagtgtagatggaggccccggggcccaccataatttctactaagtgtagatggagtgggtccaggcctcgttaatttctactaagtgtagatttttttnnnnnnnnnnaagcttggcgtggatccgatatcaactagatcttgagacaaatggcagtattcatccacaattttaaaagaaaaggggggattggggggtacagtgcaggggaaagaatagtagacataatagcaacagacatacaaactaaag

SEQ ID NO: 14421 - DNA, 301 bp, Artificial Sequence
  Fanca.1_Ercc5.4
  crRNA array
  misc_feature (148)..(157): n is a, c, g, or t
cttggctttatatatcttgtggaaaggacgaaacaccgtaatttctactaagtgtagatggaggccccggggcccaccataatttctactaagtgtagatcagagccggtggaataatgttaatttctactaagtgtagatttttttnnnnnnnnnnaagcttggcgtggatccgatatcaactagatcttgagacaaatggcagtattcatccacaattttaaaagaaaaggggggattggggggtacagtgcaggggaaagaatagtagacataatagcaacagacatacaaactaaag

SEQ ID NO: 14422 - DNA, 301 bp, Artificial Sequence
  Fanca.2_Ercc5.1
  crRNA array
  misc_feature (148)..(157): n is a, c, g, or t
cttggctttatatatcttgtggaaaggacgaaacaccgtaatttctactaagtgtagatagagctaccacctagacagctaatttctactaagtgtagatacggcacgagcaagagacactaatttctactaagtgtagatttttttnnnnnnnnnnaagcttggcgtggatccgatatcaactagatcttgagacaaatggcagtattcatccacaattttaaaagaaaaggggggattggggggtacagtgcaggggaaagaatagtagacataatagcaacagacatacaaactaaag

SEQ ID NO: 14423 - DNA, 301 bp, Artificial Sequence
  Fanca.2_Ercc5.2
  crRNA array
  misc_feature (148)..(157): n is a, c, g, or t
cttggctttatatatcttgtggaaaggacgaaacaccgtaatttctactaagtgtagatagagctaccacctagacagctaatttctactaagtgtagatgagtatcacatcggtgactctaatttctactaagtgtagatttttttnnnnnnnnnnaagcttggcgtggatccgatatcaactagatcttgagacaaatggcagtattcatccacaattttaaaagaaaaggggggattggggggtacagtgcaggggaaagaatagtagacataatagcaacagacatacaaactaaag

SEQ ID NO: 14424 - DNA, 301 bp, Artificial Sequence
  Fanca.2_Ercc5.3
  crRNA array
  misc_feature (148)..(157): n is a, c, g, or t
cttggctttatatatcttgtggaaaggacgaaacaccgtaatttctactaagtgtagatagagctaccacctagacagctaatttctactaagtgtagatggagtgggtccaggcctcgttaatttctactaagtgtagatttttttnnnnnnnnnnaagcttggcgtggatccgatatcaactagatcttgagacaaatggcagtattcatccacaattttaaaagaaaaggggggattggggggtacagtgcaggggaaagaatagtagacataatagcaacagacatacaaactaaag

SEQ ID NO: 14425 - DNA, 301 bp, Artificial Sequence
  Fanca.2_Ercc5.4
  crRNA array
  misc_feature (148)..(157): n is a, c, g, or t
cttggctttatatatcttgtggaaaggacgaaacaccgtaatttctactaagtgtagatagagctaccacctagacagctaatttctactaagtgtagatcagagccggtggaataatgttaatttctactaagtgtagatttttttnnnnnnnnnnaagcttggcgtggatccgatatcaactagatcttgagacaaatggcagtattcatccacaattttaaaagaaaaggggggattggggggtacagtgcaggggaaagaatagtagacataatagcaacagacatacaaactaaag

SEQ ID NO: 14426 - DNA, 301 bp, Artificial Sequence
  Fanca.3_Ercc5.1
  crRNA array
  misc_feature (148)..(157): n is a, c, g, or t
cttggctttatatatcttgtggaaaggacgaaacaccgtaatttctactaagtgtagataccaactgctgtgcctcgggtaatttctactaagtgtagatacggcacgagcaagagacactaatttctactaagtgtagatttttttnnnnnnnnnnaagcttggcgtggatccgatatcaactagatcttgagacaaatggcagtattcatccacaattttaaaagaaaaggggggattggggggtacagtgcaggggaaagaatagtagacataatagcaacagacatacaaactaaag

SEQ ID NO: 14427 - DNA, 301 bp, Artificial Sequence
  Fanca.3_Ercc5.2
  crRNA array
  misc_feature (148)..(157): n is a, c, g, or t
cttggctttatatatcttgtggaaaggacgaaacaccgtaatttctactaagtgtagataccaactgctgtgcctcgggtaatttctactaagtgtagatgagtatcacatcggtgactctaatttctactaagtgtagatttttttnnnnnnnnnnaagcttggcgtggatccgatatcaactagatcttgagacaaatggcagtattcatccacaattttaaaagaaaaggggggattggggggtacagtgcaggggaaagaatagtagacataatagcaacagacatacaaactaaag

SEQ ID NO: 14428 - DNA, 301 bp, Artificial Sequence
  Fanca.3_Ercc5.3
  crRNA array
  misc_feature (148)..(157): n is a, c, g, or t
cttggctttatatatcttgtggaaaggacgaaacaccgtaatttctactaagtgtagataccaactgctgtgcctcgggtaatttctactaagtgtagatggagtgggtccaggcctcgttaatttctactaagtgtagatttttttnnnnnnnnnnaagcttggcgtggatccgatatcaactagatcttgagacaaatggcagtattcatccacaattttaaaagaaaaggggggattggggggtacagtgcaggggaaagaatagtagacataatagcaacagacatacaaactaaag

SEQ ID NO: 14429 - DNA, 301 bp, Artificial Sequence
  Fanca.3_Ercc5.4
  crRNA array
  misc_feature (148)..(157): n is a, c, g, or t
cttggctttatatatcttgtggaaaggacgaaacaccgtaatttctactaagtgtagataccaactgctgtgcctcgggtaatttctactaagtgtagatcagagccggtggaataatgttaatttctactaagtgtagatttttttnnnnnnnnnnaagcttggcgtggatccgatatcaactagatcttgagacaaatggcagtattcatccacaattttaaaagaaaaggggggattggggggtacagtgcaggggaaagaatagtagacataatagcaacagacatacaaactaaag

SEQ ID NO: 14430 - DNA, 301 bp, Artificial Sequence
  Fanca.4_Ercc5.1
  crRNA array
  misc_feature (148)..(157): n is a, c, g, or t
cttggctttatatatcttgtggaaaggacgaaacaccgtaatttctactaagtgtagatcacccacccctggtgccaagtaatttctactaagtgtagatacggcacgagcaagagacactaatttctactaagtgtagatttttttnnnnnnnnnnaagcttggcgtggatccgatatcaactagatcttgagacaaatggcagtattcatccacaattttaaaagaaaaggggggattggggggtacagtgcaggggaaagaatagtagacataatagcaacagacatacaaactaaag

SEQ ID NO: 14431 - DNA, 301 bp, Artificial Sequence
  Fanca.4_Ercc5.2
  crRNA array
  misc_feature (148)..(157): n is a, c, g, or t
cttggctttatatatcttgtggaaaggacgaaacaccgtaatttctactaagtgtagatcacccacccctggtgccaagtaatttctactaagtgtagatgagtatcacatcggtgactctaatttctactaagtgtagatttttttnnnnnnnnnnaagcttggcgtggatccgatatcaactagatcttgagacaaatggcagtattcatccacaattttaaaagaaaaggggggattggggggtacagtgcaggggaaagaatagtagacataatagcaacagacatacaaactaaag

SEQ ID NO: 14432 - DNA, 301 bp, Artificial Sequence
  Fanca.4_Ercc5.3
  crRNA array
  misc_feature (148)..(157): n is a, c, g, or t
cttggctttatatatcttgtggaaaggacgaaacaccgtaatttctactaagtgtagatcacccacccctggtgccaagtaatttctactaagtgtagatggagtgggtccaggcctcgttaatttctactaagtgtagatttttttnnnnnnnnnnaagcttggcgtggatccgatatcaactagatcttgagacaaatggcagtattcatccacaattttaaaagaaaaggggggattggggggtacagtgcaggggaaagaatagtagacataatagcaacagacatacaaactaaag

SEQ ID NO: 14433 - DNA, 301 bp, Artificial Sequence
  Fanca.4_Ercc5.4
  crRNA array
  misc_feature (148)..(157): n is a, c, g, or t
cttggctttatatatcttgtggaaaggacgaaacaccgtaatttctactaagtgtagatcacccacccctggtgccaagtaatttctactaagtgtagatcagagccggtggaataatgttaatttctactaagtgtagatttttttnnnnnnnnnnaagcttggcgtggatccgatatcaactagatcttgagacaaatggcagtattcatccacaattttaaaagaaaaggggggattggggggtacagtgcaggggaaagaatagtagacataatagcaacagacatacaaactaaag

SEQ ID NO: 14434 - DNA, 301 bp, Artificial Sequence
  Fanca.1_Arid1b.1
  crRNA array
  misc_feature (148)..(157): n is a, c, g, or t
cttggctttatatatcttgtggaaaggacgaaacaccgtaatttctactaagtgtagatggaggccccggggcccaccataatttctactaagtgtagatgctgctgctgtagtgcgtggtaatttctactaagtgtagatttttttnnnnnnnnnnaagcttggcgtggatccgatatcaactagatcttgagacaaatggcagtattcatccacaattttaaaagaaaaggggggattggggggtacagtgcaggggaaagaatagtagacataatagcaacagacatacaaactaaag

SEQ ID NO: 14435 - DNA, 301 bp, Artificial Sequence
  Fanca.1_Arid1b.2
  crRNA array
  misc_feature (148)..(157): n is a, c, g, or t
cttggctttatatatcttgtggaaaggacgaaacaccgtaatttctactaagtgtagatggaggccccggggcccaccataatttctactaagtgtagatagtgcaaaactgagcgcgggtaatttctactaagtgtagatttttttnnnnnnnnnnaagcttggcgtggatccgatatcaactagatcttgagacaaatggcagtattcatccacaattttaaaagaaaaggggggattggggggtacagtgcaggggaaagaatagtagacataatagcaacagacatacaaactaaag

SEQ ID NO: 14436 - DNA, 301 bp, Artificial Sequence
  Fanca.1_Arid1b.3
  crRNA array
  misc_feature (148)..(157): n is a, c, g, or t
cttggctttatatatcttgtggaaaggacgaaacaccgtaatttctactaagtgtagatggaggccccggggcccaccataatttctactaagtgtagatcactcaaaggcgaacaggtataatttctactaagtgtagatttttttnnnnnnnnnnaagcttggcgtggatccgatatcaactagatcttgagacaaatggcagtattcatccacaattttaaaagaaaaggggggattggggggtacagtgcaggggaaagaatagtagacataatagcaacagacatacaaactaaag

SEQ ID NO: 14437 - DNA, 301 bp, Artificial Sequence
  Fanca.1_Arid1b.4
  crRNA array
  misc_feature (148)..(157): n is a, c, g, or t
cttggctttatatatcttgtggaaaggacgaaacaccgtaatttctactaagtgtagatggaggccccggggcccaccataatttctactaagtgtagatctcctggctccgtagaagcataatttctactaagtgtagatttttttnnnnnnnnnnaagcttggcgtggatccgatatcaactagatcttgagacaaatggcagtattcatccacaattttaaaagaaaaggggggattggggggtacagtgcaggggaaagaatagtagacataatagcaacagacatacaaactaaag

SEQ ID NO: 14438 - DNA, 301 bp, Artificial Sequence
  Fanca.2_Arid1b.1
  crRNA array
  misc_feature (148)..(157): n is a, c, g, or t
cttggctttatatatcttgtggaaaggacgaaacaccgtaatttctactaagtgtagatagagctaccacctagacagctaatttctactaagtgtagatgctgctgctgtagtgcgtggtaatttctactaagtgtagatttttttnnnnnnnnnnaagcttggcgtggatccgatatcaactagatcttgagacaaatggcagtattcatccacaattttaaaagaaaaggggggattggggggtacagtgcaggggaaagaatagtagacataatagcaacagacatacaaactaaag

SEQ ID NO: 14439 - DNA, 301 bp, Artificial Sequence
  Fanca.2_Arid1b.2
  crRNA array
  misc_feature (148)..(157): n is a, c, g, or t
cttggctttatatatcttgtggaaaggacgaaacaccgtaatttctactaagtgtagatagagctaccacctagacagctaatttctactaagtgtagatagtgcaaaactgagcgcgggtaatttctactaagtgtagatttttttnnnnnnnnnnaagcttggcgtggatccgatatcaactagatcttgagacaaatggcagtattcatccacaattttaaaagaaaaggggggattggggggtacagtgcaggggaaagaatagtagacataatagcaacagacatacaaactaaag

SEQ ID NO: 14440 - DNA, 301 bp, Artificial Sequence
  Fanca.2_Arid1b.3
  crRNA array
  misc_feature (148)..(157): n is a, c, g, or t
cttggctttatatatcttgtggaaaggacgaaacaccgtaatttctactaagtgtagatagagctaccacctagacagctaatttctactaagtgtagatcactcaaaggcgaacaggtataatttctactaagtgtagatttttttnnnnnnnnnnaagcttggcgtggatccgatatcaactagatcttgagacaaatggcagtattcatccacaattttaaaagaaaaggggggattggggggtacagtgcaggggaaagaatagtagacataatagcaacagacatacaaactaaag

SEQ ID NO: 14441 - DNA, 301 bp, Artificial Sequence
  Fanca.2_Arid1b.4
  crRNA array
  misc_feature (148)..(157): n is a, c, g, or t
cttggctttatatatcttgtggaaaggacgaaacaccgtaatttctactaagtgtagatagagctaccacctagacagctaatttctactaagtgtagatctcctggctccgtagaagcataatttctactaagtgtagatttttttnnnnnnnnnnaagcttggcgtggatccgatatcaactagatcttgagacaaatggcagtattcatccacaattttaaaagaaaaggggggattggggggtacagtgcaggggaaagaatagtagacataatagcaacagacatacaaactaaag

SEQ ID NO: 14442 - DNA, 301 bp, Artificial Sequence
  Fanca.3_Arid1b.1
  crRNA array
  misc_feature (148)..(157): n is a, c, g, or t
cttggctttatatatcttgtggaaaggacgaaacaccgtaatttctactaagtgtagataccaactgctgtgcctcgggtaatttctactaagtgtagatgctgctgctgtagtgcgtggtaatttctactaagtgtagatttttttnnnnnnnnnnaagcttggcgtggatccgatatcaactagatcttgagacaaatggcagtattcatccacaattttaaaagaaaaggggggattggggggtacagtgcaggggaaagaatagtagacataatagcaacagacatacaaactaaag

SEQ ID NO: 14443 - DNA, 301 bp, Artificial Sequence
  Fanca.3_Arid1b.2
  crRNA array
  misc_feature (148)..(157): n is a, c, g, or t
cttggctttatatatcttgtggaaaggacgaaacaccgtaatttctactaagtgtagataccaactgctgtgcctcgggtaatttctactaagtgtagatagtgcaaaactgagcgcgggtaatttctactaagtgtagatttttttnnnnnnnnnnaagcttggcgtggatccgatatcaactagatcttgagacaaatggcagtattcatccacaattttaaaagaaaaggggggattggggggtacagtgcaggggaaagaatagtagacataatagcaacagacatacaaactaaag

SEQ ID NO: 14444 - DNA, 301 bp, Artificial Sequence
  Fanca.3_Arid1b.3
  crRNA array
  misc_feature (148)..(157): n is a, c, g, or t
cttggctttatatatcttgtggaaaggacgaaacaccgtaatttctactaagtgtagataccaactgctgtgcctcgggtaatttctactaagtgtagatcactcaaaggcgaacaggtataatttctactaagtgtagatttttttnnnnnnnnnnaagcttggcgtggatccgatatcaactagatcttgagacaaatggcagtattcatccacaattttaaaagaaaaggggggattggggggtacagtgcaggggaaagaatagtagacataatagcaacagacatacaaactaaag

SEQ ID NO: 14445 - DNA, 301 bp, Artificial Sequence
  Fanca.3_Arid1b.4
  crRNA array
  misc_feature (148)..(157): n is a, c, g, or t
cttggctttatatatcttgtggaaaggacgaaacaccgtaatttctactaagtgtagataccaactgctgtgcctcgggtaatttctactaagtgtagatctcctggctccgtagaagcataatttctactaagtgtagatttttttnnnnnnnnnnaagcttggcgtggatccgatatcaactagatcttgagacaaatggcagtattcatccacaattttaaaagaaaaggggggattggggggtacagtgcaggggaaagaatagtagacataatagcaacagacatacaaactaaag

SEQ ID NO: 14446 - DNA, 301 bp, Artificial Sequence
  Fanca.4_Arid1b.1
  crRNA array
  misc_feature (148)..(157): n is a, c, g, or t
cttggctttatatatcttgtggaaaggacgaaacaccgtaatttctactaagtgtagatcacccacccctggtgccaagtaatttctactaagtgtagatgctgctgctgtagtgcgtggtaatttctactaagtgtagatttttttnnnnnnnnnnaagcttggcgtggatccgatatcaactagatcttgagacaaatggcagtattcatccacaattttaaaagaaaaggggggattggggggtacagtgcaggggaaagaatagtagacataatagcaacagacatacaaactaaag

SEQ ID NO: 14447 - DNA, 301 bp, Artificial Sequence
  Fanca.4_Arid1b.2
  crRNA array
  misc_feature (148)..(157): n is a, c, g, or t
cttggctttatatatcttgtggaaaggacgaaacaccgtaatttctactaagtgtagatcacccacccctggtgccaagtaatttctactaagtgtagatagtgcaaaactgagcgcgggtaatttctactaagtgtagatttttttnnnnnnnnnnaagcttggcgtggatccgatatcaactagatcttgagacaaatggcagtattcatccacaattttaaaagaaaaggggggattggggggtacagtgcaggggaaagaatagtagacataatagcaacagacatacaaactaaag

SEQ ID NO: 14448 - DNA, 301 bp, Artificial Sequence
  Fanca.4_Arid1b.3
  crRNA array
  misc_feature (148)..(157): n is a, c, g, or t
cttggctttatatatcttgtggaaaggacgaaacaccgtaatttctactaagtgtagatcacccacccctggtgccaagtaatttctactaagtgtagatcactcaaaggcgaacaggtataatttctactaagtgtagatttttttnnnnnnnnnnaagcttggcgtggatccgatatcaactagatcttgagacaaatggcagtattcatccacaattttaaaagaaaaggggggattggggggtacagtgcaggggaaagaatagtagacataatagcaacagacatacaaactaaag

SEQ ID NO: 14449 - DNA, 301 bp, Artificial Sequence
  Fanca.4_Arid1b.4
  crRNA array
  misc_feature (148)..(157): n is a, c, g, or t
cttggctttatatatcttgtggaaaggacgaaacaccgtaatttctactaagtgtagatcacccacccctggtgccaagtaatttctactaagtgtagatctcctggctccgtagaagcataatttctactaagtgtagatttttttnnnnnnnnnnaagcttggcgtggatccgatatcaactagatcttgagacaaatggcagtattcatccacaattttaaaagaaaaggggggattggggggtacagtgcaggggaaagaatagtagacataatagcaacagacatacaaactaaag

SEQ ID NO: 14450 - DNA, 301 bp, Artificial Sequence
  Fanca.1_Rb1.1
  crRNA array
  misc_feature (148)..(157): n is a, c, g, or t
cttggctttatatatcttgtggaaaggacgaaacaccgtaatttctactaagtgtagatggaggccccggggcccaccataatttctactaagtgtagattctgacatgatcgggtaccttaatttctactaagtgtagatttttttnnnnnnnnnnaagcttggcgtggatccgatatcaactagatcttgagacaaatggcagtattcatccacaattttaaaagaaaaggggggattggggggtacagtgcaggggaaagaatagtagacataatagcaacagacatacaaactaaag

SEQ ID NO: 14451 - DNA, 301 bp, Artificial Sequence
  Fanca.1_Rb1.2
  crRNA array
  misc_feature (148)..(157): n is a, c, g, or t
cttggctttatatatcttgtggaaaggacgaaacaccgtaatttctactaagtgtagatggaggccccggggcccaccataatttctactaagtgtagatgtctctgcatgaaaacggagtaatttctactaagtgtagatttttttnnnnnnnnnnaagcttggcgtggatccgatatcaactagatcttgagacaaatggcagtattcatccacaattttaaaagaaaaggggggattggggggtacagtgcaggggaaagaatagtagacataatagcaacagacatacaaactaaag

SEQ ID NO: 14452 - DNA, 301 bp, Artificial Sequence
  Fanca.1_Rb1.3
  crRNA array
  misc_feature (148)..(157): n is a, c, g, or t
cttggctttatatatcttgtggaaaggacgaaacaccgtaatttctactaagtgtagatggaggccccggggcccaccataatttctactaagtgtagatagccaatctggtctaataactaatttctactaagtgtagatttttttnnnnnnnnnnaagcttggcgtggatccgatatcaactagatcttgagacaaatggcagtattcatccacaattttaaaagaaaaggggggattggggggtacagtgcaggggaaagaatagtagacataatagcaacagacatacaaactaaag

SEQ ID NO: 14453 - DNA, 301 bp, Artificial Sequence
  Fanca.1_Rb1.4
  crRNA array
  misc_feature (148)..(157): n is a, c, g, or t
cttggctttatatatcttgtggaaaggacgaaacaccgtaatttctactaagtgtagatggaggccccggggcccaccataatttctactaagtgtagattgtagctcagtaaaagtgaataatttctactaagtgtagatttttttnnnnnnnnnnaagcttggcgtggatccgatatcaactagatcttgagacaaatggcagtattcatccacaattttaaaagaaaaggggggattggggggtacagtgcaggggaaagaatagtagacataatagcaacagacatacaaactaaag

SEQ ID NO: 14454 - DNA, 301 bp, Artificial Sequence
  Fanca.2_Rb1.1
  crRNA array
  misc_feature (148)..(157): n is a, c, g, or t
cttggctttatatatcttgtggaaaggacgaaacaccgtaatttctactaagtgtagatagagctaccacctagacagctaatttctactaagtgtagattctgacatgatcgggtaccttaatttctactaagtgtagatttttttnnnnnnnnnnaagcttggcgtggatccgatatcaactagatcttgagacaaatggcagtattcatccacaattttaaaagaaaaggggggattggggggtacagtgcaggggaaagaatagtagacataatagcaacagacatacaaactaaag

SEQ ID NO: 14455 - DNA, 301 bp, Artificial Sequence
  Fanca.2_Rb1.2
  crRNA array
  misc_feature (148)..(157): n is a, c, g, or t
cttggctttatatatcttgtggaaaggacgaaacaccgtaatttctactaagtgtagatagagctaccacctagacagctaatttctactaagtgtagatgtctctgcatgaaaacggagtaatttctactaagtgtagatttttttnnnnnnnnnnaagcttggcgtggatccgatatcaactagatcttgagacaaatggcagtattcatccacaattttaaaagaaaaggggggattggggggtacagtgcaggggaaagaatagtagacataatagcaacagacatacaaactaaag

SEQ ID NO: 14456 - DNA, 301 bp, Artificial Sequence
  Fanca.2_Rb1.3
  crRNA array
  misc_feature (148)..(157): n is a, c, g, or t
cttggctttatatatcttgtggaaaggacgaaacaccgtaatttctactaagtgtagatagagctaccacctagacagctaatttctactaagtgtagatagccaatctggtctaataactaatttctactaagtgtagatttttttnnnnnnnnnnaagcttggcgtggatccgatatcaactagatcttgagacaaatggcagtattcatccacaattttaaaagaaaaggggggattggggggtacagtgcaggggaaagaatagtagacataatagcaacagacatacaaactaaag

SEQ ID NO: 14457 - DNA, 301 bp, Artificial Sequence
  Fanca.2_Rb1.4
  crRNA array
  misc_feature (148)..(157): n is a, c, g, or t
cttggctttatatatcttgtggaaaggacgaaacaccgtaatttctactaagtgtagatagagctaccacctagacagctaatttctactaagtgtagattgtagctcagtaaaagtgaataatttctactaagtgtagatttttttnnnnnnnnnnaagcttggcgtggatccgatatcaactagatcttgagacaaatggcagtattcatccacaattttaaaagaaaaggggggattggggggtacagtgcaggggaaagaatagtagacataatagcaacagacatacaaactaaag

SEQ ID NO: 14458 - DNA, 301 bp, Artificial Sequence
  Fanca.3_Rb1.1
  crRNA array
  misc_feature (148)..(157): n is a, c, g, or t
cttggctttatatatcttgtggaaaggacgaaacaccgtaatttctactaagtgtagataccaactgctgtgcctcgggtaatttctactaagtgtagattctgacatgatcgggtaccttaatttctactaagtgtagatttttttnnnnnnnnnnaagcttggcgtggatccgatatcaactagatcttgagacaaatggcagtattcatccacaattttaaaagaaaaggggggattggggggtacagtgcaggggaaagaatagtagacataatagcaacagacatacaaactaaag

SEQ ID NO: 14459 - DNA, 301 bp, Artificial Sequence
  Fanca.3_Rb1.2
  crRNA array
  misc_feature (148)..(157): n is a, c, g, or t
cttggctttatatatcttgtggaaaggacgaaacaccgtaatttctactaagtgtagataccaactgctgtgcctcgggtaatttctactaagtgtagatgtctctgcatgaaaacggagtaatttctactaagtgtagatttttttnnnnnnnnnnaagcttggcgtggatccgatatcaactagatcttgagacaaatggcagtattcatccacaattttaaaagaaaaggggggattggggggtacagtgcaggggaaagaatagtagacataatagcaacagacatacaaactaaag

SEQ ID NO: 14460 - DNA, 301 bp, Artificial Sequence
  Fanca.3_Rb1.3
  crRNA array
  misc_feature (148)..(157): n is a, c, g, or t
cttggctttatatatcttgtggaaaggacgaaacaccgtaatttctactaagtgtagataccaactgctgtgcctcgggtaatttctactaagtgtagatagccaatctggtctaataactaatttctactaagtgtagatttttttnnnnnnnnnnaagcttggcgtggatccgatatcaactagatcttgagacaaatggcagtattcatccacaattttaaaagaaaaggggggattggggggtacagtgcaggggaaagaatagtagacataatagcaacagacatacaaactaaag

SEQ ID NO: 14461 - DNA, 301 bp, Artificial Sequence
  Fanca.3_Rb1.4
  crRNA array
  misc_feature (148)..(157): n is a, c, g, or t
cttggctttatatatcttgtggaaaggacgaaacaccgtaatttctactaagtgtagataccaactgctgtgcctcgggtaatttctactaagtgtagattgtagctcagtaaaagtgaataatttctactaagtgtagatttttttnnnnnnnnnnaagcttggcgtggatccgatatcaactagatcttgagacaaatggcagtattcatccacaattttaaaagaaaaggggggattggggggtacagtgcaggggaaagaatagtagacataatagcaacagacatacaaactaaag

SEQ ID NO: 14462 - DNA, 301 bp, Artificial Sequence
  Fanca.4_Rb1.1
  crRNA array
  misc_feature (148)..(157): n is a, c, g, or t
cttggctttatatatcttgtggaaaggacgaaacaccgtaatttctactaagtgtagatcacccacccctggtgccaagtaatttctactaagtgtagattctgacatgatcgggtaccttaatttctactaagtgtagatttttttnnnnnnnnnnaagcttggcgtggatccgatatcaactagatcttgagacaaatggcagtattcatccacaattttaaaagaaaaggggggattggggggtacagtgcaggggaaagaatagtagacataatagcaacagacatacaaactaaag

SEQ ID NO: 14463 - DNA, 301 bp, Artificial Sequence
  Fanca.4_Rb1.2
  crRNA array
  misc_feature (148)..(157): n is a, c, g, or t
cttggctttatatatcttgtggaaaggacgaaacaccgtaatttctactaagtgtagatcacccacccctggtgccaagtaatttctactaagtgtagatgtctctgcatgaaaacggagtaatttctactaagtgtagatttttttnnnnnnnnnnaagcttggcgtggatccgatatcaactagatcttgagacaaatggcagtattcatccacaattttaaaagaaaaggggggattggggggtacagtgcaggggaaagaatagtagacataatagcaacagacatacaaactaaag

SEQ ID NO: 14464 - DNA, 301 bp, Artificial Sequence
  Fanca.4_Rb1.3
  crRNA array
  misc_feature (148)..(157): n is a, c, g, or t
cttggctttatatatcttgtggaaaggacgaaacaccgtaatttctactaagtgtagatcacccacccctggtgccaagtaatttctactaagtgtagatagccaatctggtctaataactaatttctactaagtgtagatttttttnnnnnnnnnnaagcttggcgtggatccgatatcaactagatcttgagacaaatggcagtattcatccacaattttaaaagaaaaggggggattggggggtacagtgcaggggaaagaatagtagacataatagcaacagacatacaaactaaag

SEQ ID NO: 14465 - DNA, 301 bp, Artificial Sequence
  Fanca.4_Rb1.4
  crRNA array
  misc_feature (148)..(157): n is a, c, g, or t
cttggctttatatatcttgtggaaaggacgaaacaccgtaatttctactaagtgtagatcacccacccctggtgccaagtaatttctactaagtgtagattgtagctcagtaaaagtgaataatttctactaagtgtagatttttttnnnnnnnnnnaagcttggcgtggatccgatatcaactagatcttgagacaaatggcagtattcatccacaattttaaaagaaaaggggggattggggggtacagtgcaggggaaagaatagtagacataatagcaacagacatacaaactaaag

SEQ ID NO: 14466 - DNA, 301 bp, Artificial Sequence
  Fanca.1_Kmt2c.1
  crRNA array
  misc_feature (148)..(157): n is a, c, g, or t
cttggctttatatatcttgtggaaaggacgaaacaccgtaatttctactaagtgtagatggaggccccggggcccaccataatttctactaagtgtagatactcgacctccacctccctataatttctactaagtgtagatttttttnnnnnnnnnnaagcttggcgtggatccgatatcaactagatcttgagacaaatggcagtattcatccacaattttaaaagaaaaggggggattggggggtacagtgcaggggaaagaatagtagacataatagcaacagacatacaaactaaag

SEQ ID NO: 14467 - DNA, 301 bp, Artificial Sequence
  Fanca.1_Kmt2c.2
  crRNA array
  misc_feature (148)..(157): n is a, c, g, or t
cttggctttatatatcttgtggaaaggacgaaacaccgtaatttctactaagtgtagatggaggccccggggcccaccataatttctactaagtgtagatcccaaagatcagcgtggacctaatttctactaagtgtagatttttttnnnnnnnnnnaagcttggcgtggatccgatatcaactagatcttgagacaaatggcagtattcatccacaattttaaaagaaaaggggggattggggggtacagtgcaggggaaagaatagtagacataatagcaacagacatacaaactaaag

SEQ ID NO: 14468 - DNA, 301 bp, Artificial Sequence
  Fanca.1_Kmt2c.3
  crRNA array
  misc_feature (148)..(157): n is a, c, g, or t
cttggctttatatatcttgtggaaaggacgaaacaccgtaatttctactaagtgtagatggaggccccggggcccaccataatttctactaagtgtagataaaagatccgaatcgatgcgtaatttctactaagtgtagatttttttnnnnnnnnnnaagcttggcgtggatccgatatcaactagatcttgagacaaatggcagtattcatccacaattttaaaagaaaaggggggattggggggtacagtgcaggggaaagaatagtagacataatagcaacagacatacaaactaaag

SEQ ID NO: 14469 - DNA, 301 bp, Artificial Sequence
  Fanca.1_Kmt2c.4
  crRNA array
  misc_feature (148)..(157): n is a, c, g, or t
cttggctttatatatcttgtggaaaggacgaaacaccgtaatttctactaagtgtagatggaggccccggggcccaccataatttctactaagtgtagatctgaggcacatggaagcgattaatttctactaagtgtagatttttttnnnnnnnnnnaagcttggcgtggatccgatatcaactagatcttgagacaaatggcagtattcatccacaattttaaaagaaaaggggggattggggggtacagtgcaggggaaagaatagtagacataatagcaacagacatacaaactaaag

SEQ ID NO: 14470 - DNA, 301 bp, Artificial Sequence
  Fanca.2_Kmt2c.1
  crRNA array
  misc_feature (148)..(157): n is a, c, g, or t
cttggctttatatatcttgtggaaaggacgaaacaccgtaatttctactaagtgtagatagagctaccacctagacagctaatttctactaagtgtagatactcgacctccacctccctataatttctactaagtgtagatttttttnnnnnnnnnnaagcttggcgtggatccgatatcaactagatcttgagacaaatggcagtattcatccacaattttaaaagaaaaggggggattggggggtacagtgcaggggaaagaatagtagacataatagcaacagacatacaaactaaag

SEQ ID NO: 14471 - DNA, 301 bp, Artificial Sequence
  Fanca.2_Kmt2c.2
  crRNA array
  misc_feature (148)..(157): n is a, c, g, or t
cttggctttatatatcttgtggaaaggacgaaacaccgtaatttctactaagtgtagatagagctaccacctagacagctaatttctactaagtgtagatcccaaagatcagcgtggacctaatttctactaagtgtagatttttttnnnnnnnnnnaagcttggcgtggatccgatatcaactagatcttgagacaaatggcagtattcatccacaattttaaaagaaaaggggggattggggggtacagtgcaggggaaagaatagtagacataatagcaacagacatacaaactaaag

SEQ ID NO: 14472 - DNA, 301 bp, Artificial Sequence
  Fanca.2_Kmt2c.3
  crRNA array
  misc_feature (148)..(157): n is a, c, g, or t
cttggctttatatatcttgtggaaaggacgaaacaccgtaatttctactaagtgtagatagagctaccacctagacagctaatttctactaagtgtagataaaagatccgaatcgatgcgtaatttctactaagtgtagatttttttnnnnnnnnnnaagcttggcgtggatccgatatcaactagatcttgagacaaatggcagtattcatccacaattttaaaagaaaaggggggattggggggtacagtgcaggggaaagaatagtagacataatagcaacagacatacaaactaaag

SEQ ID NO: 14473 - DNA, 301 bp, Artificial Sequence
  Fanca.2_Kmt2c.4
  crRNA array
  misc_feature (148)..(157): n is a, c, g, or t
cttggctttatatatcttgtggaaaggacgaaacaccgtaatttctactaagtgtagatagagctaccacctagacagctaatttctactaagtgtagatctgaggcacatggaagcgattaatttctactaagtgtagatttttttnnnnnnnnnnaagcttggcgtggatccgatatcaactagatcttgagacaaatggcagtattcatccacaattttaaaagaaaaggggggattggggggtacagtgcaggggaaagaatagtagacataatagcaacagacatacaaactaaag

SEQ ID NO: 14474 - DNA, 301 bp, Artificial Sequence
  Fanca.3_Kmt2c.1
  crRNA array
  misc_feature (148)..(157): n is a, c, g, or t
cttggctttatatatcttgtggaaaggacgaaacaccgtaatttctactaagtgtagataccaactgctgtgcctcgggtaatttctactaagtgtagatactcgacctccacctccctataatttctactaagtgtagatttttttnnnnnnnnnnaagcttggcgtggatccgatatcaactagatcttgagacaaatggcagtattcatccacaattttaaaagaaaaggggggattggggggtacagtgcaggggaaagaatagtagacataatagcaacagacatacaaactaaag

SEQ ID NO: 14475 - DNA, 301 bp, Artificial Sequence
  Fanca.3_Kmt2c.2
  crRNA array
  misc_feature (148)..(157): n is a, c, g, or t
cttggctttatatatcttgtggaaaggacgaaacaccgtaatttctactaagtgtagataccaactgctgtgcctcgggtaatttctactaagtgtagatcccaaagatcagcgtggacctaatttctactaagtgtagatttttttnnnnnnnnnnaagcttggcgtggatccgatatcaactagatcttgagacaaatggcagtattcatccacaattttaaaagaaaaggggggattggggggtacagtgcaggggaaagaatagtagacataatagcaacagacatacaaactaaag

SEQ ID NO: 14476 - DNA, 301 bp, Artificial Sequence
  Fanca.3_Kmt2c.3
  crRNA array
  misc_feature (148)..(157): n is a, c, g, or t
cttggctttatatatcttgtggaaaggacgaaacaccgtaatttctactaagtgtagataccaactgctgtgcctcgggtaatttctactaagtgtagataaaagatccgaatcgatgcgtaatttctactaagtgtagatttttttnnnnnnnnnnaagcttggcgtggatccgatatcaactagatcttgagacaaatggcagtattcatccacaattttaaaagaaaaggggggattggggggtacagtgcaggggaaagaatagtagacataatagcaacagacatacaaactaaag

SEQ ID NO: 14477 - DNA, 301 bp, Artificial Sequence
  Fanca.3_Kmt2c.4
  crRNA array
  misc_feature (148)..(157): n is a, c, g, or t
cttggctttatatatcttgtggaaaggacgaaacaccgtaatttctactaagtgtagataccaactgctgtgcctcgggtaatttctactaagtgtagatctgaggcacatggaagcgattaatttctactaagtgtagatttttttnnnnnnnnnnaagcttggcgtggatccgatatcaactagatcttgagacaaatggcagtattcatccacaattttaaaagaaaaggggggattggggggtacagtgcaggggaaagaatagtagacataatagcaacagacatacaaactaaag

SEQ ID NO: 14478 - DNA, 301 bp, Artificial Sequence
  Fanca.4_Kmt2c.1
  crRNA array
  misc_feature (148)..(157): n is a, c, g, or t
cttggctttatatatcttgtggaaaggacgaaacaccgtaatttctactaagtgtagatcacccacccctggtgccaagtaatttctactaagtgtagatactcgacctccacctccctataatttctactaagtgtagatttttttnnnnnnnnnnaagcttggcgtggatccgatatcaactagatcttgagacaaatggcagtattcatccacaattttaaaagaaaaggggggattggggggtacagtgcaggggaaagaatagtagacataatagcaacagacatacaaactaaag

SEQ ID NO: 14479 - DNA, 301 bp, Artificial Sequence
  Fanca.4_Kmt2c.2
  crRNA array
  misc_feature (148)..(157): n is a, c, g, or t
cttggctttatatatcttgtggaaaggacgaaacaccgtaatttctactaagtgtagatcacccacccctggtgccaagtaatttctactaagtgtagatcccaaagatcagcgtggacctaatttctactaagtgtagatttttttnnnnnnnnnnaagcttggcgtggatccgatatcaactagatcttgagacaaatggcagtattcatccacaattttaaaagaaaaggggggattggggggtacagtgcaggggaaagaatagtagacataatagcaacagacatacaaactaaag

SEQ ID NO: 14480 - DNA, 301 bp, Artificial Sequence
  Fanca.4_Kmt2c.3
  crRNA array
  misc_feature (148)..(157): n is a, c, g, or t
cttggctttatatatcttgtggaaaggacgaaacaccgtaatttctactaagtgtagatcacccacccctggtgccaagtaatttctactaagtgtagataaaagatccgaatcgatgcgtaatttctactaagtgtagatttttttnnnnnnnnnnaagcttggcgtggatccgatatcaactagatcttgagacaaatggcagtattcatccacaattttaaaagaaaaggggggattggggggtacagtgcaggggaaagaatagtagacataatagcaacagacatacaaactaaag

SEQ ID NO: 14481 - DNA, 301 bp, Artificial Sequence
  Fanca.4_Kmt2c.4
  crRNA array
  misc_feature (148)..(157): n is a, c, g, or t
cttggctttatatatcttgtggaaaggacgaaacaccgtaatttctactaagtgtagatcacccacccctggtgccaagtaatttctactaagtgtagatctgaggcacatggaagcgattaatttctactaagtgtagatttttttnnnnnnnnnnaagcttggcgtggatccgatatcaactagatcttgagacaaatggcagtattcatccacaattttaaaagaaaaggggggattggggggtacagtgcaggggaaagaatagtagacataatagcaacagacatacaaactaaag

SEQ ID NO: 14482 - DNA, 301 bp, Artificial Sequence
  Fanca.1_Pten.1
  crRNA array
  misc_feature (148)..(157): n is a, c, g, or t
cttggctttatatatcttgtggaaaggacgaaacaccgtaatttctactaagtgtagatggaggccccggggcccaccataatttctactaagtgtagataagcgtggtgcgtgacgcactaatttctactaagtgtagatttttttnnnnnnnnnnaagcttggcgtggatccgatatcaactagatcttgagacaaatggcagtattcatccacaattttaaaagaaaaggggggattggggggtacagtgcaggggaaagaatagtagacataatagcaacagacatacaaactaaag

SEQ ID NO: 14483 - DNA, 301 bp, Artificial Sequence
  Fanca.1_Pten.2
  crRNA array
  misc_feature (148)..(157): n is a, c, g, or t
cttggctttatatatcttgtggaaaggacgaaacaccgtaatttctactaagtgtagatggaggccccggggcccaccataatttctactaagtgtagattgtcaccagctgaagtggcttaatttctactaagtgtagatttttttnnnnnnnnnnaagcttggcgtggatccgatatcaactagatcttgagacaaatggcagtattcatccacaattttaaaagaaaaggggggattggggggtacagtgcaggggaaagaatagtagacataatagcaacagacatacaaactaaag

SEQ ID NO: 14484 - DNA, 301 bp, Artificial Sequence
  Fanca.1_Pten.3
  crRNA array
  misc_feature (148)..(157): n is a, c, g, or t
cttggctttatatatcttgtggaaaggacgaaacaccgtaatttctactaagtgtagatggaggccccggggcccaccataatttctactaagtgtagatggagtcaagaggctgatttttaatttctactaagtgtagatttttttnnnnnnnnnnaagcttggcgtggatccgatatcaactagatcttgagacaaatggcagtattcatccacaattttaaaagaaaaggggggattggggggtacagtgcaggggaaagaatagtagacataatagcaacagacatacaaactaaag

SEQ ID NO: 14485 - DNA, 301 bp, Artificial Sequence
  Fanca.1_Pten.4
  crRNA array
  misc_feature (148)..(157): n is a, c, g, or t
cttggctttatatatcttgtggaaaggacgaaacaccgtaatttctactaagtgtagatggaggccccggggcccaccataatttctactaagtgtagatctgtaagctaaaccactacataatttctactaagtgtagatttttttnnnnnnnnnnaagcttggcgtggatccgatatcaactagatcttgagacaaatggcagtattcatccacaattttaaaagaaaaggggggattggggggtacagtgcaggggaaagaatagtagacataatagcaacagacatacaaactaaag

SEQ ID NO: 14486 - DNA, 301 bp, Artificial Sequence
  Fanca.2_Pten.1
  crRNA array
  misc_feature (148)..(157): n is a, c, g, or t
cttggctttatatatcttgtggaaaggacgaaacaccgtaatttctactaagtgtagatagagctaccacctagacagctaatttctactaagtgtagataagcgtggtgcgtgacgcactaatttctactaagtgtagatttttttnnnnnnnnnnaagcttggcgtggatccgatatcaactagatcttgagacaaatggcagtattcatccacaattttaaaagaaaaggggggattggggggtacagtgcaggggaaagaatagtagacataatagcaacagacatacaaactaaag

SEQ ID NO: 14487 - DNA, 301 bp, Artificial Sequence
  Fanca.2_Pten.2
  crRNA array
  misc_feature (148)..(157): n is a, c, g, or t
cttggctttatatatcttgtggaaaggacgaaacaccgtaatttctactaagtgtagatagagctaccacctagacagctaatttctactaagtgtagattgtcaccagctgaagtggcttaatttctactaagtgtagatttttttnnnnnnnnnnaagcttggcgtggatccgatatcaactagatcttgagacaaatggcagtattcatccacaattttaaaagaaaaggggggattggggggtacagtgcaggggaaagaatagtagacataatagcaacagacatacaaactaaag

SEQ ID NO: 14488 - DNA, 301 bp, Artificial Sequence
  Fanca.2_Pten.3
  crRNA array
  misc_feature (148)..(157): n is a, c, g, or t
cttggctttatatatcttgtggaaaggacgaaacaccgtaatttctactaagtgtagatagagctaccacctagacagctaatttctactaagtgtagatggagtcaagaggctgatttttaatttctactaagtgtagatttttttnnnnnnnnnnaagcttggcgtggatccgatatcaactagatcttgagacaaatggcagtattcatccacaattttaaaagaaaaggggggattggggggtacagtgcaggggaaagaatagtagacataatagcaacagacatacaaactaaag

SEQ ID NO: 14489 - DNA, 301 bp, Artificial Sequence
  Fanca.2_Pten.4
  crRNA array
  misc_feature (148)..(157): n is a, c, g, or t
cttggctttatatatcttgtggaaaggacgaaacaccgtaatttctactaagtgtagatagagctaccacctagacagctaatttctactaagtgtagatctgtaagctaaaccactacataatttctactaagtgtagatttttttnnnnnnnnnnaagcttggcgtggatccgatatcaactagatcttgagacaaatggcagtattcatccacaattttaaaagaaaaggggggattggggggtacagtgcaggggaaagaatagtagacataatagcaacagacatacaaactaaag

SEQ ID NO: 14490 - DNA, 301 bp, Artificial Sequence
  Fanca.3_Pten.1
  crRNA array
  misc_feature (148)..(157): n is a, c, g, or t
cttggctttatatatcttgtggaaaggacgaaacaccgtaatttctactaagtgtagataccaactgctgtgcctcgggtaatttctactaagtgtagataagcgtggtgcgtgacgcactaatttctactaagtgtagatttttttnnnnnnnnnnaagcttggcgtggatccgatatcaactagatcttgagacaaatggcagtattcatccacaattttaaaagaaaaggggggattggggggtacagtgcaggggaaagaatagtagacataatagcaacagacatacaaactaaag

SEQ ID NO: 14491 - DNA, 301 bp, Artificial Sequence
  Fanca.3_Pten.2
  crRNA array
  misc_feature (148)..(157): n is a, c, g, or t
cttggctttatatatcttgtggaaaggacgaaacaccgtaatttctactaagtgtagataccaactgctgtgcctcgggtaatttctactaagtgtagattgtcaccagctgaagtggcttaatttctactaagtgtagatttttttnnnnnnnnnnaagcttggcgtggatccgatatcaactagatcttgagacaaatggcagtattcatccacaattttaaaagaaaaggggggattggggggtacagtgcaggggaaagaatagtagacataatagcaacagacatacaaactaaag

SEQ ID NO: 14492 - DNA, 301 bp, Artificial Sequence
  Fanca.3_Pten.3
  crRNA array
  misc_feature (148)..(157): n is a, c, g, or t
cttggctttatatatcttgtggaaaggacgaaacaccgtaatttctactaagtgtagataccaactgctgtgcctcgggtaatttctactaagtgtagatggagtcaagaggctgatttttaatttctactaagtgtagatttttttnnnnnnnnnnaagcttggcgtggatccgatatcaactagatcttgagacaaatggcagtattcatccacaattttaaaagaaaaggggggattggggggtacagtgcaggggaaagaatagtagacataatagcaacagacatacaaactaaag

SEQ ID NO: 14493 - DNA, 301 bp, Artificial Sequence
  Fanca.3_Pten.4
  crRNA array
  misc_feature (148)..(157): n is a, c, g, or t
cttggctttatatatcttgtggaaaggacgaaacaccgtaatttctactaagtgtagataccaactgctgtgcctcgggtaatttctactaagtgtagatctgtaagctaaaccactacataatttctactaagtgtagatttttttnnnnnnnnnnaagcttggcgtggatccgatatcaactagatcttgagacaaatggcagtattcatccacaattttaaaagaaaaggggggattggggggtacagtgcaggggaaagaatagtagacataatagcaacagacatacaaactaaag

SEQ ID NO: 14494 - DNA, 301 bp, Artificial Sequence
  Fanca.4_Pten.1
  crRNA array
  misc_feature (148)..(157): n is a, c, g, or t
cttggctttatatatcttgtggaaaggacgaaacaccgtaatttctactaagtgtagatcacccacccctggtgccaagtaatttctactaagtgtagataagcgtggtgcgtgacgcactaatttctactaagtgtagatttttttnnnnnnnnnnaagcttggcgtggatccgatatcaactagatcttgagacaaatggcagtattcatccacaattttaaaagaaaaggggggattggggggtacagtgcaggggaaagaatagtagacataatagcaacagacatacaaactaaag

SEQ ID NO: 14495 - DNA, 301 bp, Artificial Sequence
  Fanca.4_Pten.2
  crRNA array
  misc_feature (148)..(157): n is a, c, g, or t
cttggctttatatatcttgtggaaaggacgaaacaccgtaatttctactaagtgtagatcacccacccctggtgccaagtaatttctactaagtgtagattgtcaccagctgaagtggcttaatttctactaagtgtagatttttttnnnnnnnnnnaagcttggcgtggatccgatatcaactagatcttgagacaaatggcagtattcatccacaattttaaaagaaaaggggggattggggggtacagtgcaggggaaagaatagtagacataatagcaacagacatacaaactaaag

SEQ ID NO: 14496 - DNA, 301 bp, Artificial Sequence
  Fanca.4_Pten.3
  crRNA array
  misc_feature (148)..(157): n is a, c, g, or t
cttggctttatatatcttgtggaaaggacgaaacaccgtaatttctactaagtgtagatcacccacccctggtgccaagtaatttctactaagtgtagatggagtcaagaggctgatttttaatttctactaagtgtagatttttttnnnnnnnnnnaagcttggcgtggatccgatatcaactagatcttgagacaaatggcagtattcatccacaattttaaaagaaaaggggggattggggggtacagtgcaggggaaagaatagtagacataatagcaacagacatacaaactaaag

SEQ ID NO: 14497 - DNA, 301 bp, Artificial Sequence
  Fanca.4_Pten.4
  crRNA array
  misc_feature (148)..(157): n is a, c, g, or t
cttggctttatatatcttgtggaaaggacgaaacaccgtaatttctactaagtgtagatcacccacccctggtgccaagtaatttctactaagtgtagatctgtaagctaaaccactacataatttctactaagtgtagatttttttnnnnnnnnnnaagcttggcgtggatccgatatcaactagatcttgagacaaatggcagtattcatccacaattttaaaagaaaaggggggattggggggtacagtgcaggggaaagaatagtagacataatagcaacagacatacaaactaaag

SEQ ID NO: 14498 - DNA, 301 bp, Artificial Sequence
  Fanca.1_Atm.1
  crRNA array
  misc_feature (148)..(157): n is a, c, g, or t
cttggctttatatatcttgtggaaaggacgaaacaccgtaatttctactaagtgtagatggaggccccggggcccaccataatttctactaagtgtagatgagaaagtctccgaatcgtttaatttctactaagtgtagatttttttnnnnnnnnnnaagcttggcgtggatccgatatcaactagatcttgagacaaatggcagtattcatccacaattttaaaagaaaaggggggattggggggtacagtgcaggggaaagaatagtagacataatagcaacagacatacaaactaaag

SEQ ID NO: 14499 - DNA, 301 bp, Artificial Sequence
  Fanca.1_Atm.2
  crRNA array
  misc_feature (148)..(157): n is a, c, g, or t
cttggctttatatatcttgtggaaaggacgaaacaccgtaatttctactaagtgtagatggaggccccggggcccaccataatttctactaagtgtagatcctacgagggcacgagagactaatttctactaagtgtagatttttttnnnnnnnnnnaagcttggcgtggatccgatatcaactagatcttgagacaaatggcagtattcatccacaattttaaaagaaaaggggggattggggggtacagtgcaggggaaagaatagtagacataatagcaacagacatacaaactaaag

SEQ ID NO: 14500 - DNA, 301 bp, Artificial Sequence
  Fanca.1_Atm.3
  crRNA array
  misc_feature (148)..(157): n is a, c, g, or t
cttggctttatatatcttgtggaaaggacgaaacaccgtaatttctactaagtgtagatggaggccccggggcccaccataatttctactaagtgtagattgaaagtctccgatatgccataatttctactaagtgtagatttttttnnnnnnnnnnaagcttggcgtggatccgatatcaactagatcttgagacaaatggcagtattcatccacaattttaaaagaaaaggggggattggggggtacagtgcaggggaaagaatagtagacataatagcaacagacatacaaactaaag

SEQ ID NO: 14501 - DNA, 301 bp, Artificial Sequence
  Fanca.1_Atm.4
  crRNA array
  misc_feature (148)..(157): n is a, c, g, or t
cttggctttatatatcttgtggaaaggacgaaacaccgtaatttctactaagtgtagatggaggccccggggcccaccataatttctactaagtgtagatggtggtgatcagtcaagtagtaatttctactaagtgtagatttttttnnnnnnnnnnaagcttggcgtggatccgatatcaactagatcttgagacaaatggcagtattcatccacaattttaaaagaaaaggggggattggggggtacagtgcaggggaaagaatagtagacataatagcaacagacatacaaactaaag

SEQ ID NO: 14502 - DNA, 301 bp, Artificial Sequence
  Fanca.2_Atm.1
  crRNA array
  misc_feature (148)..(157): n is a, c, g, or t
cttggctttatatatcttgtggaaaggacgaaacaccgtaatttctactaagtgtagatagagctaccacctagacagctaatttctactaagtgtagatgagaaagtctccgaatcgtttaatttctactaagtgtagatttttttnnnnnnnnnnaagcttggcgtggatccgatatcaactagatcttgagacaaatggcagtattcatccacaattttaaaagaaaaggggggattggggggtacagtgcaggggaaagaatagtagacataatagcaacagacatacaaactaaag

SEQ ID NO: 14503 - DNA, 301 bp, Artificial Sequence
  Fanca.2_Atm.2
  crRNA array
  misc_feature (148)..(157): n is a, c, g, or t
cttggctttatatatcttgtggaaaggacgaaacaccgtaatttctactaagtgtagatagagctaccacctagacagctaatttctactaagtgtagatcctacgagggcacgagagactaatttctactaagtgtagatttttttnnnnnnnnnnaagcttggcgtggatccgatatcaactagatcttgagacaaatggcagtattcatccacaattttaaaagaaaaggggggattggggggtacagtgcaggggaaagaatagtagacataatagcaacagacatacaaactaaag

SEQ ID NO: 14504 - DNA, 301 bp, Artificial Sequence
  Fanca.2_Atm.3
  crRNA array
  misc_feature (148)..(157): n is a, c, g, or t
cttggctttatatatcttgtggaaaggacgaaacaccgtaatttctactaagtgtagatagagctaccacctagacagctaatttctactaagtgtagattgaaagtctccgatatgccataatttctactaagtgtagatttttttnnnnnnnnnnaagcttggcgtggatccgatatcaactagatcttgagacaaatggcagtattcatccacaattttaaaagaaaaggggggattggggggtacagtgcaggggaaagaatagtagacataatagcaacagacatacaaactaaag

SEQ ID NO: 14505 - DNA, 301 bp, Artificial Sequence
  Fanca.2_Atm.4
  crRNA array
  misc_feature (148)..(157): n is a, c, g, or t
cttggctttatatatcttgtggaaaggacgaaacaccgtaatttctactaagtgtagatagagctaccacctagacagctaatttctactaagtgtagatggtggtgatcagtcaagtagtaatttctactaagtgtagatttttttnnnnnnnnnnaagcttggcgtggatccgatatcaactagatcttgagacaaatggcagtattcatccacaattttaaaagaaaaggggggattggggggtacagtgcaggggaaagaatagtagacataatagcaacagacatacaaactaaag

SEQ ID NO: 14506 - DNA, 301 bp, Artificial Sequence
  Fanca.3_Atm.1
  crRNA array
  misc_feature (148)..(157): n is a, c, g, or t
cttggctttatatatcttgtggaaaggacgaaacaccgtaatttctactaagtgtagataccaactgctgtgcctcgggtaatttctactaagtgtagatgagaaagtctccgaatcgtttaatttctactaagtgtagatttttttnnnnnnnnnnaagcttggcgtggatccgatatcaactagatcttgagacaaatggcagtattcatccacaattttaaaagaaaaggggggattggggggtacagtgcaggggaaagaatagtagacataatagcaacagacatacaaactaaag

SEQ ID NO: 14507 - DNA, 301 bp, Artificial Sequence
  Fanca.3_Atm.2
  crRNA array
  misc_feature (148)..(157): n is a, c, g, or t
cttggctttatatatcttgtggaaaggacgaaacaccgtaatttctactaagtgtagataccaactgctgtgcctcgggtaatttctactaagtgtagatcctacgagggcacgagagactaatttctactaagtgtagatttttttnnnnnnnnnnaagcttggcgtggatccgatatcaactagatcttgagacaaatggcagtattcatccacaattttaaaagaaaaggggggattggggggtacagtgcaggggaaagaatagtagacataatagcaacagacatacaaactaaag

SEQ ID NO: 14508 - DNA, 301 bp, Artificial Sequence
  Fanca.3_Atm.3
  crRNA array
  misc_feature (148)..(157): n is a, c, g, or t
cttggctttatatatcttgtggaaaggacgaaacaccgtaatttctactaagtgtagataccaactgctgtgcctcgggtaatttctactaagtgtagattgaaagtctccgatatgccataatttctactaagtgtagatttttttnnnnnnnnnnaagcttggcgtggatccgatatcaactagatcttgagacaaatggcagtattcatccacaattttaaaagaaaaggggggattggggggtacagtgcaggggaaagaatagtagacataatagcaacagacatacaaactaaag

SEQ ID NO: 14509 - DNA, 301 bp, Artificial Sequence
  Fanca.3_Atm.4
  crRNA array
  misc_feature (148)..(157): n is a, c, g, or t
cttggctttatatatcttgtggaaaggacgaaacaccgtaatttctactaagtgtagataccaactgctgtgcctcgggtaatttctactaagtgtagatggtggtgatcagtcaagtagtaatttctactaagtgtagatttttttnnnnnnnnnnaagcttggcgtggatccgatatcaactagatcttgagacaaatggcagtattcatccacaattttaaaagaaaaggggggattggggggtacagtgcaggggaaagaatagtagacataatagcaacagacatacaaactaaag

SEQ ID NO: 14510 - DNA, 301 bp, Artificial Sequence
  Fanca.4_Atm.1
  crRNA array
  misc_feature (148)..(157): n is a, c, g, or t
cttggctttatatatcttgtggaaaggacgaaacaccgtaatttctactaagtgtagatcacccacccctggtgccaagtaatttctactaagtgtagatgagaaagtctccgaatcgtttaatttctactaagtgtagatttttttnnnnnnnnnnaagcttggcgtggatccgatatcaactagatcttgagacaaatggcagtattcatccacaattttaaaagaaaaggggggattggggggtacagtgcaggggaaagaatagtagacataatagcaacagacatacaaactaaag

SEQ ID NO: 14511 - DNA, 301 bp, Artificial Sequence
  Fanca.4_Atm.2
  crRNA array
  misc_feature (148)..(157): n is a, c, g, or t
cttggctttatatatcttgtggaaaggacgaaacaccgtaatttctactaagtgtagatcacccacccctggtgccaagtaatttctactaagtgtagatcctacgagggcacgagagactaatttctactaagtgtagatttttttnnnnnnnnnnaagcttggcgtggatccgatatcaactagatcttgagacaaatggcagtattcatccacaattttaaaagaaaaggggggattggggggtacagtgcaggggaaagaatagtagacataatagcaacagacatacaaactaaag

SEQ ID NO: 14512 - DNA, 301 bp, Artificial Sequence
  Fanca.4_Atm.3
  crRNA array
  misc_feature (148)..(157): n is a, c, g, or t
cttggctttatatatcttgtggaaaggacgaaacaccgtaatttctactaagtgtagatcacccacccctggtgccaagtaatttctactaagtgtagattgaaagtctccgatatgccataatttctactaagtgtagatttttttnnnnnnnnnnaagcttggcgtggatccgatatcaactagatcttgagacaaatggcagtattcatccacaattttaaaagaaaaggggggattggggggtacagtgcaggggaaagaatagtagacataatagcaacagacatacaaactaaag

SEQ ID NO: 14513 - DNA, 301 bp, Artificial Sequence
  Fanca.4_Atm.4
  crRNA array
  misc_feature (148)..(157): n is a, c, g, or t
cttggctttatatatcttgtggaaaggacgaaacaccgtaatttctactaagtgtagatcacccacccctggtgccaagtaatttctactaagtgtagatggtggtgatcagtcaagtagtaatttctactaagtgtagatttttttnnnnnnnnnnaagcttggcgtggatccgatatcaactagatcttgagacaaatggcagtattcatccacaattttaaaagaaaaggggggattggggggtacagtgcaggggaaagaatagtagacataatagcaacagacatacaaactaaag

SEQ ID NO: 14514 - DNA, 301 bp, Artificial Sequence
  Nf1.1_Kdm6a.1
  crRNA array
  misc_feature (148)..(157): n is a, c, g, or t
cttggctttatatatcttgtggaaaggacgaaacaccgtaatttctactaagtgtagattggcgatccggaatcctctgtaatttctactaagtgtagatgctgccgcctctcgcggcagtaatttctactaagtgtagatttttttnnnnnnnnnnaagcttggcgtggatccgatatcaactagatcttgagacaaatggcagtattcatccacaattttaaaagaaaaggggggattggggggtacagtgcaggggaaagaatagtagacataatagcaacagacatacaaactaaag

SEQ ID NO: 14515 - DNA, 301 bp, Artificial Sequence
  Nf1.1_Kdm6a.2
  crRNA array
  misc_feature (148)..(157): n is a, c, g, or t
cttggctttatatatcttgtggaaaggacgaaacaccgtaatttctactaagtgtagattggcgatccggaatcctctgtaatttctactaagtgtagatgctgcaggtaaggcacgttttaatttctactaagtgtagatttttttnnnnnnnnnnaagcttggcgtggatccgatatcaactagatcttgagacaaatggcagtattcatccacaattttaaaagaaaaggggggattggggggtacagtgcaggggaaagaatagtagacataatagcaacagacatacaaactaaag

SEQ ID NO: 14516 - DNA, 301 bp, Artificial Sequence
  Nf1.1_Kdm6a.3
  crRNA array
  misc_feature (148)..(157): n is a, c, g, or t
cttggctttatatatcttgtggaaaggacgaaacaccgtaatttctactaagtgtagattggcgatccggaatcctctgtaatttctactaagtgtagattgctggtgccggggaagttttaatttctactaagtgtagatttttttnnnnnnnnnnaagcttggcgtggatccgatatcaactagatcttgagacaaatggcagtattcatccacaattttaaaagaaaaggggggattggggggtacagtgcaggggaaagaatagtagacataatagcaacagacatacaaactaaag

SEQ ID NO: 14517 - DNA, 301 bp, Artificial Sequence
  Nf1.1_Kdm6a.4
  crRNA array
  misc_feature (148)..(157): n is a, c, g, or t
cttggctttatatatcttgtggaaaggacgaaacaccgtaatttctactaagtgtagattggcgatccggaatcctctgtaatttctactaagtgtagattgtctcctacgaatcccccctaatttctactaagtgtagatttttttnnnnnnnnnnaagcttggcgtggatccgatatcaactagatcttgagacaaatggcagtattcatccacaattttaaaagaaaaggggggattggggggtacagtgcaggggaaagaatagtagacataatagcaacagacatacaaactaaag

SEQ ID NO: 14518 - DNA, 301 bp, Artificial Sequence
  Nf1.2_Kdm6a.1
  crRNA array
  misc_feature (148)..(157): n is a, c, g, or t
cttggctttatatatcttgtggaaaggacgaaacaccgtaatttctactaagtgtagatggaaacacaacgctggcctctaatttctactaagtgtagatgctgccgcctctcgcggcagtaatttctactaagtgtagatttttttnnnnnnnnnnaagcttggcgtggatccgatatcaactagatcttgagacaaatggcagtattcatccacaattttaaaagaaaaggggggattggggggtacagtgcaggggaaagaatagtagacataatagcaacagacatacaaactaaag

SEQ ID NO: 14519 - DNA, 301 bp, Artificial Sequence
  Nf1.2_Kdm6a.2
  crRNA array
  misc_feature (148)..(157): n is a, c, g, or t
cttggctttatatatcttgtggaaaggacgaaacaccgtaatttctactaagtgtagatggaaacacaacgctggcctctaatttctactaagtgtagatgctgcaggtaaggcacgttttaatttctactaagtgtagatttttttnnnnnnnnnnaagcttggcgtggatccgatatcaactagatcttgagacaaatggcagtattcatccacaattttaaaagaaaaggggggattggggggtacagtgcaggggaaagaatagtagacataatagcaacagacatacaaactaaag

SEQ ID NO: 14520 - DNA, 301 bp, Artificial Sequence
  Nf1.2_Kdm6a.3
  crRNA array
  misc_feature (148)..(157): n is a, c, g, or t
cttggctttatatatcttgtggaaaggacgaaacaccgtaatttctactaagtgtagatggaaacacaacgctggcctctaatttctactaagtgtagattgctggtgccggggaagttttaatttctactaagtgtagatttttttnnnnnnnnnnaagcttggcgtggatccgatatcaactagatcttgagacaaatggcagtattcatccacaattttaaaagaaaaggggggattggggggtacagtgcaggggaaagaatagtagacataatagcaacagacatacaaactaaag

SEQ ID NO: 14521 - DNA, 301 bp, Artificial Sequence
  Nf1.2_Kdm6a.4
  crRNA array
  misc_feature (148)..(157): n is a, c, g, or t
cttggctttatatatcttgtggaaaggacgaaacaccgtaatttctactaagtgtagatggaaacacaacgctggcctctaatttctactaagtgtagattgtctcctacgaatcccccctaatttctactaagtgtagatttttttnnnnnnnnnnaagcttggcgtggatccgatatcaactagatcttgagacaaatggcagtattcatccacaattttaaaagaaaaggggggattggggggtacagtgcaggggaaagaatagtagacataatagcaacagacatacaaactaaag

SEQ ID NO: 14522 - DNA, 301 bp, Artificial Sequence
  Nf1.3_Kdm6a.1
  crRNA array
  misc_feature (148)..(157): n is a, c, g, or t
cttggctttatatatcttgtggaaaggacgaaacaccgtaatttctactaagtgtagataatgatggaacgcagtcgcataatttctactaagtgtagatgctgccgcctctcgcggcagtaatttctactaagtgtagatttttttnnnnnnnnnnaagcttggcgtggatccgatatcaactagatcttgagacaaatggcagtattcatccacaattttaaaagaaaaggggggattggggggtacagtgcaggggaaagaatagtagacataatagcaacagacatacaaactaaag

SEQ ID NO: 14523 - DNA, 301 bp, Artificial Sequence
  Nf1.3_Kdm6a.2
  crRNA array
  misc_feature (148)..(157): n is a, c, g, or t
cttggctttatatatcttgtggaaaggacgaaacaccgtaatttctactaagtgtagataatgatggaacgcagtcgcataatttctactaagtgtagatgctgcaggtaaggcacgttttaatttctactaagtgtagatttttttnnnnnnnnnnaagcttggcgtggatccgatatcaactagatcttgagacaaatggcagtattcatccacaattttaaaagaaaaggggggattggggggtacagtgcaggggaaagaatagtagacataatagcaacagacatacaaactaaag

SEQ ID NO: 14524 - DNA, 301 bp, Artificial Sequence
  Nf1.3_Kdm6a.3
  crRNA array
  misc_feature (148)..(157): n is a, c, g, or t
cttggctttatatatcttgtggaaaggacgaaacaccgtaatttctactaagtgtagataatgatggaacgcagtcgcataatttctactaagtgtagattgctggtgccggggaagttttaatttctactaagtgtagatttttttnnnnnnnnnnaagcttggcgtggatccgatatcaactagatcttgagacaaatggcagtattcatccacaattttaaaagaaaaggggggattggggggtacagtgcaggggaaagaatagtagacataatagcaacagacatacaaactaaag

SEQ ID NO: 14525 - DNA, 301 bp, Artificial Sequence
  Nf1.3_Kdm6a.4
  crRNA array
  misc_feature (148)..(157): n is a, c, g, or t
cttggctttatatatcttgtggaaaggacgaaacaccgtaatttctactaagtgtagataatgatggaacgcagtcgcataatttctactaagtgtagattgtctcctacgaatcccccctaatttctactaagtgtagatttttttnnnnnnnnnnaagcttggcgtggatccgatatcaactagatcttgagacaaatggcagtattcatccacaattttaaaagaaaaggggggattggggggtacagtgcaggggaaagaatagtagacataatagcaacagacatacaaactaaag

SEQ ID NO: 14526 - DNA, 301 bp, Artificial Sequence
  Nf1.4_Kdm6a.1
  crRNA array
  misc_feature (148)..(157): n is a, c, g, or t
cttggctttatatatcttgtggaaaggacgaaacaccgtaatttctactaagtgtagattgcaaaaccatccaccaagttaatttctactaagtgtagatgctgccgcctctcgcggcagtaatttctactaagtgtagatttttttnnnnnnnnnnaagcttggcgtggatccgatatcaactagatcttgagacaaatggcagtattcatccacaattttaaaagaaaaggggggattggggggtacagtgcaggggaaagaatagtagacataatagcaacagacatacaaactaaag

SEQ ID NO: 14527 - DNA, 301 bp, Artificial Sequence
  Nf1.4_Kdm6a.2
  crRNA array
  misc_feature (148)..(157): n is a, c, g, or t
cttggctttatatatcttgtggaaaggacgaaacaccgtaatttctactaagtgtagattgcaaaaccatccaccaagttaatttctactaagtgtagatgctgcaggtaaggcacgttttaatttctactaagtgtagatttttttnnnnnnnnnnaagcttggcgtggatccgatatcaactagatcttgagacaaatggcagtattcatccacaattttaaaagaaaaggggggattggggggtacagtgcaggggaaagaatagtagacataatagcaacagacatacaaactaaag

SEQ ID NO: 14528 - DNA, 301 bp, Artificial Sequence
  Nf1.4_Kdm6a.3
  crRNA array
  misc_feature (148)..(157): n is a, c, g, or t
cttggctttatatatcttgtggaaaggacgaaacaccgtaatttctactaagtgtagattgcaaaaccatccaccaagttaatttctactaagtgtagattgctggtgccggggaagttttaatttctactaagtgtagatttttttnnnnnnnnnnaagcttggcgtggatccgatatcaactagatcttgagacaaatggcagtattcatccacaattttaaaagaaaaggggggattggggggtacagtgcaggggaaagaatagtagacataatagcaacagacatacaaactaaag

SEQ ID NO: 14529 - DNA, 301 bp, Artificial Sequence
  Nf1.4_Kdm6a.4
  crRNA array
  misc_feature (148)..(157): n is a, c, g, or t
cttggctttatatatcttgtggaaaggacgaaacaccgtaatttctactaagtgtagattgcaaaaccatccaccaagttaatttctactaagtgtagattgtctcctacgaatcccccctaatttctactaagtgtagatttttttnnnnnnnnnnaagcttggcgtggatccgatatcaactagatcttgagacaaatggcagtattcatccacaattttaaaagaaaaggggggattggggggtacagtgcaggggaaagaatagtagacataatagcaacagacatacaaactaaag

SEQ ID NO: 14530 - DNA, 301 bp, Artificial Sequence
  Nf1.1_Ercc5.1
  crRNA array
  misc_feature (148)..(157): n is a, c, g, or t
cttggctttatatatcttgtggaaaggacgaaacaccgtaatttctactaagtgtagattggcgatccggaatcctctgtaatttctactaagtgtagatacggcacgagcaagagacactaatttctactaagtgtagatttttttnnnnnnnnnnaagcttggcgtggatccgatatcaactagatcttgagacaaatggcagtattcatccacaattttaaaagaaaaggggggattggggggtacagtgcaggggaaagaatagtagacataatagcaacagacatacaaactaaag

SEQ ID NO: 14531 - DNA, 301 bp, Artificial Sequence
  Nf1.1_Ercc5.2
  crRNA array
  misc_feature (148)..(157): n is a, c, g, or t
cttggctttatatatcttgtggaaaggacgaaacaccgtaatttctactaagtgtagattggcgatccggaatcctctgtaatttctactaagtgtagatgagtatcacatcggtgactctaatttctactaagtgtagatttttttnnnnnnnnnnaagcttggcgtggatccgatatcaactagatcttgagacaaatggcagtattcatccacaattttaaaagaaaaggggggattggggggtacagtgcaggggaaagaatagtagacataatagcaacagacatacaaactaaag

SEQ ID NO: 14532 - DNA, 301 bp, Artificial Sequence
  Nf1.1_Ercc5.3
  crRNA array
  misc_feature (148)..(157): n is a, c, g, or t
cttggctttatatatcttgtggaaaggacgaaacaccgtaatttctactaagtgtagattggcgatccggaatcctctgtaatttctactaagtgtagatggagtgggtccaggcctcgttaatttctactaagtgtagatttttttnnnnnnnnnnaagcttggcgtggatccgatatcaactagatcttgagacaaatggcagtattcatccacaattttaaaagaaaaggggggattggggggtacagtgcaggggaaagaatagtagacataatagcaacagacatacaaactaaag

SEQ ID NO: 14533 - DNA, 301 bp, Artificial Sequence
  Nf1.1_Ercc5.4
  crRNA array
  misc_feature (148)..(157): n is a, c, g, or t
cttggctttatatatcttgtggaaaggacgaaacaccgtaatttctactaagtgtagattggcgatccggaatcctctgtaatttctactaagtgtagatcagagccggtggaataatgttaatttctactaagtgtagatttttttnnnnnnnnnnaagcttggcgtggatccgatatcaactagatcttgagacaaatggcagtattcatccacaattttaaaagaaaaggggggattggggggtacagtgcaggggaaagaatagtagacataatagcaacagacatacaaactaaag

SEQ ID NO: 14534 - DNA, 301 bp, Artificial Sequence
  Nf1.2_Ercc5.1
  crRNA array
  misc_feature (148)..(157): n is a, c, g, or t
cttggctttatatatcttgtggaaaggacgaaacaccgtaatttctactaagtgtagatggaaacacaacgctggcctctaatttctactaagtgtagatacggcacgagcaagagacactaatttctactaagtgtagatttttttnnnnnnnnnnaagcttggcgtggatccgatatcaactagatcttgagacaaatggcagtattcatccacaattttaaaagaaaaggggggattggggggtacagtgcaggggaaagaatagtagacataatagcaacagacatacaaactaaag

SEQ ID NO: 14535 - DNA, 301 bp, Artificial Sequence
  Nf1.2_Ercc5.2
  crRNA array
  misc_feature (148)..(157): n is a, c, g, or t
cttggctttatatatcttgtggaaaggacgaaacaccgtaatttctactaagtgtagatggaaacacaacgctggcctctaatttctactaagtgtagatgagtatcacatcggtgactctaatttctactaagtgtagatttttttnnnnnnnnnnaagcttggcgtggatccgatatcaactagatcttgagacaaatggcagtattcatccacaattttaaaagaaaaggggggattggggggtacagtgcaggggaaagaatagtagacataatagcaacagacatacaaactaaag

SEQ ID NO: 14536 - DNA, 301 bp, Artificial Sequence
  Nf1.2_Ercc5.3
  crRNA array
  misc_feature (148)..(157): n is a, c, g, or t
cttggctttatatatcttgtggaaaggacgaaacaccgtaatttctactaagtgtagatggaaacacaacgctggcctctaatttctactaagtgtagatggagtgggtccaggcctcgttaatttctactaagtgtagatttttttnnnnnnnnnnaagcttggcgtggatccgatatcaactagatcttgagacaaatggcagtattcatccacaattttaaaagaaaaggggggattggggggtacagtgcaggggaaagaatagtagacataatagcaacagacatacaaactaaag

SEQ ID NO: 14537 - DNA, 301 bp, Artificial Sequence
  Nf1.2_Ercc5.4
  crRNA array
  misc_feature (148)..(157): n is a, c, g, or t
cttggctttatatatcttgtggaaaggacgaaacaccgtaatttctactaagtgtagatggaaacacaacgctggcctctaatttctactaagtgtagatcagagccggtggaataatgttaatttctactaagtgtagatttttttnnnnnnnnnnaagcttggcgtggatccgatatcaactagatcttgagacaaatggcagtattcatccacaattttaaaagaaaaggggggattggggggtacagtgcaggggaaagaatagtagacataatagcaacagacatacaaactaaag

SEQ ID NO: 14538 - DNA, 301 bp, Artificial Sequence
  Nf1.3_Ercc5.1
  crRNA array
  misc_feature (148)..(157): n is a, c, g, or t
cttggctttatatatcttgtggaaaggacgaaacaccgtaatttctactaagtgtagataatgatggaacgcagtcgcataatttctactaagtgtagatacggcacgagcaagagacactaatttctactaagtgtagatttttttnnnnnnnnnnaagcttggcgtggatccgatatcaactagatcttgagacaaatggcagtattcatccacaattttaaaagaaaaggggggattggggggtacagtgcaggggaaagaatagtagacataatagcaacagacatacaaactaaag

SEQ ID NO: 14539 - DNA, 301 bp, Artificial Sequence
  Nf1.3_Ercc5.2
  crRNA array
  misc_feature (148)..(157): n is a, c, g, or t
cttggctttatatatcttgtggaaaggacgaaacaccgtaatttctactaagtgtagataatgatggaacgcagtcgcataatttctactaagtgtagatgagtatcacatcggtgactctaatttctactaagtgtagatttttttnnnnnnnnnnaagcttggcgtggatccgatatcaactagatcttgagacaaatggcagtattcatccacaattttaaaagaaaaggggggattggggggtacagtgcaggggaaagaatagtagacataatagcaacagacatacaaactaaag

SEQ ID NO: 14540 - DNA, 301 bp, Artificial Sequence
  Nf1.3_Ercc5.3
  crRNA array
  misc_feature (148)..(157): n is a, c, g, or t
cttggctttatatatcttgtggaaaggacgaaacaccgtaatttctactaagtgtagataatgatggaacgcagtcgcataatttctactaagtgtagatggagtgggtccaggcctcgttaatttctactaagtgtagatttttttnnnnnnnnnnaagcttggcgtggatccgatatcaactagatcttgagacaaatggcagtattcatccacaattttaaaagaaaaggggggattggggggtacagtgcaggggaaagaatagtagacataatagcaacagacatacaaactaaag

SEQ ID NO: 14541 - DNA, 301 bp, Artificial Sequence
  Nf1.3_Ercc5.4
  crRNA array
  misc_feature (148)..(157): n is a, c, g, or t
cttggctttatatatcttgtggaaaggacgaaacaccgtaatttctactaagtgtagataatgatggaacgcagtcgcataatttctactaagtgtagatcagagccggtggaataatgttaatttctactaagtgtagatttttttnnnnnnnnnnaagcttggcgtggatccgatatcaactagatcttgagacaaatggcagtattcatccacaattttaaaagaaaaggggggattggggggtacagtgcaggggaaagaatagtagacataatagcaacagacatacaaactaaag

SEQ ID NO: 14542 - DNA, 301 bp, Artificial Sequence
  Nf1.4_Ercc5.1
  crRNA array
  misc_feature (148)..(157): n is a, c, g, or t
cttggctttatatatcttgtggaaaggacgaaacaccgtaatttctactaagtgtagattgcaaaaccatccaccaagttaatttctactaagtgtagatacggcacgagcaagagacactaatttctactaagtgtagatttttttnnnnnnnnnnaagcttggcgtggatccgatatcaactagatcttgagacaaatggcagtattcatccacaattttaaaagaaaaggggggattggggggtacagtgcaggggaaagaatagtagacataatagcaacagacatacaaactaaag

SEQ ID NO: 14543 - DNA, 301 bp, Artificial Sequence
  Nf1.4_Ercc5.2
  crRNA array
  misc_feature (148)..(157): n is a, c, g, or t
cttggctttatatatcttgtggaaaggacgaaacaccgtaatttctactaagtgtagattgcaaaaccatccaccaagttaatttctactaagtgtagatgagtatcacatcggtgactctaatttctactaagtgtagatttttttnnnnnnnnnnaagcttggcgtggatccgatatcaactagatcttgagacaaatggcagtattcatccacaattttaaaagaaaaggggggattggggggtacagtgcaggggaaagaatagtagacataatagcaacagacatacaaactaaag

SEQ ID NO: 14544 - DNA, 301 bp, Artificial Sequence
  Nf1.4_Ercc5.3
  crRNA array
  misc_feature (148)..(157): n is a, c, g, or t
cttggctttatatatcttgtggaaaggacgaaacaccgtaatttctactaagtgtagattgcaaaaccatccaccaagttaatttctactaagtgtagatggagtgggtccaggcctcgttaatttctactaagtgtagatttttttnnnnnnnnnnaagcttggcgtggatccgatatcaactagatcttgagacaaatggcagtattcatccacaattttaaaagaaaaggggggattggggggtacagtgcaggggaaagaatagtagacataatagcaacagacatacaaactaaag

SEQ ID NO: 14545 - DNA, 301 bp, Artificial Sequence
  Nf1.4_Ercc5.4
  crRNA array
  misc_feature (148)..(157): n is a, c, g, or t
cttggctttatatatcttgtggaaaggacgaaacaccgtaatttctactaagtgtagattgcaaaaccatccaccaagttaatttctactaagtgtagatcagagccggtggaataatgttaatttctactaagtgtagatttttttnnnnnnnnnnaagcttggcgtggatccgatatcaactagatcttgagacaaatggcagtattcatccacaattttaaaagaaaaggggggattggggggtacagtgcaggggaaagaatagtagacataatagcaacagacatacaaactaaag

SEQ ID NO: 14546 - DNA, 301 bp, Artificial Sequence
  Nf1.1_Arid1b.1
  crRNA array
  misc_feature (148)..(157): n is a, c, g, or t
cttggctttatatatcttgtggaaaggacgaaacaccgtaatttctactaagtgtagattggcgatccggaatcctctgtaatttctactaagtgtagatgctgctgctgtagtgcgtggtaatttctactaagtgtagatttttttnnnnnnnnnnaagcttggcgtggatccgatatcaactagatcttgagacaaatggcagtattcatccacaattttaaaagaaaaggggggattggggggtacagtgcaggggaaagaatagtagacataatagcaacagacatacaaactaaag

SEQ ID NO: 14547 - DNA, 301 bp, Artificial Sequence
  Nf1.1_Arid1b.2
  crRNA array
  misc_feature (148)..(157): n is a, c, g, or t
cttggctttatatatcttgtggaaaggacgaaacaccgtaatttctactaagtgtagattggcgatccggaatcctctgtaatttctactaagtgtagatagtgcaaaactgagcgcgggtaatttctactaagtgtagatttttttnnnnnnnnnnaagcttggcgtggatccgatatcaactagatcttgagacaaatggcagtattcatccacaattttaaaagaaaaggggggattggggggtacagtgcaggggaaagaatagtagacataatagcaacagacatacaaactaaag

SEQ ID NO: 14548 - DNA, 301 bp, Artificial Sequence
  Nf1.1_Arid1b.3
  crRNA array
  misc_feature (148)..(157): n is a, c, g, or t
cttggctttatatatcttgtggaaaggacgaaacaccgtaatttctactaagtgtagattggcgatccggaatcctctgtaatttctactaagtgtagatcactcaaaggcgaacaggtataatttctactaagtgtagatttttttnnnnnnnnnnaagcttggcgtggatccgatatcaactagatcttgagacaaatggcagtattcatccacaattttaaaagaaaaggggggattggggggtacagtgcaggggaaagaatagtagacataatagcaacagacatacaaactaaag

SEQ ID NO: 14549 - DNA, 301 bp, Artificial Sequence
  Nf1.1_Arid1b.4
  crRNA array
  misc_feature (148)..(157): n is a, c, g, or t
cttggctttatatatcttgtggaaaggacgaaacaccgtaatttctactaagtgtagattggcgatccggaatcctctgtaatttctactaagtgtagatctcctggctccgtagaagcataatttctactaagtgtagatttttttnnnnnnnnnnaagcttggcgtggatccgatatcaactagatcttgagacaaatggcagtattcatccacaattttaaaagaaaaggggggattggggggtacagtgcaggggaaagaatagtagacataatagcaacagacatacaaactaaag

SEQ ID NO: 14550 - DNA, 301 bp, Artificial Sequence
  Nf1.2_Arid1b.1
  crRNA array
  misc_feature (148)..(157): n is a, c, g, or t
cttggctttatatatcttgtggaaaggacgaaacaccgtaatttctactaagtgtagatggaaacacaacgctggcctctaatttctactaagtgtagatgctgctgctgtagtgcgtggtaatttctactaagtgtagatttttttnnnnnnnnnnaagcttggcgtggatccgatatcaactagatcttgagacaaatggcagtattcatccacaattttaaaagaaaaggggggattggggggtacagtgcaggggaaagaatagtagacataatagcaacagacatacaaactaaag

SEQ ID NO: 14551 - DNA, 301 bp, Artificial Sequence
  Nf1.2_Arid1b.2
  crRNA array
  misc_feature (148)..(157): n is a, c, g, or t
cttggctttatatatcttgtggaaaggacgaaacaccgtaatttctactaagtgtagatggaaacacaacgctggcctctaatttctactaagtgtagatagtgcaaaactgagcgcgggtaatttctactaagtgtagatttttttnnnnnnnnnnaagcttggcgtggatccgatatcaactagatcttgagacaaatggcagtattcatccacaattttaaaagaaaaggggggattggggggtacagtgcaggggaaagaatagtagacataatagcaacagacatacaaactaaag

SEQ ID NO: 14552 - DNA, 301 bp, Artificial Sequence
  Nf1.2_Arid1b.3
  crRNA array
  misc_feature (148)..(157): n is a, c, g, or t
cttggctttatatatcttgtggaaaggacgaaacaccgtaatttctactaagtgtagatggaaacacaacgctggcctctaatttctactaagtgtagatcactcaaaggcgaacaggtataatttctactaagtgtagatttttttnnnnnnnnnnaagcttggcgtggatccgatatcaactagatcttgagacaaatggcagtattcatccacaattttaaaagaaaaggggggattggggggtacagtgcaggggaaagaatagtagacataatagcaacagacatacaaactaaag

SEQ ID NO: 14553 - DNA, 301 bp, Artificial Sequence
  Nf1.2_Arid1b.4
  crRNA array
  misc_feature (148)..(157): n is a, c, g, or t
cttggctttatatatcttgtggaaaggacgaaacaccgtaatttctactaagtgtagatggaaacacaacgctggcctctaatttctactaagtgtagatctcctggctccgtagaagcataatttctactaagtgtagatttttttnnnnnnnnnnaagcttggcgtggatccgatatcaactagatcttgagacaaatggcagtattcatccacaattttaaaagaaaaggggggattggggggtacagtgcaggggaaagaatagtagacataatagcaacagacatacaaactaaag

SEQ ID NO: 14554 - DNA, 301 bp, Artificial Sequence
  Nf1.3_Arid1b.1
  crRNA array
  misc_feature (148)..(157): n is a, c, g, or t
cttggctttatatatcttgtggaaaggacgaaacaccgtaatttctactaagtgtagataatgatggaacgcagtcgcataatttctactaagtgtagatgctgctgctgtagtgcgtggtaatttctactaagtgtagatttttttnnnnnnnnnnaagcttggcgtggatccgatatcaactagatcttgagacaaatggcagtattcatccacaattttaaaagaaaaggggggattggggggtacagtgcaggggaaagaatagtagacataatagcaacagacatacaaactaaag

SEQ ID NO: 14555 - DNA, 301 bp, Artificial Sequence
  Nf1.3_Arid1b.2
  crRNA array
  misc_feature (148)..(157): n is a, c, g, or t
cttggctttatatatcttgtggaaaggacgaaacaccgtaatttctactaagtgtagataatgatggaacgcagtcgcataatttctactaagtgtagatagtgcaaaactgagcgcgggtaatttctactaagtgtagatttttttnnnnnnnnnnaagcttggcgtggatccgatatcaactagatcttgagacaaatggcagtattcatccacaattttaaaagaaaaggggggattggggggtacagtgcaggggaaagaatagtagacataatagcaacagacatacaaactaaag

SEQ ID NO: 14556 - DNA, 301 bp, Artificial Sequence
  Nf1.3_Arid1b.3
  crRNA array
  misc_feature (148)..(157): n is a, c, g, or t
cttggctttatatatcttgtggaaaggacgaaacaccgtaatttctactaagtgtagataatgatggaacgcagtcgcataatttctactaagtgtagatcactcaaaggcgaacaggtataatttctactaagtgtagatttttttnnnnnnnnnnaagcttggcgtggatccgatatcaactagatcttgagacaaatggcagtattcatccacaattttaaaagaaaaggggggattggggggtacagtgcaggggaaagaatagtagacataatagcaacagacatacaaactaaag

SEQ ID NO: 14557 - DNA, 301 bp, Artificial Sequence
  Nf1.3_Arid1b.4
  crRNA array
  misc_feature (148)..(157): n is a, c, g, or t
cttggctttatatatcttgtggaaaggacgaaacaccgtaatttctactaagtgtagataatgatggaacgcagtcgcataatttctactaagtgtagatctcctggctccgtagaagcataatttctactaagtgtagatttttttnnnnnnnnnnaagcttggcgtggatccgatatcaactagatcttgagacaaatggcagtattcatccacaattttaaaagaaaaggggggattggggggtacagtgcaggggaaagaatagtagacataatagcaacagacatacaaactaaag

SEQ ID NO: 14558 - DNA, 301 bp, Artificial Sequence
  Nf1.4_Arid1b.1
  crRNA array
  misc_feature (148)..(157): n is a, c, g, or t
cttggctttatatatcttgtggaaaggacgaaacaccgtaatttctactaagtgtagattgcaaaaccatccaccaagttaatttctactaagtgtagatgctgctgctgtagtgcgtggtaatttctactaagtgtagatttttttnnnnnnnnnnaagcttggcgtggatccgatatcaactagatcttgagacaaatggcagtattcatccacaattttaaaagaaaaggggggattggggggtacagtgcaggggaaagaatagtagacataatagcaacagacatacaaactaaag

SEQ ID NO: 14559 - DNA, 301 bp, Artificial Sequence
  Nf1.4_Arid1b.2
  crRNA array
  misc_feature (148)..(157): n is a, c, g, or t
cttggctttatatatcttgtggaaaggacgaaacaccgtaatttctactaagtgtagattgcaaaaccatccaccaagttaatttctactaagtgtagatagtgcaaaactgagcgcgggtaatttctactaagtgtagatttttttnnnnnnnnnnaagcttggcgtggatccgatatcaactagatcttgagacaaatggcagtattcatccacaattttaaaagaaaaggggggattggggggtacagtgcaggggaaagaatagtagacataatagcaacagacatacaaactaaag

SEQ ID NO: 14560 - DNA, 301 bp, Artificial Sequence
  Nf1.4_Arid1b.3
  crRNA array
  misc_feature (148)..(157): n is a, c, g, or t
cttggctttatatatcttgtggaaaggacgaaacaccgtaatttctactaagtgtagattgcaaaaccatccaccaagttaatttctactaagtgtagatcactcaaaggcgaacaggtataatttctactaagtgtagatttttttnnnnnnnnnnaagcttggcgtggatccgatatcaactagatcttgagacaaatggcagtattcatccacaattttaaaagaaaaggggggattggggggtacagtgcaggggaaagaatagtagacataatagcaacagacatacaaactaaag

SEQ ID NO: 14561 - DNA, 301 bp, Artificial Sequence
  Nf1.4_Arid1b.4
  crRNA array
  misc_feature (148)..(157): n is a, c, g, or t
cttggctttatatatcttgtggaaaggacgaaacaccgtaatttctactaagtgtagattgcaaaaccatccaccaagttaatttctactaagtgtagatctcctggctccgtagaagcataatttctactaagtgtagatttttttnnnnnnnnnnaagcttggcgtggatccgatatcaactagatcttgagacaaatggcagtattcatccacaattttaaaagaaaaggggggattggggggtacagtgcaggggaaagaatagtagacataatagcaacagacatacaaactaaag

SEQ ID NO: 14562 - DNA, 301 bp, Artificial Sequence
  Nf1.1_Rb1.1
  crRNA array
  misc_feature (148)..(157): n is a, c, g, or t
cttggctttatatatcttgtggaaaggacgaaacaccgtaatttctactaagtgtagattggcgatccggaatcctctgtaatttctactaagtgtagattctgacatgatcgggtaccttaatttctactaagtgtagatttttttnnnnnnnnnnaagcttggcgtggatccgatatcaactagatcttgagacaaatggcagtattcatccacaattttaaaagaaaaggggggattggggggtacagtgcaggggaaagaatagtagacataatagcaacagacatacaaactaaag

SEQ ID NO: 14563 - DNA, 301 bp, Artificial Sequence
  Nf1.1_Rb1.2
  crRNA array
  misc_feature (148)..(157): n is a, c, g, or t
cttggctttatatatcttgtggaaaggacgaaacaccgtaatttctactaagtgtagattggcgatccggaatcctctgtaatttctactaagtgtagatgtctctgcatgaaaacggagtaatttctactaagtgtagatttttttnnnnnnnnnnaagcttggcgtggatccgatatcaactagatcttgagacaaatggcagtattcatccacaattttaaaagaaaaggggggattggggggtacagtgcaggggaaagaatagtagacataatagcaacagacatacaaactaaag

SEQ ID NO: 14564 - DNA, 301 bp, Artificial Sequence
  Nf1.1_Rb1.3
  crRNA array
  misc_feature (148)..(157): n is a, c, g, or t
cttggctttatatatcttgtggaaaggacgaaacaccgtaatttctactaagtgtagattggcgatccggaatcctctgtaatttctactaagtgtagatagccaatctggtctaataactaatttctactaagtgtagatttttttnnnnnnnnnnaagcttggcgtggatccgatatcaactagatcttgagacaaatggcagtattcatccacaattttaaaagaaaaggggggattggggggtacagtgcaggggaaagaatagtagacataatagcaacagacatacaaactaaag

SEQ ID NO: 14565 - DNA, 301 bp, Artificial Sequence
  Nf1.1_Rb1.4
  crRNA array
  misc_feature (148)..(157): n is a, c, g, or t
cttggctttatatatcttgtggaaaggacgaaacaccgtaatttctactaagtgtagattggcgatccggaatcctctgtaatttctactaagtgtagattgtagctcagtaaaagtgaataatttctactaagtgtagatttttttnnnnnnnnnnaagcttggcgtggatccgatatcaactagatcttgagacaaatggcagtattcatccacaattttaaaagaaaaggggggattggggggtacagtgcaggggaaagaatagtagacataatagcaacagacatacaaactaaag

SEQ ID NO: 14566 - DNA, 301 bp, Artificial Sequence
  Nf1.2_Rb1.1
  crRNA array
  misc_feature (148)..(157): n is a, c, g, or t
cttggctttatatatcttgtggaaaggacgaaacaccgtaatttctactaagtgtagatggaaacacaacgctggcctctaatttctactaagtgtagattctgacatgatcgggtaccttaatttctactaagtgtagatttttttnnnnnnnnnnaagcttggcgtggatccgatatcaactagatcttgagacaaatggcagtattcatccacaattttaaaagaaaaggggggattggggggtacagtgcaggggaaagaatagtagacataatagcaacagacatacaaactaaag

SEQ ID NO: 14567 - DNA, 301 bp, Artificial Sequence
  Nf1.2_Rb1.2
  crRNA array
  misc_feature (148)..(157): n is a, c, g, or t
cttggctttatatatcttgtggaaaggacgaaacaccgtaatttctactaagtgtagatggaaacacaacgctggcctctaatttctactaagtgtagatgtctctgcatgaaaacggagtaatttctactaagtgtagatttttttnnnnnnnnnnaagcttggcgtggatccgatatcaactagatcttgagacaaatggcagtattcatccacaattttaaaagaaaaggggggattggggggtacagtgcaggggaaagaatagtagacataatagcaacagacatacaaactaaag

SEQ ID NO: 14568 - DNA, 301 bp, Artificial Sequence
  Nf1.2_Rb1.3
  crRNA array
  misc_feature (148)..(157): n is a, c, g, or t
cttggctttatatatcttgtggaaaggacgaaacaccgtaatttctactaagtgtagatggaaacacaacgctggcctctaatttctactaagtgtagatagccaatctggtctaataactaatttctactaagtgtagatttttttnnnnnnnnnnaagcttggcgtggatccgatatcaactagatcttgagacaaatggcagtattcatccacaattttaaaagaaaaggggggattggggggtacagtgcaggggaaagaatagtagacataatagcaacagacatacaaactaaag

SEQ ID NO: 14569 - DNA, 301 bp, Artificial Sequence
  Nf1.2_Rb1.4
  crRNA array
  misc_feature (148)..(157): n is a, c, g, or t
cttggctttatatatcttgtggaaaggacgaaacaccgtaatttctactaagtgtagatggaaacacaacgctggcctctaatttctactaagtgtagattgtagctcagtaaaagtgaataatttctactaagtgtagatttttttnnnnnnnnnnaagcttggcgtggatccgatatcaactagatcttgagacaaatggcagtattcatccacaattttaaaagaaaaggggggattggggggtacagtgcaggggaaagaatagtagacataatagcaacagacatacaaactaaag

SEQ ID NO: 14570 - DNA, 301 bp, Artificial Sequence
  Nf1.3_Rb1.1
  crRNA array
  misc_feature (148)..(157): n is a, c, g, or t
cttggctttatatatcttgtggaaaggacgaaacaccgtaatttctactaagtgtagataatgatggaacgcagtcgcataatttctactaagtgtagattctgacatgatcgggtaccttaatttctactaagtgtagatttttttnnnnnnnnnnaagcttggcgtggatccgatatcaactagatcttgagacaaatggcagtattcatccacaattttaaaagaaaaggggggattggggggtacagtgcaggggaaagaatagtagacataatagcaacagacatacaaactaaag

SEQ ID NO: 14571 - DNA, 301 bp, Artificial Sequence
  Nf1.3_Rb1.2
  crRNA array
  misc_feature (148)..(157): n is a, c, g, or t
cttggctttatatatcttgtggaaaggacgaaacaccgtaatttctactaagtgtagataatgatggaacgcagtcgcataatttctactaagtgtagatgtctctgcatgaaaacggagtaatttctactaagtgtagatttttttnnnnnnnnnnaagcttggcgtggatccgatatcaactagatcttgagacaaatggcagtattcatccacaattttaaaagaaaaggggggattggggggtacagtgcaggggaaagaatagtagacataatagcaacagacatacaaactaaag

SEQ ID NO: 14572 - DNA, 301 bp, Artificial Sequence
  Nf1.3_Rb1.3
  crRNA array
  misc_feature (148)..(157): n is a, c, g, or t
cttggctttatatatcttgtggaaaggacgaaacaccgtaatttctactaagtgtagataatgatggaacgcagtcgcataatttctactaagtgtagatagccaatctggtctaataactaatttctactaagtgtagatttttttnnnnnnnnnnaagcttggcgtggatccgatatcaactagatcttgagacaaatggcagtattcatccacaattttaaaagaaaaggggggattggggggtacagtgcaggggaaagaatagtagacataatagcaacagacatacaaactaaag

SEQ ID NO: 14573 - DNA, 301 bp, Artificial Sequence
  Nf1.3_Rb1.4
  crRNA array
  misc_feature (148)..(157): n is a, c, g, or t
cttggctttatatatcttgtggaaaggacgaaacaccgtaatttctactaagtgtagataatgatggaacgcagtcgcataatttctactaagtgtagattgtagctcagtaaaagtgaataatttctactaagtgtagatttttttnnnnnnnnnnaagcttggcgtggatccgatatcaactagatcttgagacaaatggcagtattcatccacaattttaaaagaaaaggggggattggggggtacagtgcaggggaaagaatagtagacataatagcaacagacatacaaactaaag

SEQ ID NO: 14574 - DNA, 301 bp, Artificial Sequence
  Nf1.4_Rb1.1
  crRNA array
  misc_feature (148)..(157): n is a, c, g, or t
cttggctttatatatcttgtggaaaggacgaaacaccgtaatttctactaagtgtagattgcaaaaccatccaccaagttaatttctactaagtgtagattctgacatgatcgggtaccttaatttctactaagtgtagatttttttnnnnnnnnnnaagcttggcgtggatccgatatcaactagatcttgagacaaatggcagtattcatccacaattttaaaagaaaaggggggattggggggtacagtgcaggggaaagaatagtagacataatagcaacagacatacaaactaaag

SEQ ID NO: 14575 - DNA, 301 bp, Artificial Sequence
  Nf1.4_Rb1.2
  crRNA array
  misc_feature (148)..(157): n is a, c, g, or t
cttggctttatatatcttgtggaaaggacgaaacaccgtaatttctactaagtgtagattgcaaaaccatccaccaagttaatttctactaagtgtagatgtctctgcatgaaaacggagtaatttctactaagtgtagatttttttnnnnnnnnnnaagcttggcgtggatccgatatcaactagatcttgagacaaatggcagtattcatccacaattttaaaagaaaaggggggattggggggtacagtgcaggggaaagaatagtagacataatagcaacagacatacaaactaaag

SEQ ID NO: 14576 - DNA, 301 bp, Artificial Sequence
  Nf1.4_Rb1.3
  crRNA array
  misc_feature (148)..(157): n is a, c, g, or t
cttggctttatatatcttgtggaaaggacgaaacaccgtaatttctactaagtgtagattgcaaaaccatccaccaagttaatttctactaagtgtagatagccaatctggtctaataactaatttctactaagtgtagatttttttnnnnnnnnnnaagcttggcgtggatccgatatcaactagatcttgagacaaatggcagtattcatccacaattttaaaagaaaaggggggattggggggtacagtgcaggggaaagaatagtagacataatagcaacagacatacaaactaaag

SEQ ID NO: 14577 - DNA, 301 bp, Artificial Sequence
  Nf1.4_Rb1.4
  crRNA array
  misc_feature (148)..(157): n is a, c, g, or t
cttggctttatatatcttgtggaaaggacgaaacaccgtaatttctactaagtgtagattgcaaaaccatccaccaagttaatttctactaagtgtagattgtagctcagtaaaagtgaataatttctactaagtgtagatttttttnnnnnnnnnnaagcttggcgtggatccgatatcaactagatcttgagacaaatggcagtattcatccacaattttaaaagaaaaggggggattggggggtacagtgcaggggaaagaatagtagacataatagcaacagacatacaaactaaag

SEQ ID NO: 14578 - DNA, 301 bp, Artificial Sequence
  Nf1.1_Kmt2c.1
  crRNA array
  misc_feature (148)..(157): n is a, c, g, or t
cttggctttatatatcttgtggaaaggacgaaacaccgtaatttctactaagtgtagattggcgatccggaatcctctgtaatttctactaagtgtagatactcgacctccacctccctataatttctactaagtgtagatttttttnnnnnnnnnnaagcttggcgtggatccgatatcaactagatcttgagacaaatggcagtattcatccacaattttaaaagaaaaggggggattggggggtacagtgcaggggaaagaatagtagacataatagcaacagacatacaaactaaag

SEQ ID NO: 14579 - DNA, 301 bp, Artificial Sequence
  Nf1.1_Kmt2c.2
  crRNA array
  misc_feature (148)..(157): n is a, c, g, or t
cttggctttatatatcttgtggaaaggacgaaacaccgtaatttctactaagtgtagattggcgatccggaatcctctgtaatttctactaagtgtagatcccaaagatcagcgtggacctaatttctactaagtgtagatttttttnnnnnnnnnnaagcttggcgtggatccgatatcaactagatcttgagacaaatggcagtattcatccacaattttaaaagaaaaggggggattggggggtacagtgcaggggaaagaatagtagacataatagcaacagacatacaaactaaag

SEQ ID NO: 14580 - DNA, 301 bp, Artificial Sequence
  Nf1.1_Kmt2c.3
  crRNA array
  misc_feature (148)..(157): n is a, c, g, or t
cttggctttatatatcttgtggaaaggacgaaacaccgtaatttctactaagtgtagattggcgatccggaatcctctgtaatttctactaagtgtagataaaagatccgaatcgatgcgtaatttctactaagtgtagatttttttnnnnnnnnnnaagcttggcgtggatccgatatcaactagatcttgagacaaatggcagtattcatccacaattttaaaagaaaaggggggattggggggtacagtgcaggggaaagaatagtagacataatagcaacagacatacaaactaaag

SEQ ID NO: 14581 - DNA, 301 bp, Artificial Sequence
  Nf1.1_Kmt2c.4
  crRNA array
  misc_feature (148)..(157): n is a, c, g, or t
cttggctttatatatcttgtggaaaggacgaaacaccgtaatttctactaagtgtagattggcgatccggaatcctctgtaatttctactaagtgtagatctgaggcacatggaagcgattaatttctactaagtgtagatttttttnnnnnnnnnnaagcttggcgtggatccgatatcaactagatcttgagacaaatggcagtattcatccacaattttaaaagaaaaggggggattggggggtacagtgcaggggaaagaatagtagacataatagcaacagacatacaaactaaag

SEQ ID NO: 14582 - DNA, 301 bp, Artificial Sequence
  Nf1.2_Kmt2c.1
  crRNA array
  misc_feature (148)..(157): n is a, c, g, or t
cttggctttatatatcttgtggaaaggacgaaacaccgtaatttctactaagtgtagatggaaacacaacgctggcctctaatttctactaagtgtagatactcgacctccacctccctataatttctactaagtgtagatttttttnnnnnnnnnnaagcttggcgtggatccgatatcaactagatcttgagacaaatggcagtattcatccacaattttaaaagaaaaggggggattggggggtacagtgcaggggaaagaatagtagacataatagcaacagacatacaaactaaag

SEQ ID NO: 14583 - DNA, 301 bp, Artificial Sequence
  Nf1.2_Kmt2c.2
  crRNA array
  misc_feature (148)..(157): n is a, c, g, or t
cttggctttatatatcttgtggaaaggacgaaacaccgtaatttctactaagtgtagatggaaacacaacgctggcctctaatttctactaagtgtagatcccaaagatcagcgtggacctaatttctactaagtgtagatttttttnnnnnnnnnnaagcttggcgtggatccgatatcaactagatcttgagacaaatggcagtattcatccacaattttaaaagaaaaggggggattggggggtacagtgcaggggaaagaatagtagacataatagcaacagacatacaaactaaag

SEQ ID NO: 14584 - DNA, 301 bp, Artificial Sequence
  Nf1.2_Kmt2c.3
  crRNA array
  misc_feature (148)..(157): n is a, c, g, or t
cttggctttatatatcttgtggaaaggacgaaacaccgtaatttctactaagtgtagatggaaacacaacgctggcctctaatttctactaagtgtagataaaagatccgaatcgatgcgtaatttctactaagtgtagatttttttnnnnnnnnnnaagcttggcgtggatccgatatcaactagatcttgagacaaatggcagtattcatccacaattttaaaagaaaaggggggattggggggtacagtgcaggggaaagaatagtagacataatagcaacagacatacaaactaaag

SEQ ID NO: 14585 - DNA, 301 bp, Artificial Sequence
  Nf1.2_Kmt2c.4
  crRNA array
  misc_feature (148)..(157): n is a, c, g, or t
cttggctttatatatcttgtggaaaggacgaaacaccgtaatttctactaagtgtagatggaaacacaacgctggcctctaatttctactaagtgtagatctgaggcacatggaagcgattaatttctactaagtgtagatttttttnnnnnnnnnnaagcttggcgtggatccgatatcaactagatcttgagacaaatggcagtattcatccacaattttaaaagaaaaggggggattggggggtacagtgcaggggaaagaatagtagacataatagcaacagacatacaaactaaag

SEQ ID NO: 14586 - DNA, 301 bp, Artificial Sequence
  Nf1.3_Kmt2c.1
  crRNA array
  misc_feature (148)..(157): n is a, c, g, or t
cttggctttatatatcttgtggaaaggacgaaacaccgtaatttctactaagtgtagataatgatggaacgcagtcgcataatttctactaagtgtagatactcgacctccacctccctataatttctactaagtgtagatttttttnnnnnnnnnnaagcttggcgtggatccgatatcaactagatcttgagacaaatggcagtattcatccacaattttaaaagaaaaggggggattggggggtacagtgcaggggaaagaatagtagacataatagcaacagacatacaaactaaag

SEQ ID NO: 14587 - DNA, 301 bp, Artificial Sequence
  Nf1.3_Kmt2c.2
  crRNA array
  misc_feature (148)..(157): n is a, c, g, or t
cttggctttatatatcttgtggaaaggacgaaacaccgtaatttctactaagtgtagataatgatggaacgcagtcgcataatttctactaagtgtagatcccaaagatcagcgtggacctaatttctactaagtgtagatttttttnnnnnnnnnnaagcttggcgtggatccgatatcaactagatcttgagacaaatggcagtattcatccacaattttaaaagaaaaggggggattggggggtacagtgcaggggaaagaatagtagacataatagcaacagacatacaaactaaag

SEQ ID NO: 14588 - DNA, 301 bp, Artificial Sequence
  Nf1.3_Kmt2c.3
  crRNA array
  misc_feature (148)..(157): n is a, c, g, or t
cttggctttatatatcttgtggaaaggacgaaacaccgtaatttctactaagtgtagataatgatggaacgcagtcgcataatttctactaagtgtagataaaagatccgaatcgatgcgtaatttctactaagtgtagatttttttnnnnnnnnnnaagcttggcgtggatccgatatcaactagatcttgagacaaatggcagtattcatccacaattttaaaagaaaaggggggattggggggtacagtgcaggggaaagaatagtagacataatagcaacagacatacaaactaaag

SEQ ID NO: 14589 - DNA, 301 bp, Artificial Sequence
  Nf1.3_Kmt2c.4
  crRNA array
  misc_feature (148)..(157): n is a, c, g, or t
cttggctttatatatcttgtggaaaggacgaaacaccgtaatttctactaagtgtagataatgatggaacgcagtcgcataatttctactaagtgtagatctgaggcacatggaagcgattaatttctactaagtgtagatttttttnnnnnnnnnnaagcttggcgtggatccgatatcaactagatcttgagacaaatggcagtattcatccacaattttaaaagaaaaggggggattggggggtacagtgcaggggaaagaatagtagacataatagcaacagacatacaaactaaag

SEQ ID NO: 14590 - DNA, 301 bp, Artificial Sequence
  Nf1.4_Kmt2c.1
  crRNA array
  misc_feature (148)..(157): n is a, c, g, or t
cttggctttatatatcttgtggaaaggacgaaacaccgtaatttctactaagtgtagattgcaaaaccatccaccaagttaatttctactaagtgtagatactcgacctccacctccctataatttctactaagtgtagatttttttnnnnnnnnnnaagcttggcgtggatccgatatcaactagatcttgagacaaatggcagtattcatccacaattttaaaagaaaaggggggattggggggtacagtgcaggggaaagaatagtagacataatagcaacagacatacaaactaaag

SEQ ID NO: 14591 - DNA, 301 bp, Artificial Sequence
  Nf1.4_Kmt2c.2
  crRNA array
  misc_feature (148)..(157): n is a, c, g, or t
cttggctttatatatcttgtggaaaggacgaaacaccgtaatttctactaagtgtagattgcaaaaccatccaccaagttaatttctactaagtgtagatcccaaagatcagcgtggacctaatttctactaagtgtagatttttttnnnnnnnnnnaagcttggcgtggatccgatatcaactagatcttgagacaaatggcagtattcatccacaattttaaaagaaaaggggggattggggggtacagtgcaggggaaagaatagtagacataatagcaacagacatacaaactaaag

SEQ ID NO: 14592 - DNA, 301 bp, Artificial Sequence
  Nf1.4_Kmt2c.3
  crRNA array
  misc_feature (148)..(157): n is a, c, g, or t
cttggctttatatatcttgtggaaaggacgaaacaccgtaatttctactaagtgtagattgcaaaaccatccaccaagttaatttctactaagtgtagataaaagatccgaatcgatgcgtaatttctactaagtgtagatttttttnnnnnnnnnnaagcttggcgtggatccgatatcaactagatcttgagacaaatggcagtattcatccacaattttaaaagaaaaggggggattggggggtacagtgcaggggaaagaatagtagacataatagcaacagacatacaaactaaag

SEQ ID NO: 14593 - DNA, 301 bp, Artificial Sequence
  Nf1.4_Kmt2c.4
  crRNA array
  misc_feature (148)..(157): n is a, c, g, or t
cttggctttatatatcttgtggaaaggacgaaacaccgtaatttctactaagtgtagattgcaaaaccatccaccaagttaatttctactaagtgtagatctgaggcacatggaagcgattaatttctactaagtgtagatttttttnnnnnnnnnnaagcttggcgtggatccgatatcaactagatcttgagacaaatggcagtattcatccacaattttaaaagaaaaggggggattggggggtacagtgcaggggaaagaatagtagacataatagcaacagacatacaaactaaag

SEQ ID NO: 14594 - DNA, 301 bp, Artificial Sequence
  Nf1.1_Pten.1
  crRNA array
  misc_feature (148)..(157): n is a, c, g, or t
cttggctttatatatcttgtggaaaggacgaaacaccgtaatttctactaagtgtagattggcgatccggaatcctctgtaatttctactaagtgtagataagcgtggtgcgtgacgcactaatttctactaagtgtagatttttttnnnnnnnnnnaagcttggcgtggatccgatatcaactagatcttgagacaaatggcagtattcatccacaattttaaaagaaaaggggggattggggggtacagtgcaggggaaagaatagtagacataatagcaacagacatacaaactaaag

SEQ ID NO: 14595 - DNA, 301 bp, Artificial Sequence
  Nf1.1_Pten.2
  crRNA array
  misc_feature (148)..(157): n is a, c, g, or t
cttggctttatatatcttgtggaaaggacgaaacaccgtaatttctactaagtgtagattggcgatccggaatcctctgtaatttctactaagtgtagattgtcaccagctgaagtggcttaatttctactaagtgtagatttttttnnnnnnnnnnaagcttggcgtggatccgatatcaactagatcttgagacaaatggcagtattcatccacaattttaaaagaaaaggggggattggggggtacagtgcaggggaaagaatagtagacataatagcaacagacatacaaactaaag

SEQ ID NO: 14596 - DNA, 301 bp, Artificial Sequence
  Nf1.1_Pten.3
  crRNA array
  misc_feature (148)..(157): n is a, c, g, or t
cttggctttatatatcttgtggaaaggacgaaacaccgtaatttctactaagtgtagattggcgatccggaatcctctgtaatttctactaagtgtagatggagtcaagaggctgatttttaatttctactaagtgtagatttttttnnnnnnnnnnaagcttggcgtggatccgatatcaactagatcttgagacaaatggcagtattcatccacaattttaaaagaaaaggggggattggggggtacagtgcaggggaaagaatagtagacataatagcaacagacatacaaactaaag

SEQ ID NO: 14597 - DNA, 301 bp, Artificial Sequence
  Nf1.1_Pten.4
  crRNA array
  misc_feature (148)..(157): n is a, c, g, or t
cttggctttatatatcttgtggaaaggacgaaacaccgtaatttctactaagtgtagattggcgatccggaatcctctgtaatttctactaagtgtagatctgtaagctaaaccactacataatttctactaagtgtagatttttttnnnnnnnnnnaagcttggcgtggatccgatatcaactagatcttgagacaaatggcagtattcatccacaattttaaaagaaaaggggggattggggggtacagtgcaggggaaagaatagtagacataatagcaacagacatacaaactaaag

SEQ ID NO: 14598 - DNA, 301 bp, Artificial Sequence
  Nf1.2_Pten.1
  crRNA array
  misc_feature (148)..(157): n is a, c, g, or t
cttggctttatatatcttgtggaaaggacgaaacaccgtaatttctactaagtgtagatggaaacacaacgctggcctctaatttctactaagtgtagataagcgtggtgcgtgacgcactaatttctactaagtgtagatttttttnnnnnnnnnnaagcttggcgtggatccgatatcaactagatcttgagacaaatggcagtattcatccacaattttaaaagaaaaggggggattggggggtacagtgcaggggaaagaatagtagacataatagcaacagacatacaaactaaag

SEQ ID NO: 14599 - DNA, 301 bp, Artificial Sequence
  Nf1.2_Pten.2
  crRNA array
  misc_feature (148)..(157): n is a, c, g, or t
cttggctttatatatcttgtggaaaggacgaaacaccgtaatttctactaagtgtagatggaaacacaacgctggcctctaatttctactaagtgtagattgtcaccagctgaagtggcttaatttctactaagtgtagatttttttnnnnnnnnnnaagcttggcgtggatccgatatcaactagatcttgagacaaatggcagtattcatccacaattttaaaagaaaaggggggattggggggtacagtgcaggggaaagaatagtagacataatagcaacagacatacaaactaaag

SEQ ID NO: 14600 - DNA, 301 bp, Artificial Sequence
  Nf1.2_Pten.3
  crRNA array
  misc_feature (148)..(157): n is a, c, g, or t
cttggctttatatatcttgtggaaaggacgaaacaccgtaatttctactaagtgtagatggaaacacaacgctggcctctaatttctactaagtgtagatggagtcaagaggctgatttttaatttctactaagtgtagatttttttnnnnnnnnnnaagcttggcgtggatccgatatcaactagatcttgagacaaatggcagtattcatccacaattttaaaagaaaaggggggattggggggtacagtgcaggggaaagaatagtagacataatagcaacagacatacaaactaaag

SEQ ID NO: 14601 - DNA, 301 bp, Artificial Sequence
  Nf1.2_Pten.4
  crRNA array
  misc_feature (148)..(157): n is a, c, g, or t
cttggctttatatatcttgtggaaaggacgaaacaccgtaatttctactaagtgtagatggaaacacaacgctggcctctaatttctactaagtgtagatctgtaagctaaaccactacataatttctactaagtgtagatttttttnnnnnnnnnnaagcttggcgtggatccgatatcaactagatcttgagacaaatggcagtattcatccacaattttaaaagaaaaggggggattggggggtacagtgcaggggaaagaatagtagacataatagcaacagacatacaaactaaag

SEQ ID NO: 14602 - DNA, 301 bp, Artificial Sequence
  Nf1.3_Pten.1
  crRNA array
  misc_feature (148)..(157): n is a, c, g, or t
cttggctttatatatcttgtggaaaggacgaaacaccgtaatttctactaagtgtagataatgatggaacgcagtcgcataatttctactaagtgtagataagcgtggtgcgtgacgcactaatttctactaagtgtagatttttttnnnnnnnnnnaagcttggcgtggatccgatatcaactagatcttgagacaaatggcagtattcatccacaattttaaaagaaaaggggggattggggggtacagtgcaggggaaagaatagtagacataatagcaacagacatacaaactaaag

SEQ ID NO: 14603 - DNA, 301 bp, Artificial Sequence
  Nf1.3_Pten.2
  crRNA array
  misc_feature (148)..(157): n is a, c, g, or t
cttggctttatatatcttgtggaaaggacgaaacaccgtaatttctactaagtgtagataatgatggaacgcagtcgcataatttctactaagtgtagattgtcaccagctgaagtggcttaatttctactaagtgtagatttttttnnnnnnnnnnaagcttggcgtggatccgatatcaactagatcttgagacaaatggcagtattcatccacaattttaaaagaaaaggggggattggggggtacagtgcaggggaaagaatagtagacataatagcaacagacatacaaactaaag

SEQ ID NO: 14604 - DNA, 301 bp, Artificial Sequence
  Nf1.3_Pten.3
  crRNA array
  misc_feature (148)..(157): n is a, c, g, or t
cttggctttatatatcttgtggaaaggacgaaacaccgtaatttctactaagtgtagataatgatggaacgcagtcgcataatttctactaagtgtagatggagtcaagaggctgatttttaatttctactaagtgtagatttttttnnnnnnnnnnaagcttggcgtggatccgatatcaactagatcttgagacaaatggcagtattcatccacaattttaaaagaaaaggggggattggggggtacagtgcaggggaaagaatagtagacataatagcaacagacatacaaactaaag

SEQ ID NO: 14605 - DNA, 301 bp, Artificial Sequence
  Nf1.3_Pten.4
  crRNA array
  misc_feature (148)..(157): n is a, c, g, or t
cttggctttatatatcttgtggaaaggacgaaacaccgtaatttctactaagtgtagataatgatggaacgcagtcgcataatttctactaagtgtagatctgtaagctaaaccactacataatttctactaagtgtagatttttttnnnnnnnnnnaagcttggcgtggatccgatatcaactagatcttgagacaaatggcagtattcatccacaattttaaaagaaaaggggggattggggggtacagtgcaggggaaagaatagtagacataatagcaacagacatacaaactaaag

SEQ ID NO: 14606 - DNA, 301 bp, Artificial Sequence
  Nf1.4_Pten.1
  crRNA array
  misc_feature (148)..(157): n is a, c, g, or t
cttggctttatatatcttgtggaaaggacgaaacaccgtaatttctactaagtgtagattgcaaaaccatccaccaagttaatttctactaagtgtagataagcgtggtgcgtgacgcactaatttctactaagtgtagatttttttnnnnnnnnnnaagcttggcgtggatccgatatcaactagatcttgagacaaatggcagtattcatccacaattttaaaagaaaaggggggattggggggtacagtgcaggggaaagaatagtagacataatagcaacagacatacaaactaaag

SEQ ID NO: 14607 - DNA, 301 bp, Artificial Sequence
  Nf1.4_Pten.2
  crRNA array
  misc_feature (148)..(157): n is a, c, g, or t
cttggctttatatatcttgtggaaaggacgaaacaccgtaatttctactaagtgtagattgcaaaaccatccaccaagttaatttctactaagtgtagattgtcaccagctgaagtggcttaatttctactaagtgtagatttttttnnnnnnnnnnaagcttggcgtggatccgatatcaactagatcttgagacaaatggcagtattcatccacaattttaaaagaaaaggggggattggggggtacagtgcaggggaaagaatagtagacataatagcaacagacatacaaactaaag

SEQ ID NO: 14608 - DNA, 301 bp, Artificial Sequence
  Nf1.4_Pten.3
  crRNA array
  misc_feature (148)..(157): n is a, c, g, or t
cttggctttatatatcttgtggaaaggacgaaacaccgtaatttctactaagtgtagattgcaaaaccatccaccaagttaatttctactaagtgtagatggagtcaagaggctgatttttaatttctactaagtgtagatttttttnnnnnnnnnnaagcttggcgtggatccgatatcaactagatcttgagacaaatggcagtattcatccacaattttaaaagaaaaggggggattggggggtacagtgcaggggaaagaatagtagacataatagcaacagacatacaaactaaag

SEQ ID NO: 14609 - DNA, 301 bp, Artificial Sequence
  Nf1.4_Pten.4
  crRNA array
  misc_feature (148)..(157): n is a, c, g, or t
cttggctttatatatcttgtggaaaggacgaaacaccgtaatttctactaagtgtagattgcaaaaccatccaccaagttaatttctactaagtgtagatctgtaagctaaaccactacataatttctactaagtgtagatttttttnnnnnnnnnnaagcttggcgtggatccgatatcaactagatcttgagacaaatggcagtattcatccacaattttaaaagaaaaggggggattggggggtacagtgcaggggaaagaatagtagacataatagcaacagacatacaaactaaag

SEQ ID NO: 14610 - DNA, 301 bp, Artificial Sequence
  Nf1.1_Atm.1
  crRNA array
  misc_feature (148)..(157): n is a, c, g, or t
cttggctttatatatcttgtggaaaggacgaaacaccgtaatttctactaagtgtagattggcgatccggaatcctctgtaatttctactaagtgtagatgagaaagtctccgaatcgtttaatttctactaagtgtagatttttttnnnnnnnnnnaagcttggcgtggatccgatatcaactagatcttgagacaaatggcagtattcatccacaattttaaaagaaaaggggggattggggggtacagtgcaggggaaagaatagtagacataatagcaacagacatacaaactaaag

SEQ ID NO: 14611 - DNA, 301 bp, Artificial Sequence
  Nf1.1_Atm.2
  crRNA array
  misc_feature (148)..(157): n is a, c, g, or t
cttggctttatatatcttgtggaaaggacgaaacaccgtaatttctactaagtgtagattggcgatccggaatcctctgtaatttctactaagtgtagatcctacgagggcacgagagactaatttctactaagtgtagatttttttnnnnnnnnnnaagcttggcgtggatccgatatcaactagatcttgagacaaatggcagtattcatccacaattttaaaagaaaaggggggattggggggtacagtgcaggggaaagaatagtagacataatagcaacagacatacaaactaaag

SEQ ID NO: 14612 - DNA, 301 bp, Artificial Sequence
  Nf1.1_Atm.3
  crRNA array
  misc_feature (148)..(157): n is a, c, g, or t
cttggctttatatatcttgtggaaaggacgaaacaccgtaatttctactaagtgtagattggcgatccggaatcctctgtaatttctactaagtgtagattgaaagtctccgatatgccataatttctactaagtgtagatttttttnnnnnnnnnnaagcttggcgtggatccgatatcaactagatcttgagacaaatggcagtattcatccacaattttaaaagaaaaggggggattggggggtacagtgcaggggaaagaatagtagacataatagcaacagacatacaaactaaag

SEQ ID NO: 14613 - DNA, 301 bp, Artificial Sequence
  Nf1.1_Atm.4
  crRNA array
  misc_feature (148)..(157): n is a, c, g, or t
cttggctttatatatcttgtggaaaggacgaaacaccgtaatttctactaagtgtagattggcgatccggaatcctctgtaatttctactaagtgtagatggtggtgatcagtcaagtagtaatttctactaagtgtagatttttttnnnnnnnnnnaagcttggcgtggatccgatatcaactagatcttgagacaaatggcagtattcatccacaattttaaaagaaaaggggggattggggggtacagtgcaggggaaagaatagtagacataatagcaacagacatacaaactaaag

SEQ ID NO: 14614 - DNA, 301 bp, Artificial Sequence
  Nf1.2_Atm.1
  crRNA array
  misc_feature (148)..(157): n is a, c, g, or t
cttggctttatatatcttgtggaaaggacgaaacaccgtaatttctactaagtgtagatggaaacacaacgctggcctctaatttctactaagtgtagatgagaaagtctccgaatcgtttaatttctactaagtgtagatttttttnnnnnnnnnnaagcttggcgtggatccgatatcaactagatcttgagacaaatggcagtattcatccacaattttaaaagaaaaggggggattggggggtacagtgcaggggaaagaatagtagacataatagcaacagacatacaaactaaag

SEQ ID NO: 14615 - DNA, 301 bp, Artificial Sequence
  Nf1.2_Atm.2
  crRNA array
  misc_feature (148)..(157): n is a, c, g, or t
cttggctttatatatcttgtggaaaggacgaaacaccgtaatttctactaagtgtagatggaaacacaacgctggcctctaatttctactaagtgtagatcctacgagggcacgagagactaatttctactaagtgtagatttttttnnnnnnnnnnaagcttggcgtggatccgatatcaactagatcttgagacaaatggcagtattcatccacaattttaaaagaaaaggggggattggggggtacagtgcaggggaaagaatagtagacataatagcaacagacatacaaactaaag

SEQ ID NO: 14616 - DNA, 301 bp, Artificial Sequence
  Nf1.2_Atm.3
  crRNA array
  misc_feature (148)..(157): n is a, c, g, or t
cttggctttatatatcttgtggaaaggacgaaacaccgtaatttctactaagtgtagatggaaacacaacgctggcctctaatttctactaagtgtagattgaaagtctccgatatgccataatttctactaagtgtagatttttttnnnnnnnnnnaagcttggcgtggatccgatatcaactagatcttgagacaaatggcagtattcatccacaattttaaaagaaaaggggggattggggggtacagtgcaggggaaagaatagtagacataatagcaacagacatacaaactaaag

SEQ ID NO: 14617 - DNA, 301 bp, Artificial Sequence
  Nf1.2_Atm.4
  crRNA array
  misc_feature (148)..(157): n is a, c, g, or t
cttggctttatatatcttgtggaaaggacgaaacaccgtaatttctactaagtgtagatggaaacacaacgctggcctctaatttctactaagtgtagatggtggtgatcagtcaagtagtaatttctactaagtgtagatttttttnnnnnnnnnnaagcttggcgtggatccgatatcaactagatcttgagacaaatggcagtattcatccacaattttaaaagaaaaggggggattggggggtacagtgcaggggaaagaatagtagacataatagcaacagacatacaaactaaag

SEQ ID NO: 14618 - DNA, 301 bp, Artificial Sequence
  Nf1.3_Atm.1
  crRNA array
  misc_feature (148)..(157): n is a, c, g, or t
cttggctttatatatcttgtggaaaggacgaaacaccgtaatttctactaagtgtagataatgatggaacgcagtcgcataatttctactaagtgtagatgagaaagtctccgaatcgtttaatttctactaagtgtagatttttttnnnnnnnnnnaagcttggcgtggatccgatatcaactagatcttgagacaaatggcagtattcatccacaattttaaaagaaaaggggggattggggggtacagtgcaggggaaagaatagtagacataatagcaacagacatacaaactaaag

SEQ ID NO: 14619 - DNA, 301 bp, Artificial Sequence
  Nf1.3_Atm.2
  crRNA array
  misc_feature (148)..(157): n is a, c, g, or t
cttggctttatatatcttgtggaaaggacgaaacaccgtaatttctactaagtgtagataatgatggaacgcagtcgcataatttctactaagtgtagatcctacgagggcacgagagactaatttctactaagtgtagatttttttnnnnnnnnnnaagcttggcgtggatccgatatcaactagatcttgagacaaatggcagtattcatccacaattttaaaagaaaaggggggattggggggtacagtgcaggggaaagaatagtagacataatagcaacagacatacaaactaaag

SEQ ID NO: 14620 - DNA, 301 bp, Artificial Sequence
  Nf1.3_Atm.3
  crRNA array
  misc_feature (148)..(157): n is a, c, g, or t
cttggctttatatatcttgtggaaaggacgaaacaccgtaatttctactaagtgtagataatgatggaacgcagtcgcataatttctactaagtgtagattgaaagtctccgatatgccataatttctactaagtgtagatttttttnnnnnnnnnnaagcttggcgtggatccgatatcaactagatcttgagacaaatggcagtattcatccacaattttaaaagaaaaggggggattggggggtacagtgcaggggaaagaatagtagacataatagcaacagacatacaaactaaag

SEQ ID NO: 14621 - DNA, 301 bp, Artificial Sequence
  Nf1.3_Atm.4
  crRNA array
  misc_feature (148)..(157): n is a, c, g, or t
cttggctttatatatcttgtggaaaggacgaaacaccgtaatttctactaagtgtagataatgatggaacgcagtcgcataatttctactaagtgtagatggtggtgatcagtcaagtagtaatttctactaagtgtagatttttttnnnnnnnnnnaagcttggcgtggatccgatatcaactagatcttgagacaaatggcagtattcatccacaattttaaaagaaaaggggggattggggggtacagtgcaggggaaagaatagtagacataatagcaacagacatacaaactaaag

SEQ ID NO: 14622 - DNA, 301 bp, Artificial Sequence
  Nf1.4_Atm.1
  crRNA array
  misc_feature (148)..(157): n is a, c, g, or t
cttggctttatatatcttgtggaaaggacgaaacaccgtaatttctactaagtgtagattgcaaaaccatccaccaagttaatttctactaagtgtagatgagaaagtctccgaatcgtttaatttctactaagtgtagatttttttnnnnnnnnnnaagcttggcgtggatccgatatcaactagatcttgagacaaatggcagtattcatccacaattttaaaagaaaaggggggattggggggtacagtgcaggggaaagaatagtagacataatagcaacagacatacaaactaaag

SEQ ID NO: 14623 - DNA, 301 bp, Artificial Sequence
  Nf1.4_Atm.2
  crRNA array
  misc_feature (148)..(157): n is a, c, g, or t
cttggctttatatatcttgtggaaaggacgaaacaccgtaatttctactaagtgtagattgcaaaaccatccaccaagttaatttctactaagtgtagatcctacgagggcacgagagactaatttctactaagtgtagatttttttnnnnnnnnnnaagcttggcgtggatccgatatcaactagatcttgagacaaatggcagtattcatccacaattttaaaagaaaaggggggattggggggtacagtgcaggggaaagaatagtagacataatagcaacagacatacaaactaaag

SEQ ID NO: 14624 - DNA, 301 bp, Artificial Sequence
  Nf1.4_Atm.3
  crRNA array
  misc_feature (148)..(157): n is a, c, g, or t
cttggctttatatatcttgtggaaaggacgaaacaccgtaatttctactaagtgtagattgcaaaaccatccaccaagttaatttctactaagtgtagattgaaagtctccgatatgccataatttctactaagtgtagatttttttnnnnnnnnnnaagcttggcgtggatccgatatcaactagatcttgagacaaatggcagtattcatccacaattttaaaagaaaaggggggattggggggtacagtgcaggggaaagaatagtagacataatagcaacagacatacaaactaaag

SEQ ID NO: 14625 - DNA, 301 bp, Artificial Sequence
  Nf1.4_Atm.4
  crRNA array
  misc_feature (148)..(157): n is a, c, g, or t
cttggctttatatatcttgtggaaaggacgaaacaccgtaatttctactaagtgtagattgcaaaaccatccaccaagttaatttctactaagtgtagatggtggtgatcagtcaagtagtaatttctactaagtgtagatttttttnnnnnnnnnnaagcttggcgtggatccgatatcaactagatcttgagacaaatggcagtattcatccacaattttaaaagaaaaggggggattggggggtacagtgcaggggaaagaatagtagacataatagcaacagacatacaaactaaag

SEQ ID NO: 14626 - DNA, 301 bp, Artificial Sequence
  Kdm6a.1_Ercc5.1
  crRNA array
  misc_feature (148)..(157): n is a, c, g, or t
cttggctttatatatcttgtggaaaggacgaaacaccgtaatttctactaagtgtagatgctgccgcctctcgcggcagtaatttctactaagtgtagatacggcacgagcaagagacactaatttctactaagtgtagatttttttnnnnnnnnnnaagcttggcgtggatccgatatcaactagatcttgagacaaatggcagtattcatccacaattttaaaagaaaaggggggattggggggtacagtgcaggggaaagaatagtagacataatagcaacagacatacaaactaaag

SEQ ID NO: 14627 - DNA, 301 bp, Artificial Sequence
  Kdm6a.1_Ercc5.2
  crRNA array
  misc_feature (148)..(157): n is a, c, g, or t
cttggctttatatatcttgtggaaaggacgaaacaccgtaatttctactaagtgtagatgctgccgcctctcgcggcagtaatttctactaagtgtagatgagtatcacatcggtgactctaatttctactaagtgtagatttttttnnnnnnnnnnaagcttggcgtggatccgatatcaactagatcttgagacaaatggcagtattcatccacaattttaaaagaaaaggggggattggggggtacagtgcaggggaaagaatagtagacataatagcaacagacatacaaactaaag

SEQ ID NO: 14628 - DNA, 301 bp, Artificial Sequence
  Kdm6a.1_Ercc5.3
  crRNA array
  misc_feature (148)..(157): n is a, c, g, or t
cttggctttatatatcttgtggaaaggacgaaacaccgtaatttctactaagtgtagatgctgccgcctctcgcggcagtaatttctactaagtgtagatggagtgggtccaggcctcgttaatttctactaagtgtagatttttttnnnnnnnnnnaagcttggcgtggatccgatatcaactagatcttgagacaaatggcagtattcatccacaattttaaaagaaaaggggggattggggggtacagtgcaggggaaagaatagtagacataatagcaacagacatacaaactaaag

SEQ ID NO: 14629 - DNA, 301 bp, Artificial Sequence
  Kdm6a.1_Ercc5.4
  crRNA array
  misc_feature (148)..(157): n is a, c, g, or t
cttggctttatatatcttgtggaaaggacgaaacaccgtaatttctactaagtgtagatgctgccgcctctcgcggcagtaatttctactaagtgtagatcagagccggtggaataatgttaatttctactaagtgtagatttttttnnnnnnnnnnaagcttggcgtggatccgatatcaactagatcttgagacaaatggcagtattcatccacaattttaaaagaaaaggggggattggggggtacagtgcaggggaaagaatagtagacataatagcaacagacatacaaactaaag

SEQ ID NO: 14630 - DNA, 301 bp, Artificial Sequence
  Kdm6a.2_Ercc5.1
  crRNA array
  misc_feature (148)..(157): n is a, c, g, or t
cttggctttatatatcttgtggaaaggacgaaacaccgtaatttctactaagtgtagatgctgcaggtaaggcacgttttaatttctactaagtgtagatacggcacgagcaagagacactaatttctactaagtgtagatttttttnnnnnnnnnnaagcttggcgtggatccgatatcaactagatcttgagacaaatggcagtattcatccacaattttaaaagaaaaggggggattggggggtacagtgcaggggaaagaatagtagacataatagcaacagacatacaaactaaag

SEQ ID NO: 14631 - DNA, 301 bp, Artificial Sequence
  Kdm6a.2_Ercc5.2
  crRNA array
  misc_feature (148)..(157): n is a, c, g, or t
cttggctttatatatcttgtggaaaggacgaaacaccgtaatttctactaagtgtagatgctgcaggtaaggcacgttttaatttctactaagtgtagatgagtatcacatcggtgactctaatttctactaagtgtagatttttttnnnnnnnnnnaagcttggcgtggatccgatatcaactagatcttgagacaaatggcagtattcatccacaattttaaaagaaaaggggggattggggggtacagtgcaggggaaagaatagtagacataatagcaacagacatacaaactaaag

SEQ ID NO: 14632 - DNA, 301 bp, Artificial Sequence
  Kdm6a.2_Ercc5.3
  crRNA array
  misc_feature (148)..(157): n is a, c, g, or t
cttggctttatatatcttgtggaaaggacgaaacaccgtaatttctactaagtgtagatgctgcaggtaaggcacgttttaatttctactaagtgtagatggagtgggtccaggcctcgttaatttctactaagtgtagatttttttnnnnnnnnnnaagcttggcgtggatccgatatcaactagatcttgagacaaatggcagtattcatccacaattttaaaagaaaaggggggattggggggtacagtgcaggggaaagaatagtagacataatagcaacagacatacaaactaaag

SEQ ID NO: 14633 - DNA, 301 bp, Artificial Sequence
  Kdm6a.2_Ercc5.4
  crRNA array
  misc_feature (148)..(157): n is a, c, g, or t
cttggctttatatatcttgtggaaaggacgaaacaccgtaatttctactaagtgtagatgctgcaggtaaggcacgttttaatttctactaagtgtagatcagagccggtggaataatgttaatttctactaagtgtagatttttttnnnnnnnnnnaagcttggcgtggatccgatatcaactagatcttgagacaaatggcagtattcatccacaattttaaaagaaaaggggggattggggggtacagtgcaggggaaagaatagtagacataatagcaacagacatacaaactaaag

SEQ ID NO: 14634 - DNA, 301 bp, Artificial Sequence
  Kdm6a.3_Ercc5.1
  crRNA array
  misc_feature (148)..(157): n is a, c, g, or t
cttggctttatatatcttgtggaaaggacgaaacaccgtaatttctactaagtgtagattgctggtgccggggaagttttaatttctactaagtgtagatacggcacgagcaagagacactaatttctactaagtgtagatttttttnnnnnnnnnnaagcttggcgtggatccgatatcaactagatcttgagacaaatggcagtattcatccacaattttaaaagaaaaggggggattggggggtacagtgcaggggaaagaatagtagacataatagcaacagacatacaaactaaag

SEQ ID NO: 14635 - DNA, 301 bp, Artificial Sequence
  Kdm6a.3_Ercc5.2
  crRNA array
  misc_feature (148)..(157): n is a, c, g, or t
cttggctttatatatcttgtggaaaggacgaaacaccgtaatttctactaagtgtagattgctggtgccggggaagttttaatttctactaagtgtagatgagtatcacatcggtgactctaatttctactaagtgtagatttttttnnnnnnnnnnaagcttggcgtggatccgatatcaactagatcttgagacaaatggcagtattcatccacaattttaaaagaaaaggggggattggggggtacagtgcaggggaaagaatagtagacataatagcaacagacatacaaactaaag

SEQ ID NO: 14636 - DNA, 301 bp, Artificial Sequence
  Kdm6a.3_Ercc5.3
  crRNA array
  misc_feature (148)..(157): n is a, c, g, or t
cttggctttatatatcttgtggaaaggacgaaacaccgtaatttctactaagtgtagattgctggtgccggggaagttttaatttctactaagtgtagatggagtgggtccaggcctcgttaatttctactaagtgtagatttttttnnnnnnnnnnaagcttggcgtggatccgatatcaactagatcttgagacaaatggcagtattcatccacaattttaaaagaaaaggggggattggggggtacagtgcaggggaaagaatagtagacataatagcaacagacatacaaactaaag

SEQ ID NO: 14637 - DNA, 301 bp, Artificial Sequence
  Kdm6a.3_Ercc5.4
  crRNA array
  misc_feature (148)..(157): n is a, c, g, or t
cttggctttatatatcttgtggaaaggacgaaacaccgtaatttctactaagtgtagattgctggtgccggggaagttttaatttctactaagtgtagatcagagccggtggaataatgttaatttctactaagtgtagatttttttnnnnnnnnnnaagcttggcgtggatccgatatcaactagatcttgagacaaatggcagtattcatccacaattttaaaagaaaaggggggattggggggtacagtgcaggggaaagaatagtagacataatagcaacagacatacaaactaaag

SEQ ID NO: 14638 - DNA, 301 bp, Artificial Sequence
  Kdm6a.4_Ercc5.1
  crRNA array
  misc_feature (148)..(157): n is a, c, g, or t
cttggctttatatatcttgtggaaaggacgaaacaccgtaatttctactaagtgtagattgtctcctacgaatcccccctaatttctactaagtgtagatacggcacgagcaagagacactaatttctactaagtgtagatttttttnnnnnnnnnnaagcttggcgtggatccgatatcaactagatcttgagacaaatggcagtattcatccacaattttaaaagaaaaggggggattggggggtacagtgcaggggaaagaatagtagacataatagcaacagacatacaaactaaag

SEQ ID NO: 14639 - DNA, 301 bp, Artificial Sequence
  Kdm6a.4_Ercc5.2
  crRNA array
  misc_feature (148)..(157): n is a, c, g, or t
cttggctttatatatcttgtggaaaggacgaaacaccgtaatttctactaagtgtagattgtctcctacgaatcccccctaatttctactaagtgtagatgagtatcacatcggtgactctaatttctactaagtgtagatttttttnnnnnnnnnnaagcttggcgtggatccgatatcaactagatcttgagacaaatggcagtattcatccacaattttaaaagaaaaggggggattggggggtacagtgcaggggaaagaatagtagacataatagcaacagacatacaaactaaag

SEQ ID NO: 14640 - DNA, 301 bp, Artificial Sequence
  Kdm6a.4_Ercc5.3
  crRNA array
  misc_feature (148)..(157): n is a, c, g, or t
cttggctttatatatcttgtggaaaggacgaaacaccgtaatttctactaagtgtagattgtctcctacgaatcccccctaatttctactaagtgtagatggagtgggtccaggcctcgttaatttctactaagtgtagatttttttnnnnnnnnnnaagcttggcgtggatccgatatcaactagatcttgagacaaatggcagtattcatccacaattttaaaagaaaaggggggattggggggtacagtgcaggggaaagaatagtagacataatagcaacagacatacaaactaaag

SEQ ID NO: 14641 - DNA, 301 bp, Artificial Sequence
  Kdm6a.4_Ercc5.4
  crRNA array
  misc_feature (148)..(157): n is a, c, g, or t
cttggctttatatatcttgtggaaaggacgaaacaccgtaatttctactaagtgtagattgtctcctacgaatcccccctaatttctactaagtgtagatcagagccggtggaataatgttaatttctactaagtgtagatttttttnnnnnnnnnnaagcttggcgtggatccgatatcaactagatcttgagacaaatggcagtattcatccacaattttaaaagaaaaggggggattggggggtacagtgcaggggaaagaatagtagacataatagcaacagacatacaaactaaag

SEQ ID NO: 14642 - DNA, 301 bp, Artificial Sequence
  Kdm6a.1_Arid1b.1
  crRNA array
  misc_feature (148)..(157): n is a, c, g, or t
cttggctttatatatcttgtggaaaggacgaaacaccgtaatttctactaagtgtagatgctgccgcctctcgcggcagtaatttctactaagtgtagatgctgctgctgtagtgcgtggtaatttctactaagtgtagatttttttnnnnnnnnnnaagcttggcgtggatccgatatcaactagatcttgagacaaatggcagtattcatccacaattttaaaagaaaaggggggattggggggtacagtgcaggggaaagaatagtagacataatagcaacagacatacaaactaaag

SEQ ID NO: 14643 - DNA, 301 bp, Artificial Sequence
  Kdm6a.1_Arid1b.2
  crRNA array
  misc_feature (148)..(157): n is a, c, g, or t
cttggctttatatatcttgtggaaaggacgaaacaccgtaatttctactaagtgtagatgctgccgcctctcgcggcagtaatttctactaagtgtagatagtgcaaaactgagcgcgggtaatttctactaagtgtagatttttttnnnnnnnnnnaagcttggcgtggatccgatatcaactagatcttgagacaaatggcagtattcatccacaattttaaaagaaaaggggggattggggggtacagtgcaggggaaagaatagtagacataatagcaacagacatacaaactaaag

SEQ ID NO: 14644 - DNA, 301 bp, Artificial Sequence
  Kdm6a.1_Arid1b.3
  crRNA array
  misc_feature (148)..(157): n is a, c, g, or t
cttggctttatatatcttgtggaaaggacgaaacaccgtaatttctactaagtgtagatgctgccgcctctcgcggcagtaatttctactaagtgtagatcactcaaaggcgaacaggtataatttctactaagtgtagatttttttnnnnnnnnnnaagcttggcgtggatccgatatcaactagatcttgagacaaatggcagtattcatccacaattttaaaagaaaaggggggattggggggtacagtgcaggggaaagaatagtagacataatagcaacagacatacaaactaaag

SEQ ID NO: 14645 - DNA, 301 bp, Artificial Sequence
  Kdm6a.1_Arid1b.4
  crRNA array
  misc_feature (148)..(157): n is a, c, g, or t
cttggctttatatatcttgtggaaaggacgaaacaccgtaatttctactaagtgtagatgctgccgcctctcgcggcagtaatttctactaagtgtagatctcctggctccgtagaagcataatttctactaagtgtagatttttttnnnnnnnnnnaagcttggcgtggatccgatatcaactagatcttgagacaaatggcagtattcatccacaattttaaaagaaaaggggggattggggggtacagtgcaggggaaagaatagtagacataatagcaacagacatacaaactaaag

SEQ ID NO: 14646 - DNA, 301 bp, Artificial Sequence
  Kdm6a.2_Arid1b.1
  crRNA array
  misc_feature (148)..(157): n is a, c, g, or t
cttggctttatatatcttgtggaaaggacgaaacaccgtaatttctactaagtgtagatgctgcaggtaaggcacgttttaatttctactaagtgtagatgctgctgctgtagtgcgtggtaatttctactaagtgtagatttttttnnnnnnnnnnaagcttggcgtggatccgatatcaactagatcttgagacaaatggcagtattcatccacaattttaaaagaaaaggggggattggggggtacagtgcaggggaaagaatagtagacataatagcaacagacatacaaactaaag

SEQ ID NO: 14647 - DNA, 301 bp, Artificial Sequence
  Kdm6a.2_Arid1b.2
  crRNA array
  misc_feature (148)..(157): n is a, c, g, or t
cttggctttatatatcttgtggaaaggacgaaacaccgtaatttctactaagtgtagatgctgcaggtaaggcacgttttaatttctactaagtgtagatagtgcaaaactgagcgcgggtaatttctactaagtgtagatttttttnnnnnnnnnnaagcttggcgtggatccgatatcaactagatcttgagacaaatggcagtattcatccacaattttaaaagaaaaggggggattggggggtacagtgcaggggaaagaatagtagacataatagcaacagacatacaaactaaag

SEQ ID NO: 14648 - DNA, 301 bp, Artificial Sequence
  Kdm6a.2_Arid1b.3
  crRNA array
  misc_feature (148)..(157): n is a, c, g, or t
cttggctttatatatcttgtggaaaggacgaaacaccgtaatttctactaagtgtagatgctgcaggtaaggcacgttttaatttctactaagtgtagatcactcaaaggcgaacaggtataatttctactaagtgtagatttttttnnnnnnnnnnaagcttggcgtggatccgatatcaactagatcttgagacaaatggcagtattcatccacaattttaaaagaaaaggggggattggggggtacagtgcaggggaaagaatagtagacataatagcaacagacatacaaactaaag

SEQ ID NO: 14649 - DNA, 301 bp, Artificial Sequence
  Kdm6a.2_Arid1b.4
  crRNA array
  misc_feature (148)..(157): n is a, c, g, or t
cttggctttatatatcttgtggaaaggacgaaacaccgtaatttctactaagtgtagatgctgcaggtaaggcacgttttaatttctactaagtgtagatctcctggctccgtagaagcataatttctactaagtgtagatttttttnnnnnnnnnnaagcttggcgtggatccgatatcaactagatcttgagacaaatggcagtattcatccacaattttaaaagaaaaggggggattggggggtacagtgcaggggaaagaatagtagacataatagcaacagacatacaaactaaag

SEQ ID NO: 14650 - DNA, 301 bp, Artificial Sequence
  Kdm6a.3_Arid1b.1
  crRNA array
  misc_feature (148)..(157): n is a, c, g, or t
cttggctttatatatcttgtggaaaggacgaaacaccgtaatttctactaagtgtagattgctggtgccggggaagttttaatttctactaagtgtagatgctgctgctgtagtgcgtggtaatttctactaagtgtagatttttttnnnnnnnnnnaagcttggcgtggatccgatatcaactagatcttgagacaaatggcagtattcatccacaattttaaaagaaaaggggggattggggggtacagtgcaggggaaagaatagtagacataatagcaacagacatacaaactaaag

SEQ ID NO: 14651 - DNA, 301 bp, Artificial Sequence
  Kdm6a.3_Arid1b.2
  crRNA array
  misc_feature (148)..(157): n is a, c, g, or t
cttggctttatatatcttgtggaaaggacgaaacaccgtaatttctactaagtgtagattgctggtgccggggaagttttaatttctactaagtgtagatagtgcaaaactgagcgcgggtaatttctactaagtgtagatttttttnnnnnnnnnnaagcttggcgtggatccgatatcaactagatcttgagacaaatggcagtattcatccacaattttaaaagaaaaggggggattggggggtacagtgcaggggaaagaatagtagacataatagcaacagacatacaaactaaag

SEQ ID NO: 14652 - DNA, 301 bp, Artificial Sequence
  Kdm6a.3_Arid1b.3
  crRNA array
  misc_feature (148)..(157): n is a, c, g, or t
cttggctttatatatcttgtggaaaggacgaaacaccgtaatttctactaagtgtagattgctggtgccggggaagttttaatttctactaagtgtagatcactcaaaggcgaacaggtataatttctactaagtgtagatttttttnnnnnnnnnnaagcttggcgtggatccgatatcaactagatcttgagacaaatggcagtattcatccacaattttaaaagaaaaggggggattggggggtacagtgcaggggaaagaatagtagacataatagcaacagacatacaaactaaag

SEQ ID NO: 14653 - DNA, 301 bp, Artificial Sequence
  Kdm6a.3_Arid1b.4
  crRNA array
  misc_feature (148)..(157): n is a, c, g, or t
cttggctttatatatcttgtggaaaggacgaaacaccgtaatttctactaagtgtagattgctggtgccggggaagttttaatttctactaagtgtagatctcctggctccgtagaagcataatttctactaagtgtagatttttttnnnnnnnnnnaagcttggcgtggatccgatatcaactagatcttgagacaaatggcagtattcatccacaattttaaaagaaaaggggggattggggggtacagtgcaggggaaagaatagtagacataatagcaacagacatacaaactaaag

SEQ ID NO: 14654 - DNA, 301 bp, Artificial Sequence
  Kdm6a.4_Arid1b.1
  crRNA array
  misc_feature (148)..(157): n is a, c, g, or t
cttggctttatatatcttgtggaaaggacgaaacaccgtaatttctactaagtgtagattgtctcctacgaatcccccctaatttctactaagtgtagatgctgctgctgtagtgcgtggtaatttctactaagtgtagatttttttnnnnnnnnnnaagcttggcgtggatccgatatcaactagatcttgagacaaatggcagtattcatccacaattttaaaagaaaaggggggattggggggtacagtgcaggggaaagaatagtagacataatagcaacagacatacaaactaaag

SEQ ID NO: 14655 - DNA, 301 bp, Artificial Sequence
  Kdm6a.4_Arid1b.2
  crRNA array
  misc_feature (148)..(157): n is a, c, g, or t
cttggctttatatatcttgtggaaaggacgaaacaccgtaatttctactaagtgtagattgtctcctacgaatcccccctaatttctactaagtgtagatagtgcaaaactgagcgcgggtaatttctactaagtgtagatttttttnnnnnnnnnnaagcttggcgtggatccgatatcaactagatcttgagacaaatggcagtattcatccacaattttaaaagaaaaggggggattggggggtacagtgcaggggaaagaatagtagacataatagcaacagacatacaaactaaag

SEQ ID NO: 14656 - DNA, 301 bp, Artificial Sequence
  Kdm6a.4_Arid1b.3
  crRNA array
  misc_feature (148)..(157): n is a, c, g, or t
cttggctttatatatcttgtggaaaggacgaaacaccgtaatttctactaagtgtagattgtctcctacgaatcccccctaatttctactaagtgtagatcactcaaaggcgaacaggtataatttctactaagtgtagatttttttnnnnnnnnnnaagcttggcgtggatccgatatcaactagatcttgagacaaatggcagtattcatccacaattttaaaagaaaaggggggattggggggtacagtgcaggggaaagaatagtagacataatagcaacagacatacaaactaaag

SEQ ID NO: 14657 - DNA, 301 bp, Artificial Sequence
  Kdm6a.4_Arid1b.4
  crRNA array
  misc_feature (148)..(157): n is a, c, g, or t
cttggctttatatatcttgtggaaaggacgaaacaccgtaatttctactaagtgtagattgtctcctacgaatcccccctaatttctactaagtgtagatctcctggctccgtagaagcataatttctactaagtgtagatttttttnnnnnnnnnnaagcttggcgtggatccgatatcaactagatcttgagacaaatggcagtattcatccacaattttaaaagaaaaggggggattggggggtacagtgcaggggaaagaatagtagacataatagcaacagacatacaaactaaag

SEQ ID NO: 14658 - DNA, 301 bp, Artificial Sequence
  Kdm6a.1_Rb1.1
  crRNA array
  misc_feature (148)..(157): n is a, c, g, or t
cttggctttatatatcttgtggaaaggacgaaacaccgtaatttctactaagtgtagatgctgccgcctctcgcggcagtaatttctactaagtgtagattctgacatgatcgggtaccttaatttctactaagtgtagatttttttnnnnnnnnnnaagcttggcgtggatccgatatcaactagatcttgagacaaatggcagtattcatccacaattttaaaagaaaaggggggattggggggtacagtgcaggggaaagaatagtagacataatagcaacagacatacaaactaaag

SEQ ID NO: 14659 - DNA, 301 bp, Artificial Sequence
  Kdm6a.1_Rb1.2
  crRNA array
  misc_feature (148)..(157): n is a, c, g, or t
cttggctttatatatcttgtggaaaggacgaaacaccgtaatttctactaagtgtagatgctgccgcctctcgcggcagtaatttctactaagtgtagatgtctctgcatgaaaacggagtaatttctactaagtgtagatttttttnnnnnnnnnnaagcttggcgtggatccgatatcaactagatcttgagacaaatggcagtattcatccacaattttaaaagaaaaggggggattggggggtacagtgcaggggaaagaatagtagacataatagcaacagacatacaaactaaag

SEQ ID NO: 14660 - DNA, 301 bp, Artificial Sequence
  Kdm6a.1_Rb1.3
  crRNA array
  misc_feature (148)..(157): n is a, c, g, or t
cttggctttatatatcttgtggaaaggacgaaacaccgtaatttctactaagtgtagatgctgccgcctctcgcggcagtaatttctactaagtgtagatagccaatctggtctaataactaatttctactaagtgtagatttttttnnnnnnnnnnaagcttggcgtggatccgatatcaactagatcttgagacaaatggcagtattcatccacaattttaaaagaaaaggggggattggggggtacagtgcaggggaaagaatagtagacataatagcaacagacatacaaactaaag

SEQ ID NO: 14661 - DNA, 301 bp, Artificial Sequence
  Kdm6a.1_Rb1.4
  crRNA array
  misc_feature (148)..(157): n is a, c, g, or t
cttggctttatatatcttgtggaaaggacgaaacaccgtaatttctactaagtgtagatgctgccgcctctcgcggcagtaatttctactaagtgtagattgtagctcagtaaaagtgaataatttctactaagtgtagatttttttnnnnnnnnnnaagcttggcgtggatccgatatcaactagatcttgagacaaatggcagtattcatccacaattttaaaagaaaaggggggattggggggtacagtgcaggggaaagaatagtagacataatagcaacagacatacaaactaaag

SEQ ID NO: 14662 - DNA, 301 bp, Artificial Sequence
  Kdm6a.2_Rb1.1
  crRNA array
  misc_feature (148)..(157): n is a, c, g, or t
cttggctttatatatcttgtggaaaggacgaaacaccgtaatttctactaagtgtagatgctgcaggtaaggcacgttttaatttctactaagtgtagattctgacatgatcgggtaccttaatttctactaagtgtagatttttttnnnnnnnnnnaagcttggcgtggatccgatatcaactagatcttgagacaaatggcagtattcatccacaattttaaaagaaaaggggggattggggggtacagtgcaggggaaagaatagtagacataatagcaacagacatacaaactaaag

SEQ ID NO: 14663 - DNA, 301 bp, Artificial Sequence
  Kdm6a.2_Rb1.2
  crRNA array
  misc_feature (148)..(157): n is a, c, g, or t
cttggctttatatatcttgtggaaaggacgaaacaccgtaatttctactaagtgtagatgctgcaggtaaggcacgttttaatttctactaagtgtagatgtctctgcatgaaaacggagtaatttctactaagtgtagatttttttnnnnnnnnnnaagcttggcgtggatccgatatcaactagatcttgagacaaatggcagtattcatccacaattttaaaagaaaaggggggattggggggtacagtgcaggggaaagaatagtagacataatagcaacagacatacaaactaaag

SEQ ID NO: 14664 - DNA, 301 bp, Artificial Sequence
  Kdm6a.2_Rb1.3
  crRNA array
  misc_feature (148)..(157): n is a, c, g, or t
cttggctttatatatcttgtggaaaggacgaaacaccgtaatttctactaagtgtagatgctgcaggtaaggcacgttttaatttctactaagtgtagatagccaatctggtctaataactaatttctactaagtgtagatttttttnnnnnnnnnnaagcttggcgtggatccgatatcaactagatcttgagacaaatggcagtattcatccacaattttaaaagaaaaggggggattggggggtacagtgcaggggaaagaatagtagacataatagcaacagacatacaaactaaag

SEQ ID NO: 14665 - DNA, 301 bp, Artificial Sequence
  Kdm6a.2_Rb1.4
  crRNA array
  misc_feature (148)..(157): n is a, c, g, or t
cttggctttatatatcttgtggaaaggacgaaacaccgtaatttctactaagtgtagatgctgcaggtaaggcacgttttaatttctactaagtgtagattgtagctcagtaaaagtgaataatttctactaagtgtagatttttttnnnnnnnnnnaagcttggcgtggatccgatatcaactagatcttgagacaaatggcagtattcatccacaattttaaaagaaaaggggggattggggggtacagtgcaggggaaagaatagtagacataatagcaacagacatacaaactaaag

SEQ ID NO: 14666 - DNA, 301 bp, Artificial Sequence
  Kdm6a.3_Rb1.1
  crRNA array
  misc_feature (148)..(157): n is a, c, g, or t
cttggctttatatatcttgtggaaaggacgaaacaccgtaatttctactaagtgtagattgctggtgccggggaagttttaatttctactaagtgtagattctgacatgatcgggtaccttaatttctactaagtgtagatttttttnnnnnnnnnnaagcttggcgtggatccgatatcaactagatcttgagacaaatggcagtattcatccacaattttaaaagaaaaggggggattggggggtacagtgcaggggaaagaatagtagacataatagcaacagacatacaaactaaag

SEQ ID NO: 14667 - DNA, 301 bp, Artificial Sequence
  Kdm6a.3_Rb1.2
  crRNA array
  misc_feature (148)..(157): n is a, c, g, or t
cttggctttatatatcttgtggaaaggacgaaacaccgtaatttctactaagtgtagattgctggtgccggggaagttttaatttctactaagtgtagatgtctctgcatgaaaacggagtaatttctactaagtgtagatttttttnnnnnnnnnnaagcttggcgtggatccgatatcaactagatcttgagacaaatggcagtattcatccacaattttaaaagaaaaggggggattggggggtacagtgcaggggaaagaatagtagacataatagcaacagacatacaaactaaag

SEQ ID NO: 14668 - DNA, 301 bp, Artificial Sequence
  Kdm6a.3_Rb1.3
  crRNA array
  misc_feature (148)..(157): n is a, c, g, or t
cttggctttatatatcttgtggaaaggacgaaacaccgtaatttctactaagtgtagattgctggtgccggggaagttttaatttctactaagtgtagatagccaatctggtctaataactaatttctactaagtgtagatttttttnnnnnnnnnnaagcttggcgtggatccgatatcaactagatcttgagacaaatggcagtattcatccacaattttaaaagaaaaggggggattggggggtacagtgcaggggaaagaatagtagacataatagcaacagacatacaaactaaag

SEQ ID NO: 14669 - DNA, 301 bp, Artificial Sequence
  Kdm6a.3_Rb1.4
  crRNA array
  misc_feature (148)..(157): n is a, c, g, or t
cttggctttatatatcttgtggaaaggacgaaacaccgtaatttctactaagtgtagattgctggtgccggggaagttttaatttctactaagtgtagattgtagctcagtaaaagtgaataatttctactaagtgtagatttttttnnnnnnnnnnaagcttggcgtggatccgatatcaactagatcttgagacaaatggcagtattcatccacaattttaaaagaaaaggggggattggggggtacagtgcaggggaaagaatagtagacataatagcaacagacatacaaactaaag

SEQ ID NO: 14670 - DNA, 301 bp, Artificial Sequence
  Kdm6a.4_Rb1.1
  crRNA array
  misc_feature (148)..(157): n is a, c, g, or t
cttggctttatatatcttgtggaaaggacgaaacaccgtaatttctactaagtgtagattgtctcctacgaatcccccctaatttctactaagtgtagattctgacatgatcgggtaccttaatttctactaagtgtagatttttttnnnnnnnnnnaagcttggcgtggatccgatatcaactagatcttgagacaaatggcagtattcatccacaattttaaaagaaaaggggggattggggggtacagtgcaggggaaagaatagtagacataatagcaacagacatacaaactaaag

SEQ ID NO: 14671 - DNA, 301 bp, Artificial Sequence
  Kdm6a.4_Rb1.2
  crRNA array
  misc_feature (148)..(157): n is a, c, g, or t
cttggctttatatatcttgtggaaaggacgaaacaccgtaatttctactaagtgtagattgtctcctacgaatcccccctaatttctactaagtgtagatgtctctgcatgaaaacggagtaatttctactaagtgtagatttttttnnnnnnnnnnaagcttggcgtggatccgatatcaactagatcttgagacaaatggcagtattcatccacaattttaaaagaaaaggggggattggggggtacagtgcaggggaaagaatagtagacataatagcaacagacatacaaactaaag

SEQ ID NO: 14672 - DNA, 301 bp, Artificial Sequence
  Kdm6a.4_Rb1.3
  crRNA array
  misc_feature (148)..(157): n is a, c, g, or t
cttggctttatatatcttgtggaaaggacgaaacaccgtaatttctactaagtgtagattgtctcctacgaatcccccctaatttctactaagtgtagatagccaatctggtctaataactaatttctactaagtgtagatttttttnnnnnnnnnnaagcttggcgtggatccgatatcaactagatcttgagacaaatggcagtattcatccacaattttaaaagaaaaggggggattggggggtacagtgcaggggaaagaatagtagacataatagcaacagacatacaaactaaag

SEQ ID NO: 14673 - DNA, 301 bp, Artificial Sequence
  Kdm6a.4_Rb1.4
  crRNA array
  misc_feature (148)..(157): n is a, c, g, or t
cttggctttatatatcttgtggaaaggacgaaacaccgtaatttctactaagtgtagattgtctcctacgaatcccccctaatttctactaagtgtagattgtagctcagtaaaagtgaataatttctactaagtgtagatttttttnnnnnnnnnnaagcttggcgtggatccgatatcaactagatcttgagacaaatggcagtattcatccacaattttaaaagaaaaggggggattggggggtacagtgcaggggaaagaatagtagacataatagcaacagacatacaaactaaag

SEQ ID NO: 14674 - DNA, 301 bp, Artificial Sequence
  Kdm6a.1_Kmt2c.1
  crRNA array
  misc_feature (148)..(157): n is a, c, g, or t
cttggctttatatatcttgtggaaaggacgaaacaccgtaatttctactaagtgtagatgctgccgcctctcgcggcagtaatttctactaagtgtagatactcgacctccacctccctataatttctactaagtgtagatttttttnnnnnnnnnnaagcttggcgtggatccgatatcaactagatcttgagacaaatggcagtattcatccacaattttaaaagaaaaggggggattggggggtacagtgcaggggaaagaatagtagacataatagcaacagacatacaaactaaag

SEQ ID NO: 14675 - DNA, 301 bp, Artificial Sequence
  Kdm6a.1_Kmt2c.2
  crRNA array
  misc_feature (148)..(157): n is a, c, g, or t
cttggctttatatatcttgtggaaaggacgaaacaccgtaatttctactaagtgtagatgctgccgcctctcgcggcagtaatttctactaagtgtagatcccaaagatcagcgtggacctaatttctactaagtgtagatttttttnnnnnnnnnnaagcttggcgtggatccgatatcaactagatcttgagacaaatggcagtattcatccacaattttaaaagaaaaggggggattggggggtacagtgcaggggaaagaatagtagacataatagcaacagacatacaaactaaag

SEQ ID NO: 14676 - DNA, 301 bp, Artificial Sequence
  Kdm6a.1_Kmt2c.3
  crRNA array
  misc_feature (148)..(157): n is a, c, g, or t
cttggctttatatatcttgtggaaaggacgaaacaccgtaatttctactaagtgtagatgctgccgcctctcgcggcagtaatttctactaagtgtagataaaagatccgaatcgatgcgtaatttctactaagtgtagatttttttnnnnnnnnnnaagcttggcgtggatccgatatcaactagatcttgagacaaatggcagtattcatccacaattttaaaagaaaaggggggattggggggtacagtgcaggggaaagaatagtagacataatagcaacagacatacaaactaaag

SEQ ID NO: 14677 - DNA, 301 bp, Artificial Sequence
  Kdm6a.1_Kmt2c.4
  crRNA array
  misc_feature (148)..(157): n is a, c, g, or t
cttggctttatatatcttgtggaaaggacgaaacaccgtaatttctactaagtgtagatgctgccgcctctcgcggcagtaatttctactaagtgtagatctgaggcacatggaagcgattaatttctactaagtgtagatttttttnnnnnnnnnnaagcttggcgtggatccgatatcaactagatcttgagacaaatggcagtattcatccacaattttaaaagaaaaggggggattggggggtacagtgcaggggaaagaatagtagacataatagcaacagacatacaaactaaag

SEQ ID NO: 14678 - DNA, 301 bp, Artificial Sequence
  Kdm6a.2_Kmt2c.1
  crRNA array
  misc_feature (148)..(157): n is a, c, g, or t
cttggctttatatatcttgtggaaaggacgaaacaccgtaatttctactaagtgtagatgctgcaggtaaggcacgttttaatttctactaagtgtagatactcgacctccacctccctataatttctactaagtgtagatttttttnnnnnnnnnnaagcttggcgtggatccgatatcaactagatcttgagacaaatggcagtattcatccacaattttaaaagaaaaggggggattggggggtacagtgcaggggaaagaatagtagacataatagcaacagacatacaaactaaag

SEQ ID NO: 14679 - DNA, 301 bp, Artificial Sequence
  Kdm6a.2_Kmt2c.2
  crRNA array
  misc_feature (148)..(157): n is a, c, g, or t
cttggctttatatatcttgtggaaaggacgaaacaccgtaatttctactaagtgtagatgctgcaggtaaggcacgttttaatttctactaagtgtagatcccaaagatcagcgtggacctaatttctactaagtgtagatttttttnnnnnnnnnnaagcttggcgtggatccgatatcaactagatcttgagacaaatggcagtattcatccacaattttaaaagaaaaggggggattggggggtacagtgcaggggaaagaatagtagacataatagcaacagacatacaaactaaag

SEQ ID NO: 14680 - DNA, 301 bp, Artificial Sequence
  Kdm6a.2_Kmt2c.3
  crRNA array
  misc_feature (148)..(157): n is a, c, g, or t
cttggctttatatatcttgtggaaaggacgaaacaccgtaatttctactaagtgtagatgctgcaggtaaggcacgttttaatttctactaagtgtagataaaagatccgaatcgatgcgtaatttctactaagtgtagatttttttnnnnnnnnnnaagcttggcgtggatccgatatcaactagatcttgagacaaatggcagtattcatccacaattttaaaagaaaaggggggattggggggtacagtgcaggggaaagaatagtagacataatagcaacagacatacaaactaaag

SEQ ID NO: 14681 - DNA, 301 bp, Artificial Sequence
  Kdm6a.2_Kmt2c.4
  crRNA array
  misc_feature (148)..(157): n is a, c, g, or t
cttggctttatatatcttgtggaaaggacgaaacaccgtaatttctactaagtgtagatgctgcaggtaaggcacgttttaatttctactaagtgtagatctgaggcacatggaagcgattaatttctactaagtgtagatttttttnnnnnnnnnnaagcttggcgtggatccgatatcaactagatcttgagacaaatggcagtattcatccacaattttaaaagaaaaggggggattggggggtacagtgcaggggaaagaatagtagacataatagcaacagacatacaaactaaag

SEQ ID NO: 14682 - DNA, 301 bp, Artificial Sequence
  Kdm6a.3_Kmt2c.1
  crRNA array
  misc_feature (148)..(157): n is a, c, g, or t
cttggctttatatatcttgtggaaaggacgaaacaccgtaatttctactaagtgtagattgctggtgccggggaagttttaatttctactaagtgtagatactcgacctccacctccctataatttctactaagtgtagatttttttnnnnnnnnnnaagcttggcgtggatccgatatcaactagatcttgagacaaatggcagtattcatccacaattttaaaagaaaaggggggattggggggtacagtgcaggggaaagaatagtagacataatagcaacagacatacaaactaaag

SEQ ID NO: 14683 - DNA, 301 bp, Artificial Sequence
  Kdm6a.3_Kmt2c.2
  crRNA array
  misc_feature (148)..(157): n is a, c, g, or t
cttggctttatatatcttgtggaaaggacgaaacaccgtaatttctactaagtgtagattgctggtgccggggaagttttaatttctactaagtgtagatcccaaagatcagcgtggacctaatttctactaagtgtagatttttttnnnnnnnnnnaagcttggcgtggatccgatatcaactagatcttgagacaaatggcagtattcatccacaattttaaaagaaaaggggggattggggggtacagtgcaggggaaagaatagtagacataatagcaacagacatacaaactaaag

SEQ ID NO: 14684 - DNA, 301 bp, Artificial Sequence
  Kdm6a.3_Kmt2c.3
  crRNA array
  misc_feature (148)..(157): n is a, c, g, or t
cttggctttatatatcttgtggaaaggacgaaacaccgtaatttctactaagtgtagattgctggtgccggggaagttttaatttctactaagtgtagataaaagatccgaatcgatgcgtaatttctactaagtgtagatttttttnnnnnnnnnnaagcttggcgtggatccgatatcaactagatcttgagacaaatggcagtattcatccacaattttaaaagaaaaggggggattggggggtacagtgcaggggaaagaatagtagacataatagcaacagacatacaaactaaag

SEQ ID NO: 14685 - DNA, 301 bp, Artificial Sequence
  Kdm6a.3_Kmt2c.4
  crRNA array
  misc_feature (148)..(157): n is a, c, g, or t
cttggctttatatatcttgtggaaaggacgaaacaccgtaatttctactaagtgtagattgctggtgccggggaagttttaatttctactaagtgtagatctgaggcacatggaagcgattaatttctactaagtgtagatttttttnnnnnnnnnnaagcttggcgtggatccgatatcaactagatcttgagacaaatggcagtattcatccacaattttaaaagaaaaggggggattggggggtacagtgcaggggaaagaatagtagacataatagcaacagacatacaaactaaag

SEQ ID NO: 14686 - DNA, 301 bp, Artificial Sequence
  Kdm6a.4_Kmt2c.1
  crRNA array
  misc_feature (148)..(157): n is a, c, g, or t
cttggctttatatatcttgtggaaaggacgaaacaccgtaatttctactaagtgtagattgtctcctacgaatcccccctaatttctactaagtgtagatactcgacctccacctccctataatttctactaagtgtagatttttttnnnnnnnnnnaagcttggcgtggatccgatatcaactagatcttgagacaaatggcagtattcatccacaattttaaaagaaaaggggggattggggggtacagtgcaggggaaagaatagtagacataatagcaacagacatacaaactaaag

SEQ ID NO: 14687 - DNA, 301 bp, Artificial Sequence
  Kdm6a.4_Kmt2c.2
  crRNA array
  misc_feature (148)..(157): n is a, c, g, or t
cttggctttatatatcttgtggaaaggacgaaacaccgtaatttctactaagtgtagattgtctcctacgaatcccccctaatttctactaagtgtagatcccaaagatcagcgtggacctaatttctactaagtgtagatttttttnnnnnnnnnnaagcttggcgtggatccgatatcaactagatcttgagacaaatggcagtattcatccacaattttaaaagaaaaggggggattggggggtacagtgcaggggaaagaatagtagacataatagcaacagacatacaaactaaag

SEQ ID NO: 14688 - DNA, 301 bp, Artificial Sequence
  Kdm6a.4_Kmt2c.3
  crRNA array
  misc_feature (148)..(157): n is a, c, g, or t
cttggctttatatatcttgtggaaaggacgaaacaccgtaatttctactaagtgtagattgtctcctacgaatcccccctaatttctactaagtgtagataaaagatccgaatcgatgcgtaatttctactaagtgtagatttttttnnnnnnnnnnaagcttggcgtggatccgatatcaactagatcttgagacaaatggcagtattcatccacaattttaaaagaaaaggggggattggggggtacagtgcaggggaaagaatagtagacataatagcaacagacatacaaactaaag

SEQ ID NO: 14689 - DNA, 301 bp, Artificial Sequence
  Kdm6a.4_Kmt2c.4
  crRNA array
  misc_feature (148)..(157): n is a, c, g, or t
cttggctttatatatcttgtggaaaggacgaaacaccgtaatttctactaagtgtagattgtctcctacgaatcccccctaatttctactaagtgtagatctgaggcacatggaagcgattaatttctactaagtgtagatttttttnnnnnnnnnnaagcttggcgtggatccgatatcaactagatcttgagacaaatggcagtattcatccacaattttaaaagaaaaggggggattggggggtacagtgcaggggaaagaatagtagacataatagcaacagacatacaaactaaag

SEQ ID NO: 14690 - DNA, 301 bp, Artificial Sequence
  Kdm6a.1_Pten.1
  crRNA array
  misc_feature (148)..(157): n is a, c, g, or t
cttggctttatatatcttgtggaaaggacgaaacaccgtaatttctactaagtgtagatgctgccgcctctcgcggcagtaatttctactaagtgtagataagcgtggtgcgtgacgcactaatttctactaagtgtagatttttttnnnnnnnnnnaagcttggcgtggatccgatatcaactagatcttgagacaaatggcagtattcatccacaattttaaaagaaaaggggggattggggggtacagtgcaggggaaagaatagtagacataatagcaacagacatacaaactaaag

SEQ ID NO: 14691 - DNA, 301 bp, Artificial Sequence
  Kdm6a.1_Pten.2
  crRNA array
  misc_feature (148)..(157): n is a, c, g, or t
cttggctttatatatcttgtggaaaggacgaaacaccgtaatttctactaagtgtagatgctgccgcctctcgcggcagtaatttctactaagtgtagattgtcaccagctgaagtggcttaatttctactaagtgtagatttttttnnnnnnnnnnaagcttggcgtggatccgatatcaactagatcttgagacaaatggcagtattcatccacaattttaaaagaaaaggggggattggggggtacagtgcaggggaaagaatagtagacataatagcaacagacatacaaactaaag

SEQ ID NO: 14692 - DNA, 301 bp, Artificial Sequence
  Kdm6a.1_Pten.3
  crRNA array
  misc_feature (148)..(157): n is a, c, g, or t
cttggctttatatatcttgtggaaaggacgaaacaccgtaatttctactaagtgtagatgctgccgcctctcgcggcagtaatttctactaagtgtagatggagtcaagaggctgatttttaatttctactaagtgtagatttttttnnnnnnnnnnaagcttggcgtggatccgatatcaactagatcttgagacaaatggcagtattcatccacaattttaaaagaaaaggggggattggggggtacagtgcaggggaaagaatagtagacataatagcaacagacatacaaactaaag

SEQ ID NO: 14693 - DNA, 301 bp, Artificial Sequence
  Kdm6a.1_Pten.4
  crRNA array
  misc_feature (148)..(157): n is a, c, g, or t
cttggctttatatatcttgtggaaaggacgaaacaccgtaatttctactaagtgtagatgctgccgcctctcgcggcagtaatttctactaagtgtagatctgtaagctaaaccactacataatttctactaagtgtagatttttttnnnnnnnnnnaagcttggcgtggatccgatatcaactagatcttgagacaaatggcagtattcatccacaattttaaaagaaaaggggggattggggggtacagtgcaggggaaagaatagtagacataatagcaacagacatacaaactaaag

SEQ ID NO: 14694 - DNA, 301 bp, Artificial Sequence
  Kdm6a.2_Pten.1
  crRNA array
  misc_feature (148)..(157): n is a, c, g, or t
cttggctttatatatcttgtggaaaggacgaaacaccgtaatttctactaagtgtagatgctgcaggtaaggcacgttttaatttctactaagtgtagataagcgtggtgcgtgacgcactaatttctactaagtgtagatttttttnnnnnnnnnnaagcttggcgtggatccgatatcaactagatcttgagacaaatggcagtattcatccacaattttaaaagaaaaggggggattggggggtacagtgcaggggaaagaatagtagacataatagcaacagacatacaaactaaag

SEQ ID NO: 14695 - DNA, 301 bp, Artificial Sequence
  Kdm6a.2_Pten.2
  crRNA array
  misc_feature (148)..(157): n is a, c, g, or t
cttggctttatatatcttgtggaaaggacgaaacaccgtaatttctactaagtgtagatgctgcaggtaaggcacgttttaatttctactaagtgtagattgtcaccagctgaagtggcttaatttctactaagtgtagatttttttnnnnnnnnnnaagcttggcgtggatccgatatcaactagatcttgagacaaatggcagtattcatccacaattttaaaagaaaaggggggattggggggtacagtgcaggggaaagaatagtagacataatagcaacagacatacaaactaaag

SEQ ID NO: 14696 - DNA, 301 bp, Artificial Sequence
  Kdm6a.2_Pten.3
  crRNA array
  misc_feature (148)..(157): n is a, c, g, or t
cttggctttatatatcttgtggaaaggacgaaacaccgtaatttctactaagtgtagatgctgcaggtaaggcacgttttaatttctactaagtgtagatggagtcaagaggctgatttttaatttctactaagtgtagatttttttnnnnnnnnnnaagcttggcgtggatccgatatcaactagatcttgagacaaatggcagtattcatccacaattttaaaagaaaaggggggattggggggtacagtgcaggggaaagaatagtagacataatagcaacagacatacaaactaaag

SEQ ID NO: 14697 - DNA, 301 bp, Artificial Sequence
  Kdm6a.2_Pten.4
  crRNA array
  misc_feature (148)..(157): n is a, c, g, or t
cttggctttatatatcttgtggaaaggacgaaacaccgtaatttctactaagtgtagatgctgcaggtaaggcacgttttaatttctactaagtgtagatctgtaagctaaaccactacataatttctactaagtgtagatttttttnnnnnnnnnnaagcttggcgtggatccgatatcaactagatcttgagacaaatggcagtattcatccacaattttaaaagaaaaggggggattggggggtacagtgcaggggaaagaatagtagacataatagcaacagacatacaaactaaag

SEQ ID NO: 14698 - DNA, 301 bp, Artificial Sequence
  Kdm6a.3_Pten.1
  crRNA array
  misc_feature (148)..(157): n is a, c, g, or t
cttggctttatatatcttgtggaaaggacgaaacaccgtaatttctactaagtgtagattgctggtgccggggaagttttaatttctactaagtgtagataagcgtggtgcgtgacgcactaatttctactaagtgtagatttttttnnnnnnnnnnaagcttggcgtggatccgatatcaactagatcttgagacaaatggcagtattcatccacaattttaaaagaaaaggggggattggggggtacagtgcaggggaaagaatagtagacataatagcaacagacatacaaactaaag

SEQ ID NO: 14699 - DNA, 301 bp, Artificial Sequence
  Kdm6a.3_Pten.2
  crRNA array
  misc_feature (148)..(157): n is a, c, g, or t
cttggctttatatatcttgtggaaaggacgaaacaccgtaatttctactaagtgtagattgctggtgccggggaagttttaatttctactaagtgtagattgtcaccagctgaagtggcttaatttctactaagtgtagatttttttnnnnnnnnnnaagcttggcgtggatccgatatcaactagatcttgagacaaatggcagtattcatccacaattttaaaagaaaaggggggattggggggtacagtgcaggggaaagaatagtagacataatagcaacagacatacaaactaaag

SEQ ID NO: 14700 - DNA, 301 bp, Artificial Sequence
  Kdm6a.3_Pten.3
  crRNA array
  misc_feature (148)..(157): n is a, c, g, or t
cttggctttatatatcttgtggaaaggacgaaacaccgtaatttctactaagtgtagattgctggtgccggggaagttttaatttctactaagtgtagatggagtcaagaggctgatttttaatttctactaagtgtagatttttttnnnnnnnnnnaagcttggcgtggatccgatatcaactagatcttgagacaaatggcagtattcatccacaattttaaaagaaaaggggggattggggggtacagtgcaggggaaagaatagtagacataatagcaacagacatacaaactaaag

SEQ ID NO: 14701 - DNA, 301 bp, Artificial Sequence
  Kdm6a.3_Pten.4
  crRNA array
  misc_feature (148)..(157): n is a, c, g, or t
cttggctttatatatcttgtggaaaggacgaaacaccgtaatttctactaagtgtagattgctggtgccggggaagttttaatttctactaagtgtagatctgtaagctaaaccactacataatttctactaagtgtagatttttttnnnnnnnnnnaagcttggcgtggatccgatatcaactagatcttgagacaaatggcagtattcatccacaattttaaaagaaaaggggggattggggggtacagtgcaggggaaagaatagtagacataatagcaacagacatacaaactaaag

SEQ ID NO: 14702 - DNA, 301 bp, Artificial Sequence
  Kdm6a.4_Pten.1
  crRNA array
  misc_feature (148)..(157): n is a, c, g, or t
cttggctttatatatcttgtggaaaggacgaaacaccgtaatttctactaagtgtagattgtctcctacgaatcccccctaatttctactaagtgtagataagcgtggtgcgtgacgcactaatttctactaagtgtagatttttttnnnnnnnnnnaagcttggcgtggatccgatatcaactagatcttgagacaaatggcagtattcatccacaattttaaaagaaaaggggggattggggggtacagtgcaggggaaagaatagtagacataatagcaacagacatacaaactaaag

SEQ ID NO: 14703 - DNA, 301 bp, Artificial Sequence
  Kdm6a.4_Pten.2
  crRNA array
  misc_feature (148)..(157): n is a, c, g, or t
cttggctttatatatcttgtggaaaggacgaaacaccgtaatttctactaagtgtagattgtctcctacgaatcccccctaatttctactaagtgtagattgtcaccagctgaagtggcttaatttctactaagtgtagatttttttnnnnnnnnnnaagcttggcgtggatccgatatcaactagatcttgagacaaatggcagtattcatccacaattttaaaagaaaaggggggattggggggtacagtgcaggggaaagaatagtagacataatagcaacagacatacaaactaaag

SEQ ID NO: 14704 - DNA, 301 bp, Artificial Sequence
  Kdm6a.4_Pten.3
  crRNA array
  misc_feature (148)..(157): n is a, c, g, or t
cttggctttatatatcttgtggaaaggacgaaacaccgtaatttctactaagtgtagattgtctcctacgaatcccccctaatttctactaagtgtagatggagtcaagaggctgatttttaatttctactaagtgtagatttttttnnnnnnnnnnaagcttggcgtggatccgatatcaactagatcttgagacaaatggcagtattcatccacaattttaaaagaaaaggggggattggggggtacagtgcaggggaaagaatagtagacataatagcaacagacatacaaactaaag

SEQ ID NO: 14705 - DNA, 301 bp, Artificial Sequence
  Kdm6a.4_Pten.4
  crRNA array
  misc_feature (148)..(157): n is a, c, g, or t
cttggctttatatatcttgtggaaaggacgaaacaccgtaatttctactaagtgtagattgtctcctacgaatcccccctaatttctactaagtgtagatctgtaagctaaaccactacataatttctactaagtgtagatttttttnnnnnnnnnnaagcttggcgtggatccgatatcaactagatcttgagacaaatggcagtattcatccacaattttaaaagaaaaggggggattggggggtacagtgcaggggaaagaatagtagacataatagcaacagacatacaaactaaag

SEQ ID NO: 14706 - DNA, 301 bp, Artificial Sequence
  Kdm6a.1_Atm.1
  crRNA array
  misc_feature (148)..(157): n is a, c, g, or t
cttggctttatatatcttgtggaaaggacgaaacaccgtaatttctactaagtgtagatgctgccgcctctcgcggcagtaatttctactaagtgtagatgagaaagtctccgaatcgtttaatttctactaagtgtagatttttttnnnnnnnnnnaagcttggcgtggatccgatatcaactagatcttgagacaaatggcagtattcatccacaattttaaaagaaaaggggggattggggggtacagtgcaggggaaagaatagtagacataatagcaacagacatacaaactaaag

SEQ ID NO: 14707 - DNA, 301 bp, Artificial Sequence
  Kdm6a.1_Atm.2
  crRNA array
  misc_feature (148)..(157): n is a, c, g, or t
cttggctttatatatcttgtggaaaggacgaaacaccgtaatttctactaagtgtagatgctgccgcctctcgcggcagtaatttctactaagtgtagatcctacgagggcacgagagactaatttctactaagtgtagatttttttnnnnnnnnnnaagcttggcgtggatccgatatcaactagatcttgagacaaatggcagtattcatccacaattttaaaagaaaaggggggattggggggtacagtgcaggggaaagaatagtagacataatagcaacagacatacaaactaaag

SEQ ID NO: 14708 - DNA, 301 bp, Artificial Sequence
  Kdm6a.1_Atm.3
  crRNA array
  misc_feature (148)..(157): n is a, c, g, or t
cttggctttatatatcttgtggaaaggacgaaacaccgtaatttctactaagtgtagatgctgccgcctctcgcggcagtaatttctactaagtgtagattgaaagtctccgatatgccataatttctactaagtgtagatttttttnnnnnnnnnnaagcttggcgtggatccgatatcaactagatcttgagacaaatggcagtattcatccacaattttaaaagaaaaggggggattggggggtacagtgcaggggaaagaatagtagacataatagcaacagacatacaaactaaag

SEQ ID NO: 14709 - DNA, 301 bp, Artificial Sequence
  Kdm6a.1_Atm.4
  crRNA array
  misc_feature (148)..(157): n is a, c, g, or t
cttggctttatatatcttgtggaaaggacgaaacaccgtaatttctactaagtgtagatgctgccgcctctcgcggcagtaatttctactaagtgtagatggtggtgatcagtcaagtagtaatttctactaagtgtagatttttttnnnnnnnnnnaagcttggcgtggatccgatatcaactagatcttgagacaaatggcagtattcatccacaattttaaaagaaaaggggggattggggggtacagtgcaggggaaagaatagtagacataatagcaacagacatacaaactaaag

SEQ ID NO: 14710 - DNA, 301 bp, Artificial Sequence
  Kdm6a.2_Atm.1
  crRNA array
  misc_feature (148)..(157): n is a, c, g, or t
cttggctttatatatcttgtggaaaggacgaaacaccgtaatttctactaagtgtagatgctgcaggtaaggcacgttttaatttctactaagtgtagatgagaaagtctccgaatcgtttaatttctactaagtgtagatttttttnnnnnnnnnnaagcttggcgtggatccgatatcaactagatcttgagacaaatggcagtattcatccacaattttaaaagaaaaggggggattggggggtacagtgcaggggaaagaatagtagacataatagcaacagacatacaaactaaag

SEQ ID NO: 14711 - DNA, 301 bp, Artificial Sequence
  Kdm6a.2_Atm.2
  crRNA array
  misc_feature (148)..(157): n is a, c, g, or t
cttggctttatatatcttgtggaaaggacgaaacaccgtaatttctactaagtgtagatgctgcaggtaaggcacgttttaatttctactaagtgtagatcctacgagggcacgagagactaatttctactaagtgtagatttttttnnnnnnnnnnaagcttggcgtggatccgatatcaactagatcttgagacaaatggcagtattcatccacaattttaaaagaaaaggggggattggggggtacagtgcaggggaaagaatagtagacataatagcaacagacatacaaactaaag

SEQ ID NO: 14712 - DNA, 301 bp, Artificial Sequence
  Kdm6a.2_Atm.3
  crRNA array
  misc_feature (148)..(157): n is a, c, g, or t
cttggctttatatatcttgtggaaaggacgaaacaccgtaatttctactaagtgtagatgctgcaggtaaggcacgttttaatttctactaagtgtagattgaaagtctccgatatgccataatttctactaagtgtagatttttttnnnnnnnnnnaagcttggcgtggatccgatatcaactagatcttgagacaaatggcagtattcatccacaattttaaaagaaaaggggggattggggggtacagtgcaggggaaagaatagtagacataatagcaacagacatacaaactaaag

SEQ ID NO: 14713 - DNA, 301 bp, Artificial Sequence
  Kdm6a.2_Atm.4
  crRNA array
  misc_feature (148)..(157): n is a, c, g, or t
cttggctttatatatcttgtggaaaggacgaaacaccgtaatttctactaagtgtagatgctgcaggtaaggcacgttttaatttctactaagtgtagatggtggtgatcagtcaagtagtaatttctactaagtgtagatttttttnnnnnnnnnnaagcttggcgtggatccgatatcaactagatcttgagacaaatggcagtattcatccacaattttaaaagaaaaggggggattggggggtacagtgcaggggaaagaatagtagacataatagcaacagacatacaaactaaag

SEQ ID NO: 14714 - DNA, 301 bp, Artificial Sequence
  Kdm6a.3_Atm.1
  crRNA array
  misc_feature (148)..(157): n is a, c, g, or t
cttggctttatatatcttgtggaaaggacgaaacaccgtaatttctactaagtgtagattgctggtgccggggaagttttaatttctactaagtgtagatgagaaagtctccgaatcgtttaatttctactaagtgtagatttttttnnnnnnnnnnaagcttggcgtggatccgatatcaactagatcttgagacaaatggcagtattcatccacaattttaaaagaaaaggggggattggggggtacagtgcaggggaaagaatagtagacataatagcaacagacatacaaactaaag

SEQ ID NO: 14715 - DNA, 301 bp, Artificial Sequence
  Kdm6a.3_Atm.2
  crRNA array
  misc_feature (148)..(157): n is a, c, g, or t
cttggctttatatatcttgtggaaaggacgaaacaccgtaatttctactaagtgtagattgctggtgccggggaagttttaatttctactaagtgtagatcctacgagggcacgagagactaatttctactaagtgtagatttttttnnnnnnnnnnaagcttggcgtggatccgatatcaactagatcttgagacaaatggcagtattcatccacaattttaaaagaaaaggggggattggggggtacagtgcaggggaaagaatagtagacataatagcaacagacatacaaactaaag

SEQ ID NO: 14716 - DNA, 301 bp, Artificial Sequence
  Kdm6a.3_Atm.3
  crRNA array
  misc_feature (148)..(157): n is a, c, g, or t
cttggctttatatatcttgtggaaaggacgaaacaccgtaatttctactaagtgtagattgctggtgccggggaagttttaatttctactaagtgtagattgaaagtctccgatatgccataatttctactaagtgtagatttttttnnnnnnnnnnaagcttggcgtggatccgatatcaactagatcttgagacaaatggcagtattcatccacaattttaaaagaaaaggggggattggggggtacagtgcaggggaaagaatagtagacataatagcaacagacatacaaactaaag

SEQ ID NO: 14717 - DNA, 301 bp, Artificial Sequence
  Kdm6a.3_Atm.4
  crRNA array
  misc_feature (148)..(157): n is a, c, g, or t
cttggctttatatatcttgtggaaaggacgaaacaccgtaatttctactaagtgtagattgctggtgccggggaagttttaatttctactaagtgtagatggtggtgatcagtcaagtagtaatttctactaagtgtagatttttttnnnnnnnnnnaagcttggcgtggatccgatatcaactagatcttgagacaaatggcagtattcatccacaattttaaaagaaaaggggggattggggggtacagtgcaggggaaagaatagtagacataatagcaacagacatacaaactaaag

SEQ ID NO: 14718 - DNA, 301 bp, Artificial Sequence
  Kdm6a.4_Atm.1
  crRNA array
  misc_feature (148)..(157): n is a, c, g, or t
cttggctttatatatcttgtggaaaggacgaaacaccgtaatttctactaagtgtagattgtctcctacgaatcccccctaatttctactaagtgtagatgagaaagtctccgaatcgtttaatttctactaagtgtagatttttttnnnnnnnnnnaagcttggcgtggatccgatatcaactagatcttgagacaaatggcagtattcatccacaattttaaaagaaaaggggggattggggggtacagtgcaggggaaagaatagtagacataatagcaacagacatacaaactaaag

SEQ ID NO: 14719 - DNA, 301 bp, Artificial Sequence
  Kdm6a.4_Atm.2
  crRNA array
  misc_feature (148)..(157): n is a, c, g, or t
cttggctttatatatcttgtggaaaggacgaaacaccgtaatttctactaagtgtagattgtctcctacgaatcccccctaatttctactaagtgtagatcctacgagggcacgagagactaatttctactaagtgtagatttttttnnnnnnnnnnaagcttggcgtggatccgatatcaactagatcttgagacaaatggcagtattcatccacaattttaaaagaaaaggggggattggggggtacagtgcaggggaaagaatagtagacataatagcaacagacatacaaactaaag

SEQ ID NO: 14720 - DNA, 301 bp, Artificial Sequence
  Kdm6a.4_Atm.3
  crRNA array
  misc_feature (148)..(157): n is a, c, g, or t
cttggctttatatatcttgtggaaaggacgaaacaccgtaatttctactaagtgtagattgtctcctacgaatcccccctaatttctactaagtgtagattgaaagtctccgatatgccataatttctactaagtgtagatttttttnnnnnnnnnnaagcttggcgtggatccgatatcaactagatcttgagacaaatggcagtattcatccacaattttaaaagaaaaggggggattggggggtacagtgcaggggaaagaatagtagacataatagcaacagacatacaaactaaag

SEQ ID NO: 14721 - DNA, 301 bp, Artificial Sequence
  Kdm6a.4_Atm.4
  crRNA array
  misc_feature (148)..(157): n is a, c, g, or t
cttggctttatatatcttgtggaaaggacgaaacaccgtaatttctactaagtgtagattgtctcctacgaatcccccctaatttctactaagtgtagatggtggtgatcagtcaagtagtaatttctactaagtgtagatttttttnnnnnnnnnnaagcttggcgtggatccgatatcaactagatcttgagacaaatggcagtattcatccacaattttaaaagaaaaggggggattggggggtacagtgcaggggaaagaatagtagacataatagcaacagacatacaaactaaag

SEQ ID NO: 14722 - DNA, 301 bp, Artificial Sequence
  Ercc5.1_Arid1b.1
  crRNA array
  misc_feature (148)..(157): n is a, c, g, or t
cttggctttatatatcttgtggaaaggacgaaacaccgtaatttctactaagtgtagatacggcacgagcaagagacactaatttctactaagtgtagatgctgctgctgtagtgcgtggtaatttctactaagtgtagatttttttnnnnnnnnnnaagcttggcgtggatccgatatcaactagatcttgagacaaatggcagtattcatccacaattttaaaagaaaaggggggattggggggtacagtgcaggggaaagaatagtagacataatagcaacagacatacaaactaaag

SEQ ID NO: 14723 - DNA, 301 bp, Artificial Sequence
  Ercc5.1_Arid1b.2
  crRNA array
  misc_feature (148)..(157): n is a, c, g, or t
cttggctttatatatcttgtggaaaggacgaaacaccgtaatttctactaagtgtagatacggcacgagcaagagacactaatttctactaagtgtagatagtgcaaaactgagcgcgggtaatttctactaagtgtagatttttttnnnnnnnnnnaagcttggcgtggatccgatatcaactagatcttgagacaaatggcagtattcatccacaattttaaaagaaaaggggggattggggggtacagtgcaggggaaagaatagtagacataatagcaacagacatacaaactaaag

SEQ ID NO: 14724 - DNA, 301 bp, Artificial Sequence
  Ercc5.1_Arid1b.3
  crRNA array
  misc_feature (148)..(157): n is a, c, g, or t
cttggctttatatatcttgtggaaaggacgaaacaccgtaatttctactaagtgtagatacggcacgagcaagagacactaatttctactaagtgtagatcactcaaaggcgaacaggtataatttctactaagtgtagatttttttnnnnnnnnnnaagcttggcgtggatccgatatcaactagatcttgagacaaatggcagtattcatccacaattttaaaagaaaaggggggattggggggtacagtgcaggggaaagaatagtagacataatagcaacagacatacaaactaaag

SEQ ID NO: 14725 - DNA, 301 bp, Artificial Sequence
  Ercc5.1_Arid1b.4
  crRNA array
  misc_feature (148)..(157): n is a, c, g, or t
cttggctttatatatcttgtggaaaggacgaaacaccgtaatttctactaagtgtagatacggcacgagcaagagacactaatttctactaagtgtagatctcctggctccgtagaagcataatttctactaagtgtagatttttttnnnnnnnnnnaagcttggcgtggatccgatatcaactagatcttgagacaaatggcagtattcatccacaattttaaaagaaaaggggggattggggggtacagtgcaggggaaagaatagtagacataatagcaacagacatacaaactaaag

SEQ ID NO: 14726 - DNA, 301 bp, Artificial Sequence
  Ercc5.2_Arid1b.1
  crRNA array
  misc_feature (148)..(157): n is a, c, g, or t
cttggctttatatatcttgtggaaaggacgaaacaccgtaatttctactaagtgtagatgagtatcacatcggtgactctaatttctactaagtgtagatgctgctgctgtagtgcgtggtaatttctactaagtgtagatttttttnnnnnnnnnnaagcttggcgtggatccgatatcaactagatcttgagacaaatggcagtattcatccacaattttaaaagaaaaggggggattggggggtacagtgcaggggaaagaatagtagacataatagcaacagacatacaaactaaag

SEQ ID NO: 14727 - DNA, 301 bp, Artificial Sequence
  Ercc5.2_Arid1b.2
  crRNA array
  misc_feature (148)..(157): n is a, c, g, or t
cttggctttatatatcttgtggaaaggacgaaacaccgtaatttctactaagtgtagatgagtatcacatcggtgactctaatttctactaagtgtagatagtgcaaaactgagcgcgggtaatttctactaagtgtagatttttttnnnnnnnnnnaagcttggcgtggatccgatatcaactagatcttgagacaaatggcagtattcatccacaattttaaaagaaaaggggggattggggggtacagtgcaggggaaagaatagtagacataatagcaacagacatacaaactaaag

SEQ ID NO: 14728 - DNA, 301 bp, Artificial Sequence
  Ercc5.2_Arid1b.3
  crRNA array
  misc_feature (148)..(157): n is a, c, g, or t
cttggctttatatatcttgtggaaaggacgaaacaccgtaatttctactaagtgtagatgagtatcacatcggtgactctaatttctactaagtgtagatcactcaaaggcgaacaggtataatttctactaagtgtagatttttttnnnnnnnnnnaagcttggcgtggatccgatatcaactagatcttgagacaaatggcagtattcatccacaattttaaaagaaaaggggggattggggggtacagtgcaggggaaagaatagtagacataatagcaacagacatacaaactaaag

SEQ ID NO: 14729 - DNA, 301 bp, Artificial Sequence
  Ercc5.2_Arid1b.4
  crRNA array
  misc_feature (148)..(157): n is a, c, g, or t
cttggctttatatatcttgtggaaaggacgaaacaccgtaatttctactaagtgtagatgagtatcacatcggtgactctaatttctactaagtgtagatctcctggctccgtagaagcataatttctactaagtgtagatttttttnnnnnnnnnnaagcttggcgtggatccgatatcaactagatcttgagacaaatggcagtattcatccacaattttaaaagaaaaggggggattggggggtacagtgcaggggaaagaatagtagacataatagcaacagacatacaaactaaag

SEQ ID NO: 14730 - DNA, 301 bp, Artificial Sequence
  Ercc5.3_Arid1b.1
  crRNA array
  misc_feature (148)..(157): n is a, c, g, or t
cttggctttatatatcttgtggaaaggacgaaacaccgtaatttctactaagtgtagatggagtgggtccaggcctcgttaatttctactaagtgtagatgctgctgctgtagtgcgtggtaatttctactaagtgtagatttttttnnnnnnnnnnaagcttggcgtggatccgatatcaactagatcttgagacaaatggcagtattcatccacaattttaaaagaaaaggggggattggggggtacagtgcaggggaaagaatagtagacataatagcaacagacatacaaactaaag

SEQ ID NO: 14731 - DNA, 301 bp, Artificial Sequence
  Ercc5.3_Arid1b.2
  crRNA array
  misc_feature (148)..(157): n is a, c, g, or t
cttggctttatatatcttgtggaaaggacgaaacaccgtaatttctactaagtgtagatggagtgggtccaggcctcgttaatttctactaagtgtagatagtgcaaaactgagcgcgggtaatttctactaagtgtagatttttttnnnnnnnnnnaagcttggcgtggatccgatatcaactagatcttgagacaaatggcagtattcatccacaattttaaaagaaaaggggggattggggggtacagtgcaggggaaagaatagtagacataatagcaacagacatacaaactaaag

SEQ ID NO: 14732 - DNA, 301 bp, Artificial Sequence
  Ercc5.3_Arid1b.3
  crRNA array
  misc_feature (148)..(157): n is a, c, g, or t
cttggctttatatatcttgtggaaaggacgaaacaccgtaatttctactaagtgtagatggagtgggtccaggcctcgttaatttctactaagtgtagatcactcaaaggcgaacaggtataatttctactaagtgtagatttttttnnnnnnnnnnaagcttggcgtggatccgatatcaactagatcttgagacaaatggcagtattcatccacaattttaaaagaaaaggggggattggggggtacagtgcaggggaaagaatagtagacataatagcaacagacatacaaactaaag

SEQ ID NO: 14733 - DNA, 301 bp, Artificial Sequence
  Ercc5.3_Arid1b.4
  crRNA array
  misc_feature (148)..(157): n is a, c, g, or t
cttggctttatatatcttgtggaaaggacgaaacaccgtaatttctactaagtgtagatggagtgggtccaggcctcgttaatttctactaagtgtagatctcctggctccgtagaagcataatttctactaagtgtagatttttttnnnnnnnnnnaagcttggcgtggatccgatatcaactagatcttgagacaaatggcagtattcatccacaattttaaaagaaaaggggggattggggggtacagtgcaggggaaagaatagtagacataatagcaacagacatacaaactaaag

SEQ ID NO: 14734 - DNA, 301 bp, Artificial Sequence
  Ercc5.4_Arid1b.1
  crRNA array
  misc_feature (148)..(157): n is a, c, g, or t
cttggctttatatatcttgtggaaaggacgaaacaccgtaatttctactaagtgtagatcagagccggtggaataatgttaatttctactaagtgtagatgctgctgctgtagtgcgtggtaatttctactaagtgtagatttttttnnnnnnnnnnaagcttggcgtggatccgatatcaactagatcttgagacaaatggcagtattcatccacaattttaaaagaaaaggggggattggggggtacagtgcaggggaaagaatagtagacataatagcaacagacatacaaactaaag

SEQ ID NO: 14735 - DNA, 301 bp, Artificial Sequence
  Ercc5.4_Arid1b.2
  crRNA array
  misc_feature (148)..(157): n is a, c, g, or t
cttggctttatatatcttgtggaaaggacgaaacaccgtaatttctactaagtgtagatcagagccggtggaataatgttaatttctactaagtgtagatagtgcaaaactgagcgcgggtaatttctactaagtgtagatttttttnnnnnnnnnnaagcttggcgtggatccgatatcaactagatcttgagacaaatggcagtattcatccacaattttaaaagaaaaggggggattggggggtacagtgcaggggaaagaatagtagacataatagcaacagacatacaaactaaag

SEQ ID NO: 14736 - DNA, 301 bp, Artificial Sequence
  Ercc5.4_Arid1b.3
  crRNA array
  misc_feature (148)..(157): n is a, c, g, or t
cttggctttatatatcttgtggaaaggacgaaacaccgtaatttctactaagtgtagatcagagccggtggaataatgttaatttctactaagtgtagatcactcaaaggcgaacaggtataatttctactaagtgtagatttttttnnnnnnnnnnaagcttggcgtggatccgatatcaactagatcttgagacaaatggcagtattcatccacaattttaaaagaaaaggggggattggggggtacagtgcaggggaaagaatagtagacataatagcaacagacatacaaactaaag

SEQ ID NO: 14737 - DNA, 301 bp, Artificial Sequence
  Ercc5.4_Arid1b.4
  crRNA array
  misc_feature (148)..(157): n is a, c, g, or t
cttggctttatatatcttgtggaaaggacgaaacaccgtaatttctactaagtgtagatcagagccggtggaataatgttaatttctactaagtgtagatctcctggctccgtagaagcataatttctactaagtgtagatttttttnnnnnnnnnnaagcttggcgtggatccgatatcaactagatcttgagacaaatggcagtattcatccacaattttaaaagaaaaggggggattggggggtacagtgcaggggaaagaatagtagacataatagcaacagacatacaaactaaag

SEQ ID NO: 14738 - DNA, 301 bp, Artificial Sequence
  Ercc5.1_Rb1.1
  crRNA array
  misc_feature (148)..(157): n is a, c, g, or t
cttggctttatatatcttgtggaaaggacgaaacaccgtaatttctactaagtgtagatacggcacgagcaagagacactaatttctactaagtgtagattctgacatgatcgggtaccttaatttctactaagtgtagatttttttnnnnnnnnnnaagcttggcgtggatccgatatcaactagatcttgagacaaatggcagtattcatccacaattttaaaagaaaaggggggattggggggtacagtgcaggggaaagaatagtagacataatagcaacagacatacaaactaaag

SEQ ID NO: 14739 - DNA, 301 bp, Artificial Sequence
  Ercc5.1_Rb1.2
  crRNA array
  misc_feature (148)..(157): n is a, c, g, or t
cttggctttatatatcttgtggaaaggacgaaacaccgtaatttctactaagtgtagatacggcacgagcaagagacactaatttctactaagtgtagatgtctctgcatgaaaacggagtaatttctactaagtgtagatttttttnnnnnnnnnnaagcttggcgtggatccgatatcaactagatcttgagacaaatggcagtattcatccacaattttaaaagaaaaggggggattggggggtacagtgcaggggaaagaatagtagacataatagcaacagacatacaaactaaag

SEQ ID NO: 14740 - DNA, 301 bp, Artificial Sequence
  Ercc5.1_Rb1.3
  crRNA array
  misc_feature (148)..(157): n is a, c, g, or t
cttggctttatatatcttgtggaaaggacgaaacaccgtaatttctactaagtgtagatacggcacgagcaagagacactaatttctactaagtgtagatagccaatctggtctaataactaatttctactaagtgtagatttttttnnnnnnnnnnaagcttggcgtggatccgatatcaactagatcttgagacaaatggcagtattcatccacaattttaaaagaaaaggggggattggggggtacagtgcaggggaaagaatagtagacataatagcaacagacatacaaactaaag

SEQ ID NO: 14741 - DNA, 301 bp, Artificial Sequence
  Ercc5.1_Rb1.4
  crRNA array
  misc_feature (148)..(157): n is a, c, g, or t
cttggctttatatatcttgtggaaaggacgaaacaccgtaatttctactaagtgtagatacggcacgagcaagagacactaatttctactaagtgtagattgtagctcagtaaaagtgaataatttctactaagtgtagatttttttnnnnnnnnnnaagcttggcgtggatccgatatcaactagatcttgagacaaatggcagtattcatccacaattttaaaagaaaaggggggattggggggtacagtgcaggggaaagaatagtagacataatagcaacagacatacaaactaaag

SEQ ID NO: 14742 - DNA, 301 bp, Artificial Sequence
  Ercc5.2_Rb1.1
  crRNA array
  misc_feature (148)..(157): n is a, c, g, or t
cttggctttatatatcttgtggaaaggacgaaacaccgtaatttctactaagtgtagatgagtatcacatcggtgactctaatttctactaagtgtagattctgacatgatcgggtaccttaatttctactaagtgtagatttttttnnnnnnnnnnaagcttggcgtggatccgatatcaactagatcttgagacaaatggcagtattcatccacaattttaaaagaaaaggggggattggggggtacagtgcaggggaaagaatagtagacataatagcaacagacatacaaactaaag

SEQ ID NO: 14743 - DNA, 301 bp, Artificial Sequence
  Ercc5.2_Rb1.2
  crRNA array
  misc_feature (148)..(157): n is a, c, g, or t
cttggctttatatatcttgtggaaaggacgaaacaccgtaatttctactaagtgtagatgagtatcacatcggtgactctaatttctactaagtgtagatgtctctgcatgaaaacggagtaatttctactaagtgtagatttttttnnnnnnnnnnaagcttggcgtggatccgatatcaactagatcttgagacaaatggcagtattcatccacaattttaaaagaaaaggggggattggggggtacagtgcaggggaaagaatagtagacataatagcaacagacatacaaactaaag

SEQ ID NO: 14744 - DNA, 301 bp, Artificial Sequence
  Ercc5.2_Rb1.3
  crRNA array
  misc_feature (148)..(157): n is a, c, g, or t
cttggctttatatatcttgtggaaaggacgaaacaccgtaatttctactaagtgtagatgagtatcacatcggtgactctaatttctactaagtgtagatagccaatctggtctaataactaatttctactaagtgtagatttttttnnnnnnnnnnaagcttggcgtggatccgatatcaactagatcttgagacaaatggcagtattcatccacaattttaaaagaaaaggggggattggggggtacagtgcaggggaaagaatagtagacataatagcaacagacatacaaactaaag

SEQ ID NO: 14745 - DNA, 301 bp, Artificial Sequence
  Ercc5.2_Rb1.4
  crRNA array
  misc_feature (148)..(157): n is a, c, g, or t
cttggctttatatatcttgtggaaaggacgaaacaccgtaatttctactaagtgtagatgagtatcacatcggtgactctaatttctactaagtgtagattgtagctcagtaaaagtgaataatttctactaagtgtagatttttttnnnnnnnnnnaagcttggcgtggatccgatatcaactagatcttgagacaaatggcagtattcatccacaattttaaaagaaaaggggggattggggggtacagtgcaggggaaagaatagtagacataatagcaacagacatacaaactaaag

SEQ ID NO: 14746 - DNA, 301 bp, Artificial Sequence
  Ercc5.3_Rb1.1
  crRNA array
  misc_feature (148)..(157): n is a, c, g, or t
cttggctttatatatcttgtggaaaggacgaaacaccgtaatttctactaagtgtagatggagtgggtccaggcctcgttaatttctactaagtgtagattctgacatgatcgggtaccttaatttctactaagtgtagatttttttnnnnnnnnnnaagcttggcgtggatccgatatcaactagatcttgagacaaatggcagtattcatccacaattttaaaagaaaaggggggattggggggtacagtgcaggggaaagaatagtagacataatagcaacagacatacaaactaaag

SEQ ID NO: 14747 - DNA, 301 bp, Artificial Sequence
  Ercc5.3_Rb1.2
  crRNA array
  misc_feature (148)..(157): n is a, c, g, or t
cttggctttatatatcttgtggaaaggacgaaacaccgtaatttctactaagtgtagatggagtgggtccaggcctcgttaatttctactaagtgtagatgtctctgcatgaaaacggagtaatttctactaagtgtagatttttttnnnnnnnnnnaagcttggcgtggatccgatatcaactagatcttgagacaaatggcagtattcatccacaattttaaaagaaaaggggggattggggggtacagtgcaggggaaagaatagtagacataatagcaacagacatacaaactaaag

SEQ ID NO: 14748 - DNA, 301 bp, Artificial Sequence
  Ercc5.3_Rb1.3
  crRNA array
  misc_feature (148)..(157): n is a, c, g, or t
cttggctttatatatcttgtggaaaggacgaaacaccgtaatttctactaagtgtagatggagtgggtccaggcctcgttaatttctactaagtgtagatagccaatctggtctaataactaatttctactaagtgtagatttttttnnnnnnnnnnaagcttggcgtggatccgatatcaactagatcttgagacaaatggcagtattcatccacaattttaaaagaaaaggggggattggggggtacagtgcaggggaaagaatagtagacataatagcaacagacatacaaactaaag

SEQ ID NO: 14749 - DNA, 301 bp, Artificial Sequence
  Ercc5.3_Rb1.4
  crRNA array
  misc_feature (148)..(157): n is a, c, g, or t
cttggctttatatatcttgtggaaaggacgaaacaccgtaatttctactaagtgtagatggagtgggtccaggcctcgttaatttctactaagtgtagattgtagctcagtaaaagtgaataatttctactaagtgtagatttttttnnnnnnnnnnaagcttggcgtggatccgatatcaactagatcttgagacaaatggcagtattcatccacaattttaaaagaaaaggggggattggggggtacagtgcaggggaaagaatagtagacataatagcaacagacatacaaactaaag

SEQ ID NO: 14750 - DNA, 301 bp, Artificial Sequence
  Ercc5.4_Rb1.1
  crRNA array
  misc_feature (148)..(157): n is a, c, g, or t
cttggctttatatatcttgtggaaaggacgaaacaccgtaatttctactaagtgtagatcagagccggtggaataatgttaatttctactaagtgtagattctgacatgatcgggtaccttaatttctactaagtgtagatttttttnnnnnnnnnnaagcttggcgtggatccgatatcaactagatcttgagacaaatggcagtattcatccacaattttaaaagaaaaggggggattggggggtacagtgcaggggaaagaatagtagacataatagcaacagacatacaaactaaag

SEQ ID NO: 14751 - DNA, 301 bp, Artificial Sequence
  Ercc5.4_Rb1.2
  crRNA array
  misc_feature (148)..(157): n is a, c, g, or t
cttggctttatatatcttgtggaaaggacgaaacaccgtaatttctactaagtgtagatcagagccggtggaataatgttaatttctactaagtgtagatgtctctgcatgaaaacggagtaatttctactaagtgtagatttttttnnnnnnnnnnaagcttggcgtggatccgatatcaactagatcttgagacaaatggcagtattcatccacaattttaaaagaaaaggggggattggggggtacagtgcaggggaaagaatagtagacataatagcaacagacatacaaactaaag

SEQ ID NO: 14752 - DNA, 301 bp, Artificial Sequence
  Ercc5.4_Rb1.3
  crRNA array
  misc_feature (148)..(157): n is a, c, g, or t
cttggctttatatatcttgtggaaaggacgaaacaccgtaatttctactaagtgtagatcagagccggtggaataatgttaatttctactaagtgtagatagccaatctggtctaataactaatttctactaagtgtagatttttttnnnnnnnnnnaagcttggcgtggatccgatatcaactagatcttgagacaaatggcagtattcatccacaattttaaaagaaaaggggggattggggggtacagtgcaggggaaagaatagtagacataatagcaacagacatacaaactaaag

SEQ ID NO: 14753 - DNA, 301 bp, Artificial Sequence
  Ercc5.4_Rb1.4
  crRNA array
  misc_feature (148)..(157): n is a, c, g, or t
cttggctttatatatcttgtggaaaggacgaaacaccgtaatttctactaagtgtagatcagagccggtggaataatgttaatttctactaagtgtagattgtagctcagtaaaagtgaataatttctactaagtgtagatttttttnnnnnnnnnnaagcttggcgtggatccgatatcaactagatcttgagacaaatggcagtattcatccacaattttaaaagaaaaggggggattggggggtacagtgcaggggaaagaatagtagacataatagcaacagacatacaaactaaag

SEQ ID NO: 14754 - DNA, 301 bp, Artificial Sequence
  Ercc5.1_Kmt2c.1
  crRNA array
  misc_feature (148)..(157): n is a, c, g, or t
cttggctttatatatcttgtggaaaggacgaaacaccgtaatttctactaagtgtagatacggcacgagcaagagacactaatttctactaagtgtagatactcgacctccacctccctataatttctactaagtgtagatttttttnnnnnnnnnnaagcttggcgtggatccgatatcaactagatcttgagacaaatggcagtattcatccacaattttaaaagaaaaggggggattggggggtacagtgcaggggaaagaatagtagacataatagcaacagacatacaaactaaag

SEQ ID NO: 14755 - DNA, 301 bp, Artificial Sequence
  Ercc5.1_Kmt2c.2
  crRNA array
  misc_feature (148)..(157): n is a, c, g, or t
cttggctttatatatcttgtggaaaggacgaaacaccgtaatttctactaagtgtagatacggcacgagcaagagacactaatttctactaagtgtagatcccaaagatcagcgtggacctaatttctactaagtgtagatttttttnnnnnnnnnnaagcttggcgtggatccgatatcaactagatcttgagacaaatggcagtattcatccacaattttaaaagaaaaggggggattggggggtacagtgcaggggaaagaatagtagacataatagcaacagacatacaaactaaag

SEQ ID NO: 14756 - DNA, 301 bp, Artificial Sequence
  Ercc5.1_Kmt2c.3
  crRNA array
  misc_feature (148)..(157): n is a, c, g, or t
cttggctttatatatcttgtggaaaggacgaaacaccgtaatttctactaagtgtagatacggcacgagcaagagacactaatttctactaagtgtagataaaagatccgaatcgatgcgtaatttctactaagtgtagatttttttnnnnnnnnnnaagcttggcgtggatccgatatcaactagatcttgagacaaatggcagtattcatccacaattttaaaagaaaaggggggattggggggtacagtgcaggggaaagaatagtagacataatagcaacagacatacaaactaaag

SEQ ID NO: 14757 - DNA, 301 bp, Artificial Sequence
  Ercc5.1_Kmt2c.4
  crRNA array
  misc_feature (148)..(157): n is a, c, g, or t
cttggctttatatatcttgtggaaaggacgaaacaccgtaatttctactaagtgtagatacggcacgagcaagagacactaatttctactaagtgtagatctgaggcacatggaagcgattaatttctactaagtgtagatttttttnnnnnnnnnnaagcttggcgtggatccgatatcaactagatcttgagacaaatggcagtattcatccacaattttaaaagaaaaggggggattggggggtacagtgcaggggaaagaatagtagacataatagcaacagacatacaaactaaag

SEQ ID NO: 14758 - DNA, 301 bp, Artificial Sequence
  Ercc5.2_Kmt2c.1
  crRNA array
  misc_feature (148)..(157): n is a, c, g, or t
cttggctttatatatcttgtggaaaggacgaaacaccgtaatttctactaagtgtagatgagtatcacatcggtgactctaatttctactaagtgtagatactcgacctccacctccctataatttctactaagtgtagatttttttnnnnnnnnnnaagcttggcgtggatccgatatcaactagatcttgagacaaatggcagtattcatccacaattttaaaagaaaaggggggattggggggtacagtgcaggggaaagaatagtagacataatagcaacagacatacaaactaaag

SEQ ID NO: 14759 - DNA, 301 bp, Artificial Sequence
  Ercc5.2_Kmt2c.2
  crRNA array
  misc_feature (148)..(157): n is a, c, g, or t
cttggctttatatatcttgtggaaaggacgaaacaccgtaatttctactaagtgtagatgagtatcacatcggtgactctaatttctactaagtgtagatcccaaagatcagcgtggacctaatttctactaagtgtagatttttttnnnnnnnnnnaagcttggcgtggatccgatatcaactagatcttgagacaaatggcagtattcatccacaattttaaaagaaaaggggggattggggggtacagtgcaggggaaagaatagtagacataatagcaacagacatacaaactaaag

SEQ ID NO: 14760 - DNA, 301 bp, Artificial Sequence
  Ercc5.2_Kmt2c.3
  crRNA array
  misc_feature (148)..(157): n is a, c, g, or t
cttggctttatatatcttgtggaaaggacgaaacaccgtaatttctactaagtgtagatgagtatcacatcggtgactctaatttctactaagtgtagataaaagatccgaatcgatgcgtaatttctactaagtgtagatttttttnnnnnnnnnnaagcttggcgtggatccgatatcaactagatcttgagacaaatggcagtattcatccacaattttaaaagaaaaggggggattggggggtacagtgcaggggaaagaatagtagacataatagcaacagacatacaaactaaag

SEQ ID NO: 14761 - DNA, 301 bp, Artificial Sequence
  Ercc5.2_Kmt2c.4
  crRNA array
  misc_feature (148)..(157): n is a, c, g, or t
cttggctttatatatcttgtggaaaggacgaaacaccgtaatttctactaagtgtagatgagtatcacatcggtgactctaatttctactaagtgtagatctgaggcacatggaagcgattaatttctactaagtgtagatttttttnnnnnnnnnnaagcttggcgtggatccgatatcaactagatcttgagacaaatggcagtattcatccacaattttaaaagaaaaggggggattggggggtacagtgcaggggaaagaatagtagacataatagcaacagacatacaaactaaag

SEQ ID NO: 14762 - DNA, 301 bp, Artificial Sequence
  Ercc5.3_Kmt2c.1
  crRNA array
  misc_feature (148)..(157): n is a, c, g, or t
cttggctttatatatcttgtggaaaggacgaaacaccgtaatttctactaagtgtagatggagtgggtccaggcctcgttaatttctactaagtgtagatactcgacctccacctccctataatttctactaagtgtagatttttttnnnnnnnnnnaagcttggcgtggatccgatatcaactagatcttgagacaaatggcagtattcatccacaattttaaaagaaaaggggggattggggggtacagtgcaggggaaagaatagtagacataatagcaacagacatacaaactaaag

SEQ ID NO: 14763 - DNA, 301 bp, Artificial Sequence
  Ercc5.3_Kmt2c.2
  crRNA array
  misc_feature (148)..(157): n is a, c, g, or t
cttggctttatatatcttgtggaaaggacgaaacaccgtaatttctactaagtgtagatggagtgggtccaggcctcgttaatttctactaagtgtagatcccaaagatcagcgtggacctaatttctactaagtgtagatttttttnnnnnnnnnnaagcttggcgtggatccgatatcaactagatcttgagacaaatggcagtattcatccacaattttaaaagaaaaggggggattggggggtacagtgcaggggaaagaatagtagacataatagcaacagacatacaaactaaag

SEQ ID NO: 14764 - DNA, 301 bp, Artificial Sequence
  Ercc5.3_Kmt2c.3
  crRNA array
  misc_feature (148)..(157): n is a, c, g, or t
cttggctttatatatcttgtggaaaggacgaaacaccgtaatttctactaagtgtagatggagtgggtccaggcctcgttaatttctactaagtgtagataaaagatccgaatcgatgcgtaatttctactaagtgtagatttttttnnnnnnnnnnaagcttggcgtggatccgatatcaactagatcttgagacaaatggcagtattcatccacaattttaaaagaaaaggggggattggggggtacagtgcaggggaaagaatagtagacataatagcaacagacatacaaactaaag

SEQ ID NO: 14765 - DNA, 301 bp, Artificial Sequence
  Ercc5.3_Kmt2c.4
  crRNA array
  misc_feature (148)..(157): n is a, c, g, or t
cttggctttatatatcttgtggaaaggacgaaacaccgtaatttctactaagtgtagatggagtgggtccaggcctcgttaatttctactaagtgtagatctgaggcacatggaagcgattaatttctactaagtgtagatttttttnnnnnnnnnnaagcttggcgtggatccgatatcaactagatcttgagacaaatggcagtattcatccacaattttaaaagaaaaggggggattggggggtacagtgcaggggaaagaatagtagacataatagcaacagacatacaaactaaag

SEQ ID NO: 14766 - DNA, 301 bp, Artificial Sequence
  Ercc5.4_Kmt2c.1
  crRNA array
  misc_feature (148)..(157): n is a, c, g, or t
cttggctttatatatcttgtggaaaggacgaaacaccgtaatttctactaagtgtagatcagagccggtggaataatgttaatttctactaagtgtagatactcgacctccacctccctataatttctactaagtgtagatttttttnnnnnnnnnnaagcttggcgtggatccgatatcaactagatcttgagacaaatggcagtattcatccacaattttaaaagaaaaggggggattggggggtacagtgcaggggaaagaatagtagacataatagcaacagacatacaaactaaag

SEQ ID NO: 14767 - DNA, 301 bp, Artificial Sequence
  Ercc5.4_Kmt2c.2
  crRNA array
  misc_feature (148)..(157): n is a, c, g, or t
cttggctttatatatcttgtggaaaggacgaaacaccgtaatttctactaagtgtagatcagagccggtggaataatgttaatttctactaagtgtagatcccaaagatcagcgtggacctaatttctactaagtgtagatttttttnnnnnnnnnnaagcttggcgtggatccgatatcaactagatcttgagacaaatggcagtattcatccacaattttaaaagaaaaggggggattggggggtacagtgcaggggaaagaatagtagacataatagcaacagacatacaaactaaag

SEQ ID NO: 14768 - DNA, 301 bp, Artificial Sequence
  Ercc5.4_Kmt2c.3
  crRNA array
  misc_feature (148)..(157): n is a, c, g, or t
cttggctttatatatcttgtggaaaggacgaaacaccgtaatttctactaagtgtagatcagagccggtggaataatgttaatttctactaagtgtagataaaagatccgaatcgatgcgtaatttctactaagtgtagatttttttnnnnnnnnnnaagcttggcgtggatccgatatcaactagatcttgagacaaatggcagtattcatccacaattttaaaagaaaaggggggattggggggtacagtgcaggggaaagaatagtagacataatagcaacagacatacaaactaaag

SEQ ID NO: 14769 - DNA, 301 bp, Artificial Sequence
  Ercc5.4_Kmt2c.4
  crRNA array
  misc_feature (148)..(157): n is a, c, g, or t
cttggctttatatatcttgtggaaaggacgaaacaccgtaatttctactaagtgtagatcagagccggtggaataatgttaatttctactaagtgtagatctgaggcacatggaagcgattaatttctactaagtgtagatttttttnnnnnnnnnnaagcttggcgtggatccgatatcaactagatcttgagacaaatggcagtattcatccacaattttaaaagaaaaggggggattggggggtacagtgcaggggaaagaatagtagacataatagcaacagacatacaaactaaag

SEQ ID NO: 14770 - DNA, 301 bp, Artificial Sequence
  Ercc5.1_Pten.1
  crRNA array
  misc_feature (148)..(157): n is a, c, g, or t
cttggctttatatatcttgtggaaaggacgaaacaccgtaatttctactaagtgtagatacggcacgagcaagagacactaatttctactaagtgtagataagcgtggtgcgtgacgcactaatttctactaagtgtagatttttttnnnnnnnnnnaagcttggcgtggatccgatatcaactagatcttgagacaaatggcagtattcatccacaattttaaaagaaaaggggggattggggggtacagtgcaggggaaagaatagtagacataatagcaacagacatacaaactaaag

SEQ ID NO: 14771 - DNA, 301 bp, Artificial Sequence
  Ercc5.1_Pten.2
  crRNA array
  misc_feature (148)..(157): n is a, c, g, or t
cttggctttatatatcttgtggaaaggacgaaacaccgtaatttctactaagtgtagatacggcacgagcaagagacactaatttctactaagtgtagattgtcaccagctgaagtggcttaatttctactaagtgtagatttttttnnnnnnnnnnaagcttggcgtggatccgatatcaactagatcttgagacaaatggcagtattcatccacaattttaaaagaaaaggggggattggggggtacagtgcaggggaaagaatagtagacataatagcaacagacatacaaactaaag

SEQ ID NO: 14772 - DNA, 301 bp, Artificial Sequence
  Ercc5.1_Pten.3
  crRNA array
  misc_feature (148)..(157): n is a, c, g, or t
cttggctttatatatcttgtggaaaggacgaaacaccgtaatttctactaagtgtagatacggcacgagcaagagacactaatttctactaagtgtagatggagtcaagaggctgatttttaatttctactaagtgtagatttttttnnnnnnnnnnaagcttggcgtggatccgatatcaactagatcttgagacaaatggcagtattcatccacaattttaaaagaaaaggggggattggggggtacagtgcaggggaaagaatagtagacataatagcaacagacatacaaactaaag

SEQ ID NO: 14773 - DNA, 301 bp, Artificial Sequence
  Ercc5.1_Pten.4
  crRNA array
  misc_feature (148)..(157): n is a, c, g, or t
cttggctttatatatcttgtggaaaggacgaaacaccgtaatttctactaagtgtagatacggcacgagcaagagacactaatttctactaagtgtagatctgtaagctaaaccactacataatttctactaagtgtagatttttttnnnnnnnnnnaagcttggcgtggatccgatatcaactagatcttgagacaaatggcagtattcatccacaattttaaaagaaaaggggggattggggggtacagtgcaggggaaagaatagtagacataatagcaacagacatacaaactaaag

SEQ ID NO: 14774 - DNA, 301 bp, Artificial Sequence
  Ercc5.2_Pten.1
  crRNA array
  misc_feature (148)..(157): n is a, c, g, or t
cttggctttatatatcttgtggaaaggacgaaacaccgtaatttctactaagtgtagatgagtatcacatcggtgactctaatttctactaagtgtagataagcgtggtgcgtgacgcactaatttctactaagtgtagatttttttnnnnnnnnnnaagcttggcgtggatccgatatcaactagatcttgagacaaatggcagtattcatccacaattttaaaagaaaaggggggattggggggtacagtgcaggggaaagaatagtagacataatagcaacagacatacaaactaaag

SEQ ID NO: 14775 - DNA, 301 bp, Artificial Sequence
  Ercc5.2_Pten.2
  crRNA array
  misc_feature (148)..(157): n is a, c, g, or t
cttggctttatatatcttgtggaaaggacgaaacaccgtaatttctactaagtgtagatgagtatcacatcggtgactctaatttctactaagtgtagattgtcaccagctgaagtggcttaatttctactaagtgtagatttttttnnnnnnnnnnaagcttggcgtggatccgatatcaactagatcttgagacaaatggcagtattcatccacaattttaaaagaaaaggggggattggggggtacagtgcaggggaaagaatagtagacataatagcaacagacatacaaactaaag

SEQ ID NO: 14776 - DNA, 301 bp, Artificial Sequence
  Ercc5.2_Pten.3
  crRNA array
  misc_feature (148)..(157): n is a, c, g, or t
cttggctttatatatcttgtggaaaggacgaaacaccgtaatttctactaagtgtagatgagtatcacatcggtgactctaatttctactaagtgtagatggagtcaagaggctgatttttaatttctactaagtgtagatttttttnnnnnnnnnnaagcttggcgtggatccgatatcaactagatcttgagacaaatggcagtattcatccacaattttaaaagaaaaggggggattggggggtacagtgcaggggaaagaatagtagacataatagcaacagacatacaaactaaag

SEQ ID NO: 14777 - DNA, 301 bp, Artificial Sequence
  Ercc5.2_Pten.4
  crRNA array
  misc_feature (148)..(157): n is a, c, g, or t
cttggctttatatatcttgtggaaaggacgaaacaccgtaatttctactaagtgtagatgagtatcacatcggtgactctaatttctactaagtgtagatctgtaagctaaaccactacataatttctactaagtgtagatttttttnnnnnnnnnnaagcttggcgtggatccgatatcaactagatcttgagacaaatggcagtattcatccacaattttaaaagaaaaggggggattggggggtacagtgcaggggaaagaatagtagacataatagcaacagacatacaaactaaag

SEQ ID NO: 14778 - DNA, 301 bp, Artificial Sequence
  Ercc5.3_Pten.1
  crRNA array
  misc_feature (148)..(157): n is a, c, g, or t
cttggctttatatatcttgtggaaaggacgaaacaccgtaatttctactaagtgtagatggagtgggtccaggcctcgttaatttctactaagtgtagataagcgtggtgcgtgacgcactaatttctactaagtgtagatttttttnnnnnnnnnnaagcttggcgtggatccgatatcaactagatcttgagacaaatggcagtattcatccacaattttaaaagaaaaggggggattggggggtacagtgcaggggaaagaatagtagacataatagcaacagacatacaaactaaag

SEQ ID NO: 14779 - DNA, 301 bp, Artificial Sequence
  Ercc5.3_Pten.2
  crRNA array
  misc_feature (148)..(157): n is a, c, g, or t
cttggctttatatatcttgtggaaaggacgaaacaccgtaatttctactaagtgtagatggagtgggtccaggcctcgttaatttctactaagtgtagattgtcaccagctgaagtggcttaatttctactaagtgtagatttttttnnnnnnnnnnaagcttggcgtggatccgatatcaactagatcttgagacaaatggcagtattcatccacaattttaaaagaaaaggggggattggggggtacagtgcaggggaaagaatagtagacataatagcaacagacatacaaactaaag

SEQ ID NO: 14780 - DNA, 301 bp, Artificial Sequence
  Ercc5.3_Pten.3
  crRNA array
  misc_feature (148)..(157): n is a, c, g, or t
cttggctttatatatcttgtggaaaggacgaaacaccgtaatttctactaagtgtagatggagtgggtccaggcctcgttaatttctactaagtgtagatggagtcaagaggctgatttttaatttctactaagtgtagatttttttnnnnnnnnnnaagcttggcgtggatccgatatcaactagatcttgagacaaatggcagtattcatccacaattttaaaagaaaaggggggattggggggtacagtgcaggggaaagaatagtagacataatagcaacagacatacaaactaaag

SEQ ID NO: 14781 - DNA, 301 bp, Artificial Sequence
  Ercc5.3_Pten.4
  crRNA array
  misc_feature (148)..(157): n is a, c, g, or t
cttggctttatatatcttgtggaaaggacgaaacaccgtaatttctactaagtgtagatggagtgggtccaggcctcgttaatttctactaagtgtagatctgtaagctaaaccactacataatttctactaagtgtagatttttttnnnnnnnnnnaagcttggcgtggatccgatatcaactagatcttgagacaaatggcagtattcatccacaattttaaaagaaaaggggggattggggggtacagtgcaggggaaagaatagtagacataatagcaacagacatacaaactaaag

SEQ ID NO: 14782 - DNA, 301 bp, Artificial Sequence
  Ercc5.4_Pten.1
  crRNA array
  misc_feature (148)..(157): n is a, c, g, or t
cttggctttatatatcttgtggaaaggacgaaacaccgtaatttctactaagtgtagatcagagccggtggaataatgttaatttctactaagtgtagataagcgtggtgcgtgacgcactaatttctactaagtgtagatttttttnnnnnnnnnnaagcttggcgtggatccgatatcaactagatcttgagacaaatggcagtattcatccacaattttaaaagaaaaggggggattggggggtacagtgcaggggaaagaatagtagacataatagcaacagacatacaaactaaag

SEQ ID NO: 14783 - DNA, 301 bp, Artificial Sequence
  Ercc5.4_Pten.2
  crRNA array
  misc_feature (148)..(157): n is a, c, g, or t
cttggctttatatatcttgtggaaaggacgaaacaccgtaatttctactaagtgtagatcagagccggtggaataatgttaatttctactaagtgtagattgtcaccagctgaagtggcttaatttctactaagtgtagatttttttnnnnnnnnnnaagcttggcgtggatccgatatcaactagatcttgagacaaatggcagtattcatccacaattttaaaagaaaaggggggattggggggtacagtgcaggggaaagaatagtagacataatagcaacagacatacaaactaaag

SEQ ID NO: 14784 - DNA, 301 bp, Artificial Sequence
  Ercc5.4_Pten.3
  crRNA array
  misc_feature (148)..(157): n is a, c, g, or t
cttggctttatatatcttgtggaaaggacgaaacaccgtaatttctactaagtgtagatcagagccggtggaataatgttaatttctactaagtgtagatggagtcaagaggctgatttttaatttctactaagtgtagatttttttnnnnnnnnnnaagcttggcgtggatccgatatcaactagatcttgagacaaatggcagtattcatccacaattttaaaagaaaaggggggattggggggtacagtgcaggggaaagaatagtagacataatagcaacagacatacaaactaaag

SEQ ID NO: 14785 - DNA, 301 bp, Artificial Sequence
  Ercc5.4_Pten.4
  crRNA array
  misc_feature (148)..(157): n is a, c, g, or t
cttggctttatatatcttgtggaaaggacgaaacaccgtaatttctactaagtgtagatcagagccggtggaataatgttaatttctactaagtgtagatctgtaagctaaaccactacataatttctactaagtgtagatttttttnnnnnnnnnnaagcttggcgtggatccgatatcaactagatcttgagacaaatggcagtattcatccacaattttaaaagaaaaggggggattggggggtacagtgcaggggaaagaatagtagacataatagcaacagacatacaaactaaag

SEQ ID NO: 14786 - DNA, 301 bp, Artificial Sequence
  Ercc5.1_Atm.1
  crRNA array
  misc_feature (148)..(157): n is a, c, g, or t
cttggctttatatatcttgtggaaaggacgaaacaccgtaatttctactaagtgtagatacggcacgagcaagagacactaatttctactaagtgtagatgagaaagtctccgaatcgtttaatttctactaagtgtagatttttttnnnnnnnnnnaagcttggcgtggatccgatatcaactagatcttgagacaaatggcagtattcatccacaattttaaaagaaaaggggggattggggggtacagtgcaggggaaagaatagtagacataatagcaacagacatacaaactaaag

SEQ ID NO: 14787 - DNA, 301 bp, Artificial Sequence
  Ercc5.1_Atm.2
  crRNA array
  misc_feature (148)..(157): n is a, c, g, or t
cttggctttatatatcttgtggaaaggacgaaacaccgtaatttctactaagtgtagatacggcacgagcaagagacactaatttctactaagtgtagatcctacgagggcacgagagactaatttctactaagtgtagatttttttnnnnnnnnnnaagcttggcgtggatccgatatcaactagatcttgagacaaatggcagtattcatccacaattttaaaagaaaaggggggattggggggtacagtgcaggggaaagaatagtagacataatagcaacagacatacaaactaaag

SEQ ID NO: 14788 - DNA, 301 bp, Artificial Sequence
  Ercc5.1_Atm.3
  crRNA array
  misc_feature (148)..(157): n is a, c, g, or t
cttggctttatatatcttgtggaaaggacgaaacaccgtaatttctactaagtgtagatacggcacgagcaagagacactaatttctactaagtgtagattgaaagtctccgatatgccataatttctactaagtgtagatttttttnnnnnnnnnnaagcttggcgtggatccgatatcaactagatcttgagacaaatggcagtattcatccacaattttaaaagaaaaggggggattggggggtacagtgcaggggaaagaatagtagacataatagcaacagacatacaaactaaag

SEQ ID NO: 14789 - DNA, 301 bp, Artificial Sequence
  Ercc5.1_Atm.4
  crRNA array
  misc_feature (148)..(157): n is a, c, g, or t
cttggctttatatatcttgtggaaaggacgaaacaccgtaatttctactaagtgtagatacggcacgagcaagagacactaatttctactaagtgtagatggtggtgatcagtcaagtagtaatttctactaagtgtagatttttttnnnnnnnnnnaagcttggcgtggatccgatatcaactagatcttgagacaaatggcagtattcatccacaattttaaaagaaaaggggggattggggggtacagtgcaggggaaagaatagtagacataatagcaacagacatacaaactaaag

SEQ ID NO: 14790 - DNA, 301 bp, Artificial Sequence
  Ercc5.2_Atm.1
  crRNA array
  misc_feature (148)..(157): n is a, c, g, or t
cttggctttatatatcttgtggaaaggacgaaacaccgtaatttctactaagtgtagatgagtatcacatcggtgactctaatttctactaagtgtagatgagaaagtctccgaatcgtttaatttctactaagtgtagatttttttnnnnnnnnnnaagcttggcgtggatccgatatcaactagatcttgagacaaatggcagtattcatccacaattttaaaagaaaaggggggattggggggtacagtgcaggggaaagaatagtagacataatagcaacagacatacaaactaaag

SEQ ID NO: 14791 - DNA, 301 bp, Artificial Sequence
  Ercc5.2_Atm.2
  crRNA array
  misc_feature (148)..(157): n is a, c, g, or t
cttggctttatatatcttgtggaaaggacgaaacaccgtaatttctactaagtgtagatgagtatcacatcggtgactctaatttctactaagtgtagatcctacgagggcacgagagactaatttctactaagtgtagatttttttnnnnnnnnnnaagcttggcgtggatccgatatcaactagatcttgagacaaatggcagtattcatccacaattttaaaagaaaaggggggattggggggtacagtgcaggggaaagaatagtagacataatagcaacagacatacaaactaaag

SEQ ID NO: 14792 - DNA, 301 bp, Artificial Sequence
  Ercc5.2_Atm.3
  crRNA array
  misc_feature (148)..(157): n is a, c, g, or t
cttggctttatatatcttgtggaaaggacgaaacaccgtaatttctactaagtgtagatgagtatcacatcggtgactctaatttctactaagtgtagattgaaagtctccgatatgccataatttctactaagtgtagatttttttnnnnnnnnnnaagcttggcgtggatccgatatcaactagatcttgagacaaatggcagtattcatccacaattttaaaagaaaaggggggattggggggtacagtgcaggggaaagaatagtagacataatagcaacagacatacaaactaaag

SEQ ID NO: 14793 - DNA, 301 bp, Artificial Sequence
  Ercc5.2_Atm.4
  crRNA array
  misc_feature (148)..(157): n is a, c, g, or t
cttggctttatatatcttgtggaaaggacgaaacaccgtaatttctactaagtgtagatgagtatcacatcggtgactctaatttctactaagtgtagatggtggtgatcagtcaagtagtaatttctactaagtgtagatttttttnnnnnnnnnnaagcttggcgtggatccgatatcaactagatcttgagacaaatggcagtattcatccacaattttaaaagaaaaggggggattggggggtacagtgcaggggaaagaatagtagacataatagcaacagacatacaaactaaag

SEQ ID NO: 14794 - DNA, 301 bp, Artificial Sequence
  Ercc5.3_Atm.1
  crRNA array
  misc_feature (148)..(157): n is a, c, g, or t
cttggctttatatatcttgtggaaaggacgaaacaccgtaatttctactaagtgtagatggagtgggtccaggcctcgttaatttctactaagtgtagatgagaaagtctccgaatcgtttaatttctactaagtgtagatttttttnnnnnnnnnnaagcttggcgtggatccgatatcaactagatcttgagacaaatggcagtattcatccacaattttaaaagaaaaggggggattggggggtacagtgcaggggaaagaatagtagacataatagcaacagacatacaaactaaag

SEQ ID NO: 14795 - DNA, 301 bp, Artificial Sequence
  Ercc5.3_Atm.2
  crRNA array
  misc_feature (148)..(157): n is a, c, g, or t
cttggctttatatatcttgtggaaaggacgaaacaccgtaatttctactaagtgtagatggagtgggtccaggcctcgttaatttctactaagtgtagatcctacgagggcacgagagactaatttctactaagtgtagatttttttnnnnnnnnnnaagcttggcgtggatccgatatcaactagatcttgagacaaatggcagtattcatccacaattttaaaagaaaaggggggattggggggtacagtgcaggggaaagaatagtagacataatagcaacagacatacaaactaaag

SEQ ID NO: 14796 - DNA, 301 bp, Artificial Sequence
  Ercc5.3_Atm.3
  crRNA array
  misc_feature (148)..(157): n is a, c, g, or t
cttggctttatatatcttgtggaaaggacgaaacaccgtaatttctactaagtgtagatggagtgggtccaggcctcgttaatttctactaagtgtagattgaaagtctccgatatgccataatttctactaagtgtagatttttttnnnnnnnnnnaagcttggcgtggatccgatatcaactagatcttgagacaaatggcagtattcatccacaattttaaaagaaaaggggggattggggggtacagtgcaggggaaagaatagtagacataatagcaacagacatacaaactaaag

SEQ ID NO: 14797 - DNA, 301 bp, Artificial Sequence
  Ercc5.3_Atm.4
  crRNA array
  misc_feature (148)..(157): n is a, c, g, or t
cttggctttatatatcttgtggaaaggacgaaacaccgtaatttctactaagtgtagatggagtgggtccaggcctcgttaatttctactaagtgtagatggtggtgatcagtcaagtagtaatttctactaagtgtagatttttttnnnnnnnnnnaagcttggcgtggatccgatatcaactagatcttgagacaaatggcagtattcatccacaattttaaaagaaaaggggggattggggggtacagtgcaggggaaagaatagtagacataatagcaacagacatacaaactaaag

SEQ ID NO: 14798 - DNA, 301 bp, Artificial Sequence
  Ercc5.4_Atm.1
  crRNA array
  misc_feature (148)..(157): n is a, c, g, or t
cttggctttatatatcttgtggaaaggacgaaacaccgtaatttctactaagtgtagatcagagccggtggaataatgttaatttctactaagtgtagatgagaaagtctccgaatcgtttaatttctactaagtgtagatttttttnnnnnnnnnnaagcttggcgtggatccgatatcaactagatcttgagacaaatggcagtattcatccacaattttaaaagaaaaggggggattggggggtacagtgcaggggaaagaatagtagacataatagcaacagacatacaaactaaag

SEQ ID NO: 14799 - DNA, 301 bp, Artificial Sequence
  Ercc5.4_Atm.2
  crRNA array
  misc_feature (148)..(157): n is a, c, g, or t
cttggctttatatatcttgtggaaaggacgaaacaccgtaatttctactaagtgtagatcagagccggtggaataatgttaatttctactaagtgtagatcctacgagggcacgagagactaatttctactaagtgtagatttttttnnnnnnnnnnaagcttggcgtggatccgatatcaactagatcttgagacaaatggcagtattcatccacaattttaaaagaaaaggggggattggggggtacagtgcaggggaaagaatagtagacataatagcaacagacatacaaactaaag

SEQ ID NO: 14800 - DNA, 301 bp, Artificial Sequence
  Ercc5.4_Atm.3
  crRNA array
  misc_feature (148)..(157): n is a, c, g, or t
cttggctttatatatcttgtggaaaggacgaaacaccgtaatttctactaagtgtagatcagagccggtggaataatgttaatttctactaagtgtagattgaaagtctccgatatgccataatttctactaagtgtagatttttttnnnnnnnnnnaagcttggcgtggatccgatatcaactagatcttgagacaaatggcagtattcatccacaattttaaaagaaaaggggggattggggggtacagtgcaggggaaagaatagtagacataatagcaacagacatacaaactaaag

SEQ ID NO: 14801 - DNA, 301 bp, Artificial Sequence
  Ercc5.4_Atm.4
  crRNA array
  misc_feature (148)..(157): n is a, c, g, or t
cttggctttatatatcttgtggaaaggacgaaacaccgtaatttctactaagtgtagatcagagccggtggaataatgttaatttctactaagtgtagatggtggtgatcagtcaagtagtaatttctactaagtgtagatttttttnnnnnnnnnnaagcttggcgtggatccgatatcaactagatcttgagacaaatggcagtattcatccacaattttaaaagaaaaggggggattggggggtacagtgcaggggaaagaatagtagacataatagcaacagacatacaaactaaag

SEQ ID NO: 14802 - DNA, 301 bp, Artificial Sequence
  Arid1b.1_Rb1.1
  crRNA array
  misc_feature (148)..(157): n is a, c, g, or t
cttggctttatatatcttgtggaaaggacgaaacaccgtaatttctactaagtgtagatgctgctgctgtagtgcgtggtaatttctactaagtgtagattctgacatgatcgggtaccttaatttctactaagtgtagatttttttnnnnnnnnnnaagcttggcgtggatccgatatcaactagatcttgagacaaatggcagtattcatccacaattttaaaagaaaaggggggattggggggtacagtgcaggggaaagaatagtagacataatagcaacagacatacaaactaaag

SEQ ID NO: 14803 - DNA, 301 bp, Artificial Sequence
  Arid1b.1_Rb1.2
  crRNA array
  misc_feature (148)..(157): n is a, c, g, or t
cttggctttatatatcttgtggaaaggacgaaacaccgtaatttctactaagtgtagatgctgctgctgtagtgcgtggtaatttctactaagtgtagatgtctctgcatgaaaacggagtaatttctactaagtgtagatttttttnnnnnnnnnnaagcttggcgtggatccgatatcaactagatcttgagacaaatggcagtattcatccacaattttaaaagaaaaggggggattggggggtacagtgcaggggaaagaatagtagacataatagcaacagacatacaaactaaag

SEQ ID NO: 14804 - DNA, 301 bp, Artificial Sequence
  Arid1b.1_Rb1.3
  crRNA array
  misc_feature (148)..(157): n is a, c, g, or t
cttggctttatatatcttgtggaaaggacgaaacaccgtaatttctactaagtgtagatgctgctgctgtagtgcgtggtaatttctactaagtgtagatagccaatctggtctaataactaatttctactaagtgtagatttttttnnnnnnnnnnaagcttggcgtggatccgatatcaactagatcttgagacaaatggcagtattcatccacaattttaaaagaaaaggggggattggggggtacagtgcaggggaaagaatagtagacataatagcaacagacatacaaactaaag

SEQ ID NO: 14805 - DNA, 301 bp, Artificial Sequence
  Arid1b.1_Rb1.4
  crRNA array
  misc_feature (148)..(157): n is a, c, g, or t
cttggctttatatatcttgtggaaaggacgaaacaccgtaatttctactaagtgtagatgctgctgctgtagtgcgtggtaatttctactaagtgtagattgtagctcagtaaaagtgaataatttctactaagtgtagatttttttnnnnnnnnnnaagcttggcgtggatccgatatcaactagatcttgagacaaatggcagtattcatccacaattttaaaagaaaaggggggattggggggtacagtgcaggggaaagaatagtagacataatagcaacagacatacaaactaaag

SEQ ID NO: 14806 - DNA, 301 bp, Artificial Sequence
  Arid1b.2_Rb1.1
  crRNA array
  misc_feature (148)..(157): n is a, c, g, or t
cttggctttatatatcttgtggaaaggacgaaacaccgtaatttctactaagtgtagatagtgcaaaactgagcgcgggtaatttctactaagtgtagattctgacatgatcgggtaccttaatttctactaagtgtagatttttttnnnnnnnnnnaagcttggcgtggatccgatatcaactagatcttgagacaaatggcagtattcatccacaattttaaaagaaaaggggggattggggggtacagtgcaggggaaagaatagtagacataatagcaacagacatacaaactaaag

SEQ ID NO: 14807 - DNA, 301 bp, Artificial Sequence
  Arid1b.2_Rb1.2
  crRNA array
  misc_feature (148)..(157): n is a, c, g, or t
cttggctttatatatcttgtggaaaggacgaaacaccgtaatttctactaagtgtagatagtgcaaaactgagcgcgggtaatttctactaagtgtagatgtctctgcatgaaaacggagtaatttctactaagtgtagatttttttnnnnnnnnnnaagcttggcgtggatccgatatcaactagatcttgagacaaatggcagtattcatccacaattttaaaagaaaaggggggattggggggtacagtgcaggggaaagaatagtagacataatagcaacagacatacaaactaaag

SEQ ID NO: 14808 - DNA, 301 bp, Artificial Sequence
  Arid1b.2_Rb1.3
  crRNA array
  misc_feature (148)..(157): n is a, c, g, or t
cttggctttatatatcttgtggaaaggacgaaacaccgtaatttctactaagtgtagatagtgcaaaactgagcgcgggtaatttctactaagtgtagatagccaatctggtctaataactaatttctactaagtgtagatttttttnnnnnnnnnnaagcttggcgtggatccgatatcaactagatcttgagacaaatggcagtattcatccacaattttaaaagaaaaggggggattggggggtacagtgcaggggaaagaatagtagacataatagcaacagacatacaaactaaag

SEQ ID NO: 14809 - DNA, 301 bp, Artificial Sequence
  Arid1b.2_Rb1.4
  crRNA array
  misc_feature (148)..(157): n is a, c, g, or t
cttggctttatatatcttgtggaaaggacgaaacaccgtaatttctactaagtgtagatagtgcaaaactgagcgcgggtaatttctactaagtgtagattgtagctcagtaaaagtgaataatttctactaagtgtagatttttttnnnnnnnnnnaagcttggcgtggatccgatatcaactagatcttgagacaaatggcagtattcatccacaattttaaaagaaaaggggggattggggggtacagtgcaggggaaagaatagtagacataatagcaacagacatacaaactaaag

SEQ ID NO: 14810 - DNA, 301 bp, Artificial Sequence
  Arid1b.3_Rb1.1
  crRNA array
  misc_feature (148)..(157): n is a, c, g, or t
cttggctttatatatcttgtggaaaggacgaaacaccgtaatttctactaagtgtagatcactcaaaggcgaacaggtataatttctactaagtgtagattctgacatgatcgggtaccttaatttctactaagtgtagatttttttnnnnnnnnnnaagcttggcgtggatccgatatcaactagatcttgagacaaatggcagtattcatccacaattttaaaagaaaaggggggattggggggtacagtgcaggggaaagaatagtagacataatagcaacagacatacaaactaaag

SEQ ID NO: 14811 - DNA, 301 bp, Artificial Sequence
  Arid1b.3_Rb1.2
  crRNA array
  misc_feature (148)..(157): n is a, c, g, or t
cttggctttatatatcttgtggaaaggacgaaacaccgtaatttctactaagtgtagatcactcaaaggcgaacaggtataatttctactaagtgtagatgtctctgcatgaaaacggagtaatttctactaagtgtagatttttttnnnnnnnnnnaagcttggcgtggatccgatatcaactagatcttgagacaaatggcagtattcatccacaattttaaaagaaaaggggggattggggggtacagtgcaggggaaagaatagtagacataatagcaacagacatacaaactaaag

SEQ ID NO: 14812 - DNA, 301 bp, Artificial Sequence
  Arid1b.3_Rb1.3
  crRNA array
  misc_feature (148)..(157): n is a, c, g, or t
cttggctttatatatcttgtggaaaggacgaaacaccgtaatttctactaagtgtagatcactcaaaggcgaacaggtataatttctactaagtgtagatagccaatctggtctaataactaatttctactaagtgtagatttttttnnnnnnnnnnaagcttggcgtggatccgatatcaactagatcttgagacaaatggcagtattcatccacaattttaaaagaaaaggggggattggggggtacagtgcaggggaaagaatagtagacataatagcaacagacatacaaactaaag

SEQ ID NO: 14813 - DNA, 301 bp, Artificial Sequence
  Arid1b.3_Rb1.4
  crRNA array
  misc_feature (148)..(157): n is a, c, g, or t
cttggctttatatatcttgtggaaaggacgaaacaccgtaatttctactaagtgtagatcactcaaaggcgaacaggtataatttctactaagtgtagattgtagctcagtaaaagtgaataatttctactaagtgtagatttttttnnnnnnnnnnaagcttggcgtggatccgatatcaactagatcttgagacaaatggcagtattcatccacaattttaaaagaaaaggggggattggggggtacagtgcaggggaaagaatagtagacataatagcaacagacatacaaactaaag

SEQ ID NO: 14814 - DNA, 301 bp, Artificial Sequence
  Arid1b.4_Rb1.1
  crRNA array
  misc_feature (148)..(157): n is a, c, g, or t
cttggctttatatatcttgtggaaaggacgaaacaccgtaatttctactaagtgtagatctcctggctccgtagaagcataatttctactaagtgtagattctgacatgatcgggtaccttaatttctactaagtgtagatttttttnnnnnnnnnnaagcttggcgtggatccgatatcaactagatcttgagacaaatggcagtattcatccacaattttaaaagaaaaggggggattggggggtacagtgcaggggaaagaatagtagacataatagcaacagacatacaaactaaag

SEQ ID NO: 14815 - DNA, 301 bp, Artificial Sequence
  Arid1b.4_Rb1.2
  crRNA array
  misc_feature (148)..(157): n is a, c, g, or t
cttggctttatatatcttgtggaaaggacgaaacaccgtaatttctactaagtgtagatctcctggctccgtagaagcataatttctactaagtgtagatgtctctgcatgaaaacggagtaatttctactaagtgtagatttttttnnnnnnnnnnaagcttggcgtggatccgatatcaactagatcttgagacaaatggcagtattcatccacaattttaaaagaaaaggggggattggggggtacagtgcaggggaaagaatagtagacataatagcaacagacatacaaactaaag

SEQ ID NO: 14816 - DNA, 301 bp, Artificial Sequence
  Arid1b.4_Rb1.3
  crRNA array
  misc_feature (148)..(157): n is a, c, g, or t
cttggctttatatatcttgtggaaaggacgaaacaccgtaatttctactaagtgtagatctcctggctccgtagaagcataatttctactaagtgtagatagccaatctggtctaataactaatttctactaagtgtagatttttttnnnnnnnnnnaagcttggcgtggatccgatatcaactagatcttgagacaaatggcagtattcatccacaattttaaaagaaaaggggggattggggggtacagtgcaggggaaagaatagtagacataatagcaacagacatacaaactaaag

SEQ ID NO: 14817 - DNA, 301 bp, Artificial Sequence
  Arid1b.4_Rb1.4
  crRNA array
  misc_feature (148)..(157): n is a, c, g, or t
cttggctttatatatcttgtggaaaggacgaaacaccgtaatttctactaagtgtagatctcctggctccgtagaagcataatttctactaagtgtagattgtagctcagtaaaagtgaataatttctactaagtgtagatttttttnnnnnnnnnnaagcttggcgtggatccgatatcaactagatcttgagacaaatggcagtattcatccacaattttaaaagaaaaggggggattggggggtacagtgcaggggaaagaatagtagacataatagcaacagacatacaaactaaag

SEQ ID NO: 14818 - DNA, 301 bp, Artificial Sequence
  Arid1b.1_Kmt2c.1
  crRNA array
  misc_feature (148)..(157): n is a, c, g, or t
cttggctttatatatcttgtggaaaggacgaaacaccgtaatttctactaagtgtagatgctgctgctgtagtgcgtggtaatttctactaagtgtagatactcgacctccacctccctataatttctactaagtgtagatttttttnnnnnnnnnnaagcttggcgtggatccgatatcaactagatcttgagacaaatggcagtattcatccacaattttaaaagaaaaggggggattggggggtacagtgcaggggaaagaatagtagacataatagcaacagacatacaaactaaag

SEQ ID NO: 14819 - DNA, 301 bp, Artificial Sequence
  Arid1b.1_Kmt2c.2
  crRNA array
  misc_feature (148)..(157): n is a, c, g, or t
cttggctttatatatcttgtggaaaggacgaaacaccgtaatttctactaagtgtagatgctgctgctgtagtgcgtggtaatttctactaagtgtagatcccaaagatcagcgtggacctaatttctactaagtgtagatttttttnnnnnnnnnnaagcttggcgtggatccgatatcaactagatcttgagacaaatggcagtattcatccacaattttaaaagaaaaggggggattggggggtacagtgcaggggaaagaatagtagacataatagcaacagacatacaaactaaag

SEQ ID NO: 14820 - DNA, 301 bp, Artificial Sequence
  Arid1b.1_Kmt2c.3
  crRNA array
  misc_feature (148)..(157): n is a, c, g, or t
cttggctttatatatcttgtggaaaggacgaaacaccgtaatttctactaagtgtagatgctgctgctgtagtgcgtggtaatttctactaagtgtagataaaagatccgaatcgatgcgtaatttctactaagtgtagatttttttnnnnnnnnnnaagcttggcgtggatccgatatcaactagatcttgagacaaatggcagtattcatccacaattttaaaagaaaaggggggattggggggtacagtgcaggggaaagaatagtagacataatagcaacagacatacaaactaaag

SEQ ID NO: 14821 - DNA, 301 bp, Artificial Sequence
  Arid1b.1_Kmt2c.4
  crRNA array
  misc_feature (148)..(157): n is a, c, g, or t
cttggctttatatatcttgtggaaaggacgaaacaccgtaatttctactaagtgtagatgctgctgctgtagtgcgtggtaatttctactaagtgtagatctgaggcacatggaagcgattaatttctactaagtgtagatttttttnnnnnnnnnnaagcttggcgtggatccgatatcaactagatcttgagacaaatggcagtattcatccacaattttaaaagaaaaggggggattggggggtacagtgcaggggaaagaatagtagacataatagcaacagacatacaaactaaag

SEQ ID NO: 14822 - DNA, 301 bp, Artificial Sequence
  Arid1b.2_Kmt2c.1
  crRNA array
  misc_feature (148)..(157): n is a, c, g, or t
cttggctttatatatcttgtggaaaggacgaaacaccgtaatttctactaagtgtagatagtgcaaaactgagcgcgggtaatttctactaagtgtagatactcgacctccacctccctataatttctactaagtgtagatttttttnnnnnnnnnnaagcttggcgtggatccgatatcaactagatcttgagacaaatggcagtattcatccacaattttaaaagaaaaggggggattggggggtacagtgcaggggaaagaatagtagacataatagcaacagacatacaaactaaag

SEQ ID NO: 14823 - DNA, 301 bp, Artificial Sequence
  Arid1b.2_Kmt2c.2
  crRNA array
  misc_feature (148)..(157): n is a, c, g, or t
cttggctttatatatcttgtggaaaggacgaaacaccgtaatttctactaagtgtagatagtgcaaaactgagcgcgggtaatttctactaagtgtagatcccaaagatcagcgtggacctaatttctactaagtgtagatttttttnnnnnnnnnnaagcttggcgtggatccgatatcaactagatcttgagacaaatggcagtattcatccacaattttaaaagaaaaggggggattggggggtacagtgcaggggaaagaatagtagacataatagcaacagacatacaaactaaag

SEQ ID NO: 14824 - DNA, 301 bp, Artificial Sequence
  Arid1b.2_Kmt2c.3
  crRNA array
  misc_feature (148)..(157): n is a, c, g, or t
cttggctttatatatcttgtggaaaggacgaaacaccgtaatttctactaagtgtagatagtgcaaaactgagcgcgggtaatttctactaagtgtagataaaagatccgaatcgatgcgtaatttctactaagtgtagatttttttnnnnnnnnnnaagcttggcgtggatccgatatcaactagatcttgagacaaatggcagtattcatccacaattttaaaagaaaaggggggattggggggtacagtgcaggggaaagaatagtagacataatagcaacagacatacaaactaaag

SEQ ID NO: 14825 - DNA, 301 bp, Artificial Sequence
  Arid1b.2_Kmt2c.4
  crRNA array
  misc_feature (148)..(157): n is a, c, g, or t
cttggctttatatatcttgtggaaaggacgaaacaccgtaatttctactaagtgtagatagtgcaaaactgagcgcgggtaatttctactaagtgtagatctgaggcacatggaagcgattaatttctactaagtgtagatttttttnnnnnnnnnnaagcttggcgtggatccgatatcaactagatcttgagacaaatggcagtattcatccacaattttaaaagaaaaggggggattggggggtacagtgcaggggaaagaatagtagacataatagcaacagacatacaaactaaag

SEQ ID NO: 14826 - DNA, 301 bp, Artificial Sequence
  Arid1b.3_Kmt2c.1
  crRNA array
  misc_feature (148)..(157): n is a, c, g, or t
cttggctttatatatcttgtggaaaggacgaaacaccgtaatttctactaagtgtagatcactcaaaggcgaacaggtataatttctactaagtgtagatactcgacctccacctccctataatttctactaagtgtagatttttttnnnnnnnnnnaagcttggcgtggatccgatatcaactagatcttgagacaaatggcagtattcatccacaattttaaaagaaaaggggggattggggggtacagtgcaggggaaagaatagtagacataatagcaacagacatacaaactaaag

SEQ ID NO: 14827 - DNA, 301 bp, Artificial Sequence
  Arid1b.3_Kmt2c.2
  crRNA array
  misc_feature (148)..(157): n is a, c, g, or t
cttggctttatatatcttgtggaaaggacgaaacaccgtaatttctactaagtgtagatcactcaaaggcgaacaggtataatttctactaagtgtagatcccaaagatcagcgtggacctaatttctactaagtgtagatttttttnnnnnnnnnnaagcttggcgtggatccgatatcaactagatcttgagacaaatggcagtattcatccacaattttaaaagaaaaggggggattggggggtacagtgcaggggaaagaatagtagacataatagcaacagacatacaaactaaag

SEQ ID NO: 14828 - DNA, 301 bp, Artificial Sequence
  Arid1b.3_Kmt2c.3
  crRNA array
  misc_feature (148)..(157): n is a, c, g, or t
cttggctttatatatcttgtggaaaggacgaaacaccgtaatttctactaagtgtagatcactcaaaggcgaacaggtataatttctactaagtgtagataaaagatccgaatcgatgcgtaatttctactaagtgtagatttttttnnnnnnnnnnaagcttggcgtggatccgatatcaactagatcttgagacaaatggcagtattcatccacaattttaaaagaaaaggggggattggggggtacagtgcaggggaaagaatagtagacataatagcaacagacatacaaactaaag

SEQ ID NO: 14829 - DNA, 301 bp, Artificial Sequence
  Arid1b.3_Kmt2c.4
  crRNA array
  misc_feature (148)..(157): n is a, c, g, or t
cttggctttatatatcttgtggaaaggacgaaacaccgtaatttctactaagtgtagatcactcaaaggcgaacaggtataatttctactaagtgtagatctgaggcacatggaagcgattaatttctactaagtgtagatttttttnnnnnnnnnnaagcttggcgtggatccgatatcaactagatcttgagacaaatggcagtattcatccacaattttaaaagaaaaggggggattggggggtacagtgcaggggaaagaatagtagacataatagcaacagacatacaaactaaag

SEQ ID NO: 14830 - DNA, 301 bp, Artificial Sequence
  Arid1b.4_Kmt2c.1
  crRNA array
  misc_feature (148)..(157): n is a, c, g, or t
cttggctttatatatcttgtggaaaggacgaaacaccgtaatttctactaagtgtagatctcctggctccgtagaagcataatttctactaagtgtagatactcgacctccacctccctataatttctactaagtgtagatttttttnnnnnnnnnnaagcttggcgtggatccgatatcaactagatcttgagacaaatggcagtattcatccacaattttaaaagaaaaggggggattggggggtacagtgcaggggaaagaatagtagacataatagcaacagacatacaaactaaag

SEQ ID NO: 14831 - DNA, 301 bp, Artificial Sequence
  Arid1b.4_Kmt2c.2
  crRNA array
  misc_feature (148)..(157): n is a, c, g, or t
cttggctttatatatcttgtggaaaggacgaaacaccgtaatttctactaagtgtagatctcctggctccgtagaagcataatttctactaagtgtagatcccaaagatcagcgtggacctaatttctactaagtgtagatttttttnnnnnnnnnnaagcttggcgtggatccgatatcaactagatcttgagacaaatggcagtattcatccacaattttaaaagaaaaggggggattggggggtacagtgcaggggaaagaatagtagacataatagcaacagacatacaaactaaag

SEQ ID NO: 14832 - DNA, 301 bp, Artificial Sequence
  Arid1b.4_Kmt2c.3
  crRNA array
  misc_feature (148)..(157): n is a, c, g, or t
cttggctttatatatcttgtggaaaggacgaaacaccgtaatttctactaagtgtagatctcctggctccgtagaagcataatttctactaagtgtagataaaagatccgaatcgatgcgtaatttctactaagtgtagatttttttnnnnnnnnnnaagcttggcgtggatccgatatcaactagatcttgagacaaatggcagtattcatccacaattttaaaagaaaaggggggattggggggtacagtgcaggggaaagaatagtagacataatagcaacagacatacaaactaaag

SEQ ID NO: 14833 - DNA, 301 bp, Artificial Sequence
  Arid1b.4_Kmt2c.4
  crRNA array
  misc_feature (148)..(157): n is a, c, g, or t
cttggctttatatatcttgtggaaaggacgaaacaccgtaatttctactaagtgtagatctcctggctccgtagaagcataatttctactaagtgtagatctgaggcacatggaagcgattaatttctactaagtgtagatttttttnnnnnnnnnnaagcttggcgtggatccgatatcaactagatcttgagacaaatggcagtattcatccacaattttaaaagaaaaggggggattggggggtacagtgcaggggaaagaatagtagacataatagcaacagacatacaaactaaag

SEQ ID NO: 14834 - DNA, 301 bp, Artificial Sequence
  Arid1b.1_Pten.1
  crRNA array
  misc_feature (148)..(157): n is a, c, g, or t
cttggctttatatatcttgtggaaaggacgaaacaccgtaatttctactaagtgtagatgctgctgctgtagtgcgtggtaatttctactaagtgtagataagcgtggtgcgtgacgcactaatttctactaagtgtagatttttttnnnnnnnnnnaagcttggcgtggatccgatatcaactagatcttgagacaaatggcagtattcatccacaattttaaaagaaaaggggggattggggggtacagtgcaggggaaagaatagtagacataatagcaacagacatacaaactaaag

SEQ ID NO: 14835 - DNA, 301 bp, Artificial Sequence
  Arid1b.1_Pten.2
  crRNA array
  misc_feature (148)..(157): n is a, c, g, or t
cttggctttatatatcttgtggaaaggacgaaacaccgtaatttctactaagtgtagatgctgctgctgtagtgcgtggtaatttctactaagtgtagattgtcaccagctgaagtggcttaatttctactaagtgtagatttttttnnnnnnnnnnaagcttggcgtggatccgatatcaactagatcttgagacaaatggcagtattcatccacaattttaaaagaaaaggggggattggggggtacagtgcaggggaaagaatagtagacataatagcaacagacatacaaactaaag

SEQ ID NO: 14836 - DNA, 301 bp, Artificial Sequence
  Arid1b.1_Pten.3
  crRNA array
  misc_feature (148)..(157): n is a, c, g, or t
cttggctttatatatcttgtggaaaggacgaaacaccgtaatttctactaagtgtagatgctgctgctgtagtgcgtggtaatttctactaagtgtagatggagtcaagaggctgatttttaatttctactaagtgtagatttttttnnnnnnnnnnaagcttggcgtggatccgatatcaactagatcttgagacaaatggcagtattcatccacaattttaaaagaaaaggggggattggggggtacagtgcaggggaaagaatagtagacataatagcaacagacatacaaactaaag

SEQ ID NO: 14837 - DNA, 301 bp, Artificial Sequence
  Arid1b.1_Pten.4
  crRNA array
  misc_feature (148)..(157): n is a, c, g, or t
cttggctttatatatcttgtggaaaggacgaaacaccgtaatttctactaagtgtagatgctgctgctgtagtgcgtggtaatttctactaagtgtagatctgtaagctaaaccactacataatttctactaagtgtagatttttttnnnnnnnnnnaagcttggcgtggatccgatatcaactagatcttgagacaaatggcagtattcatccacaattttaaaagaaaaggggggattggggggtacagtgcaggggaaagaatagtagacataatagcaacagacatacaaactaaag

SEQ ID NO: 14838 - DNA, 301 bp, Artificial Sequence
  Arid1b.2_Pten.1
  crRNA array
  misc_feature (148)..(157): n is a, c, g, or t
cttggctttatatatcttgtggaaaggacgaaacaccgtaatttctactaagtgtagatagtgcaaaactgagcgcgggtaatttctactaagtgtagataagcgtggtgcgtgacgcactaatttctactaagtgtagatttttttnnnnnnnnnnaagcttggcgtggatccgatatcaactagatcttgagacaaatggcagtattcatccacaattttaaaagaaaaggggggattggggggtacagtgcaggggaaagaatagtagacataatagcaacagacatacaaactaaag

SEQ ID NO: 14839 - DNA, 301 bp, Artificial Sequence
  Arid1b.2_Pten.2
  crRNA array
  misc_feature (148)..(157): n is a, c, g, or t
cttggctttatatatcttgtggaaaggacgaaacaccgtaatttctactaagtgtagatagtgcaaaactgagcgcgggtaatttctactaagtgtagattgtcaccagctgaagtggcttaatttctactaagtgtagatttttttnnnnnnnnnnaagcttggcgtggatccgatatcaactagatcttgagacaaatggcagtattcatccacaattttaaaagaaaaggggggattggggggtacagtgcaggggaaagaatagtagacataatagcaacagacatacaaactaaag

SEQ ID NO: 14840 - DNA, 301 bp, Artificial Sequence
  Arid1b.2_Pten.3
  crRNA array
  misc_feature (148)..(157): n is a, c, g, or t
cttggctttatatatcttgtggaaaggacgaaacaccgtaatttctactaagtgtagatagtgcaaaactgagcgcgggtaatttctactaagtgtagatggagtcaagaggctgatttttaatttctactaagtgtagatttttttnnnnnnnnnnaagcttggcgtggatccgatatcaactagatcttgagacaaatggcagtattcatccacaattttaaaagaaaaggggggattggggggtacagtgcaggggaaagaatagtagacataatagcaacagacatacaaactaaag

SEQ ID NO: 14841 - DNA, 301 bp, Artificial Sequence
  Arid1b.2_Pten.4
  crRNA array
  misc_feature (148)..(157): n is a, c, g, or t
cttggctttatatatcttgtggaaaggacgaaacaccgtaatttctactaagtgtagatagtgcaaaactgagcgcgggtaatttctactaagtgtagatctgtaagctaaaccactacataatttctactaagtgtagatttttttnnnnnnnnnnaagcttggcgtggatccgatatcaactagatcttgagacaaatggcagtattcatccacaattttaaaagaaaaggggggattggggggtacagtgcaggggaaagaatagtagacataatagcaacagacatacaaactaaag

SEQ ID NO: 14842 - DNA, 301 bp, Artificial Sequence
  Arid1b.3_Pten.1
  crRNA array
  misc_feature (148)..(157): n is a, c, g, or t
cttggctttatatatcttgtggaaaggacgaaacaccgtaatttctactaagtgtagatcactcaaaggcgaacaggtataatttctactaagtgtagataagcgtggtgcgtgacgcactaatttctactaagtgtagatttttttnnnnnnnnnnaagcttggcgtggatccgatatcaactagatcttgagacaaatggcagtattcatccacaattttaaaagaaaaggggggattggggggtacagtgcaggggaaagaatagtagacataatagcaacagacatacaaactaaag

SEQ ID NO: 14843 - DNA, 301 bp, Artificial Sequence
  Arid1b.3_Pten.2
  crRNA array
  misc_feature (148)..(157): n is a, c, g, or t
cttggctttatatatcttgtggaaaggacgaaacaccgtaatttctactaagtgtagatcactcaaaggcgaacaggtataatttctactaagtgtagattgtcaccagctgaagtggcttaatttctactaagtgtagatttttttnnnnnnnnnnaagcttggcgtggatccgatatcaactagatcttgagacaaatggcagtattcatccacaattttaaaagaaaaggggggattggggggtacagtgcaggggaaagaatagtagacataatagcaacagacatacaaactaaag

SEQ ID NO: 14844 - DNA, 301 bp, Artificial Sequence
  Arid1b.3_Pten.3
  crRNA array
  misc_feature (148)..(157): n is a, c, g, or t
cttggctttatatatcttgtggaaaggacgaaacaccgtaatttctactaagtgtagatcactcaaaggcgaacaggtataatttctactaagtgtagatggagtcaagaggctgatttttaatttctactaagtgtagatttttttnnnnnnnnnnaagcttggcgtggatccgatatcaactagatcttgagacaaatggcagtattcatccacaattttaaaagaaaaggggggattggggggtacagtgcaggggaaagaatagtagacataatagcaacagacatacaaactaaag

SEQ ID NO: 14845 - DNA, 301 bp, Artificial Sequence
  Arid1b.3_Pten.4
  crRNA array
  misc_feature (148)..(157): n is a, c, g, or t
cttggctttatatatcttgtggaaaggacgaaacaccgtaatttctactaagtgtagatcactcaaaggcgaacaggtataatttctactaagtgtagatctgtaagctaaaccactacataatttctactaagtgtagatttttttnnnnnnnnnnaagcttggcgtggatccgatatcaactagatcttgagacaaatggcagtattcatccacaattttaaaagaaaaggggggattggggggtacagtgcaggggaaagaatagtagacataatagcaacagacatacaaactaaag

SEQ ID NO: 14846 - DNA, 301 bp, Artificial Sequence
  Arid1b.4_Pten.1
  crRNA array
  misc_feature (148)..(157): n is a, c, g, or t
cttggctttatatatcttgtggaaaggacgaaacaccgtaatttctactaagtgtagatctcctggctccgtagaagcataatttctactaagtgtagataagcgtggtgcgtgacgcactaatttctactaagtgtagatttttttnnnnnnnnnnaagcttggcgtggatccgatatcaactagatcttgagacaaatggcagtattcatccacaattttaaaagaaaaggggggattggggggtacagtgcaggggaaagaatagtagacataatagcaacagacatacaaactaaag

SEQ ID NO: 14847 - DNA, 301 bp, Artificial Sequence
  Arid1b.4_Pten.2
  crRNA array
  misc_feature (148)..(157): n is a, c, g, or t
cttggctttatatatcttgtggaaaggacgaaacaccgtaatttctactaagtgtagatctcctggctccgtagaagcataatttctactaagtgtagattgtcaccagctgaagtggcttaatttctactaagtgtagatttttttnnnnnnnnnnaagcttggcgtggatccgatatcaactagatcttgagacaaatggcagtattcatccacaattttaaaagaaaaggggggattggggggtacagtgcaggggaaagaatagtagacataatagcaacagacatacaaactaaag

SEQ ID NO: 14848 - DNA, 301 bp, Artificial Sequence
  Arid1b.4_Pten.3
  crRNA array
  misc_feature (148)..(157): n is a, c, g, or t
cttggctttatatatcttgtggaaaggacgaaacaccgtaatttctactaagtgtagatctcctggctccgtagaagcataatttctactaagtgtagatggagtcaagaggctgatttttaatttctactaagtgtagatttttttnnnnnnnnnnaagcttggcgtggatccgatatcaactagatcttgagacaaatggcagtattcatccacaattttaaaagaaaaggggggattggggggtacagtgcaggggaaagaatagtagacataatagcaacagacatacaaactaaag

SEQ ID NO: 14849 - DNA, 301 bp, Artificial Sequence
  Arid1b.4_Pten.4
  crRNA array
  misc_feature (148)..(157): n is a, c, g, or t
cttggctttatatatcttgtggaaaggacgaaacaccgtaatttctactaagtgtagatctcctggctccgtagaagcataatttctactaagtgtagatctgtaagctaaaccactacataatttctactaagtgtagatttttttnnnnnnnnnnaagcttggcgtggatccgatatcaactagatcttgagacaaatggcagtattcatccacaattttaaaagaaaaggggggattggggggtacagtgcaggggaaagaatagtagacataatagcaacagacatacaaactaaag

SEQ ID NO: 14850 - DNA, 301 bp, Artificial Sequence
  Arid1b.1_Atm.1
  crRNA array
  misc_feature (148)..(157): n is a, c, g, or t
cttggctttatatatcttgtggaaaggacgaaacaccgtaatttctactaagtgtagatgctgctgctgtagtgcgtggtaatttctactaagtgtagatgagaaagtctccgaatcgtttaatttctactaagtgtagatttttttnnnnnnnnnnaagcttggcgtggatccgatatcaactagatcttgagacaaatggcagtattcatccacaattttaaaagaaaaggggggattggggggtacagtgcaggggaaagaatagtagacataatagcaacagacatacaaactaaag

SEQ ID NO: 14851 - DNA, 301 bp, Artificial Sequence
  Arid1b.1_Atm.2
  crRNA array
  misc_feature (148)..(157): n is a, c, g, or t
cttggctttatatatcttgtggaaaggacgaaacaccgtaatttctactaagtgtagatgctgctgctgtagtgcgtggtaatttctactaagtgtagatcctacgagggcacgagagactaatttctactaagtgtagatttttttnnnnnnnnnnaagcttggcgtggatccgatatcaactagatcttgagacaaatggcagtattcatccacaattttaaaagaaaaggggggattggggggtacagtgcaggggaaagaatagtagacataatagcaacagacatacaaactaaag

SEQ ID NO: 14852 - DNA, 301 bp, Artificial Sequence
  Arid1b.1_Atm.3
  crRNA array
  misc_feature (148)..(157): n is a, c, g, or t
cttggctttatatatcttgtggaaaggacgaaacaccgtaatttctactaagtgtagatgctgctgctgtagtgcgtggtaatttctactaagtgtagattgaaagtctccgatatgccataatttctactaagtgtagatttttttnnnnnnnnnnaagcttggcgtggatccgatatcaactagatcttgagacaaatggcagtattcatccacaattttaaaagaaaaggggggattggggggtacagtgcaggggaaagaatagtagacataatagcaacagacatacaaactaaag

SEQ ID NO: 14853 - DNA, 301 bp, Artificial Sequence
  Arid1b.1_Atm.4
  crRNA array
  misc_feature (148)..(157): n is a, c, g, or t
cttggctttatatatcttgtggaaaggacgaaacaccgtaatttctactaagtgtagatgctgctgctgtagtgcgtggtaatttctactaagtgtagatggtggtgatcagtcaagtagtaatttctactaagtgtagatttttttnnnnnnnnnnaagcttggcgtggatccgatatcaactagatcttgagacaaatggcagtattcatccacaattttaaaagaaaaggggggattggggggtacagtgcaggggaaagaatagtagacataatagcaacagacatacaaactaaag

SEQ ID NO: 14854 - DNA, 301 bp, Artificial Sequence
  Arid1b.2_Atm.1
  crRNA array
  misc_feature (148)..(157): n is a, c, g, or t
cttggctttatatatcttgtggaaaggacgaaacaccgtaatttctactaagtgtagatagtgcaaaactgagcgcgggtaatttctactaagtgtagatgagaaagtctccgaatcgtttaatttctactaagtgtagatttttttnnnnnnnnnnaagcttggcgtggatccgatatcaactagatcttgagacaaatggcagtattcatccacaattttaaaagaaaaggggggattggggggtacagtgcaggggaaagaatagtagacataatagcaacagacatacaaactaaag

SEQ ID NO: 14855 - DNA, 301 bp, Artificial Sequence
  Arid1b.2_Atm.2
  crRNA array
  misc_feature (148)..(157): n is a, c, g, or t
cttggctttatatatcttgtggaaaggacgaaacaccgtaatttctactaagtgtagatagtgcaaaactgagcgcgggtaatttctactaagtgtagatcctacgagggcacgagagactaatttctactaagtgtagatttttttnnnnnnnnnnaagcttggcgtggatccgatatcaactagatcttgagacaaatggcagtattcatccacaattttaaaagaaaaggggggattggggggtacagtgcaggggaaagaatagtagacataatagcaacagacatacaaactaaag

SEQ ID NO: 14856 - DNA, 301 bp, Artificial Sequence
  Arid1b.2_Atm.3
  crRNA array
  misc_feature (148)..(157): n is a, c, g, or t
cttggctttatatatcttgtggaaaggacgaaacaccgtaatttctactaagtgtagatagtgcaaaactgagcgcgggtaatttctactaagtgtagattgaaagtctccgatatgccataatttctactaagtgtagatttttttnnnnnnnnnnaagcttggcgtggatccgatatcaactagatcttgagacaaatggcagtattcatccacaattttaaaagaaaaggggggattggggggtacagtgcaggggaaagaatagtagacataatagcaacagacatacaaactaaag

SEQ ID NO: 14857 - DNA, 301 bp, Artificial Sequence
  Arid1b.2_Atm.4
  crRNA array
  misc_feature (148)..(157): n is a, c, g, or t
cttggctttatatatcttgtggaaaggacgaaacaccgtaatttctactaagtgtagatagtgcaaaactgagcgcgggtaatttctactaagtgtagatggtggtgatcagtcaagtagtaatttctactaagtgtagatttttttnnnnnnnnnnaagcttggcgtggatccgatatcaactagatcttgagacaaatggcagtattcatccacaattttaaaagaaaaggggggattggggggtacagtgcaggggaaagaatagtagacataatagcaacagacatacaaactaaag

SEQ ID NO: 14858 - DNA, 301 bp, Artificial Sequence
  Arid1b.3_Atm.1
  crRNA array
  misc_feature (148)..(157): n is a, c, g, or t
cttggctttatatatcttgtggaaaggacgaaacaccgtaatttctactaagtgtagatcactcaaaggcgaacaggtataatttctactaagtgtagatgagaaagtctccgaatcgtttaatttctactaagtgtagatttttttnnnnnnnnnnaagcttggcgtggatccgatatcaactagatcttgagacaaatggcagtattcatccacaattttaaaagaaaaggggggattggggggtacagtgcaggggaaagaatagtagacataatagcaacagacatacaaactaaag

SEQ ID NO: 14859 - DNA, 301 bp, Artificial Sequence
  Arid1b.3_Atm.2
  crRNA array
  misc_feature (148)..(157): n is a, c, g, or t
cttggctttatatatcttgtggaaaggacgaaacaccgtaatttctactaagtgtagatcactcaaaggcgaacaggtataatttctactaagtgtagatcctacgagggcacgagagactaatttctactaagtgtagatttttttnnnnnnnnnnaagcttggcgtggatccgatatcaactagatcttgagacaaatggcagtattcatccacaattttaaaagaaaaggggggattggggggtacagtgcaggggaaagaatagtagacataatagcaacagacatacaaactaaag

SEQ ID NO: 14860 - DNA, 301 bp, Artificial Sequence
  Arid1b.3_Atm.3
  crRNA array
  misc_feature (148)..(157): n is a, c, g, or t
cttggctttatatatcttgtggaaaggacgaaacaccgtaatttctactaagtgtagatcactcaaaggcgaacaggtataatttctactaagtgtagattgaaagtctccgatatgccataatttctactaagtgtagatttttttnnnnnnnnnnaagcttggcgtggatccgatatcaactagatcttgagacaaatggcagtattcatccacaattttaaaagaaaaggggggattggggggtacagtgcaggggaaagaatagtagacataatagcaacagacatacaaactaaag

SEQ ID NO: 14861 - DNA, 301 bp, Artificial Sequence
  Arid1b.3_Atm.4
  crRNA array
  misc_feature (148)..(157): n is a, c, g, or t
cttggctttatatatcttgtggaaaggacgaaacaccgtaatttctactaagtgtagatcactcaaaggcgaacaggtataatttctactaagtgtagatggtggtgatcagtcaagtagtaatttctactaagtgtagatttttttnnnnnnnnnnaagcttggcgtggatccgatatcaactagatcttgagacaaatggcagtattcatccacaattttaaaagaaaaggggggattggggggtacagtgcaggggaaagaatagtagacataatagcaacagacatacaaactaaag

SEQ ID NO: 14862 - DNA, 301 bp, Artificial Sequence
  Arid1b.4_Atm.1
  crRNA array
  misc_feature (148)..(157): n is a, c, g, or t
cttggctttatatatcttgtggaaaggacgaaacaccgtaatttctactaagtgtagatctcctggctccgtagaagcataatttctactaagtgtagatgagaaagtctccgaatcgtttaatttctactaagtgtagatttttttnnnnnnnnnnaagcttggcgtggatccgatatcaactagatcttgagacaaatggcagtattcatccacaattttaaaagaaaaggggggattggggggtacagtgcaggggaaagaatagtagacataatagcaacagacatacaaactaaag

SEQ ID NO: 14863 - DNA, 301 bp, Artificial Sequence
  Arid1b.4_Atm.2
  crRNA array
  misc_feature (148)..(157): n is a, c, g, or t
cttggctttatatatcttgtggaaaggacgaaacaccgtaatttctactaagtgtagatctcctggctccgtagaagcataatttctactaagtgtagatcctacgagggcacgagagactaatttctactaagtgtagatttttttnnnnnnnnnnaagcttggcgtggatccgatatcaactagatcttgagacaaatggcagtattcatccacaattttaaaagaaaaggggggattggggggtacagtgcaggggaaagaatagtagacataatagcaacagacatacaaactaaag

SEQ ID NO: 14864 - DNA, 301 bp, Artificial Sequence
  Arid1b.4_Atm.3
  crRNA array
  misc_feature (148)..(157): n is a, c, g, or t
cttggctttatatatcttgtggaaaggacgaaacaccgtaatttctactaagtgtagatctcctggctccgtagaagcataatttctactaagtgtagattgaaagtctccgatatgccataatttctactaagtgtagatttttttnnnnnnnnnnaagcttggcgtggatccgatatcaactagatcttgagacaaatggcagtattcatccacaattttaaaagaaaaggggggattggggggtacagtgcaggggaaagaatagtagacataatagcaacagacatacaaactaaag

SEQ ID NO: 14865 - DNA, 301 bp, Artificial Sequence
  Arid1b.4_Atm.4
  crRNA array
  misc_feature (148)..(157): n is a, c, g, or t
cttggctttatatatcttgtggaaaggacgaaacaccgtaatttctactaagtgtagatctcctggctccgtagaagcataatttctactaagtgtagatggtggtgatcagtcaagtagtaatttctactaagtgtagatttttttnnnnnnnnnnaagcttggcgtggatccgatatcaactagatcttgagacaaatggcagtattcatccacaattttaaaagaaaaggggggattggggggtacagtgcaggggaaagaatagtagacataatagcaacagacatacaaactaaag

SEQ ID NO: 14866 - DNA, 301 bp, Artificial Sequence
  Rb1.1_Kmt2c.1
  crRNA array
  misc_feature (148)..(157): n is a, c, g, or t
cttggctttatatatcttgtggaaaggacgaaacaccgtaatttctactaagtgtagattctgacatgatcgggtaccttaatttctactaagtgtagatactcgacctccacctccctataatttctactaagtgtagatttttttnnnnnnnnnnaagcttggcgtggatccgatatcaactagatcttgagacaaatggcagtattcatccacaattttaaaagaaaaggggggattggggggtacagtgcaggggaaagaatagtagacataatagcaacagacatacaaactaaag

SEQ ID NO: 14867 - DNA, 301 bp, Artificial Sequence
  Rb1.1_Kmt2c.2
  crRNA array
  misc_feature (148)..(157): n is a, c, g, or t
cttggctttatatatcttgtggaaaggacgaaacaccgtaatttctactaagtgtagattctgacatgatcgggtaccttaatttctactaagtgtagatcccaaagatcagcgtggacctaatttctactaagtgtagatttttttnnnnnnnnnnaagcttggcgtggatccgatatcaactagatcttgagacaaatggcagtattcatccacaattttaaaagaaaaggggggattggggggtacagtgcaggggaaagaatagtagacataatagcaacagacatacaaactaaag

SEQ ID NO: 14868 - DNA, 301 bp, Artificial Sequence
  Rb1.1_Kmt2c.3
  crRNA array
  misc_feature (148)..(157): n is a, c, g, or t
cttggctttatatatcttgtggaaaggacgaaacaccgtaatttctactaagtgtagattctgacatgatcgggtaccttaatttctactaagtgtagataaaagatccgaatcgatgcgtaatttctactaagtgtagatttttttnnnnnnnnnnaagcttggcgtggatccgatatcaactagatcttgagacaaatggcagtattcatccacaattttaaaagaaaaggggggattggggggtacagtgcaggggaaagaatagtagacataatagcaacagacatacaaactaaag

SEQ ID NO: 14869 - DNA, 301 bp, Artificial Sequence
  Rb1.1_Kmt2c.4
  crRNA array
  misc_feature (148)..(157): n is a, c, g, or t
cttggctttatatatcttgtggaaaggacgaaacaccgtaatttctactaagtgtagattctgacatgatcgggtaccttaatttctactaagtgtagatctgaggcacatggaagcgattaatttctactaagtgtagatttttttnnnnnnnnnnaagcttggcgtggatccgatatcaactagatcttgagacaaatggcagtattcatccacaattttaaaagaaaaggggggattggggggtacagtgcaggggaaagaatagtagacataatagcaacagacatacaaactaaag

SEQ ID NO: 14870 - DNA, 301 bp, Artificial Sequence
  Rb1.2_Kmt2c.1
  crRNA array
  misc_feature (148)..(157): n is a, c, g, or t
cttggctttatatatcttgtggaaaggacgaaacaccgtaatttctactaagtgtagatgtctctgcatgaaaacggagtaatttctactaagtgtagatactcgacctccacctccctataatttctactaagtgtagatttttttnnnnnnnnnnaagcttggcgtggatccgatatcaactagatcttgagacaaatggcagtattcatccacaattttaaaagaaaaggggggattggggggtacagtgcaggggaaagaatagtagacataatagcaacagacatacaaactaaag

SEQ ID NO: 14871 - DNA, 301 bp, Artificial Sequence
  Rb1.2_Kmt2c.2
  crRNA array
  misc_feature (148)..(157): n is a, c, g, or t
cttggctttatatatcttgtggaaaggacgaaacaccgtaatttctactaagtgtagatgtctctgcatgaaaacggagtaatttctactaagtgtagatcccaaagatcagcgtggacctaatttctactaagtgtagatttttttnnnnnnnnnnaagcttggcgtggatccgatatcaactagatcttgagacaaatggcagtattcatccacaattttaaaagaaaaggggggattggggggtacagtgcaggggaaagaatagtagacataatagcaacagacatacaaactaaag

SEQ ID NO: 14872 - DNA, 301 bp, Artificial Sequence
  Rb1.2_Kmt2c.3
  crRNA array
  misc_feature (148)..(157): n is a, c, g, or t
cttggctttatatatcttgtggaaaggacgaaacaccgtaatttctactaagtgtagatgtctctgcatgaaaacggagtaatttctactaagtgtagataaaagatccgaatcgatgcgtaatttctactaagtgtagatttttttnnnnnnnnnnaagcttggcgtggatccgatatcaactagatcttgagacaaatggcagtattcatccacaattttaaaagaaaaggggggattggggggtacagtgcaggggaaagaatagtagacataatagcaacagacatacaaactaaag

SEQ ID NO: 14873 - DNA, 301 bp, Artificial Sequence
  Rb1.2_Kmt2c.4
  crRNA array
  misc_feature (148)..(157): n is a, c, g, or t
cttggctttatatatcttgtggaaaggacgaaacaccgtaatttctactaagtgtagatgtctctgcatgaaaacggagtaatttctactaagtgtagatctgaggcacatggaagcgattaatttctactaagtgtagatttttttnnnnnnnnnnaagcttggcgtggatccgatatcaactagatcttgagacaaatggcagtattcatccacaattttaaaagaaaaggggggattggggggtacagtgcaggggaaagaatagtagacataatagcaacagacatacaaactaaag

SEQ ID NO: 14874 - DNA, 301 bp, Artificial Sequence
  Rb1.3_Kmt2c.1
  crRNA array
  misc_feature (148)..(157): n is a, c, g, or t
cttggctttatatatcttgtggaaaggacgaaacaccgtaatttctactaagtgtagatagccaatctggtctaataactaatttctactaagtgtagatactcgacctccacctccctataatttctactaagtgtagatttttttnnnnnnnnnnaagcttggcgtggatccgatatcaactagatcttgagacaaatggcagtattcatccacaattttaaaagaaaaggggggattggggggtacagtgcaggggaaagaatagtagacataatagcaacagacatacaaactaaag

SEQ ID NO: 14875 - DNA, 301 bp, Artificial Sequence
  Rb1.3_Kmt2c.2
  crRNA array
  misc_feature (148)..(157): n is a, c, g, or t
cttggctttatatatcttgtggaaaggacgaaacaccgtaatttctactaagtgtagatagccaatctggtctaataactaatttctactaagtgtagatcccaaagatcagcgtggacctaatttctactaagtgtagatttttttnnnnnnnnnnaagcttggcgtggatccgatatcaactagatcttgagacaaatggcagtattcatccacaattttaaaagaaaaggggggattggggggtacagtgcaggggaaagaatagtagacataatagcaacagacatacaaactaaag

SEQ ID NO: 14876 - DNA, 301 bp, Artificial Sequence
  Rb1.3_Kmt2c.3
  crRNA array
  misc_feature (148)..(157): n is a, c, g, or t
cttggctttatatatcttgtggaaaggacgaaacaccgtaatttctactaagtgtagatagccaatctggtctaataactaatttctactaagtgtagataaaagatccgaatcgatgcgtaatttctactaagtgtagatttttttnnnnnnnnnnaagcttggcgtggatccgatatcaactagatcttgagacaaatggcagtattcatccacaattttaaaagaaaaggggggattggggggtacagtgcaggggaaagaatagtagacataatagcaacagacatacaaactaaag

SEQ ID NO: 14877 - DNA, 301 bp, Artificial Sequence
  Rb1.3_Kmt2c.4
  crRNA array
  misc_feature (148)..(157): n is a, c, g, or t
cttggctttatatatcttgtggaaaggacgaaacaccgtaatttctactaagtgtagatagccaatctggtctaataactaatttctactaagtgtagatctgaggcacatggaagcgattaatttctactaagtgtagatttttttnnnnnnnnnnaagcttggcgtggatccgatatcaactagatcttgagacaaatggcagtattcatccacaattttaaaagaaaaggggggattggggggtacagtgcaggggaaagaatagtagacataatagcaacagacatacaaactaaag

SEQ ID NO: 14878 - DNA, 301 bp, Artificial Sequence
  Rb1.4_Kmt2c.1
  crRNA array
  misc_feature (148)..(157): n is a, c, g, or t
cttggctttatatatcttgtggaaaggacgaaacaccgtaatttctactaagtgtagattgtagctcagtaaaagtgaataatttctactaagtgtagatactcgacctccacctccctataatttctactaagtgtagatttttttnnnnnnnnnnaagcttggcgtggatccgatatcaactagatcttgagacaaatggcagtattcatccacaattttaaaagaaaaggggggattggggggtacagtgcaggggaaagaatagtagacataatagcaacagacatacaaactaaag

SEQ ID NO: 14879 - DNA, 301 bp, Artificial Sequence
  Rb1.4_Kmt2c.2
  crRNA array
  misc_feature (148)..(157): n is a, c, g, or t
cttggctttatatatcttgtggaaaggacgaaacaccgtaatttctactaagtgtagattgtagctcagtaaaagtgaataatttctactaagtgtagatcccaaagatcagcgtggacctaatttctactaagtgtagatttttttnnnnnnnnnnaagcttggcgtggatccgatatcaactagatcttgagacaaatggcagtattcatccacaattttaaaagaaaaggggggattggggggtacagtgcaggggaaagaatagtagacataatagcaacagacatacaaactaaag

SEQ ID NO: 14880 - DNA, 301 bp, Artificial Sequence
  Rb1.4_Kmt2c.3
  crRNA array
  misc_feature (148)..(157): n is a, c, g, or t
cttggctttatatatcttgtggaaaggacgaaacaccgtaatttctactaagtgtagattgtagctcagtaaaagtgaataatttctactaagtgtagataaaagatccgaatcgatgcgtaatttctactaagtgtagatttttttnnnnnnnnnnaagcttggcgtggatccgatatcaactagatcttgagacaaatggcagtattcatccacaattttaaaagaaaaggggggattggggggtacagtgcaggggaaagaatagtagacataatagcaacagacatacaaactaaag

SEQ ID NO: 14881 - DNA, 301 bp, Artificial Sequence
  Rb1.4_Kmt2c.4
  crRNA array
  misc_feature (148)..(157): n is a, c, g, or t
cttggctttatatatcttgtggaaaggacgaaacaccgtaatttctactaagtgtagattgtagctcagtaaaagtgaataatttctactaagtgtagatctgaggcacatggaagcgattaatttctactaagtgtagatttttttnnnnnnnnnnaagcttggcgtggatccgatatcaactagatcttgagacaaatggcagtattcatccacaattttaaaagaaaaggggggattggggggtacagtgcaggggaaagaatagtagacataatagcaacagacatacaaactaaag

SEQ ID NO: 14882 - DNA, 301 bp, Artificial Sequence
  Rb1.1_Pten.1
  crRNA array
  misc_feature (148)..(157): n is a, c, g, or t
cttggctttatatatcttgtggaaaggacgaaacaccgtaatttctactaagtgtagattctgacatgatcgggtaccttaatttctactaagtgtagataagcgtggtgcgtgacgcactaatttctactaagtgtagatttttttnnnnnnnnnnaagcttggcgtggatccgatatcaactagatcttgagacaaatggcagtattcatccacaattttaaaagaaaaggggggattggggggtacagtgcaggggaaagaatagtagacataatagcaacagacatacaaactaaag

SEQ ID NO: 14883 - DNA, 301 bp, Artificial Sequence
  Rb1.1_Pten.2
  crRNA array
  misc_feature (148)..(157): n is a, c, g, or t
cttggctttatatatcttgtggaaaggacgaaacaccgtaatttctactaagtgtagattctgacatgatcgggtaccttaatttctactaagtgtagattgtcaccagctgaagtggcttaatttctactaagtgtagatttttttnnnnnnnnnnaagcttggcgtggatccgatatcaactagatcttgagacaaatggcagtattcatccacaattttaaaagaaaaggggggattggggggtacagtgcaggggaaagaatagtagacataatagcaacagacatacaaactaaag

SEQ ID NO: 14884 - DNA, 301 bp, Artificial Sequence
  Rb1.1_Pten.3
  crRNA array
  misc_feature (148)..(157): n is a, c, g, or t
cttggctttatatatcttgtggaaaggacgaaacaccgtaatttctactaagtgtagattctgacatgatcgggtaccttaatttctactaagtgtagatggagtcaagaggctgatttttaatttctactaagtgtagatttttttnnnnnnnnnnaagcttggcgtggatccgatatcaactagatcttgagacaaatggcagtattcatccacaattttaaaagaaaaggggggattggggggtacagtgcaggggaaagaatagtagacataatagcaacagacatacaaactaaag

SEQ ID NO: 14885 - DNA, 301 bp, Artificial Sequence
  Rb1.1_Pten.4
  crRNA array
  misc_feature (148)..(157): n is a, c, g, or t
cttggctttatatatcttgtggaaaggacgaaacaccgtaatttctactaagtgtagattctgacatgatcgggtaccttaatttctactaagtgtagatctgtaagctaaaccactacataatttctactaagtgtagatttttttnnnnnnnnnnaagcttggcgtggatccgatatcaactagatcttgagacaaatggcagtattcatccacaattttaaaagaaaaggggggattggggggtacagtgcaggggaaagaatagtagacataatagcaacagacatacaaactaaag

SEQ ID NO: 14886 - DNA, 301 bp, Artificial Sequence
  Rb1.2_Pten.1
  crRNA array
  misc_feature (148)..(157): n is a, c, g, or t
cttggctttatatatcttgtggaaaggacgaaacaccgtaatttctactaagtgtagatgtctctgcatgaaaacggagtaatttctactaagtgtagataagcgtggtgcgtgacgcactaatttctactaagtgtagatttttttnnnnnnnnnnaagcttggcgtggatccgatatcaactagatcttgagacaaatggcagtattcatccacaattttaaaagaaaaggggggattggggggtacagtgcaggggaaagaatagtagacataatagcaacagacatacaaactaaag

SEQ ID NO: 14887 - DNA, 301 bp, Artificial Sequence
  Rb1.2_Pten.2
  crRNA array
  misc_feature (148)..(157): n is a, c, g, or t
cttggctttatatatcttgtggaaaggacgaaacaccgtaatttctactaagtgtagatgtctctgcatgaaaacggagtaatttctactaagtgtagattgtcaccagctgaagtggcttaatttctactaagtgtagatttttttnnnnnnnnnnaagcttggcgtggatccgatatcaactagatcttgagacaaatggcagtattcatccacaattttaaaagaaaaggggggattggggggtacagtgcaggggaaagaatagtagacataatagcaacagacatacaaactaaag

SEQ ID NO: 14888 - DNA, 301 bp, Artificial Sequence
  Rb1.2_Pten.3
  crRNA array
  misc_feature (148)..(157): n is a, c, g, or t
cttggctttatatatcttgtggaaaggacgaaacaccgtaatttctactaagtgtagatgtctctgcatgaaaacggagtaatttctactaagtgtagatggagtcaagaggctgatttttaatttctactaagtgtagatttttttnnnnnnnnnnaagcttggcgtggatccgatatcaactagatcttgagacaaatggcagtattcatccacaattttaaaagaaaaggggggattggggggtacagtgcaggggaaagaatagtagacataatagcaacagacatacaaactaaag

SEQ ID NO: 14889 - DNA, 301 bp, Artificial Sequence
  Rb1.2_Pten.4
  crRNA array
  misc_feature (148)..(157): n is a, c, g, or t
cttggctttatatatcttgtggaaaggacgaaacaccgtaatttctactaagtgtagatgtctctgcatgaaaacggagtaatttctactaagtgtagatctgtaagctaaaccactacataatttctactaagtgtagatttttttnnnnnnnnnnaagcttggcgtggatccgatatcaactagatcttgagacaaatggcagtattcatccacaattttaaaagaaaaggggggattggggggtacagtgcaggggaaagaatagtagacataatagcaacagacatacaaactaaag

SEQ ID NO: 14890 - DNA, 301 bp, Artificial Sequence
  Rb1.3_Pten.1
  crRNA array
  misc_feature (148)..(157): n is a, c, g, or t
cttggctttatatatcttgtggaaaggacgaaacaccgtaatttctactaagtgtagatagccaatctggtctaataactaatttctactaagtgtagataagcgtggtgcgtgacgcactaatttctactaagtgtagatttttttnnnnnnnnnnaagcttggcgtggatccgatatcaactagatcttgagacaaatggcagtattcatccacaattttaaaagaaaaggggggattggggggtacagtgcaggggaaagaatagtagacataatagcaacagacatacaaactaaag

SEQ ID NO: 14891 - DNA, 301 bp, Artificial Sequence
  Rb1.3_Pten.2
  crRNA array
  misc_feature (148)..(157): n is a, c, g, or t
cttggctttatatatcttgtggaaaggacgaaacaccgtaatttctactaagtgtagatagccaatctggtctaataactaatttctactaagtgtagattgtcaccagctgaagtggcttaatttctactaagtgtagatttttttnnnnnnnnnnaagcttggcgtggatccgatatcaactagatcttgagacaaatggcagtattcatccacaattttaaaagaaaaggggggattggggggtacagtgcaggggaaagaatagtagacataatagcaacagacatacaaactaaag

SEQ ID NO: 14892 - DNA, 301 bp, Artificial Sequence
  Rb1.3_Pten.3
  crRNA array
  misc_feature (148)..(157): n is a, c, g, or t
cttggctttatatatcttgtggaaaggacgaaacaccgtaatttctactaagtgtagatagccaatctggtctaataactaatttctactaagtgtagatggagtcaagaggctgatttttaatttctactaagtgtagatttttttnnnnnnnnnnaagcttggcgtggatccgatatcaactagatcttgagacaaatggcagtattcatccacaattttaaaagaaaaggggggattggggggtacagtgcaggggaaagaatagtagacataatagcaacagacatacaaactaaag

SEQ ID NO: 14893 - DNA, 301 bp, Artificial Sequence
  Rb1.3_Pten.4
  crRNA array
  misc_feature (148)..(157): n is a, c, g, or t
cttggctttatatatcttgtggaaaggacgaaacaccgtaatttctactaagtgtagatagccaatctggtctaataactaatttctactaagtgtagatctgtaagctaaaccactacataatttctactaagtgtagatttttttnnnnnnnnnnaagcttggcgtggatccgatatcaactagatcttgagacaaatggcagtattcatccacaattttaaaagaaaaggggggattggggggtacagtgcaggggaaagaatagtagacataatagcaacagacatacaaactaaag

SEQ ID NO: 14894 - DNA, 301 bp, Artificial Sequence
  Rb1.4_Pten.1
  crRNA array
  misc_feature (148)..(157): n is a, c, g, or t
cttggctttatatatcttgtggaaaggacgaaacaccgtaatttctactaagtgtagattgtagctcagtaaaagtgaataatttctactaagtgtagataagcgtggtgcgtgacgcactaatttctactaagtgtagatttttttnnnnnnnnnnaagcttggcgtggatccgatatcaactagatcttgagacaaatggcagtattcatccacaattttaaaagaaaaggggggattggggggtacagtgcaggggaaagaatagtagacataatagcaacagacatacaaactaaag

SEQ ID NO: 14895 - DNA, 301 bp, Artificial Sequence
  Rb1.4_Pten.2
  crRNA array
  misc_feature (148)..(157): n is a, c, g, or t
cttggctttatatatcttgtggaaaggacgaaacaccgtaatttctactaagtgtagattgtagctcagtaaaagtgaataatttctactaagtgtagattgtcaccagctgaagtggcttaatttctactaagtgtagatttttttnnnnnnnnnnaagcttggcgtggatccgatatcaactagatcttgagacaaatggcagtattcatccacaattttaaaagaaaaggggggattggggggtacagtgcaggggaaagaatagtagacataatagcaacagacatacaaactaaag

SEQ ID NO: 14896 - DNA, 301 bp, Artificial Sequence
  Rb1.4_Pten.3
  crRNA array
  misc_feature (148)..(157): n is a, c, g, or t
cttggctttatatatcttgtggaaaggacgaaacaccgtaatttctactaagtgtagattgtagctcagtaaaagtgaataatttctactaagtgtagatggagtcaagaggctgatttttaatttctactaagtgtagatttttttnnnnnnnnnnaagcttggcgtggatccgatatcaactagatcttgagacaaatggcagtattcatccacaattttaaaagaaaaggggggattggggggtacagtgcaggggaaagaatagtagacataatagcaacagacatacaaactaaag

SEQ ID NO: 14897 - DNA, 301 bp, Artificial Sequence
  Rb1.4_Pten.4
  crRNA array
  misc_feature (148)..(157): n is a, c, g, or t
cttggctttatatatcttgtggaaaggacgaaacaccgtaatttctactaagtgtagattgtagctcagtaaaagtgaataatttctactaagtgtagatctgtaagctaaaccactacataatttctactaagtgtagatttttttnnnnnnnnnnaagcttggcgtggatccgatatcaactagatcttgagacaaatggcagtattcatccacaattttaaaagaaaaggggggattggggggtacagtgcaggggaaagaatagtagacataatagcaacagacatacaaactaaag

SEQ ID NO: 14898 - DNA, 301 bp, Artificial Sequence
  Rb1.1_Atm.1
  crRNA array
  misc_feature (148)..(157): n is a, c, g, or t
cttggctttatatatcttgtggaaaggacgaaacaccgtaatttctactaagtgtagattctgacatgatcgggtaccttaatttctactaagtgtagatgagaaagtctccgaatcgtttaatttctactaagtgtagatttttttnnnnnnnnnnaagcttggcgtggatccgatatcaactagatcttgagacaaatggcagtattcatccacaattttaaaagaaaaggggggattggggggtacagtgcaggggaaagaatagtagacataatagcaacagacatacaaactaaag

SEQ ID NO: 14899 - DNA, 301 bp, Artificial Sequence
  Rb1.1_Atm.2
  crRNA array
  misc_feature (148)..(157): n is a, c, g, or t
cttggctttatatatcttgtggaaaggacgaaacaccgtaatttctactaagtgtagattctgacatgatcgggtaccttaatttctactaagtgtagatcctacgagggcacgagagactaatttctactaagtgtagatttttttnnnnnnnnnnaagcttggcgtggatccgatatcaactagatcttgagacaaatggcagtattcatccacaattttaaaagaaaaggggggattggggggtacagtgcaggggaaagaatagtagacataatagcaacagacatacaaactaaag

SEQ ID NO: 14900 - DNA, 301 bp, Artificial Sequence
  Rb1.1_Atm.3
  crRNA array
  misc_feature (148)..(157): n is a, c, g, or t
cttggctttatatatcttgtggaaaggacgaaacaccgtaatttctactaagtgtagattctgacatgatcgggtaccttaatttctactaagtgtagattgaaagtctccgatatgccataatttctactaagtgtagatttttttnnnnnnnnnnaagcttggcgtggatccgatatcaactagatcttgagacaaatggcagtattcatccacaattttaaaagaaaaggggggattggggggtacagtgcaggggaaagaatagtagacataatagcaacagacatacaaactaaag

SEQ ID NO: 14901 - DNA, 301 bp, Artificial Sequence
  Rb1.1_Atm.4
  crRNA array
  misc_feature (148)..(157): n is a, c, g, or t
cttggctttatatatcttgtggaaaggacgaaacaccgtaatttctactaagtgtagattctgacatgatcgggtaccttaatttctactaagtgtagatggtggtgatcagtcaagtagtaatttctactaagtgtagatttttttnnnnnnnnnnaagcttggcgtggatccgatatcaactagatcttgagacaaatggcagtattcatccacaattttaaaagaaaaggggggattggggggtacagtgcaggggaaagaatagtagacataatagcaacagacatacaaactaaag

SEQ ID NO: 14902 - DNA, 301 bp, Artificial Sequence
  Rb1.2_Atm.1
  crRNA array
  misc_feature (148)..(157): n is a, c, g, or t
cttggctttatatatcttgtggaaaggacgaaacaccgtaatttctactaagtgtagatgtctctgcatgaaaacggagtaatttctactaagtgtagatgagaaagtctccgaatcgtttaatttctactaagtgtagatttttttnnnnnnnnnnaagcttggcgtggatccgatatcaactagatcttgagacaaatggcagtattcatccacaattttaaaagaaaaggggggattggggggtacagtgcaggggaaagaatagtagacataatagcaacagacatacaaactaaag

SEQ ID NO: 14903 - DNA, 301 bp, Artificial Sequence
  Rb1.2_Atm.2
  crRNA array
  misc_feature (148)..(157): n is a, c, g, or t
cttggctttatatatcttgtggaaaggacgaaacaccgtaatttctactaagtgtagatgtctctgcatgaaaacggagtaatttctactaagtgtagatcctacgagggcacgagagactaatttctactaagtgtagatttttttnnnnnnnnnnaagcttggcgtggatccgatatcaactagatcttgagacaaatggcagtattcatccacaattttaaaagaaaaggggggattggggggtacagtgcaggggaaagaatagtagacataatagcaacagacatacaaactaaag

SEQ ID NO: 14904 - DNA, 301 bp, Artificial Sequence
  Rb1.2_Atm.3
  crRNA array
  misc_feature (148)..(157): n is a, c, g, or t
cttggctttatatatcttgtggaaaggacgaaacaccgtaatttctactaagtgtagatgtctctgcatgaaaacggagtaatttctactaagtgtagattgaaagtctccgatatgccataatttctactaagtgtagatttttttnnnnnnnnnnaagcttggcgtggatccgatatcaactagatcttgagacaaatggcagtattcatccacaattttaaaagaaaaggggggattggggggtacagtgcaggggaaagaatagtagacataatagcaacagacatacaaactaaag

SEQ ID NO: 14905 - DNA, 301 bp, Artificial Sequence
  Rb1.2_Atm.4
  crRNA array
  misc_feature (148)..(157): n is a, c, g, or t
cttggctttatatatcttgtggaaaggacgaaacaccgtaatttctactaagtgtagatgtctctgcatgaaaacggagtaatttctactaagtgtagatggtggtgatcagtcaagtagtaatttctactaagtgtagatttttttnnnnnnnnnnaagcttggcgtggatccgatatcaactagatcttgagacaaatggcagtattcatccacaattttaaaagaaaaggggggattggggggtacagtgcaggggaaagaatagtagacataatagcaacagacatacaaactaaag

SEQ ID NO: 14906 - DNA, 301 bp, Artificial Sequence
  Rb1.3_Atm.1
  crRNA array
  misc_feature (148)..(157): n is a, c, g, or t
cttggctttatatatcttgtggaaaggacgaaacaccgtaatttctactaagtgtagatagccaatctggtctaataactaatttctactaagtgtagatgagaaagtctccgaatcgtttaatttctactaagtgtagatttttttnnnnnnnnnnaagcttggcgtggatccgatatcaactagatcttgagacaaatggcagtattcatccacaattttaaaagaaaaggggggattggggggtacagtgcaggggaaagaatagtagacataatagcaacagacatacaaactaaag

SEQ ID NO: 14907 - DNA, 301 bp, Artificial Sequence
  Rb1.3_Atm.2
  crRNA array
  misc_feature (148)..(157): n is a, c, g, or t
cttggctttatatatcttgtggaaaggacgaaacaccgtaatttctactaagtgtagatagccaatctggtctaataactaatttctactaagtgtagatcctacgagggcacgagagactaatttctactaagtgtagatttttttnnnnnnnnnnaagcttggcgtggatccgatatcaactagatcttgagacaaatggcagtattcatccacaattttaaaagaaaaggggggattggggggtacagtgcaggggaaagaatagtagacataatagcaacagacatacaaactaaag

SEQ ID NO: 14908 - DNA, 301 bp, Artificial Sequence
  Rb1.3_Atm.3
  crRNA array
  misc_feature (148)..(157): n is a, c, g, or t
cttggctttatatatcttgtggaaaggacgaaacaccgtaatttctactaagtgtagatagccaatctggtctaataactaatttctactaagtgtagattgaaagtctccgatatgccataatttctactaagtgtagatttttttnnnnnnnnnnaagcttggcgtggatccgatatcaactagatcttgagacaaatggcagtattcatccacaattttaaaagaaaaggggggattggggggtacagtgcaggggaaagaatagtagacataatagcaacagacatacaaactaaag

SEQ ID NO: 14909 - DNA, 301 bp, Artificial Sequence
  Rb1.3_Atm.4
  crRNA array
  misc_feature (148)..(157): n is a, c, g, or t
cttggctttatatatcttgtggaaaggacgaaacaccgtaatttctactaagtgtagatagccaatctggtctaataactaatttctactaagtgtagatggtggtgatcagtcaagtagtaatttctactaagtgtagatttttttnnnnnnnnnnaagcttggcgtggatccgatatcaactagatcttgagacaaatggcagtattcatccacaattttaaaagaaaaggggggattggggggtacagtgcaggggaaagaatagtagacataatagcaacagacatacaaactaaag

SEQ ID NO: 14910 - DNA, 301 bp, Artificial Sequence
  Rb1.4_Atm.1
  crRNA array
  misc_feature (148)..(157): n is a, c, g, or t
cttggctttatatatcttgtggaaaggacgaaacaccgtaatttctactaagtgtagattgtagctcagtaaaagtgaataatttctactaagtgtagatgagaaagtctccgaatcgtttaatttctactaagtgtagatttttttnnnnnnnnnnaagcttggcgtggatccgatatcaactagatcttgagacaaatggcagtattcatccacaattttaaaagaaaaggggggattggggggtacagtgcaggggaaagaatagtagacataatagcaacagacatacaaactaaag

SEQ ID NO: 14911 - DNA, 301 bp, Artificial Sequence
  Rb1.4_Atm.2
  crRNA array
  misc_feature (148)..(157): n is a, c, g, or t
cttggctttatatatcttgtggaaaggacgaaacaccgtaatttctactaagtgtagattgtagctcagtaaaagtgaataatttctactaagtgtagatcctacgagggcacgagagactaatttctactaagtgtagatttttttnnnnnnnnnnaagcttggcgtggatccgatatcaactagatcttgagacaaatggcagtattcatccacaattttaaaagaaaaggggggattggggggtacagtgcaggggaaagaatagtagacataatagcaacagacatacaaactaaag

SEQ ID NO: 14912 - DNA, 301 bp, Artificial Sequence
  Rb1.4_Atm.3
  crRNA array
  misc_feature (148)..(157): n is a, c, g, or t
cttggctttatatatcttgtggaaaggacgaaacaccgtaatttctactaagtgtagattgtagctcagtaaaagtgaataatttctactaagtgtagattgaaagtctccgatatgccataatttctactaagtgtagatttttttnnnnnnnnnnaagcttggcgtggatccgatatcaactagatcttgagacaaatggcagtattcatccacaattttaaaagaaaaggggggattggggggtacagtgcaggggaaagaatagtagacataatagcaacagacatacaaactaaag

SEQ ID NO: 14913 - DNA, 301 bp, Artificial Sequence
  Rb1.4_Atm.4
  crRNA array
  misc_feature (148)..(157): n is a, c, g, or t
cttggctttatatatcttgtggaaaggacgaaacaccgtaatttctactaagtgtagattgtagctcagtaaaagtgaataatttctactaagtgtagatggtggtgatcagtcaagtagtaatttctactaagtgtagatttttttnnnnnnnnnnaagcttggcgtggatccgatatcaactagatcttgagacaaatggcagtattcatccacaattttaaaagaaaaggggggattggggggtacagtgcaggggaaagaatagtagacataatagcaacagacatacaaactaaag

SEQ ID NO: 14914 - DNA, 301 bp, Artificial Sequence
  Kmt2c.1_Pten.1
  crRNA array
  misc_feature (148)..(157): n is a, c, g, or t
cttggctttatatatcttgtggaaaggacgaaacaccgtaatttctactaagtgtagatactcgacctccacctccctataatttctactaagtgtagataagcgtggtgcgtgacgcactaatttctactaagtgtagatttttttnnnnnnnnnnaagcttggcgtggatccgatatcaactagatcttgagacaaatggcagtattcatccacaattttaaaagaaaaggggggattggggggtacagtgcaggggaaagaatagtagacataatagcaacagacatacaaactaaag

SEQ ID NO: 14915 - DNA, 301 bp, Artificial Sequence
  Kmt2c.1_Pten.2
  crRNA array
  misc_feature (148)..(157): n is a, c, g, or t
cttggctttatatatcttgtggaaaggacgaaacaccgtaatttctactaagtgtagatactcgacctccacctccctataatttctactaagtgtagattgtcaccagctgaagtggcttaatttctactaagtgtagatttttttnnnnnnnnnnaagcttggcgtggatccgatatcaactagatcttgagacaaatggcagtattcatccacaattttaaaagaaaaggggggattggggggtacagtgcaggggaaagaatagtagacataatagcaacagacatacaaactaaag

SEQ ID NO: 14916 - DNA, 301 bp, Artificial Sequence
  Kmt2c.1_Pten.3
  crRNA array
  misc_feature (148)..(157): n is a, c, g, or t
cttggctttatatatcttgtggaaaggacgaaacaccgtaatttctactaagtgtagatactcgacctccacctccctataatttctactaagtgtagatggagtcaagaggctgatttttaatttctactaagtgtagatttttttnnnnnnnnnnaagcttggcgtggatccgatatcaactagatcttgagacaaatggcagtattcatccacaattttaaaagaaaaggggggattggggggtacagtgcaggggaaagaatagtagacataatagcaacagacatacaaactaaag

SEQ ID NO: 14917 - DNA, 301 bp, Artificial Sequence
  Kmt2c.1_Pten.4
  crRNA array
  misc_feature (148)..(157): n is a, c, g, or t
cttggctttatatatcttgtggaaaggacgaaacaccgtaatttctactaagtgtagatactcgacctccacctccctataatttctactaagtgtagatctgtaagctaaaccactacataatttctactaagtgtagatttttttnnnnnnnnnnaagcttggcgtggatccgatatcaactagatcttgagacaaatggcagtattcatccacaattttaaaagaaaaggggggattggggggtacagtgcaggggaaagaatagtagacataatagcaacagacatacaaactaaag

SEQ ID NO: 14918 - DNA, 301 bp, Artificial Sequence
  Kmt2c.2_Pten.1
  crRNA array
  misc_feature (148)..(157): n is a, c, g, or t
cttggctttatatatcttgtggaaaggacgaaacaccgtaatttctactaagtgtagatcccaaagatcagcgtggacctaatttctactaagtgtagataagcgtggtgcgtgacgcactaatttctactaagtgtagatttttttnnnnnnnnnnaagcttggcgtggatccgatatcaactagatcttgagacaaatggcagtattcatccacaattttaaaagaaaaggggggattggggggtacagtgcaggggaaagaatagtagacataatagcaacagacatacaaactaaag

SEQ ID NO: 14919 - DNA, 301 bp, Artificial Sequence
  Kmt2c.2_Pten.2
  crRNA array
  misc_feature (148)..(157): n is a, c, g, or t
cttggctttatatatcttgtggaaaggacgaaacaccgtaatttctactaagtgtagatcccaaagatcagcgtggacctaatttctactaagtgtagattgtcaccagctgaagtggcttaatttctactaagtgtagatttttttnnnnnnnnnnaagcttggcgtggatccgatatcaactagatcttgagacaaatggcagtattcatccacaattttaaaagaaaaggggggattggggggtacagtgcaggggaaagaatagtagacataatagcaacagacatacaaactaaag

SEQ ID NO: 14920 - DNA, 301 bp, Artificial Sequence
  Kmt2c.2_Pten.3
  crRNA array
  misc_feature (148)..(157): n is a, c, g, or t
cttggctttatatatcttgtggaaaggacgaaacaccgtaatttctactaagtgtagatcccaaagatcagcgtggacctaatttctactaagtgtagatggagtcaagaggctgatttttaatttctactaagtgtagatttttttnnnnnnnnnnaagcttggcgtggatccgatatcaactagatcttgagacaaatggcagtattcatccacaattttaaaagaaaaggggggattggggggtacagtgcaggggaaagaatagtagacataatagcaacagacatacaaactaaag

SEQ ID NO: 14921 - DNA, 301 bp, Artificial Sequence
  Kmt2c.2_Pten.4
  crRNA array
  misc_feature (148)..(157): n is a, c, g, or t
cttggctttatatatcttgtggaaaggacgaaacaccgtaatttctactaagtgtagatcccaaagatcagcgtggacctaatttctactaagtgtagatctgtaagctaaaccactacataatttctactaagtgtagatttttttnnnnnnnnnnaagcttggcgtggatccgatatcaactagatcttgagacaaatggcagtattcatccacaattttaaaagaaaaggggggattggggggtacagtgcaggggaaagaatagtagacataatagcaacagacatacaaactaaag

SEQ ID NO: 14922 - DNA, 301 bp, Artificial Sequence
  Kmt2c.3_Pten.1
  crRNA array
  misc_feature (148)..(157): n is a, c, g, or t
cttggctttatatatcttgtggaaaggacgaaacaccgtaatttctactaagtgtagataaaagatccgaatcgatgcgtaatttctactaagtgtagataagcgtggtgcgtgacgcactaatttctactaagtgtagatttttttnnnnnnnnnnaagcttggcgtggatccgatatcaactagatcttgagacaaatggcagtattcatccacaattttaaaagaaaaggggggattggggggtacagtgcaggggaaagaatagtagacataatagcaacagacatacaaactaaag

SEQ ID NO: 14923 - DNA, 301 bp, Artificial Sequence
  Kmt2c.3_Pten.2
  crRNA array
  misc_feature (148)..(157): n is a, c, g, or t
cttggctttatatatcttgtggaaaggacgaaacaccgtaatttctactaagtgtagataaaagatccgaatcgatgcgtaatttctactaagtgtagattgtcaccagctgaagtggcttaatttctactaagtgtagatttttttnnnnnnnnnnaagcttggcgtggatccgatatcaactagatcttgagacaaatggcagtattcatccacaattttaaaagaaaaggggggattggggggtacagtgcaggggaaagaatagtagacataatagcaacagacatacaaactaaag

SEQ ID NO: 14924 - DNA, 301 bp, Artificial Sequence
  Kmt2c.3_Pten.3
  crRNA array
  misc_feature (148)..(157): n is a, c, g, or t
cttggctttatatatcttgtggaaaggacgaaacaccgtaatttctactaagtgtagataaaagatccgaatcgatgcgtaatttctactaagtgtagatggagtcaagaggctgatttttaatttctactaagtgtagatttttttnnnnnnnnnnaagcttggcgtggatccgatatcaactagatcttgagacaaatggcagtattcatccacaattttaaaagaaaaggggggattggggggtacagtgcaggggaaagaatagtagacataatagcaacagacatacaaactaaag

SEQ ID NO: 14925 - DNA, 301 bp, Artificial Sequence
  Kmt2c.3_Pten.4
  crRNA array
  misc_feature (148)..(157): n is a, c, g, or t
cttggctttatatatcttgtggaaaggacgaaacaccgtaatttctactaagtgtagataaaagatccgaatcgatgcgtaatttctactaagtgtagatctgtaagctaaaccactacataatttctactaagtgtagatttttttnnnnnnnnnnaagcttggcgtggatccgatatcaactagatcttgagacaaatggcagtattcatccacaattttaaaagaaaaggggggattggggggtacagtgcaggggaaagaatagtagacataatagcaacagacatacaaactaaag

SEQ ID NO: 14926 - DNA, 301 bp, Artificial Sequence
  Kmt2c.4_Pten.1
  crRNA array
  misc_feature (148)..(157): n is a, c, g, or t
cttggctttatatatcttgtggaaaggacgaaacaccgtaatttctactaagtgtagatctgaggcacatggaagcgattaatttctactaagtgtagataagcgtggtgcgtgacgcactaatttctactaagtgtagatttttttnnnnnnnnnnaagcttggcgtggatccgatatcaactagatcttgagacaaatggcagtattcatccacaattttaaaagaaaaggggggattggggggtacagtgcaggggaaagaatagtagacataatagcaacagacatacaaactaaag

SEQ ID NO: 14927 - DNA, 301 bp, Artificial Sequence
  Kmt2c.4_Pten.2
  crRNA array
  misc_feature (148)..(157): n is a, c, g, or t
cttggctttatatatcttgtggaaaggacgaaacaccgtaatttctactaagtgtagatctgaggcacatggaagcgattaatttctactaagtgtagattgtcaccagctgaagtggcttaatttctactaagtgtagatttttttnnnnnnnnnnaagcttggcgtggatccgatatcaactagatcttgagacaaatggcagtattcatccacaattttaaaagaaaaggggggattggggggtacagtgcaggggaaagaatagtagacataatagcaacagacatacaaactaaag

SEQ ID NO: 14928 - DNA, 301 bp, Artificial Sequence
  Kmt2c.4_Pten.3
  crRNA array
  misc_feature (148)..(157): n is a, c, g, or t
cttggctttatatatcttgtggaaaggacgaaacaccgtaatttctactaagtgtagatctgaggcacatggaagcgattaatttctactaagtgtagatggagtcaagaggctgatttttaatttctactaagtgtagatttttttnnnnnnnnnnaagcttggcgtggatccgatatcaactagatcttgagacaaatggcagtattcatccacaattttaaaagaaaaggggggattggggggtacagtgcaggggaaagaatagtagacataatagcaacagacatacaaactaaag

SEQ ID NO: 14929 - DNA, 301 bp, Artificial Sequence
  Kmt2c.4_Pten.4
  crRNA array
  misc_feature (148)..(157): n is a, c, g, or t
cttggctttatatatcttgtggaaaggacgaaacaccgtaatttctactaagtgtagatctgaggcacatggaagcgattaatttctactaagtgtagatctgtaagctaaaccactacataatttctactaagtgtagatttttttnnnnnnnnnnaagcttggcgtggatccgatatcaactagatcttgagacaaatggcagtattcatccacaattttaaaagaaaaggggggattggggggtacagtgcaggggaaagaatagtagacataatagcaacagacatacaaactaaag

SEQ ID NO: 14930 - DNA, 301 bp, Artificial Sequence
  Kmt2c.1_Atm.1
  crRNA array
  misc_feature (148)..(157): n is a, c, g, or t
cttggctttatatatcttgtggaaaggacgaaacaccgtaatttctactaagtgtagatactcgacctccacctccctataatttctactaagtgtagatgagaaagtctccgaatcgtttaatttctactaagtgtagatttttttnnnnnnnnnnaagcttggcgtggatccgatatcaactagatcttgagacaaatggcagtattcatccacaattttaaaagaaaaggggggattggggggtacagtgcaggggaaagaatagtagacataatagcaacagacatacaaactaaag

SEQ ID NO: 14931 - DNA, 301 bp, Artificial Sequence
  Kmt2c.1_Atm.2
  crRNA array
  misc_feature (148)..(157): n is a, c, g, or t
cttggctttatatatcttgtggaaaggacgaaacaccgtaatttctactaagtgtagatactcgacctccacctccctataatttctactaagtgtagatcctacgagggcacgagagactaatttctactaagtgtagatttttttnnnnnnnnnnaagcttggcgtggatccgatatcaactagatcttgagacaaatggcagtattcatccacaattttaaaagaaaaggggggattggggggtacagtgcaggggaaagaatagtagacataatagcaacagacatacaaactaaag

SEQ ID NO: 14932 - DNA, 301 bp, Artificial Sequence
  Kmt2c.1_Atm.3
  crRNA array
  misc_feature (148)..(157): n is a, c, g, or t
cttggctttatatatcttgtggaaaggacgaaacaccgtaatttctactaagtgtagatactcgacctccacctccctataatttctactaagtgtagattgaaagtctccgatatgccataatttctactaagtgtagatttttttnnnnnnnnnnaagcttggcgtggatccgatatcaactagatcttgagacaaatggcagtattcatccacaattttaaaagaaaaggggggattggggggtacagtgcaggggaaagaatagtagacataatagcaacagacatacaaactaaag

SEQ ID NO: 14933 - DNA, 301 bp, Artificial Sequence
  Kmt2c.1_Atm.4
  crRNA array
  misc_feature (148)..(157): n is a, c, g, or t
cttggctttatatatcttgtggaaaggacgaaacaccgtaatttctactaagtgtagatactcgacctccacctccctataatttctactaagtgtagatggtggtgatcagtcaagtagtaatttctactaagtgtagatttttttnnnnnnnnnnaagcttggcgtggatccgatatcaactagatcttgagacaaatggcagtattcatccacaattttaaaagaaaaggggggattggggggtacagtgcaggggaaagaatagtagacataatagcaacagacatacaaactaaag

SEQ ID NO: 14934 - DNA, 301 bp, Artificial Sequence
  Kmt2c.2_Atm.1
  crRNA array
  misc_feature (148)..(157): n is a, c, g, or t
cttggctttatatatcttgtggaaaggacgaaacaccgtaatttctactaagtgtagatcccaaagatcagcgtggacctaatttctactaagtgtagatgagaaagtctccgaatcgtttaatttctactaagtgtagatttttttnnnnnnnnnnaagcttggcgtggatccgatatcaactagatcttgagacaaatggcagtattcatccacaattttaaaagaaaaggggggattggggggtacagtgcaggggaaagaatagtagacataatagcaacagacatacaaactaaag

SEQ ID NO: 14935 - DNA, 301 bp, Artificial Sequence
  Kmt2c.2_Atm.2
  crRNA array
  misc_feature (148)..(157): n is a, c, g, or t
cttggctttatatatcttgtggaaaggacgaaacaccgtaatttctactaagtgtagatcccaaagatcagcgtggacctaatttctactaagtgtagatcctacgagggcacgagagactaatttctactaagtgtagatttttttnnnnnnnnnnaagcttggcgtggatccgatatcaactagatcttgagacaaatggcagtattcatccacaattttaaaagaaaaggggggattggggggtacagtgcaggggaaagaatagtagacataatagcaacagacatacaaactaaag

SEQ ID NO: 14936 - DNA, 301 bp, Artificial Sequence
  Kmt2c.2_Atm.3
  crRNA array
  misc_feature (148)..(157): n is a, c, g, or t
cttggctttatatatcttgtggaaaggacgaaacaccgtaatttctactaagtgtagatcccaaagatcagcgtggacctaatttctactaagtgtagattgaaagtctccgatatgccataatttctactaagtgtagatttttttnnnnnnnnnnaagcttggcgtggatccgatatcaactagatcttgagacaaatggcagtattcatccacaattttaaaagaaaaggggggattggggggtacagtgcaggggaaagaatagtagacataatagcaacagacatacaaactaaag

SEQ ID NO: 14937 - DNA, 301 bp, Artificial Sequence
  Kmt2c.2_Atm.4
  crRNA array
  misc_feature (148)..(157): n is a, c, g, or t
cttggctttatatatcttgtggaaaggacgaaacaccgtaatttctactaagtgtagatcccaaagatcagcgtggacctaatttctactaagtgtagatggtggtgatcagtcaagtagtaatttctactaagtgtagatttttttnnnnnnnnnnaagcttggcgtggatccgatatcaactagatcttgagacaaatggcagtattcatccacaattttaaaagaaaaggggggattggggggtacagtgcaggggaaagaatagtagacataatagcaacagacatacaaactaaag

SEQ ID NO: 14938 - DNA, 301 bp, Artificial Sequence
  Kmt2c.3_Atm.1
  crRNA array
  misc_feature (148)..(157): n is a, c, g, or t
cttggctttatatatcttgtggaaaggacgaaacaccgtaatttctactaagtgtagataaaagatccgaatcgatgcgtaatttctactaagtgtagatgagaaagtctccgaatcgtttaatttctactaagtgtagatttttttnnnnnnnnnnaagcttggcgtggatccgatatcaactagatcttgagacaaatggcagtattcatccacaattttaaaagaaaaggggggattggggggtacagtgcaggggaaagaatagtagacataatagcaacagacatacaaactaaag

SEQ ID NO: 14939 - DNA, 301 bp, Artificial Sequence
  Kmt2c.3_Atm.2
  crRNA array
  misc_feature (148)..(157): n is a, c, g, or t
cttggctttatatatcttgtggaaaggacgaaacaccgtaatttctactaagtgtagataaaagatccgaatcgatgcgtaatttctactaagtgtagatcctacgagggcacgagagactaatttctactaagtgtagatttttttnnnnnnnnnnaagcttggcgtggatccgatatcaactagatcttgagacaaatggcagtattcatccacaattttaaaagaaaaggggggattggggggtacagtgcaggggaaagaatagtagacataatagcaacagacatacaaactaaag

SEQ ID NO: 14940 - DNA, 301 bp, Artificial Sequence
  Kmt2c.3_Atm.3
  crRNA array
  misc_feature (148)..(157): n is a, c, g, or t
cttggctttatatatcttgtggaaaggacgaaacaccgtaatttctactaagtgtagataaaagatccgaatcgatgcgtaatttctactaagtgtagattgaaagtctccgatatgccataatttctactaagtgtagatttttttnnnnnnnnnnaagcttggcgtggatccgatatcaactagatcttgagacaaatggcagtattcatccacaattttaaaagaaaaggggggattggggggtacagtgcaggggaaagaatagtagacataatagcaacagacatacaaactaaag

SEQ ID NO: 14941 - DNA, 301 bp, Artificial Sequence
  Kmt2c.3_Atm.4
  crRNA array
  misc_feature (148)..(157): n is a, c, g, or t
cttggctttatatatcttgtggaaaggacgaaacaccgtaatttctactaagtgtagataaaagatccgaatcgatgcgtaatttctactaagtgtagatggtggtgatcagtcaagtagtaatttctactaagtgtagatttttttnnnnnnnnnnaagcttggcgtggatccgatatcaactagatcttgagacaaatggcagtattcatccacaattttaaaagaaaaggggggattggggggtacagtgcaggggaaagaatagtagacataatagcaacagacatacaaactaaag

SEQ ID NO: 14942 - DNA, 301 bp, Artificial Sequence
  Kmt2c.4_Atm.1
  crRNA array
  misc_feature (148)..(157): n is a, c, g, or t
cttggctttatatatcttgtggaaaggacgaaacaccgtaatttctactaagtgtagatctgaggcacatggaagcgattaatttctactaagtgtagatgagaaagtctccgaatcgtttaatttctactaagtgtagatttttttnnnnnnnnnnaagcttggcgtggatccgatatcaactagatcttgagacaaatggcagtattcatccacaattttaaaagaaaaggggggattggggggtacagtgcaggggaaagaatagtagacataatagcaacagacatacaaactaaag

SEQ ID NO: 14943 - DNA, 301 bp, Artificial Sequence
  Kmt2c.4_Atm.2
  crRNA array
  misc_feature (148)..(157): n is a, c, g, or t
cttggctttatatatcttgtggaaaggacgaaacaccgtaatttctactaagtgtagatctgaggcacatggaagcgattaatttctactaagtgtagatcctacgagggcacgagagactaatttctactaagtgtagatttttttnnnnnnnnnnaagcttggcgtggatccgatatcaactagatcttgagacaaatggcagtattcatccacaattttaaaagaaaaggggggattggggggtacagtgcaggggaaagaatagtagacataatagcaacagacatacaaactaaag

SEQ ID NO: 14944 - DNA, 301 bp, Artificial Sequence
  Kmt2c.4_Atm.3
  crRNA array
  misc_feature (148)..(157): n is a, c, g, or t
cttggctttatatatcttgtggaaaggacgaaacaccgtaatttctactaagtgtagatctgaggcacatggaagcgattaatttctactaagtgtagattgaaagtctccgatatgccataatttctactaagtgtagatttttttnnnnnnnnnnaagcttggcgtggatccgatatcaactagatcttgagacaaatggcagtattcatccacaattttaaaagaaaaggggggattggggggtacagtgcaggggaaagaatagtagacataatagcaacagacatacaaactaaag

SEQ ID NO: 14945 - DNA, 301 bp, Artificial Sequence
  Kmt2c.4_Atm.4
  crRNA array
  misc_feature (148)..(157): n is a, c, g, or t
cttggctttatatatcttgtggaaaggacgaaacaccgtaatttctactaagtgtagatctgaggcacatggaagcgattaatttctactaagtgtagatggtggtgatcagtcaagtagtaatttctactaagtgtagatttttttnnnnnnnnnnaagcttggcgtggatccgatatcaactagatcttgagacaaatggcagtattcatccacaattttaaaagaaaaggggggattggggggtacagtgcaggggaaagaatagtagacataatagcaacagacatacaaactaaag

SEQ ID NO: 14946 - DNA, 301 bp, Artificial Sequence
  Pten.1_Atm.1
  crRNA array
  misc_feature (148)..(157): n is a, c, g, or t
cttggctttatatatcttgtggaaaggacgaaacaccgtaatttctactaagtgtagataagcgtggtgcgtgacgcactaatttctactaagtgtagatgagaaagtctccgaatcgtttaatttctactaagtgtagatttttttnnnnnnnnnnaagcttggcgtggatccgatatcaactagatcttgagacaaatggcagtattcatccacaattttaaaagaaaaggggggattggggggtacagtgcaggggaaagaatagtagacataatagcaacagacatacaaactaaag

SEQ ID NO: 14947 - DNA, 301 bp, Artificial Sequence
  Pten.1_Atm.2
  crRNA array
  misc_feature (148)..(157): n is a, c, g, or t
cttggctttatatatcttgtggaaaggacgaaacaccgtaatttctactaagtgtagataagcgtggtgcgtgacgcactaatttctactaagtgtagatcctacgagggcacgagagactaatttctactaagtgtagatttttttnnnnnnnnnnaagcttggcgtggatccgatatcaactagatcttgagacaaatggcagtattcatccacaattttaaaagaaaaggggggattggggggtacagtgcaggggaaagaatagtagacataatagcaacagacatacaaactaaag

SEQ ID NO: 14948 - DNA, 301 bp, Artificial Sequence
  Pten.1_Atm.3
  crRNA array
  misc_feature (148)..(157): n is a, c, g, or t
cttggctttatatatcttgtggaaaggacgaaacaccgtaatttctactaagtgtagataagcgtggtgcgtgacgcactaatttctactaagtgtagattgaaagtctccgatatgccataatttctactaagtgtagatttttttnnnnnnnnnnaagcttggcgtggatccgatatcaactagatcttgagacaaatggcagtattcatccacaattttaaaagaaaaggggggattggggggtacagtgcaggggaaagaatagtagacataatagcaacagacatacaaactaaag

SEQ ID NO: 14949 - DNA, 301 bp, Artificial Sequence
  Pten.1_Atm.4
  crRNA array
  misc_feature (148)..(157): n is a, c, g, or t
cttggctttatatatcttgtggaaaggacgaaacaccgtaatttctactaagtgtagataagcgtggtgcgtgacgcactaatttctactaagtgtagatggtggtgatcagtcaagtagtaatttctactaagtgtagatttttttnnnnnnnnnnaagcttggcgtggatccgatatcaactagatcttgagacaaatggcagtattcatccacaattttaaaagaaaaggggggattggggggtacagtgcaggggaaagaatagtagacataatagcaacagacatacaaactaaag

SEQ ID NO: 14950 - DNA, 301 bp, Artificial Sequence
  Pten.2_Atm.1
  crRNA array
  misc_feature (148)..(157): n is a, c, g, or t
cttggctttatatatcttgtggaaaggacgaaacaccgtaatttctactaagtgtagattgtcaccagctgaagtggcttaatttctactaagtgtagatgagaaagtctccgaatcgtttaatttctactaagtgtagatttttttnnnnnnnnnnaagcttggcgtggatccgatatcaactagatcttgagacaaatggcagtattcatccacaattttaaaagaaaaggggggattggggggtacagtgcaggggaaagaatagtagacataatagcaacagacatacaaactaaag

SEQ ID NO: 14951 - DNA, 301 bp, Artificial Sequence
  Pten.2_Atm.2
  crRNA array
  misc_feature (148)..(157): n is a, c, g, or t
cttggctttatatatcttgtggaaaggacgaaacaccgtaatttctactaagtgtagattgtcaccagctgaagtggcttaatttctactaagtgtagatcctacgagggcacgagagactaatttctactaagtgtagatttttttnnnnnnnnnnaagcttggcgtggatccgatatcaactagatcttgagacaaatggcagtattcatccacaattttaaaagaaaaggggggattggggggtacagtgcaggggaaagaatagtagacataatagcaacagacatacaaactaaag

SEQ ID NO: 14952 - DNA, 301 bp, Artificial Sequence
  Pten.2_Atm.3
  crRNA array
  misc_feature (148)..(157): n is a, c, g, or t
cttggctttatatatcttgtggaaaggacgaaacaccgtaatttctactaagtgtagattgtcaccagctgaagtggcttaatttctactaagtgtagattgaaagtctccgatatgccataatttctactaagtgtagatttttttnnnnnnnnnnaagcttggcgtggatccgatatcaactagatcttgagacaaatggcagtattcatccacaattttaaaagaaaaggggggattggggggtacagtgcaggggaaagaatagtagacataatagcaacagacatacaaactaaag

SEQ ID NO: 14953 - DNA, 301 bp, Artificial Sequence
  Pten.2_Atm.4
  crRNA array
  misc_feature (148)..(157): n is a, c, g, or t
cttggctttatatatcttgtggaaaggacgaaacaccgtaatttctactaagtgtagattgtcaccagctgaagtggcttaatttctactaagtgtagatggtggtgatcagtcaagtagtaatttctactaagtgtagatttttttnnnnnnnnnnaagcttggcgtggatccgatatcaactagatcttgagacaaatggcagtattcatccacaattttaaaagaaaaggggggattggggggtacagtgcaggggaaagaatagtagacataatagcaacagacatacaaactaaag

SEQ ID NO: 14954 - DNA, 301 bp, Artificial Sequence
  Pten.3_Atm.1
  crRNA array
  misc_feature (148)..(157): n is a, c, g, or t
cttggctttatatatcttgtggaaaggacgaaacaccgtaatttctactaagtgtagatggagtcaagaggctgatttttaatttctactaagtgtagatgagaaagtctccgaatcgtttaatttctactaagtgtagatttttttnnnnnnnnnnaagcttggcgtggatccgatatcaactagatcttgagacaaatggcagtattcatccacaattttaaaagaaaaggggggattggggggtacagtgcaggggaaagaatagtagacataatagcaacagacatacaaactaaag

SEQ ID NO: 14955 - DNA, 301 bp, Artificial Sequence
  Pten.3_Atm.2
  crRNA array
  misc_feature (148)..(157): n is a, c, g, or t
cttggctttatatatcttgtggaaaggacgaaacaccgtaatttctactaagtgtagatggagtcaagaggctgatttttaatttctactaagtgtagatcctacgagggcacgagagactaatttctactaagtgtagatttttttnnnnnnnnnnaagcttggcgtggatccgatatcaactagatcttgagacaaatggcagtattcatccacaattttaaaagaaaaggggggattggggggtacagtgcaggggaaagaatagtagacataatagcaacagacatacaaactaaag

SEQ ID NO: 14956 - DNA, 301 bp, Artificial Sequence
  Pten.3_Atm.3
  crRNA array
  misc_feature (148)..(157): n is a, c, g, or t
cttggctttatatatcttgtggaaaggacgaaacaccgtaatttctactaagtgtagatggagtcaagaggctgatttttaatttctactaagtgtagattgaaagtctccgatatgccataatttctactaagtgtagatttttttnnnnnnnnnnaagcttggcgtggatccgatatcaactagatcttgagacaaatggcagtattcatccacaattttaaaagaaaaggggggattggggggtacagtgcaggggaaagaatagtagacataatagcaacagacatacaaactaaag

SEQ ID NO: 14957 - DNA, 301 bp, Artificial Sequence
  Pten.3_Atm.4
  crRNA array
  misc_feature (148)..(157): n is a, c, g, or t
cttggctttatatatcttgtggaaaggacgaaacaccgtaatttctactaagtgtagatggagtcaagaggctgatttttaatttctactaagtgtagatggtggtgatcagtcaagtagtaatttctactaagtgtagatttttttnnnnnnnnnnaagcttggcgtggatccgatatcaactagatcttgagacaaatggcagtattcatccacaattttaaaagaaaaggggggattggggggtacagtgcaggggaaagaatagtagacataatagcaacagacatacaaactaaag

SEQ ID NO: 14958 - DNA, 301 bp, Artificial Sequence
  Pten.4_Atm.1
  crRNA array
  misc_feature (148)..(157): n is a, c, g, or t
cttggctttatatatcttgtggaaaggacgaaacaccgtaatttctactaagtgtagatctgtaagctaaaccactacataatttctactaagtgtagatgagaaagtctccgaatcgtttaatttctactaagtgtagatttttttnnnnnnnnnnaagcttggcgtggatccgatatcaactagatcttgagacaaatggcagtattcatccacaattttaaaagaaaaggggggattggggggtacagtgcaggggaaagaatagtagacataatagcaacagacatacaaactaaag

SEQ ID NO: 14959 - DNA, 301 bp, Artificial Sequence
  Pten.4_Atm.2
  crRNA array
  misc_feature (148)..(157): n is a, c, g, or t
cttggctttatatatcttgtggaaaggacgaaacaccgtaatttctactaagtgtagatctgtaagctaaaccactacataatttctactaagtgtagatcctacgagggcacgagagactaatttctactaagtgtagatttttttnnnnnnnnnnaagcttggcgtggatccgatatcaactagatcttgagacaaatggcagtattcatccacaattttaaaagaaaaggggggattggggggtacagtgcaggggaaagaatagtagacataatagcaacagacatacaaactaaag

SEQ ID NO: 14960 - DNA, 301 bp, Artificial Sequence
  Pten.4_Atm.3
  crRNA array
  misc_feature (148)..(157): n is a, c, g, or t
cttggctttatatatcttgtggaaaggacgaaacaccgtaatttctactaagtgtagatctgtaagctaaaccactacataatttctactaagtgtagattgaaagtctccgatatgccataatttctactaagtgtagatttttttnnnnnnnnnnaagcttggcgtggatccgatatcaactagatcttgagacaaatggcagtattcatccacaattttaaaagaaaaggggggattggggggtacagtgcaggggaaagaatagtagacataatagcaacagacatacaaactaaag

SEQ ID NO: 14961 - DNA, 301 bp, Artificial Sequence
  Pten.4_Atm.4
  crRNA array
  misc_feature (148)..(157): n is a, c, g, or t
cttggctttatatatcttgtggaaaggacgaaacaccgtaatttctactaagtgtagatctgtaagctaaaccactacataatttctactaagtgtagatggtggtgatcagtcaagtagtaatttctactaagtgtagatttttttnnnnnnnnnnaagcttggcgtggatccgatatcaactagatcttgagacaaatggcagtattcatccacaattttaaaagaaaaggggggattggggggtacagtgcaggggaaagaatagtagacataatagcaacagacatacaaactaaag

SEQ ID NO: 14962 - DNA, 301 bp, Artificial Sequence
  Apc.1_NTC.0
  crRNA array
  misc_feature (148)..(157): n is a, c, g, or t
cttggctttatatatcttgtggaaaggacgaaacaccgtaatttctactaagtgtagatgtgatccacacgtgtagctgtaatttctactaagtgtagattatagcgtcgcgcgctaatttaatttctactaagtgtagatttttttnnnnnnnnnnaagcttggcgtggatccgatatcaactagatcttgagacaaatggcagtattcatccacaattttaaaagaaaaggggggattggggggtacagtgcaggggaaagaatagtagacataatagcaacagacatacaaactaaag

SEQ ID NO: 14963 - DNA, 301 bp, Artificial Sequence
  Apc.1_NTC.1
  crRNA array
  misc_feature (148)..(157): n is a, c, g, or t
cttggctttatatatcttgtggaaaggacgaaacaccgtaatttctactaagtgtagatgtgatccacacgtgtagctgtaatttctactaagtgtagatcgcgtaaccgttccggctcctaatttctactaagtgtagatttttttnnnnnnnnnnaagcttggcgtggatccgatatcaactagatcttgagacaaatggcagtattcatccacaattttaaaagaaaaggggggattggggggtacagtgcaggggaaagaatagtagacataatagcaacagacatacaaactaaag

SEQ ID NO: 14964 - DNA, 301 bp, Artificial Sequence
  Apc.1_NTC.10
  crRNA array
  misc_feature (148)..(157): n is a, c, g, or t
cttggctttatatatcttgtggaaaggacgaaacaccgtaatttctactaagtgtagatgtgatccacacgtgtagctgtaatttctactaagtgtagatcgctaagttcgcgcgggccgtaatttctactaagtgtagatttttttnnnnnnnnnnaagcttggcgtggatccgatatcaactagatcttgagacaaatggcagtattcatccacaattttaaaagaaaaggggggattggggggtacagtgcaggggaaagaatagtagacataatagcaacagacatacaaactaaag

SEQ ID NO: 14965 - DNA, 301 bp, Artificial Sequence
  Apc.1_NTC.11
  crRNA array
  misc_feature (148)..(157): n is a, c, g, or t
cttggctttatatatcttgtggaaaggacgaaacaccgtaatttctactaagtgtagatgtgatccacacgtgtagctgtaatttctactaagtgtagatcgttcgtcgacgaagcaatctaatttctactaagtgtagatttttttnnnnnnnnnnaagcttggcgtggatccgatatcaactagatcttgagacaaatggcagtattcatccacaattttaaaagaaaaggggggattggggggtacagtgcaggggaaagaatagtagacataatagcaacagacatacaaactaaag

SEQ ID NO: 14966 - DNA, 301 bp, Artificial Sequence
  Apc.1_NTC.12
  crRNA array
  misc_feature (148)..(157): n is a, c, g, or t
cttggctttatatatcttgtggaaaggacgaaacaccgtaatttctactaagtgtagatgtgatccacacgtgtagctgtaatttctactaagtgtagatcgccgacgattaatcaatagtaatttctactaagtgtagatttttttnnnnnnnnnnaagcttggcgtggatccgatatcaactagatcttgagacaaatggcagtattcatccacaattttaaaagaaaaggggggattggggggtacagtgcaggggaaagaatagtagacataatagcaacagacatacaaactaaag

SEQ ID NO: 14967 - DNA, 301 bp, Artificial Sequence
  Apc.1_NTC.13
  crRNA array
  misc_feature (148)..(157): n is a, c, g, or t
cttggctttatatatcttgtggaaaggacgaaacaccgtaatttctactaagtgtagatgtgatccacacgtgtagctgtaatttctactaagtgtagatgaccgttgtatcgcgatcaataatttctactaagtgtagatttttttnnnnnnnnnnaagcttggcgtggatccgatatcaactagatcttgagacaaatggcagtattcatccacaattttaaaagaaaaggggggattggggggtacagtgcaggggaaagaatagtagacataatagcaacagacatacaaactaaag

SEQ ID NO: 14968 - DNA, 301 bp, Artificial Sequence
  Apc.1_NTC.14
  crRNA array
  misc_feature (148)..(157): n is a, c, g, or t
cttggctttatatatcttgtggaaaggacgaaacaccgtaatttctactaagtgtagatgtgatccacacgtgtagctgtaatttctactaagtgtagatccgttcgtgcgatagtgttttaatttctactaagtgtagatttttttnnnnnnnnnnaagcttggcgtggatccgatatcaactagatcttgagacaaatggcagtattcatccacaattttaaaagaaaaggggggattggggggtacagtgcaggggaaagaatagtagacataatagcaacagacatacaaactaaag

SEQ ID NO: 14969 - DNA, 301 bp, Artificial Sequence
  Apc.1_NTC.15
  crRNA array
  misc_feature (148)..(157): n is a, c, g, or t
cttggctttatatatcttgtggaaaggacgaaacaccgtaatttctactaagtgtagatgtgatccacacgtgtagctgtaatttctactaagtgtagatgttgtcgtgccgcgaatttataatttctactaagtgtagatttttttnnnnnnnnnnaagcttggcgtggatccgatatcaactagatcttgagacaaatggcagtattcatccacaattttaaaagaaaaggggggattggggggtacagtgcaggggaaagaatagtagacataatagcaacagacatacaaactaaag

SEQ ID NO: 14970 - DNA, 301 bp, Artificial Sequence
  Apc.1_NTC.16
  crRNA array
  misc_feature (148)..(157): n is a, c, g, or t
cttggctttatatatcttgtggaaaggacgaaacaccgtaatttctactaagtgtagatgtgatccacacgtgtagctgtaatttctactaagtgtagatcggtacgttagacgaaaatttaatttctactaagtgtagatttttttnnnnnnnnnnaagcttggcgtggatccgatatcaactagatcttgagacaaatggcagtattcatccacaattttaaaagaaaaggggggattggggggtacagtgcaggggaaagaatagtagacataatagcaacagacatacaaactaaag

SEQ ID NO: 14971 - DNA, 278 bp, Artificial Sequence
  Apc.1_NTC.17
  crRNA array
  misc_feature (125)..(134): n is a, c, g, or t
aaggacgaaacaccgtaatttctactaagtgtagataaaagatccgaatcgatgcgtaatttctactaagtgtagatcggtcgactacggctgttagtaatttctactaagtgtagatttttttnnnnnnnnnnaagcttggcgtggatccgatatcaactagatcttgagacaaatggcagtattcatccacaattttaaaagaaaaggggggattggggggtacagtgcaggggaaagaatagtagacataatagcaacagacatacaaactaaag

SEQ ID NO: 14972 - DNA, 301 bp, Artificial Sequence
  Apc.1_NTC.18
  crRNA array
  misc_feature (148)..(157): n is a, c, g, or t
cttggctttatatatcttgtggaaaggacgaaacaccgtaatttctactaagtgtagatgtgatccacacgtgtagctgtaatttctactaagtgtagattccggttacgaccggcaaaataatttctactaagtgtagatttttttnnnnnnnnnnaagcttggcgtggatccgatatcaactagatcttgagacaaatggcagtattcatccacaattttaaaagaaaaggggggattggggggtacagtgcaggggaaagaatagtagacataatagcaacagacatacaaactaaag

SEQ ID NO: 14973 - DNA, 301 bp, Artificial Sequence
  Apc.1_NTC.19
  crRNA array
  misc_feature (148)..(157): n is a, c, g, or t
cttggctttatatatcttgtggaaaggacgaaacaccgtaatttctactaagtgtagatgtgatccacacgtgtagctgtaatttctactaagtgtagatcgtcgtagaacgatacccgataatttctactaagtgtagatttttttnnnnnnnnnnaagcttggcgtggatccgatatcaactagatcttgagacaaatggcagtattcatccacaattttaaaagaaaaggggggattggggggtacagtgcaggggaaagaatagtagacataatagcaacagacatacaaactaaag

SEQ ID NO: 14974 - DNA, 301 bp, Artificial Sequence
  Apc.1_NTC.2
  crRNA array
  misc_feature (148)..(157): n is a, c, g, or t
cttggctttatatatcttgtggaaaggacgaaacaccgtaatttctactaagtgtagatgtgatccacacgtgtagctgtaatttctactaagtgtagatttatgtcgcgccgcgacccgtaatttctactaagtgtagatttttttnnnnnnnnnnaagcttggcgtggatccgatatcaactagatcttgagacaaatggcagtattcatccacaattttaaaagaaaaggggggattggggggtacagtgcaggggaaagaatagtagacataatagcaacagacatacaaactaaag

SEQ ID NO: 14975 - DNA, 301 bp, Artificial Sequence
  Apc.1_NTC.20
  crRNA array
  misc_feature (148)..(157): n is a, c, g, or t
cttggctttatatatcttgtggaaaggacgaaacaccgtaatttctactaagtgtagatgtgatccacacgtgtagctgtaatttctactaagtgtagatattccggcgcgaccagaagataatttctactaagtgtagatttttttnnnnnnnnnnaagcttggcgtggatccgatatcaactagatcttgagacaaatggcagtattcatccacaattttaaaagaaaaggggggattggggggtacagtgcaggggaaagaatagtagacataatagcaacagacatacaaactaaag

SEQ ID NO: 14976 - DNA, 301 bp, Artificial Sequence
  Apc.1_NTC.21
  crRNA array
  misc_feature (148)..(157): n is a, c, g, or t
cttggctttatatatcttgtggaaaggacgaaacaccgtaatttctactaagtgtagatgtgatccacacgtgtagctgtaatttctactaagtgtagatgtataacttcgcgcggtccgtaatttctactaagtgtagatttttttnnnnnnnnnnaagcttggcgtggatccgatatcaactagatcttgagacaaatggcagtattcatccacaattttaaaagaaaaggggggattggggggtacagtgcaggggaaagaatagtagacataatagcaacagacatacaaactaaag

SEQ ID NO: 14977 - DNA, 301 bp, Artificial Sequence
  Apc.1_NTC.22
  crRNA array
  misc_feature (148)..(157): n is a, c, g, or t
cttggctttatatatcttgtggaaaggacgaaacaccgtaatttctactaagtgtagatgtgatccacacgtgtagctgtaatttctactaagtgtagatgcgcgtcaacgtaatgtgcctaatttctactaagtgtagatttttttnnnnnnnnnnaagcttggcgtggatccgatatcaactagatcttgagacaaatggcagtattcatccacaattttaaaagaaaaggggggattggggggtacagtgcaggggaaagaatagtagacataatagcaacagacatacaaactaaag

SEQ ID NO: 14978 - DNA, 301 bp, Artificial Sequence
  Apc.1_NTC.23
  crRNA array
  misc_feature (148)..(157): n is a, c, g, or t
cttggctttatatatcttgtggaaaggacgaaacaccgtaatttctactaagtgtagatgtgatccacacgtgtagctgtaatttctactaagtgtagatacgcgctattatcgtaggtgtaatttctactaagtgtagatttttttnnnnnnnnnnaagcttggcgtggatccgatatcaactagatcttgagacaaatggcagtattcatccacaattttaaaagaaaaggggggattggggggtacagtgcaggggaaagaatagtagacataatagcaacagacatacaaactaaag

SEQ ID NO: 14979 - DNA, 301 bp, Artificial Sequence
  Apc.1_NTC.24
  crRNA array
  misc_feature (148)..(157): n is a, c, g, or t
cttggctttatatatcttgtggaaaggacgaaacaccgtaatttctactaagtgtagatgtgatccacacgtgtagctgtaatttctactaagtgtagatactatcgacgttcgtcccggtaatttctactaagtgtagatttttttnnnnnnnnnnaagcttggcgtggatccgatatcaactagatcttgagacaaatggcagtattcatccacaattttaaaagaaaaggggggattggggggtacagtgcaggggaaagaatagtagacataatagcaacagacatacaaactaaag

SEQ ID NO: 14980 - DNA, 301 bp, Artificial Sequence
  Apc.1_NTC.25
  crRNA array
  misc_feature (148)..(157): n is a, c, g, or t
cttggctttatatatcttgtggaaaggacgaaacaccgtaatttctactaagtgtagatgtgatccacacgtgtagctgtaatttctactaagtgtagattcgcgttatcgtgccgtgcgtaatttctactaagtgtagatttttttnnnnnnnnnnaagcttggcgtggatccgatatcaactagatcttgagacaaatggcagtattcatccacaattttaaaagaaaaggggggattggggggtacagtgcaggggaaagaatagtagacataatagcaacagacatacaaactaaag

SEQ ID NO: 14981 - DNA, 301 bp, Artificial Sequence
  Apc.1_NTC.26
  crRNA array
  misc_feature (148)..(157): n is a, c, g, or t
cttggctttatatatcttgtggaaaggacgaaacaccgtaatttctactaagtgtagatgtgatccacacgtgtagctgtaatttctactaagtgtagatcgcgacggcggttttaacactaatttctactaagtgtagatttttttnnnnnnnnnnaagcttggcgtggatccgatatcaactagatcttgagacaaatggcagtattcatccacaattttaaaagaaaaggggggattggggggtacagtgcaggggaaagaatagtagacataatagcaacagacatacaaactaaag

SEQ ID NO: 14982 - DNA, 301 bp, Artificial Sequence
  Apc.1_NTC.27
  crRNA array
  misc_feature (148)..(157): n is a, c, g, or t
cttggctttatatatcttgtggaaaggacgaaacaccgtaatttctactaagtgtagatgtgatccacacgtgtagctgtaatttctactaagtgtagatgtcgcgttgcgaccggcgcttaatttctactaagtgtagatttttttnnnnnnnnnnaagcttggcgtggatccgatatcaactagatcttgagacaaatggcagtattcatccacaattttaaaagaaaaggggggattggggggtacagtgcaggggaaagaatagtagacataatagcaacagacatacaaactaaag

SEQ ID NO: 14983 - DNA, 301 bp, Artificial Sequence
  Apc.1_NTC.28
  crRNA array
  misc_feature (148)..(157): n is a, c, g, or t
cttggctttatatatcttgtggaaaggacgaaacaccgtaatttctactaagtgtagatgtgatccacacgtgtagctgtaatttctactaagtgtagataccgctaatcggcgtaaacttaatttctactaagtgtagatttttttnnnnnnnnnnaagcttggcgtggatccgatatcaactagatcttgagacaaatggcagtattcatccacaattttaaaagaaaaggggggattggggggtacagtgcaggggaaagaatagtagacataatagcaacagacatacaaactaaag

SEQ ID NO: 14984 - DNA, 301 bp, Artificial Sequence
  Apc.1_NTC.29
  crRNA array
  misc_feature (148)..(157): n is a, c, g, or t
cttggctttatatatcttgtggaaaggacgaaacaccgtaatttctactaagtgtagatgtgatccacacgtgtagctgtaatttctactaagtgtagatcgcgatctataccgtctatataatttctactaagtgtagatttttttnnnnnnnnnnaagcttggcgtggatccgatatcaactagatcttgagacaaatggcagtattcatccacaattttaaaagaaaaggggggattggggggtacagtgcaggggaaagaatagtagacataatagcaacagacatacaaactaaag

SEQ ID NO: 14985 - DNA, 301 bp, Artificial Sequence
  Apc.1_NTC.3
  crRNA array
  misc_feature (148)..(157): n is a, c, g, or t
cttggctttatatatcttgtggaaaggacgaaacaccgtaatttctactaagtgtagatgtgatccacacgtgtagctgtaatttctactaagtgtagattcgacgcgagacgacgtacataatttctactaagtgtagatttttttnnnnnnnnnnaagcttggcgtggatccgatatcaactagatcttgagacaaatggcagtattcatccacaattttaaaagaaaaggggggattggggggtacagtgcaggggaaagaatagtagacataatagcaacagacatacaaactaaag

SEQ ID NO: 14986 - DNA, 301 bp, Artificial Sequence
  Apc.1_NTC.30
  crRNA array
  misc_feature (148)..(157): n is a, c, g, or t
cttggctttatatatcttgtggaaaggacgaaacaccgtaatttctactaagtgtagatgtgatccacacgtgtagctgtaatttctactaagtgtagatcgatcgtacgggtgtcctaataatttctactaagtgtagatttttttnnnnnnnnnnaagcttggcgtggatccgatatcaactagatcttgagacaaatggcagtattcatccacaattttaaaagaaaaggggggattggggggtacagtgcaggggaaagaatagtagacataatagcaacagacatacaaactaaag

SEQ ID NO: 14987 - DNA, 301 bp, Artificial Sequence
  Apc.1_NTC.31
  crRNA array
  misc_feature (148)..(157): n is a, c, g, or t
cttggctttatatatcttgtggaaaggacgaaacaccgtaatttctactaagtgtagatgtgatccacacgtgtagctgtaatttctactaagtgtagatgccgaccgcgtgattgtaggtaatttctactaagtgtagatttttttnnnnnnnnnnaagcttggcgtggatccgatatcaactagatcttgagacaaatggcagtattcatccacaattttaaaagaaaaggggggattggggggtacagtgcaggggaaagaatagtagacataatagcaacagacatacaaactaaag

SEQ ID NO: 14988 - DNA, 301 bp, Artificial Sequence
  Apc.1_NTC.32
  crRNA array
  misc_feature (148)..(157): n is a, c, g, or t
cttggctttatatatcttgtggaaaggacgaaacaccgtaatttctactaagtgtagatgtgatccacacgtgtagctgtaatttctactaagtgtagatgcacgttacgcccgggtcactaatttctactaagtgtagatttttttnnnnnnnnnnaagcttggcgtggatccgatatcaactagatcttgagacaaatggcagtattcatccacaattttaaaagaaaaggggggattggggggtacagtgcaggggaaagaatagtagacataatagcaacagacatacaaactaaag

SEQ ID NO: 14989 - DNA, 301 bp, Artificial Sequence
  Apc.1_NTC.33
  crRNA array
  misc_feature (148)..(157): n is a, c, g, or t
cttggctttatatatcttgtggaaaggacgaaacaccgtaatttctactaagtgtagatgtgatccacacgtgtagctgtaatttctactaagtgtagattaagcgaccgacgcattcgctaatttctactaagtgtagatttttttnnnnnnnnnnaagcttggcgtggatccgatatcaactagatcttgagacaaatggcagtattcatccacaattttaaaagaaaaggggggattggggggtacagtgcaggggaaagaatagtagacataatagcaacagacatacaaactaaag

SEQ ID NO: 14990 - DNA, 301 bp, Artificial Sequence
  Apc.1_NTC.34
  crRNA array
  misc_feature (148)..(157): n is a, c, g, or t
cttggctttatatatcttgtggaaaggacgaaacaccgtaatttctactaagtgtagatgtgatccacacgtgtagctgtaatttctactaagtgtagattagcgttcgacacgtgaaactaatttctactaagtgtagatttttttnnnnnnnnnnaagcttggcgtggatccgatatcaactagatcttgagacaaatggcagtattcatccacaattttaaaagaaaaggggggattggggggtacagtgcaggggaaagaatagtagacataatagcaacagacatacaaactaaag

SEQ ID NO: 14991 - DNA, 301 bp, Artificial Sequence
  Apc.1_NTC.35
  crRNA array
  misc_feature (148)..(157): n is a, c, g, or t
cttggctttatatatcttgtggaaaggacgaaacaccgtaatttctactaagtgtagatgtgatccacacgtgtagctgtaatttctactaagtgtagattggcgcgtaatcgctattcgtaatttctactaagtgtagatttttttnnnnnnnnnnaagcttggcgtggatccgatatcaactagatcttgagacaaatggcagtattcatccacaattttaaaagaaaaggggggattggggggtacagtgcaggggaaagaatagtagacataatagcaacagacatacaaactaaag

SEQ ID NO: 14992 - DNA, 301 bp, Artificial Sequence
  Apc.1_NTC.36
  crRNA array
  misc_feature (148)..(157): n is a, c, g, or t
cttggctttatatatcttgtggaaaggacgaaacaccgtaatttctactaagtgtagatgtgatccacacgtgtagctgtaatttctactaagtgtagatcaacccgccgtagcgggccttaatttctactaagtgtagatttttttnnnnnnnnnnaagcttggcgtggatccgatatcaactagatcttgagacaaatggcagtattcatccacaattttaaaagaaaaggggggattggggggtacagtgcaggggaaagaatagtagacataatagcaacagacatacaaactaaag

SEQ ID NO: 14993 - DNA, 301 bp, Artificial Sequence
  Apc.1_NTC.37
  crRNA array
  misc_feature (148)..(157): n is a, c, g, or t
cttggctttatatatcttgtggaaaggacgaaacaccgtaatttctactaagtgtagatgtgatccacacgtgtagctgtaatttctactaagtgtagattttgcgttgacgcgattacttaatttctactaagtgtagatttttttnnnnnnnnnnaagcttggcgtggatccgatatcaactagatcttgagacaaatggcagtattcatccacaattttaaaagaaaaggggggattggggggtacagtgcaggggaaagaatagtagacataatagcaacagacatacaaactaaag

SEQ ID NO: 14994 - DNA, 301 bp, Artificial Sequence
  Apc.1_NTC.38
  crRNA array
  misc_feature (148)..(157): n is a, c, g, or t
cttggctttatatatcttgtggaaaggacgaaacaccgtaatttctactaagtgtagatgtgatccacacgtgtagctgtaatttctactaagtgtagataacggagcgcgatactaccataatttctactaagtgtagatttttttnnnnnnnnnnaagcttggcgtggatccgatatcaactagatcttgagacaaatggcagtattcatccacaattttaaaagaaaaggggggattggggggtacagtgcaggggaaagaatagtagacataatagcaacagacatacaaactaaag

SEQ ID NO: 14995 - DNA, 301 bp, Artificial Sequence
  Apc.1_NTC.39
  crRNA array
  misc_feature (148)..(157): n is a, c, g, or t
cttggctttatatatcttgtggaaaggacgaaacaccgtaatttctactaagtgtagatgtgatccacacgtgtagctgtaatttctactaagtgtagatccggacgttataacgtttcttaatttctactaagtgtagatttttttnnnnnnnnnnaagcttggcgtggatccgatatcaactagatcttgagacaaatggcagtattcatccacaattttaaaagaaaaggggggattggggggtacagtgcaggggaaagaatagtagacataatagcaacagacatacaaactaaag

SEQ ID NO: 14996 - DNA, 301 bp, Artificial Sequence
  Apc.1_NTC.4
  crRNA array
  misc_feature (148)..(157): n is a, c, g, or t
cttggctttatatatcttgtggaaaggacgaaacaccgtaatttctactaagtgtagatgtgatccacacgtgtagctgtaatttctactaagtgtagatatacccgtcgcgaacgtgagtaatttctactaagtgtagatttttttnnnnnnnnnnaagcttggcgtggatccgatatcaactagatcttgagacaaatggcagtattcatccacaattttaaaagaaaaggggggattggggggtacagtgcaggggaaagaatagtagacataatagcaacagacatacaaactaaag

SEQ ID NO: 14997 - DNA, 301 bp, Artificial Sequence
  Apc.1_NTC.40
  crRNA array
  misc_feature (148)..(157): n is a, c, g, or t
cttggctttatatatcttgtggaaaggacgaaacaccgtaatttctactaagtgtagatgtgatccacacgtgtagctgtaatttctactaagtgtagatattcgcgaacccggccggaataatttctactaagtgtagatttttttnnnnnnnnnnaagcttggcgtggatccgatatcaactagatcttgagacaaatggcagtattcatccacaattttaaaagaaaaggggggattggggggtacagtgcaggggaaagaatagtagacataatagcaacagacatacaaactaaag

SEQ ID NO: 14998 - DNA, 301 bp, Artificial Sequence
  Apc.1_NTC.41
  crRNA array
  misc_feature (148)..(157): n is a, c, g, or t
cttggctttatatatcttgtggaaaggacgaaacaccgtaatttctactaagtgtagatgtgatccacacgtgtagctgtaatttctactaagtgtagatttgatggcgcgacgcgttattaatttctactaagtgtagatttttttnnnnnnnnnnaagcttggcgtggatccgatatcaactagatcttgagacaaatggcagtattcatccacaattttaaaagaaaaggggggattggggggtacagtgcaggggaaagaatagtagacataatagcaacagacatacaaactaaag

SEQ ID NO: 14999 - DNA, 301 bp, Artificial Sequence
  Apc.1_NTC.42
  crRNA array
  misc_feature (148)..(157): n is a, c, g, or t
cttggctttatatatcttgtggaaaggacgaaacaccgtaatttctactaagtgtagatgtgatccacacgtgtagctgtaatttctactaagtgtagatggtcaaatcgcggcgataactaatttctactaagtgtagatttttttnnnnnnnnnnaagcttggcgtggatccgatatcaactagatcttgagacaaatggcagtattcatccacaattttaaaagaaaaggggggattggggggtacagtgcaggggaaagaatagtagacataatagcaacagacatacaaactaaag

SEQ ID NO: 15000 - DNA, 301 bp, Artificial Sequence
  Apc.1_NTC.43
  crRNA array
  misc_feature (148)..(157): n is a, c, g, or t
cttggctttatatatcttgtggaaaggacgaaacaccgtaatttctactaagtgtagatgtgatccacacgtgtagctgtaatttctactaagtgtagatcgactcgcgcattgaactggtaatttctactaagtgtagatttttttnnnnnnnnnnaagcttggcgtggatccgatatcaactagatcttgagacaaatggcagtattcatccacaattttaaaagaaaaggggggattggggggtacagtgcaggggaaagaatagtagacataatagcaacagacatacaaactaaag

SEQ ID NO: 15001 - DNA, 301 bp, Artificial Sequence
  Apc.1_NTC.44
  crRNA array
  misc_feature (148)..(157): n is a, c, g, or t
cttggctttatatatcttgtggaaaggacgaaacaccgtaatttctactaagtgtagatgtgatccacacgtgtagctgtaatttctactaagtgtagatagcgtcgtacgatttatcgttaatttctactaagtgtagatttttttnnnnnnnnnnaagcttggcgtggatccgatatcaactagatcttgagacaaatggcagtattcatccacaattttaaaagaaaaggggggattggggggtacagtgcaggggaaagaatagtagacataatagcaacagacatacaaactaaag

SEQ ID NO: 15002 - DNA, 301 bp, Artificial Sequence
  Apc.1_NTC.45
  crRNA array
  misc_feature (148)..(157): n is a, c, g, or t
cttggctttatatatcttgtggaaaggacgaaacaccgtaatttctactaagtgtagatgtgatccacacgtgtagctgtaatttctactaagtgtagatcggaacgcgtgatactagggtaatttctactaagtgtagatttttttnnnnnnnnnnaagcttggcgtggatccgatatcaactagatcttgagacaaatggcagtattcatccacaattttaaaagaaaaggggggattggggggtacagtgcaggggaaagaatagtagacataatagcaacagacatacaaactaaag

SEQ ID NO: 15003 - DNA, 301 bp, Artificial Sequence
  Apc.1_NTC.46
  crRNA array
  misc_feature (148)..(157): n is a, c, g, or t
cttggctttatatatcttgtggaaaggacgaaacaccgtaatttctactaagtgtagatgtgatccacacgtgtagctgtaatttctactaagtgtagatagcgggtcgtagacgcgcggtaatttctactaagtgtagatttttttnnnnnnnnnnaagcttggcgtggatccgatatcaactagatcttgagacaaatggcagtattcatccacaattttaaaagaaaaggggggattggggggtacagtgcaggggaaagaatagtagacataatagcaacagacatacaaactaaag

SEQ ID NO: 15004 - DNA, 301 bp, Artificial Sequence
  Apc.1_NTC.47
  crRNA array
  misc_feature (148)..(157): n is a, c, g, or t
cttggctttatatatcttgtggaaaggacgaaacaccgtaatttctactaagtgtagatgtgatccacacgtgtagctgtaatttctactaagtgtagattctcgtatcgcgattgttaataatttctactaagtgtagatttttttnnnnnnnnnnaagcttggcgtggatccgatatcaactagatcttgagacaaatggcagtattcatccacaattttaaaagaaaaggggggattggggggtacagtgcaggggaaagaatagtagacataatagcaacagacatacaaactaaag

SEQ ID NO: 15005 - DNA, 301 bp, Artificial Sequence
  Apc.1_NTC.48
  crRNA array
  misc_feature (148)..(157): n is a, c, g, or t
cttggctttatatatcttgtggaaaggacgaaacaccgtaatttctactaagtgtagatgtgatccacacgtgtagctgtaatttctactaagtgtagatcggtcgactacggctgttagtaatttctactaagtgtagatttttttnnnnnnnnnnaagcttggcgtggatccgatatcaactagatcttgagacaaatggcagtattcatccacaattttaaaagaaaaggggggattggggggtacagtgcaggggaaagaatagtagacataatagcaacagacatacaaactaaag

SEQ ID NO: 15006 - DNA, 301 bp, Artificial Sequence
  Apc.1_NTC.49
  crRNA array
  misc_feature (148)..(157): n is a, c, g, or t
cttggctttatatatcttgtggaaaggacgaaacaccgtaatttctactaagtgtagatgtgatccacacgtgtagctgtaatttctactaagtgtagattcggggcgcgtcaactgaattaatttctactaagtgtagatttttttnnnnnnnnnnaagcttggcgtggatccgatatcaactagatcttgagacaaatggcagtattcatccacaattttaaaagaaaaggggggattggggggtacagtgcaggggaaagaatagtagacataatagcaacagacatacaaactaaag

SEQ ID NO: 15007 - DNA, 301 bp, Artificial Sequence
  Apc.1_NTC.5
  crRNA array
  misc_feature (148)..(157): n is a, c, g, or t
cttggctttatatatcttgtggaaaggacgaaacaccgtaatttctactaagtgtagatgtgatccacacgtgtagctgtaatttctactaagtgtagatgcttacgcgtcgcgaatgtataatttctactaagtgtagatttttttnnnnnnnnnnaagcttggcgtggatccgatatcaactagatcttgagacaaatggcagtattcatccacaattttaaaagaaaaggggggattggggggtacagtgcaggggaaagaatagtagacataatagcaacagacatacaaactaaag

SEQ ID NO: 15008 - DNA, 301 bp, Artificial Sequence
  Apc.1_NTC.50
  crRNA array
  misc_feature (148)..(157): n is a, c, g, or t
cttggctttatatatcttgtggaaaggacgaaacaccgtaatttctactaagtgtagatgtgatccacacgtgtagctgtaatttctactaagtgtagatattgccgctcgcgcaaaatctaatttctactaagtgtagatttttttnnnnnnnnnnaagcttggcgtggatccgatatcaactagatcttgagacaaatggcagtattcatccacaattttaaaagaaaaggggggattggggggtacagtgcaggggaaagaatagtagacataatagcaacagacatacaaactaaag

SEQ ID NO: 15009 - DNA, 301 bp, Artificial Sequence
  Apc.1_NTC.51
  crRNA array
  misc_feature (148)..(157): n is a, c, g, or t
cttggctttatatatcttgtggaaaggacgaaacaccgtaatttctactaagtgtagatgtgatccacacgtgtagctgtaatttctactaagtgtagattaacgcgcaacacgccaatgtaatttctactaagtgtagatttttttnnnnnnnnnnaagcttggcgtggatccgatatcaactagatcttgagacaaatggcagtattcatccacaattttaaaagaaaaggggggattggggggtacagtgcaggggaaagaatagtagacataatagcaacagacatacaaactaaag

SEQ ID NO: 15010 - DNA, 301 bp, Artificial Sequence
  Apc.1_NTC.6
  crRNA array
  misc_feature (148)..(157): n is a, c, g, or t
cttggctttatatatcttgtggaaaggacgaaacaccgtaatttctactaagtgtagatgtgatccacacgtgtagctgtaatttctactaagtgtagatcgaatcgcgcctacgggaattaatttctactaagtgtagatttttttnnnnnnnnnnaagcttggcgtggatccgatatcaactagatcttgagacaaatggcagtattcatccacaattttaaaagaaaaggggggattggggggtacagtgcaggggaaagaatagtagacataatagcaacagacatacaaactaaag

SEQ ID NO: 15011 - DNA, 301 bp, Artificial Sequence
  Apc.1_NTC.7
  crRNA array
  misc_feature (148)..(157): n is a, c, g, or t
cttggctttatatatcttgtggaaaggacgaaacaccgtaatttctactaagtgtagatgtgatccacacgtgtagctgtaatttctactaagtgtagatcgccgaacggataagactattaatttctactaagtgtagatttttttnnnnnnnnnnaagcttggcgtggatccgatatcaactagatcttgagacaaatggcagtattcatccacaattttaaaagaaaaggggggattggggggtacagtgcaggggaaagaatagtagacataatagcaacagacatacaaactaaag

SEQ ID NO: 15012 - DNA, 301 bp, Artificial Sequence
  Apc.1_NTC.8
  crRNA array
  misc_feature (148)..(157): n is a, c, g, or t
cttggctttatatatcttgtggaaaggacgaaacaccgtaatttctactaagtgtagatgtgatccacacgtgtagctgtaatttctactaagtgtagatcgaccgaggttacgctgggataatttctactaagtgtagatttttttnnnnnnnnnnaagcttggcgtggatccgatatcaactagatcttgagacaaatggcagtattcatccacaattttaaaagaaaaggggggattggggggtacagtgcaggggaaagaatagtagacataatagcaacagacatacaaactaaag

SEQ ID NO: 15013 - DNA, 301 bp, Artificial Sequence
  Apc.1_NTC.9
  crRNA array
  misc_feature (148)..(157): n is a, c, g, or t
cttggctttatatatcttgtggaaaggacgaaacaccgtaatttctactaagtgtagatgtgatccacacgtgtagctgtaatttctactaagtgtagatatcgccgtacggctatggcataatttctactaagtgtagatttttttnnnnnnnnnnaagcttggcgtggatccgatatcaactagatcttgagacaaatggcagtattcatccacaattttaaaagaaaaggggggattggggggtacagtgcaggggaaagaatagtagacataatagcaacagacatacaaactaaag

SEQ ID NO: 15014 - DNA, 301 bp, Artificial Sequence
  Apc.2_NTC.0
  crRNA array
  misc_feature (148)..(157): n is a, c, g, or t
cttggctttatatatcttgtggaaaggacgaaacaccgtaatttctactaagtgtagatcatctgctcgccaagacaaataatttctactaagtgtagattatagcgtcgcgcgctaatttaatttctactaagtgtagatttttttnnnnnnnnnnaagcttggcgtggatccgatatcaactagatcttgagacaaatggcagtattcatccacaattttaaaagaaaaggggggattggggggtacagtgcaggggaaagaatagtagacataatagcaacagacatacaaactaaag

SEQ ID NO: 15015 - DNA, 301 bp, Artificial Sequence
  Apc.2_NTC.1
  crRNA array
  misc_feature (148)..(157): n is a, c, g, or t
cttggctttatatatcttgtggaaaggacgaaacaccgtaatttctactaagtgtagatcatctgctcgccaagacaaataatttctactaagtgtagatcgcgtaaccgttccggctcctaatttctactaagtgtagatttttttnnnnnnnnnnaagcttggcgtggatccgatatcaactagatcttgagacaaatggcagtattcatccacaattttaaaagaaaaggggggattggggggtacagtgcaggggaaagaatagtagacataatagcaacagacatacaaactaaag

SEQ ID NO: 15016 - DNA, 301 bp, Artificial Sequence
  Apc.2_NTC.10
  crRNA array
  misc_feature (148)..(157): n is a, c, g, or t
cttggctttatatatcttgtggaaaggacgaaacaccgtaatttctactaagtgtagatcatctgctcgccaagacaaataatttctactaagtgtagatcgctaagttcgcgcgggccgtaatttctactaagtgtagatttttttnnnnnnnnnnaagcttggcgtggatccgatatcaactagatcttgagacaaatggcagtattcatccacaattttaaaagaaaaggggggattggggggtacagtgcaggggaaagaatagtagacataatagcaacagacatacaaactaaag

SEQ ID NO: 15017 - DNA, 301 bp, Artificial Sequence
  Apc.2_NTC.11
  crRNA array
  misc_feature (148)..(157): n is a, c, g, or t
cttggctttatatatcttgtggaaaggacgaaacaccgtaatttctactaagtgtagatcatctgctcgccaagacaaataatttctactaagtgtagatcgttcgtcgacgaagcaatctaatttctactaagtgtagatttttttnnnnnnnnnnaagcttggcgtggatccgatatcaactagatcttgagacaaatggcagtattcatccacaattttaaaagaaaaggggggattggggggtacagtgcaggggaaagaatagtagacataatagcaacagacatacaaactaaag

SEQ ID NO: 15018 - DNA, 301 bp, Artificial Sequence
  Apc.2_NTC.12
  crRNA array
  misc_feature (148)..(157): n is a, c, g, or t
cttggctttatatatcttgtggaaaggacgaaacaccgtaatttctactaagtgtagatcatctgctcgccaagacaaataatttctactaagtgtagatcgccgacgattaatcaatagtaatttctactaagtgtagatttttttnnnnnnnnnnaagcttggcgtggatccgatatcaactagatcttgagacaaatggcagtattcatccacaattttaaaagaaaaggggggattggggggtacagtgcaggggaaagaatagtagacataatagcaacagacatacaaactaaag

SEQ ID NO: 15019 - DNA, 301 bp, Artificial Sequence
  Apc.2_NTC.13
  crRNA array
  misc_feature (148)..(157): n is a, c, g, or t
cttggctttatatatcttgtggaaaggacgaaacaccgtaatttctactaagtgtagatcatctgctcgccaagacaaataatttctactaagtgtagatgaccgttgtatcgcgatcaataatttctactaagtgtagatttttttnnnnnnnnnnaagcttggcgtggatccgatatcaactagatcttgagacaaatggcagtattcatccacaattttaaaagaaaaggggggattggggggtacagtgcaggggaaagaatagtagacataatagcaacagacatacaaactaaag

SEQ ID NO: 15020 - DNA, 301 bp, Artificial Sequence
  Apc.2_NTC.14
  crRNA array
  misc_feature (148)..(157): n is a, c, g, or t
cttggctttatatatcttgtggaaaggacgaaacaccgtaatttctactaagtgtagatcatctgctcgccaagacaaataatttctactaagtgtagatccgttcgtgcgatagtgttttaatttctactaagtgtagatttttttnnnnnnnnnnaagcttggcgtggatccgatatcaactagatcttgagacaaatggcagtattcatccacaattttaaaagaaaaggggggattggggggtacagtgcaggggaaagaatagtagacataatagcaacagacatacaaactaaag

SEQ ID NO: 15021 - DNA, 301 bp, Artificial Sequence
  Apc.2_NTC.15
  crRNA array
  misc_feature (148)..(157): n is a, c, g, or t
cttggctttatatatcttgtggaaaggacgaaacaccgtaatttctactaagtgtagatcatctgctcgccaagacaaataatttctactaagtgtagatgttgtcgtgccgcgaatttataatttctactaagtgtagatttttttnnnnnnnnnnaagcttggcgtggatccgatatcaactagatcttgagacaaatggcagtattcatccacaattttaaaagaaaaggggggattggggggtacagtgcaggggaaagaatagtagacataatagcaacagacatacaaactaaag

SEQ ID NO: 15022 - DNA, 301 bp, Artificial Sequence
  Apc.2_NTC.16
  crRNA array
  misc_feature (148)..(157): n is a, c, g, or t
cttggctttatatatcttgtggaaaggacgaaacaccgtaatttctactaagtgtagatcatctgctcgccaagacaaataatttctactaagtgtagatcggtacgttagacgaaaatttaatttctactaagtgtagatttttttnnnnnnnnnnaagcttggcgtggatccgatatcaactagatcttgagacaaatggcagtattcatccacaattttaaaagaaaaggggggattggggggtacagtgcaggggaaagaatagtagacataatagcaacagacatacaaactaaag

SEQ ID NO: 15023 - DNA, 301 bp, Artificial Sequence
  Apc.2_NTC.17
  crRNA array
  misc_feature (148)..(157): n is a, c, g, or t
cttggctttatatatcttgtggaaaggacgaaacaccgtaatttctactaagtgtagatcatctgctcgccaagacaaataatttctactaagtgtagattatcgaacgctatcgaacgttaatttctactaagtgtagatttttttnnnnnnnnnnaagcttggcgtggatccgatatcaactagatcttgagacaaatggcagtattcatccacaattttaaaagaaaaggggggattggggggtacagtgcaggggaaagaatagtagacataatagcaacagacatacaaactaaag

SEQ ID NO: 15024 - DNA, 301 bp, Artificial Sequence
  Apc.2_NTC.18
  crRNA array
  misc_feature (148)..(157): n is a, c, g, or t
cttggctttatatatcttgtggaaaggacgaaacaccgtaatttctactaagtgtagatcatctgctcgccaagacaaataatttctactaagtgtagattccggttacgaccggcaaaataatttctactaagtgtagatttttttnnnnnnnnnnaagcttggcgtggatccgatatcaactagatcttgagacaaatggcagtattcatccacaattttaaaagaaaaggggggattggggggtacagtgcaggggaaagaatagtagacataatagcaacagacatacaaactaaag

SEQ ID NO: 15025 - DNA, 301 bp, Artificial Sequence
  Apc.2_NTC.19
  crRNA array
  misc_feature (148)..(157): n is a, c, g, or t
cttggctttatatatcttgtggaaaggacgaaacaccgtaatttctactaagtgtagatcatctgctcgccaagacaaataatttctactaagtgtagatcgtcgtagaacgatacccgataatttctactaagtgtagatttttttnnnnnnnnnnaagcttggcgtggatccgatatcaactagatcttgagacaaatggcagtattcatccacaattttaaaagaaaaggggggattggggggtacagtgcaggggaaagaatagtagacataatagcaacagacatacaaactaaag

SEQ ID NO: 15026 - DNA, 301 bp, Artificial Sequence
  Apc.2_NTC.2
  crRNA array
  misc_feature (148)..(157): n is a, c, g, or t
cttggctttatatatcttgtggaaaggacgaaacaccgtaatttctactaagtgtagatcatctgctcgccaagacaaataatttctactaagtgtagatttatgtcgcgccgcgacccgtaatttctactaagtgtagatttttttnnnnnnnnnnaagcttggcgtggatccgatatcaactagatcttgagacaaatggcagtattcatccacaattttaaaagaaaaggggggattggggggtacagtgcaggggaaagaatagtagacataatagcaacagacatacaaactaaag

SEQ ID NO: 15027 - DNA, 301 bp, Artificial Sequence
  Apc.2_NTC.20
  crRNA array
  misc_feature (148)..(157): n is a, c, g, or t
cttggctttatatatcttgtggaaaggacgaaacaccgtaatttctactaagtgtagatcatctgctcgccaagacaaataatttctactaagtgtagatattccggcgcgaccagaagataatttctactaagtgtagatttttttnnnnnnnnnnaagcttggcgtggatccgatatcaactagatcttgagacaaatggcagtattcatccacaattttaaaagaaaaggggggattggggggtacagtgcaggggaaagaatagtagacataatagcaacagacatacaaactaaag

SEQ ID NO: 15028 - DNA, 301 bp, Artificial Sequence
  Apc.2_NTC.21
  crRNA array
  misc_feature (148)..(157): n is a, c, g, or t
cttggctttatatatcttgtggaaaggacgaaacaccgtaatttctactaagtgtagatcatctgctcgccaagacaaataatttctactaagtgtagatgtataacttcgcgcggtccgtaatttctactaagtgtagatttttttnnnnnnnnnnaagcttggcgtggatccgatatcaactagatcttgagacaaatggcagtattcatccacaattttaaaagaaaaggggggattggggggtacagtgcaggggaaagaatagtagacataatagcaacagacatacaaactaaag

SEQ ID NO: 15029 - DNA, 301 bp, Artificial Sequence
  Apc.2_NTC.22
  crRNA array
  misc_feature (148)..(157): n is a, c, g, or t
cttggctttatatatcttgtggaaaggacgaaacaccgtaatttctactaagtgtagatcatctgctcgccaagacaaataatttctactaagtgtagatgcgcgtcaacgtaatgtgcctaatttctactaagtgtagatttttttnnnnnnnnnnaagcttggcgtggatccgatatcaactagatcttgagacaaatggcagtattcatccacaattttaaaagaaaaggggggattggggggtacagtgcaggggaaagaatagtagacataatagcaacagacatacaaactaaag

SEQ ID NO: 15030 - DNA, 301 bp, Artificial Sequence
  Apc.2_NTC.23
  crRNA array
  misc_feature (148)..(157): n is a, c, g, or t
cttggctttatatatcttgtggaaaggacgaaacaccgtaatttctactaagtgtagatcatctgctcgccaagacaaataatttctactaagtgtagatacgcgctattatcgtaggtgtaatttctactaagtgtagatttttttnnnnnnnnnnaagcttggcgtggatccgatatcaactagatcttgagacaaatggcagtattcatccacaattttaaaagaaaaggggggattggggggtacagtgcaggggaaagaatagtagacataatagcaacagacatacaaactaaag

SEQ ID NO: 15031 - DNA, 301 bp, Artificial Sequence
  Apc.2_NTC.24
  crRNA array
  misc_feature (148)..(157): n is a, c, g, or t
cttggctttatatatcttgtggaaaggacgaaacaccgtaatttctactaagtgtagatcatctgctcgccaagacaaataatttctactaagtgtagatactatcgacgttcgtcccggtaatttctactaagtgtagatttttttnnnnnnnnnnaagcttggcgtggatccgatatcaactagatcttgagacaaatggcagtattcatccacaattttaaaagaaaaggggggattggggggtacagtgcaggggaaagaatagtagacataatagcaacagacatacaaactaaag

SEQ ID NO: 15032 - DNA, 301 bp, Artificial Sequence
  Apc.2_NTC.25
  crRNA array
  misc_feature (148)..(157): n is a, c, g, or t
cttggctttatatatcttgtggaaaggacgaaacaccgtaatttctactaagtgtagatcatctgctcgccaagacaaataatttctactaagtgtagattcgcgttatcgtgccgtgcgtaatttctactaagtgtagatttttttnnnnnnnnnnaagcttggcgtggatccgatatcaactagatcttgagacaaatggcagtattcatccacaattttaaaagaaaaggggggattggggggtacagtgcaggggaaagaatagtagacataatagcaacagacatacaaactaaag

SEQ ID NO: 15033 - DNA, 301 bp, Artificial Sequence
  Apc.2_NTC.26
  crRNA array
  misc_feature (148)..(157): n is a, c, g, or t
cttggctttatatatcttgtggaaaggacgaaacaccgtaatttctactaagtgtagatcatctgctcgccaagacaaataatttctactaagtgtagatcgcgacggcggttttaacactaatttctactaagtgtagatttttttnnnnnnnnnnaagcttggcgtggatccgatatcaactagatcttgagacaaatggcagtattcatccacaattttaaaagaaaaggggggattggggggtacagtgcaggggaaagaatagtagacataatagcaacagacatacaaactaaag

SEQ ID NO: 15034 - DNA, 301 bp, Artificial Sequence
  Apc.2_NTC.27
  crRNA array
  misc_feature (148)..(157): n is a, c, g, or t
cttggctttatatatcttgtggaaaggacgaaacaccgtaatttctactaagtgtagatcatctgctcgccaagacaaataatttctactaagtgtagatgtcgcgttgcgaccggcgcttaatttctactaagtgtagatttttttnnnnnnnnnnaagcttggcgtggatccgatatcaactagatcttgagacaaatggcagtattcatccacaattttaaaagaaaaggggggattggggggtacagtgcaggggaaagaatagtagacataatagcaacagacatacaaactaaag

SEQ ID NO: 15035 - DNA, 301 bp, Artificial Sequence
  Apc.2_NTC.28
  crRNA array
  misc_feature (148)..(157): n is a, c, g, or t
cttggctttatatatcttgtggaaaggacgaaacaccgtaatttctactaagtgtagatcatctgctcgccaagacaaataatttctactaagtgtagataccgctaatcggcgtaaacttaatttctactaagtgtagatttttttnnnnnnnnnnaagcttggcgtggatccgatatcaactagatcttgagacaaatggcagtattcatccacaattttaaaagaaaaggggggattggggggtacagtgcaggggaaagaatagtagacataatagcaacagacatacaaactaaag

SEQ ID NO: 15036 - DNA, 301 bp, Artificial Sequence
  Apc.2_NTC.29
  crRNA array
  misc_feature (148)..(157): n is a, c, g, or t
cttggctttatatatcttgtggaaaggacgaaacaccgtaatttctactaagtgtagatcatctgctcgccaagacaaataatttctactaagtgtagatcgcgatctataccgtctatataatttctactaagtgtagatttttttnnnnnnnnnnaagcttggcgtggatccgatatcaactagatcttgagacaaatggcagtattcatccacaattttaaaagaaaaggggggattggggggtacagtgcaggggaaagaatagtagacataatagcaacagacatacaaactaaag

SEQ ID NO: 15037 - DNA, 301 bp, Artificial Sequence
  Apc.2_NTC.3
  crRNA array
  misc_feature (148)..(157): n is a, c, g, or t
cttggctttatatatcttgtggaaaggacgaaacaccgtaatttctactaagtgtagatcatctgctcgccaagacaaataatttctactaagtgtagattcgacgcgagacgacgtacataatttctactaagtgtagatttttttnnnnnnnnnnaagcttggcgtggatccgatatcaactagatcttgagacaaatggcagtattcatccacaattttaaaagaaaaggggggattggggggtacagtgcaggggaaagaatagtagacataatagcaacagacatacaaactaaag

SEQ ID NO: 15038 - DNA, 301 bp, Artificial Sequence
  Apc.2_NTC.30
  crRNA array
  misc_feature (148)..(157): n is a, c, g, or t
cttggctttatatatcttgtggaaaggacgaaacaccgtaatttctactaagtgtagatcatctgctcgccaagacaaataatttctactaagtgtagatcgatcgtacgggtgtcctaataatttctactaagtgtagatttttttnnnnnnnnnnaagcttggcgtggatccgatatcaactagatcttgagacaaatggcagtattcatccacaattttaaaagaaaaggggggattggggggtacagtgcaggggaaagaatagtagacataatagcaacagacatacaaactaaag

SEQ ID NO: 15039 - DNA, 301 bp, Artificial Sequence
  Apc.2_NTC.31
  crRNA array
  misc_feature (148)..(157): n is a, c, g, or t
cttggctttatatatcttgtggaaaggacgaaacaccgtaatttctactaagtgtagatcatctgctcgccaagacaaataatttctactaagtgtagatgccgaccgcgtgattgtaggtaatttctactaagtgtagatttttttnnnnnnnnnnaagcttggcgtggatccgatatcaactagatcttgagacaaatggcagtattcatccacaattttaaaagaaaaggggggattggggggtacagtgcaggggaaagaatagtagacataatagcaacagacatacaaactaaag

SEQ ID NO: 15040 - DNA, 301 bp, Artificial Sequence
  Apc.2_NTC.32
  crRNA array
  misc_feature (148)..(157): n is a, c, g, or t
cttggctttatatatcttgtggaaaggacgaaacaccgtaatttctactaagtgtagatcatctgctcgccaagacaaataatttctactaagtgtagatgcacgttacgcccgggtcactaatttctactaagtgtagatttttttnnnnnnnnnnaagcttggcgtggatccgatatcaactagatcttgagacaaatggcagtattcatccacaattttaaaagaaaaggggggattggggggtacagtgcaggggaaagaatagtagacataatagcaacagacatacaaactaaag

SEQ ID NO: 15041 - DNA, 301 bp, Artificial Sequence
  Apc.2_NTC.33
  crRNA array
  misc_feature (148)..(157): n is a, c, g, or t
cttggctttatatatcttgtggaaaggacgaaacaccgtaatttctactaagtgtagatcatctgctcgccaagacaaataatttctactaagtgtagattaagcgaccgacgcattcgctaatttctactaagtgtagatttttttnnnnnnnnnnaagcttggcgtggatccgatatcaactagatcttgagacaaatggcagtattcatccacaattttaaaagaaaaggggggattggggggtacagtgcaggggaaagaatagtagacataatagcaacagacatacaaactaaag

SEQ ID NO: 15042 - DNA, 301 bp, Artificial Sequence
  Apc.2_NTC.34
  crRNA array
  misc_feature (148)..(157): n is a, c, g, or t
cttggctttatatatcttgtggaaaggacgaaacaccgtaatttctactaagtgtagatcatctgctcgccaagacaaataatttctactaagtgtagattagcgttcgacacgtgaaactaatttctactaagtgtagatttttttnnnnnnnnnnaagcttggcgtggatccgatatcaactagatcttgagacaaatggcagtattcatccacaattttaaaagaaaaggggggattggggggtacagtgcaggggaaagaatagtagacataatagcaacagacatacaaactaaag

SEQ ID NO: 15043 - DNA, 301 bp, Artificial Sequence
  Apc.2_NTC.35
  crRNA array
  misc_feature (148)..(157): n is a, c, g, or t
cttggctttatatatcttgtggaaaggacgaaacaccgtaatttctactaagtgtagatcatctgctcgccaagacaaataatttctactaagtgtagattggcgcgtaatcgctattcgtaatttctactaagtgtagatttttttnnnnnnnnnnaagcttggcgtggatccgatatcaactagatcttgagacaaatggcagtattcatccacaattttaaaagaaaaggggggattggggggtacagtgcaggggaaagaatagtagacataatagcaacagacatacaaactaaag

SEQ ID NO: 15044 - DNA, 301 bp, Artificial Sequence
  Apc.2_NTC.36
  crRNA array
  misc_feature (148)..(157): n is a, c, g, or t
cttggctttatatatcttgtggaaaggacgaaacaccgtaatttctactaagtgtagatcatctgctcgccaagacaaataatttctactaagtgtagatcaacccgccgtagcgggccttaatttctactaagtgtagatttttttnnnnnnnnnnaagcttggcgtggatccgatatcaactagatcttgagacaaatggcagtattcatccacaattttaaaagaaaaggggggattggggggtacagtgcaggggaaagaatagtagacataatagcaacagacatacaaactaaag

SEQ ID NO: 15045 - DNA, 301 bp, Artificial Sequence
  Apc.2_NTC.37
  crRNA array
  misc_feature (148)..(157): n is a, c, g, or t
cttggctttatatatcttgtggaaaggacgaaacaccgtaatttctactaagtgtagatcatctgctcgccaagacaaataatttctactaagtgtagattttgcgttgacgcgattacttaatttctactaagtgtagatttttttnnnnnnnnnnaagcttggcgtggatccgatatcaactagatcttgagacaaatggcagtattcatccacaattttaaaagaaaaggggggattggggggtacagtgcaggggaaagaatagtagacataatagcaacagacatacaaactaaag

SEQ ID NO: 15046 - DNA, 301 bp, Artificial Sequence
  Apc.2_NTC.38
  crRNA array
  misc_feature (148)..(157): n is a, c, g, or t
cttggctttatatatcttgtggaaaggacgaaacaccgtaatttctactaagtgtagatcatctgctcgccaagacaaataatttctactaagtgtagataacggagcgcgatactaccataatttctactaagtgtagatttttttnnnnnnnnnnaagcttggcgtggatccgatatcaactagatcttgagacaaatggcagtattcatccacaattttaaaagaaaaggggggattggggggtacagtgcaggggaaagaatagtagacataatagcaacagacatacaaactaaag

SEQ ID NO: 15047 - DNA, 301 bp, Artificial Sequence
  Apc.2_NTC.39
  crRNA array
  misc_feature (148)..(157): n is a, c, g, or t
cttggctttatatatcttgtggaaaggacgaaacaccgtaatttctactaagtgtagatcatctgctcgccaagacaaataatttctactaagtgtagatccggacgttataacgtttcttaatttctactaagtgtagatttttttnnnnnnnnnnaagcttggcgtggatccgatatcaactagatcttgagacaaatggcagtattcatccacaattttaaaagaaaaggggggattggggggtacagtgcaggggaaagaatagtagacataatagcaacagacatacaaactaaag

SEQ ID NO: 15048 - DNA, 301 bp, Artificial Sequence
  Apc.2_NTC.4
  crRNA array
  misc_feature (148)..(157): n is a, c, g, or t
cttggctttatatatcttgtggaaaggacgaaacaccgtaatttctactaagtgtagatcatctgctcgccaagacaaataatttctactaagtgtagatatacccgtcgcgaacgtgagtaatttctactaagtgtagatttttttnnnnnnnnnnaagcttggcgtggatccgatatcaactagatcttgagacaaatggcagtattcatccacaattttaaaagaaaaggggggattggggggtacagtgcaggggaaagaatagtagacataatagcaacagacatacaaactaaag

SEQ ID NO: 15049 - DNA, 301 bp, Artificial Sequence
  Apc.2_NTC.40
  crRNA array
  misc_feature (148)..(157): n is a, c, g, or t
cttggctttatatatcttgtggaaaggacgaaacaccgtaatttctactaagtgtagatcatctgctcgccaagacaaataatttctactaagtgtagatattcgcgaacccggccggaataatttctactaagtgtagatttttttnnnnnnnnnnaagcttggcgtggatccgatatcaactagatcttgagacaaatggcagtattcatccacaattttaaaagaaaaggggggattggggggtacagtgcaggggaaagaatagtagacataatagcaacagacatacaaactaaag

SEQ ID NO: 15050 - DNA, 301 bp, Artificial Sequence
  Apc.2_NTC.41
  crRNA array
  misc_feature (148)..(157): n is a, c, g, or t
cttggctttatatatcttgtggaaaggacgaaacaccgtaatttctactaagtgtagatcatctgctcgccaagacaaataatttctactaagtgtagatttgatggcgcgacgcgttattaatttctactaagtgtagatttttttnnnnnnnnnnaagcttggcgtggatccgatatcaactagatcttgagacaaatggcagtattcatccacaattttaaaagaaaaggggggattggggggtacagtgcaggggaaagaatagtagacataatagcaacagacatacaaactaaag

SEQ ID NO: 15051 - DNA, 301 bp, Artificial Sequence
  Apc.2_NTC.42
  crRNA array
  misc_feature (148)..(157): n is a, c, g, or t
cttggctttatatatcttgtggaaaggacgaaacaccgtaatttctactaagtgtagatcatctgctcgccaagacaaataatttctactaagtgtagatggtcaaatcgcggcgataactaatttctactaagtgtagatttttttnnnnnnnnnnaagcttggcgtggatccgatatcaactagatcttgagacaaatggcagtattcatccacaattttaaaagaaaaggggggattggggggtacagtgcaggggaaagaatagtagacataatagcaacagacatacaaactaaag

SEQ ID NO: 15052 - DNA, 301 bp, Artificial Sequence
  Apc.2_NTC.43
  crRNA array
  misc_feature (148)..(157): n is a, c, g, or t
cttggctttatatatcttgtggaaaggacgaaacaccgtaatttctactaagtgtagatcatctgctcgccaagacaaataatttctactaagtgtagatcgactcgcgcattgaactggtaatttctactaagtgtagatttttttnnnnnnnnnnaagcttggcgtggatccgatatcaactagatcttgagacaaatggcagtattcatccacaattttaaaagaaaaggggggattggggggtacagtgcaggggaaagaatagtagacataatagcaacagacatacaaactaaag

SEQ ID NO: 15053 - DNA, 301 bp, Artificial Sequence
  Apc.2_NTC.44
  crRNA array
  misc_feature (148)..(157): n is a, c, g, or t
cttggctttatatatcttgtggaaaggacgaaacaccgtaatttctactaagtgtagatcatctgctcgccaagacaaataatttctactaagtgtagatagcgtcgtacgatttatcgttaatttctactaagtgtagatttttttnnnnnnnnnnaagcttggcgtggatccgatatcaactagatcttgagacaaatggcagtattcatccacaattttaaaagaaaaggggggattggggggtacagtgcaggggaaagaatagtagacataatagcaacagacatacaaactaaag

SEQ ID NO: 15054 - DNA, 301 bp, Artificial Sequence
  Apc.2_NTC.45
  crRNA array
  misc_feature (148)..(157): n is a, c, g, or t
cttggctttatatatcttgtggaaaggacgaaacaccgtaatttctactaagtgtagatcatctgctcgccaagacaaataatttctactaagtgtagatcggaacgcgtgatactagggtaatttctactaagtgtagatttttttnnnnnnnnnnaagcttggcgtggatccgatatcaactagatcttgagacaaatggcagtattcatccacaattttaaaagaaaaggggggattggggggtacagtgcaggggaaagaatagtagacataatagcaacagacatacaaactaaag

SEQ ID NO: 15055 - DNA, 301 bp, Artificial Sequence
  Apc.2_NTC.46
  crRNA array
  misc_feature (148)..(157): n is a, c, g, or t
cttggctttatatatcttgtggaaaggacgaaacaccgtaatttctactaagtgtagatcatctgctcgccaagacaaataatttctactaagtgtagatagcgggtcgtagacgcgcggtaatttctactaagtgtagatttttttnnnnnnnnnnaagcttggcgtggatccgatatcaactagatcttgagacaaatggcagtattcatccacaattttaaaagaaaaggggggattggggggtacagtgcaggggaaagaatagtagacataatagcaacagacatacaaactaaag

SEQ ID NO: 15056 - DNA, 301 bp, Artificial Sequence
  Apc.2_NTC.47
  crRNA array
  misc_feature (148)..(157): n is a, c, g, or t
cttggctttatatatcttgtggaaaggacgaaacaccgtaatttctactaagtgtagatcatctgctcgccaagacaaataatttctactaagtgtagattctcgtatcgcgattgttaataatttctactaagtgtagatttttttnnnnnnnnnnaagcttggcgtggatccgatatcaactagatcttgagacaaatggcagtattcatccacaattttaaaagaaaaggggggattggggggtacagtgcaggggaaagaatagtagacataatagcaacagacatacaaactaaag

SEQ ID NO: 15057 - DNA, 301 bp, Artificial Sequence
  Apc.2_NTC.48
  crRNA array
  misc_feature (148)..(157): n is a, c, g, or t
cttggctttatatatcttgtggaaaggacgaaacaccgtaatttctactaagtgtagatcatctgctcgccaagacaaataatttctactaagtgtagatcggtcgactacggctgttagtaatttctactaagtgtagatttttttnnnnnnnnnnaagcttggcgtggatccgatatcaactagatcttgagacaaatggcagtattcatccacaattttaaaagaaaaggggggattggggggtacagtgcaggggaaagaatagtagacataatagcaacagacatacaaactaaag

SEQ ID NO: 15058 - DNA, 301 bp, Artificial Sequence
  Apc.2_NTC.49
  crRNA array
  misc_feature (148)..(157): n is a, c, g, or t
cttggctttatatatcttgtggaaaggacgaaacaccgtaatttctactaagtgtagatcatctgctcgccaagacaaataatttctactaagtgtagattcggggcgcgtcaactgaattaatttctactaagtgtagatttttttnnnnnnnnnnaagcttggcgtggatccgatatcaactagatcttgagacaaatggcagtattcatccacaattttaaaagaaaaggggggattggggggtacagtgcaggggaaagaatagtagacataatagcaacagacatacaaactaaag

SEQ ID NO: 15059 - DNA, 301 bp, Artificial Sequence
  Apc.2_NTC.5
  crRNA array
  misc_feature (148)..(157): n is a, c, g, or t
cttggctttatatatcttgtggaaaggacgaaacaccgtaatttctactaagtgtagatcatctgctcgccaagacaaataatttctactaagtgtagatgcttacgcgtcgcgaatgtataatttctactaagtgtagatttttttnnnnnnnnnnaagcttggcgtggatccgatatcaactagatcttgagacaaatggcagtattcatccacaattttaaaagaaaaggggggattggggggtacagtgcaggggaaagaatagtagacataatagcaacagacatacaaactaaag

SEQ ID NO: 15060 - DNA, 301 bp, Artificial Sequence
  Apc.2_NTC.50
  crRNA array
  misc_feature (148)..(157): n is a, c, g, or t
cttggctttatatatcttgtggaaaggacgaaacaccgtaatttctactaagtgtagatcatctgctcgccaagacaaataatttctactaagtgtagatattgccgctcgcgcaaaatctaatttctactaagtgtagatttttttnnnnnnnnnnaagcttggcgtggatccgatatcaactagatcttgagacaaatggcagtattcatccacaattttaaaagaaaaggggggattggggggtacagtgcaggggaaagaatagtagacataatagcaacagacatacaaactaaag

SEQ ID NO: 15061 - DNA, 301 bp, Artificial Sequence
  Apc.2_NTC.51
  crRNA array
  misc_feature (148)..(157): n is a, c, g, or t
cttggctttatatatcttgtggaaaggacgaaacaccgtaatttctactaagtgtagatcatctgctcgccaagacaaataatttctactaagtgtagattaacgcgcaacacgccaatgtaatttctactaagtgtagatttttttnnnnnnnnnnaagcttggcgtggatccgatatcaactagatcttgagacaaatggcagtattcatccacaattttaaaagaaaaggggggattggggggtacagtgcaggggaaagaatagtagacataatagcaacagacatacaaactaaag

SEQ ID NO: 15062 - DNA, 301 bp, Artificial Sequence
  Apc.2_NTC.6
  crRNA array
  misc_feature (148)..(157): n is a, c, g, or t
cttggctttatatatcttgtggaaaggacgaaacaccgtaatttctactaagtgtagatcatctgctcgccaagacaaataatttctactaagtgtagatcgaatcgcgcctacgggaattaatttctactaagtgtagatttttttnnnnnnnnnnaagcttggcgtggatccgatatcaactagatcttgagacaaatggcagtattcatccacaattttaaaagaaaaggggggattggggggtacagtgcaggggaaagaatagtagacataatagcaacagacatacaaactaaag

SEQ ID NO: 15063 - DNA, 301 bp, Artificial Sequence
  Apc.2_NTC.7
  crRNA array
  misc_feature (148)..(157): n is a, c, g, or t
cttggctttatatatcttgtggaaaggacgaaacaccgtaatttctactaagtgtagatcatctgctcgccaagacaaataatttctactaagtgtagatcgccgaacggataagactattaatttctactaagtgtagatttttttnnnnnnnnnnaagcttggcgtggatccgatatcaactagatcttgagacaaatggcagtattcatccacaattttaaaagaaaaggggggattggggggtacagtgcaggggaaagaatagtagacataatagcaacagacatacaaactaaag

SEQ ID NO: 15064 - DNA, 301 bp, Artificial Sequence
  Apc.2_NTC.8
  crRNA array
  misc_feature (148)..(157): n is a, c, g, or t
cttggctttatatatcttgtggaaaggacgaaacaccgtaatttctactaagtgtagatcatctgctcgccaagacaaataatttctactaagtgtagatcgaccgaggttacgctgggataatttctactaagtgtagatttttttnnnnnnnnnnaagcttggcgtggatccgatatcaactagatcttgagacaaatggcagtattcatccacaattttaaaagaaaaggggggattggggggtacagtgcaggggaaagaatagtagacataatagcaacagacatacaaactaaag

SEQ ID NO: 15065 - DNA, 301 bp, Artificial Sequence
  Apc.2_NTC.9
  crRNA array
  misc_feature (148)..(157): n is a, c, g, or t
cttggctttatatatcttgtggaaaggacgaaacaccgtaatttctactaagtgtagatcatctgctcgccaagacaaataatttctactaagtgtagatatcgccgtacggctatggcataatttctactaagtgtagatttttttnnnnnnnnnnaagcttggcgtggatccgatatcaactagatcttgagacaaatggcagtattcatccacaattttaaaagaaaaggggggattggggggtacagtgcaggggaaagaatagtagacataatagcaacagacatacaaactaaag

SEQ ID NO: 15066 - DNA, 301 bp, Artificial Sequence
  Apc.3_NTC.0
  crRNA array
  misc_feature (148)..(157): n is a, c, g, or t
cttggctttatatatcttgtggaaaggacgaaacaccgtaatttctactaagtgtagatacgccaatcgacatgatgattaatttctactaagtgtagattatagcgtcgcgcgctaatttaatttctactaagtgtagatttttttnnnnnnnnnnaagcttggcgtggatccgatatcaactagatcttgagacaaatggcagtattcatccacaattttaaaagaaaaggggggattggggggtacagtgcaggggaaagaatagtagacataatagcaacagacatacaaactaaag

SEQ ID NO: 15067 - DNA, 301 bp, Artificial Sequence
  Apc.3_NTC.1
  crRNA array
  misc_feature (148)..(157): n is a, c, g, or t
cttggctttatatatcttgtggaaaggacgaaacaccgtaatttctactaagtgtagatacgccaatcgacatgatgattaatttctactaagtgtagatcgcgtaaccgttccggctcctaatttctactaagtgtagatttttttnnnnnnnnnnaagcttggcgtggatccgatatcaactagatcttgagacaaatggcagtattcatccacaattttaaaagaaaaggggggattggggggtacagtgcaggggaaagaatagtagacataatagcaacagacatacaaactaaag

SEQ ID NO: 15068 - DNA, 301 bp, Artificial Sequence
  Apc.3_NTC.10
  crRNA array
  misc_feature (148)..(157): n is a, c, g, or t
cttggctttatatatcttgtggaaaggacgaaacaccgtaatttctactaagtgtagatacgccaatcgacatgatgattaatttctactaagtgtagatcgctaagttcgcgcgggccgtaatttctactaagtgtagatttttttnnnnnnnnnnaagcttggcgtggatccgatatcaactagatcttgagacaaatggcagtattcatccacaattttaaaagaaaaggggggattggggggtacagtgcaggggaaagaatagtagacataatagcaacagacatacaaactaaag

SEQ ID NO: 15069 - DNA, 301 bp, Artificial Sequence
  Apc.3_NTC.11
  crRNA array
  misc_feature (148)..(157): n is a, c, g, or t
cttggctttatatatcttgtggaaaggacgaaacaccgtaatttctactaagtgtagatacgccaatcgacatgatgattaatttctactaagtgtagatcgttcgtcgacgaagcaatctaatttctactaagtgtagatttttttnnnnnnnnnnaagcttggcgtggatccgatatcaactagatcttgagacaaatggcagtattcatccacaattttaaaagaaaaggggggattggggggtacagtgcaggggaaagaatagtagacataatagcaacagacatacaaactaaag

SEQ ID NO: 15070 - DNA, 301 bp, Artificial Sequence
  Apc.3_NTC.12
  crRNA array
  misc_feature (148)..(157): n is a, c, g, or t
cttggctttatatatcttgtggaaaggacgaaacaccgtaatttctactaagtgtagatacgccaatcgacatgatgattaatttctactaagtgtagatcgccgacgattaatcaatagtaatttctactaagtgtagatttttttnnnnnnnnnnaagcttggcgtggatccgatatcaactagatcttgagacaaatggcagtattcatccacaattttaaaagaaaaggggggattggggggtacagtgcaggggaaagaatagtagacataatagcaacagacatacaaactaaag

SEQ ID NO: 15071 - DNA, 301 bp, Artificial Sequence
  Apc.3_NTC.13
  crRNA array
  misc_feature (148)..(157): n is a, c, g, or t
cttggctttatatatcttgtggaaaggacgaaacaccgtaatttctactaagtgtagatacgccaatcgacatgatgattaatttctactaagtgtagatgaccgttgtatcgcgatcaataatttctactaagtgtagatttttttnnnnnnnnnnaagcttggcgtggatccgatatcaactagatcttgagacaaatggcagtattcatccacaattttaaaagaaaaggggggattggggggtacagtgcaggggaaagaatagtagacataatagcaacagacatacaaactaaag

SEQ ID NO: 15072 - DNA, 301 bp, Artificial Sequence
  Apc.3_NTC.14
  crRNA array
  misc_feature (148)..(157): n is a, c, g, or t
cttggctttatatatcttgtggaaaggacgaaacaccgtaatttctactaagtgtagatacgccaatcgacatgatgattaatttctactaagtgtagatccgttcgtgcgatagtgttttaatttctactaagtgtagatttttttnnnnnnnnnnaagcttggcgtggatccgatatcaactagatcttgagacaaatggcagtattcatccacaattttaaaagaaaaggggggattggggggtacagtgcaggggaaagaatagtagacataatagcaacagacatacaaactaaag

SEQ ID NO: 15073 - DNA, 301 bp, Artificial Sequence
  Apc.3_NTC.15
  crRNA array
  misc_feature (148)..(157): n is a, c, g, or t
cttggctttatatatcttgtggaaaggacgaaacaccgtaatttctactaagtgtagatacgccaatcgacatgatgattaatttctactaagtgtagatgttgtcgtgccgcgaatttataatttctactaagtgtagatttttttnnnnnnnnnnaagcttggcgtggatccgatatcaactagatcttgagacaaatggcagtattcatccacaattttaaaagaaaaggggggattggggggtacagtgcaggggaaagaatagtagacataatagcaacagacatacaaactaaag

SEQ ID NO: 15074 - DNA, 301 bp, Artificial Sequence
  Apc.3_NTC.16
  crRNA array
  misc_feature (148)..(157): n is a, c, g, or t
cttggctttatatatcttgtggaaaggacgaaacaccgtaatttctactaagtgtagatacgccaatcgacatgatgattaatttctactaagtgtagatcggtacgttagacgaaaatttaatttctactaagtgtagatttttttnnnnnnnnnnaagcttggcgtggatccgatatcaactagatcttgagacaaatggcagtattcatccacaattttaaaagaaaaggggggattggggggtacagtgcaggggaaagaatagtagacataatagcaacagacatacaaactaaag

SEQ ID NO: 15075 - DNA, 301 bp, Artificial Sequence
  Apc.3_NTC.17
  crRNA array
  misc_feature (148)..(157): n is a, c, g, or t
cttggctttatatatcttgtggaaaggacgaaacaccgtaatttctactaagtgtagatacgccaatcgacatgatgattaatttctactaagtgtagattatcgaacgctatcgaacgttaatttctactaagtgtagatttttttnnnnnnnnnnaagcttggcgtggatccgatatcaactagatcttgagacaaatggcagtattcatccacaattttaaaagaaaaggggggattggggggtacagtgcaggggaaagaatagtagacataatagcaacagacatacaaactaaag

SEQ ID NO: 15076 - DNA, 301 bp, Artificial Sequence
  Apc.3_NTC.18
  crRNA array
  misc_feature (148)..(157): n is a, c, g, or t
cttggctttatatatcttgtggaaaggacgaaacaccgtaatttctactaagtgtagatacgccaatcgacatgatgattaatttctactaagtgtagattccggttacgaccggcaaaataatttctactaagtgtagatttttttnnnnnnnnnnaagcttggcgtggatccgatatcaactagatcttgagacaaatggcagtattcatccacaattttaaaagaaaaggggggattggggggtacagtgcaggggaaagaatagtagacataatagcaacagacatacaaactaaag

SEQ ID NO: 15077 - DNA, 301 bp, Artificial Sequence
  Apc.3_NTC.19
  crRNA array
  misc_feature (148)..(157): n is a, c, g, or t
cttggctttatatatcttgtggaaaggacgaaacaccgtaatttctactaagtgtagatacgccaatcgacatgatgattaatttctactaagtgtagatcgtcgtagaacgatacccgataatttctactaagtgtagatttttttnnnnnnnnnnaagcttggcgtggatccgatatcaactagatcttgagacaaatggcagtattcatccacaattttaaaagaaaaggggggattggggggtacagtgcaggggaaagaatagtagacataatagcaacagacatacaaactaaag

SEQ ID NO: 15078 - DNA, 301 bp, Artificial Sequence
  Apc.3_NTC.2
  crRNA array
  misc_feature (148)..(157): n is a, c, g, or t
cttggctttatatatcttgtggaaaggacgaaacaccgtaatttctactaagtgtagatacgccaatcgacatgatgattaatttctactaagtgtagatttatgtcgcgccgcgacccgtaatttctactaagtgtagatttttttnnnnnnnnnnaagcttggcgtggatccgatatcaactagatcttgagacaaatggcagtattcatccacaattttaaaagaaaaggggggattggggggtacagtgcaggggaaagaatagtagacataatagcaacagacatacaaactaaag

SEQ ID NO: 15079 - DNA, 301 bp, Artificial Sequence
  Apc.3_NTC.20
  crRNA array
  misc_feature (148)..(157): n is a, c, g, or t
cttggctttatatatcttgtggaaaggacgaaacaccgtaatttctactaagtgtagatacgccaatcgacatgatgattaatttctactaagtgtagatattccggcgcgaccagaagataatttctactaagtgtagatttttttnnnnnnnnnnaagcttggcgtggatccgatatcaactagatcttgagacaaatggcagtattcatccacaattttaaaagaaaaggggggattggggggtacagtgcaggggaaagaatagtagacataatagcaacagacatacaaactaaag

SEQ ID NO: 15080 - DNA, 301 bp, Artificial Sequence
  Apc.3_NTC.21
  crRNA array
  misc_feature (148)..(157): n is a, c, g, or t
cttggctttatatatcttgtggaaaggacgaaacaccgtaatttctactaagtgtagatacgccaatcgacatgatgattaatttctactaagtgtagatgtataacttcgcgcggtccgtaatttctactaagtgtagatttttttnnnnnnnnnnaagcttggcgtggatccgatatcaactagatcttgagacaaatggcagtattcatccacaattttaaaagaaaaggggggattggggggtacagtgcaggggaaagaatagtagacataatagcaacagacatacaaactaaag

SEQ ID NO: 15081 - DNA, 301 bp, Artificial Sequence
  Apc.3_NTC.22
  crRNA array
  misc_feature (148)..(157): n is a, c, g, or t
cttggctttatatatcttgtggaaaggacgaaacaccgtaatttctactaagtgtagatacgccaatcgacatgatgattaatttctactaagtgtagatgcgcgtcaacgtaatgtgcctaatttctactaagtgtagatttttttnnnnnnnnnnaagcttggcgtggatccgatatcaactagatcttgagacaaatggcagtattcatccacaattttaaaagaaaaggggggattggggggtacagtgcaggggaaagaatagtagacataatagcaacagacatacaaactaaag

SEQ ID NO: 15082 - DNA, 301 bp, Artificial Sequence
  Apc.3_NTC.23
  crRNA array
  misc_feature (148)..(157): n is a, c, g, or t
cttggctttatatatcttgtggaaaggacgaaacaccgtaatttctactaagtgtagatacgccaatcgacatgatgattaatttctactaagtgtagatacgcgctattatcgtaggtgtaatttctactaagtgtagatttttttnnnnnnnnnnaagcttggcgtggatccgatatcaactagatcttgagacaaatggcagtattcatccacaattttaaaagaaaaggggggattggggggtacagtgcaggggaaagaatagtagacataatagcaacagacatacaaactaaag

SEQ ID NO: 15083 - DNA, 301 bp, Artificial Sequence
  Apc.3_NTC.24
  crRNA array
  misc_feature (148)..(157): n is a, c, g, or t
cttggctttatatatcttgtggaaaggacgaaacaccgtaatttctactaagtgtagatacgccaatcgacatgatgattaatttctactaagtgtagatactatcgacgttcgtcccggtaatttctactaagtgtagatttttttnnnnnnnnnnaagcttggcgtggatccgatatcaactagatcttgagacaaatggcagtattcatccacaattttaaaagaaaaggggggattggggggtacagtgcaggggaaagaatagtagacataatagcaacagacatacaaactaaag

SEQ ID NO: 15084 - DNA, 301 bp, Artificial Sequence
  Apc.3_NTC.25
  crRNA array
  misc_feature (148)..(157): n is a, c, g, or t
cttggctttatatatcttgtggaaaggacgaaacaccgtaatttctactaagtgtagatacgccaatcgacatgatgattaatttctactaagtgtagattcgcgttatcgtgccgtgcgtaatttctactaagtgtagatttttttnnnnnnnnnnaagcttggcgtggatccgatatcaactagatcttgagacaaatggcagtattcatccacaattttaaaagaaaaggggggattggggggtacagtgcaggggaaagaatagtagacataatagcaacagacatacaaactaaag

SEQ ID NO: 15085 - DNA, 301 bp, Artificial Sequence
  Apc.3_NTC.26
  crRNA array
  misc_feature (148)..(157): n is a, c, g, or t
cttggctttatatatcttgtggaaaggacgaaacaccgtaatttctactaagtgtagatacgccaatcgacatgatgattaatttctactaagtgtagatcgcgacggcggttttaacactaatttctactaagtgtagatttttttnnnnnnnnnnaagcttggcgtggatccgatatcaactagatcttgagacaaatggcagtattcatccacaattttaaaagaaaaggggggattggggggtacagtgcaggggaaagaatagtagacataatagcaacagacatacaaactaaag

SEQ ID NO: 15086 - DNA, 301 bp, Artificial Sequence
  Apc.3_NTC.27
  crRNA array
  misc_feature (148)..(157): n is a, c, g, or t
cttggctttatatatcttgtggaaaggacgaaacaccgtaatttctactaagtgtagatacgccaatcgacatgatgattaatttctactaagtgtagatgtcgcgttgcgaccggcgcttaatttctactaagtgtagatttttttnnnnnnnnnnaagcttggcgtggatccgatatcaactagatcttgagacaaatggcagtattcatccacaattttaaaagaaaaggggggattggggggtacagtgcaggggaaagaatagtagacataatagcaacagacatacaaactaaag

SEQ ID NO: 15087 - DNA, 301 bp, Artificial Sequence
  Apc.3_NTC.28
  crRNA array
  misc_feature (148)..(157): n is a, c, g, or t
cttggctttatatatcttgtggaaaggacgaaacaccgtaatttctactaagtgtagatacgccaatcgacatgatgattaatttctactaagtgtagataccgctaatcggcgtaaacttaatttctactaagtgtagatttttttnnnnnnnnnnaagcttggcgtggatccgatatcaactagatcttgagacaaatggcagtattcatccacaattttaaaagaaaaggggggattggggggtacagtgcaggggaaagaatagtagacataatagcaacagacatacaaactaaag

SEQ ID NO: 15088 - DNA, 301 bp, Artificial Sequence
  Apc.3_NTC.29
  crRNA array
  misc_feature (148)..(157): n is a, c, g, or t
cttggctttatatatcttgtggaaaggacgaaacaccgtaatttctactaagtgtagatacgccaatcgacatgatgattaatttctactaagtgtagatcgcgatctataccgtctatataatttctactaagtgtagatttttttnnnnnnnnnnaagcttggcgtggatccgatatcaactagatcttgagacaaatggcagtattcatccacaattttaaaagaaaaggggggattggggggtacagtgcaggggaaagaatagtagacataatagcaacagacatacaaactaaag

SEQ ID NO: 15089 - DNA, 301 bp, Artificial Sequence
  Apc.3_NTC.3
  crRNA array
  misc_feature (148)..(157): n is a, c, g, or t
cttggctttatatatcttgtggaaaggacgaaacaccgtaatttctactaagtgtagatacgccaatcgacatgatgattaatttctactaagtgtagattcgacgcgagacgacgtacataatttctactaagtgtagatttttttnnnnnnnnnnaagcttggcgtggatccgatatcaactagatcttgagacaaatggcagtattcatccacaattttaaaagaaaaggggggattggggggtacagtgcaggggaaagaatagtagacataatagcaacagacatacaaactaaag

SEQ ID NO: 15090 - DNA, 301 bp, Artificial Sequence
  Apc.3_NTC.30
  crRNA array
  misc_feature (148)..(157): n is a, c, g, or t
cttggctttatatatcttgtggaaaggacgaaacaccgtaatttctactaagtgtagatacgccaatcgacatgatgattaatttctactaagtgtagatcgatcgtacgggtgtcctaataatttctactaagtgtagatttttttnnnnnnnnnnaagcttggcgtggatccgatatcaactagatcttgagacaaatggcagtattcatccacaattttaaaagaaaaggggggattggggggtacagtgcaggggaaagaatagtagacataatagcaacagacatacaaactaaag

SEQ ID NO: 15091 - DNA, 301 bp, Artificial Sequence
  Apc.3_NTC.31
  crRNA array
  misc_feature (148)..(157): n is a, c, g, or t
cttggctttatatatcttgtggaaaggacgaaacaccgtaatttctactaagtgtagatacgccaatcgacatgatgattaatttctactaagtgtagatgccgaccgcgtgattgtaggtaatttctactaagtgtagatttttttnnnnnnnnnnaagcttggcgtggatccgatatcaactagatcttgagacaaatggcagtattcatccacaattttaaaagaaaaggggggattggggggtacagtgcaggggaaagaatagtagacataatagcaacagacatacaaactaaag

SEQ ID NO: 15092 - DNA, 301 bp, Artificial Sequence
  Apc.3_NTC.32
  crRNA array
  misc_feature (148)..(157): n is a, c, g, or t
cttggctttatatatcttgtggaaaggacgaaacaccgtaatttctactaagtgtagatacgccaatcgacatgatgattaatttctactaagtgtagatgcacgttacgcccgggtcactaatttctactaagtgtagatttttttnnnnnnnnnnaagcttggcgtggatccgatatcaactagatcttgagacaaatggcagtattcatccacaattttaaaagaaaaggggggattggggggtacagtgcaggggaaagaatagtagacataatagcaacagacatacaaactaaag

SEQ ID NO: 15093 - DNA, 301 bp, Artificial Sequence
  Apc.3_NTC.33
  crRNA array
  misc_feature (148)..(157): n is a, c, g, or t
cttggctttatatatcttgtggaaaggacgaaacaccgtaatttctactaagtgtagatacgccaatcgacatgatgattaatttctactaagtgtagattaagcgaccgacgcattcgctaatttctactaagtgtagatttttttnnnnnnnnnnaagcttggcgtggatccgatatcaactagatcttgagacaaatggcagtattcatccacaattttaaaagaaaaggggggattggggggtacagtgcaggggaaagaatagtagacataatagcaacagacatacaaactaaag

SEQ ID NO: 15094 - DNA, 301 bp, Artificial Sequence
  Apc.3_NTC.34
  crRNA array
  misc_feature (148)..(157): n is a, c, g, or t
cttggctttatatatcttgtggaaaggacgaaacaccgtaatttctactaagtgtagatacgccaatcgacatgatgattaatttctactaagtgtagattagcgttcgacacgtgaaactaatttctactaagtgtagatttttttnnnnnnnnnnaagcttggcgtggatccgatatcaactagatcttgagacaaatggcagtattcatccacaattttaaaagaaaaggggggattggggggtacagtgcaggggaaagaatagtagacataatagcaacagacatacaaactaaag

SEQ ID NO: 15095 - DNA, 301 bp, Artificial Sequence
  Apc.3_NTC.35
  crRNA array
  misc_feature (148)..(157): n is a, c, g, or t
cttggctttatatatcttgtggaaaggacgaaacaccgtaatttctactaagtgtagatacgccaatcgacatgatgattaatttctactaagtgtagattggcgcgtaatcgctattcgtaatttctactaagtgtagatttttttnnnnnnnnnnaagcttggcgtggatccgatatcaactagatcttgagacaaatggcagtattcatccacaattttaaaagaaaaggggggattggggggtacagtgcaggggaaagaatagtagacataatagcaacagacatacaaactaaag

SEQ ID NO: 15096 - DNA, 301 bp, Artificial Sequence
  Apc.3_NTC.36
  crRNA array
  misc_feature (148)..(157): n is a, c, g, or t
cttggctttatatatcttgtggaaaggacgaaacaccgtaatttctactaagtgtagatacgccaatcgacatgatgattaatttctactaagtgtagatcaacccgccgtagcgggccttaatttctactaagtgtagatttttttnnnnnnnnnnaagcttggcgtggatccgatatcaactagatcttgagacaaatggcagtattcatccacaattttaaaagaaaaggggggattggggggtacagtgcaggggaaagaatagtagacataatagcaacagacatacaaactaaag

SEQ ID NO: 15097 - DNA, 301 bp, Artificial Sequence
  Apc.3_NTC.37
  crRNA array
  misc_feature (148)..(157): n is a, c, g, or t
cttggctttatatatcttgtggaaaggacgaaacaccgtaatttctactaagtgtagatacgccaatcgacatgatgattaatttctactaagtgtagattttgcgttgacgcgattacttaatttctactaagtgtagatttttttnnnnnnnnnnaagcttggcgtggatccgatatcaactagatcttgagacaaatggcagtattcatccacaattttaaaagaaaaggggggattggggggtacagtgcaggggaaagaatagtagacataatagcaacagacatacaaactaaag

SEQ ID NO: 15098 - DNA, 301 bp, Artificial Sequence
  Apc.3_NTC.38
  crRNA array
  misc_feature (148)..(157): n is a, c, g, or t
cttggctttatatatcttgtggaaaggacgaaacaccgtaatttctactaagtgtagatacgccaatcgacatgatgattaatttctactaagtgtagataacggagcgcgatactaccataatttctactaagtgtagatttttttnnnnnnnnnnaagcttggcgtggatccgatatcaactagatcttgagacaaatggcagtattcatccacaattttaaaagaaaaggggggattggggggtacagtgcaggggaaagaatagtagacataatagcaacagacatacaaactaaag

SEQ ID NO: 15099 - DNA, 301 bp, Artificial Sequence
  Apc.3_NTC.39
  crRNA array
  misc_feature (148)..(157): n is a, c, g, or t
cttggctttatatatcttgtggaaaggacgaaacaccgtaatttctactaagtgtagatacgccaatcgacatgatgattaatttctactaagtgtagatccggacgttataacgtttcttaatttctactaagtgtagatttttttnnnnnnnnnnaagcttggcgtggatccgatatcaactagatcttgagacaaatggcagtattcatccacaattttaaaagaaaaggggggattggggggtacagtgcaggggaaagaatagtagacataatagcaacagacatacaaactaaag

SEQ ID NO: 15100 - DNA, 301 bp, Artificial Sequence
  Apc.3_NTC.4
  crRNA array
  misc_feature (148)..(157): n is a, c, g, or t
cttggctttatatatcttgtggaaaggacgaaacaccgtaatttctactaagtgtagatacgccaatcgacatgatgattaatttctactaagtgtagatatacccgtcgcgaacgtgagtaatttctactaagtgtagatttttttnnnnnnnnnnaagcttggcgtggatccgatatcaactagatcttgagacaaatggcagtattcatccacaattttaaaagaaaaggggggattggggggtacagtgcaggggaaagaatagtagacataatagcaacagacatacaaactaaag

SEQ ID NO: 15101 - DNA, 301 bp, Artificial Sequence
  Apc.3_NTC.40
  crRNA array
  misc_feature (148)..(157): n is a, c, g, or t
cttggctttatatatcttgtggaaaggacgaaacaccgtaatttctactaagtgtagatacgccaatcgacatgatgattaatttctactaagtgtagatattcgcgaacccggccggaataatttctactaagtgtagatttttttnnnnnnnnnnaagcttggcgtggatccgatatcaactagatcttgagacaaatggcagtattcatccacaattttaaaagaaaaggggggattggggggtacagtgcaggggaaagaatagtagacataatagcaacagacatacaaactaaag

SEQ ID NO: 15102 - DNA, 301 bp, Artificial Sequence
  Apc.3_NTC.41
  crRNA array
  misc_feature (148)..(157): n is a, c, g, or t
cttggctttatatatcttgtggaaaggacgaaacaccgtaatttctactaagtgtagatacgccaatcgacatgatgattaatttctactaagtgtagatttgatggcgcgacgcgttattaatttctactaagtgtagatttttttnnnnnnnnnnaagcttggcgtggatccgatatcaactagatcttgagacaaatggcagtattcatccacaattttaaaagaaaaggggggattggggggtacagtgcaggggaaagaatagtagacataatagcaacagacatacaaactaaag

SEQ ID NO: 15103 - DNA, 301 bp, Artificial Sequence
  Apc.3_NTC.42
  crRNA array
  misc_feature (148)..(157): n is a, c, g, or t
cttggctttatatatcttgtggaaaggacgaaacaccgtaatttctactaagtgtagatacgccaatcgacatgatgattaatttctactaagtgtagatggtcaaatcgcggcgataactaatttctactaagtgtagatttttttnnnnnnnnnnaagcttggcgtggatccgatatcaactagatcttgagacaaatggcagtattcatccacaattttaaaagaaaaggggggattggggggtacagtgcaggggaaagaatagtagacataatagcaacagacatacaaactaaag

SEQ ID NO: 15104 - DNA, 301 bp, Artificial Sequence
  Apc.3_NTC.43
  crRNA array
  misc_feature (148)..(157): n is a, c, g, or t
cttggctttatatatcttgtggaaaggacgaaacaccgtaatttctactaagtgtagatacgccaatcgacatgatgattaatttctactaagtgtagatcgactcgcgcattgaactggtaatttctactaagtgtagatttttttnnnnnnnnnnaagcttggcgtggatccgatatcaactagatcttgagacaaatggcagtattcatccacaattttaaaagaaaaggggggattggggggtacagtgcaggggaaagaatagtagacataatagcaacagacatacaaactaaag

SEQ ID NO: 15105 - DNA, 301 bp, Artificial Sequence
  Apc.3_NTC.44
  crRNA array
  misc_feature (148)..(157): n is a, c, g, or t
cttggctttatatatcttgtggaaaggacgaaacaccgtaatttctactaagtgtagatacgccaatcgacatgatgattaatttctactaagtgtagatagcgtcgtacgatttatcgttaatttctactaagtgtagatttttttnnnnnnnnnnaagcttggcgtggatccgatatcaactagatcttgagacaaatggcagtattcatccacaattttaaaagaaaaggggggattggggggtacagtgcaggggaaagaatagtagacataatagcaacagacatacaaactaaag

SEQ ID NO: 15106 - DNA, 301 bp, Artificial Sequence
  Apc.3_NTC.45
  crRNA array
  misc_feature (148)..(157): n is a, c, g, or t
cttggctttatatatcttgtggaaaggacgaaacaccgtaatttctactaagtgtagatacgccaatcgacatgatgattaatttctactaagtgtagatcggaacgcgtgatactagggtaatttctactaagtgtagatttttttnnnnnnnnnnaagcttggcgtggatccgatatcaactagatcttgagacaaatggcagtattcatccacaattttaaaagaaaaggggggattggggggtacagtgcaggggaaagaatagtagacataatagcaacagacatacaaactaaag

SEQ ID NO: 15107 - DNA, 301 bp, Artificial Sequence
  Apc.3_NTC.46
  crRNA array
  misc_feature (148)..(157): n is a, c, g, or t
cttggctttatatatcttgtggaaaggacgaaacaccgtaatttctactaagtgtagatacgccaatcgacatgatgattaatttctactaagtgtagatagcgggtcgtagacgcgcggtaatttctactaagtgtagatttttttnnnnnnnnnnaagcttggcgtggatccgatatcaactagatcttgagacaaatggcagtattcatccacaattttaaaagaaaaggggggattggggggtacagtgcaggggaaagaatagtagacataatagcaacagacatacaaactaaag

SEQ ID NO: 15108 - DNA, 301 bp, Artificial Sequence
  Apc.3_NTC.47
  crRNA array
  misc_feature (148)..(157): n is a, c, g, or t
cttggctttatatatcttgtggaaaggacgaaacaccgtaatttctactaagtgtagatacgccaatcgacatgatgattaatttctactaagtgtagattctcgtatcgcgattgttaataatttctactaagtgtagatttttttnnnnnnnnnnaagcttggcgtggatccgatatcaactagatcttgagacaaatggcagtattcatccacaattttaaaagaaaaggggggattggggggtacagtgcaggggaaagaatagtagacataatagcaacagacatacaaactaaag

SEQ ID NO: 15109 - DNA, 301 bp, Artificial Sequence
  Apc.3_NTC.48
  crRNA array
  misc_feature (148)..(157): n is a, c, g, or t
cttggctttatatatcttgtggaaaggacgaaacaccgtaatttctactaagtgtagatacgccaatcgacatgatgattaatttctactaagtgtagatcggtcgactacggctgttagtaatttctactaagtgtagatttttttnnnnnnnnnnaagcttggcgtggatccgatatcaactagatcttgagacaaatggcagtattcatccacaattttaaaagaaaaggggggattggggggtacagtgcaggggaaagaatagtagacataatagcaacagacatacaaactaaag

SEQ ID NO: 15110 - DNA, 301 bp, Artificial Sequence
  Apc.3_NTC.49
  crRNA array
  misc_feature (148)..(157): n is a, c, g, or t
cttggctttatatatcttgtggaaaggacgaaacaccgtaatttctactaagtgtagatacgccaatcgacatgatgattaatttctactaagtgtagattcggggcgcgtcaactgaattaatttctactaagtgtagatttttttnnnnnnnnnnaagcttggcgtggatccgatatcaactagatcttgagacaaatggcagtattcatccacaattttaaaagaaaaggggggattggggggtacagtgcaggggaaagaatagtagacataatagcaacagacatacaaactaaag

SEQ ID NO: 15111 - DNA, 301 bp, Artificial Sequence
  Apc.3_NTC.5
  crRNA array
  misc_feature (148)..(157): n is a, c, g, or t
cttggctttatatatcttgtggaaaggacgaaacaccgtaatttctactaagtgtagatacgccaatcgacatgatgattaatttctactaagtgtagatgcttacgcgtcgcgaatgtataatttctactaagtgtagatttttttnnnnnnnnnnaagcttggcgtggatccgatatcaactagatcttgagacaaatggcagtattcatccacaattttaaaagaaaaggggggattggggggtacagtgcaggggaaagaatagtagacataatagcaacagacatacaaactaaag

SEQ ID NO: 15112 - DNA, 301 bp, Artificial Sequence
  Apc.3_NTC.50
  crRNA array
  misc_feature (148)..(157): n is a, c, g, or t
cttggctttatatatcttgtggaaaggacgaaacaccgtaatttctactaagtgtagatacgccaatcgacatgatgattaatttctactaagtgtagatattgccgctcgcgcaaaatctaatttctactaagtgtagatttttttnnnnnnnnnnaagcttggcgtggatccgatatcaactagatcttgagacaaatggcagtattcatccacaattttaaaagaaaaggggggattggggggtacagtgcaggggaaagaatagtagacataatagcaacagacatacaaactaaag

SEQ ID NO: 15113 - DNA, 301 bp, Artificial Sequence
  Apc.3_NTC.51
  crRNA array
  misc_feature (148)..(157): n is a, c, g, or t
cttggctttatatatcttgtggaaaggacgaaacaccgtaatttctactaagtgtagatacgccaatcgacatgatgattaatttctactaagtgtagattaacgcgcaacacgccaatgtaatttctactaagtgtagatttttttnnnnnnnnnnaagcttggcgtggatccgatatcaactagatcttgagacaaatggcagtattcatccacaattttaaaagaaaaggggggattggggggtacagtgcaggggaaagaatagtagacataatagcaacagacatacaaactaaag

SEQ ID NO: 15114 - DNA, 301 bp, Artificial Sequence
  Apc.3_NTC.6
  crRNA array
  misc_feature (148)..(157): n is a, c, g, or t
cttggctttatatatcttgtggaaaggacgaaacaccgtaatttctactaagtgtagatacgccaatcgacatgatgattaatttctactaagtgtagatcgaatcgcgcctacgggaattaatttctactaagtgtagatttttttnnnnnnnnnnaagcttggcgtggatccgatatcaactagatcttgagacaaatggcagtattcatccacaattttaaaagaaaaggggggattggggggtacagtgcaggggaaagaatagtagacataatagcaacagacatacaaactaaag

SEQ ID NO: 15115 - DNA, 301 bp, Artificial Sequence
  Apc.3_NTC.7
  crRNA array
  misc_feature (148)..(157): n is a, c, g, or t
cttggctttatatatcttgtggaaaggacgaaacaccgtaatttctactaagtgtagatacgccaatcgacatgatgattaatttctactaagtgtagatcgccgaacggataagactattaatttctactaagtgtagatttttttnnnnnnnnnnaagcttggcgtggatccgatatcaactagatcttgagacaaatggcagtattcatccacaattttaaaagaaaaggggggattggggggtacagtgcaggggaaagaatagtagacataatagcaacagacatacaaactaaag

SEQ ID NO: 15116 - DNA, 301 bp, Artificial Sequence
  Apc.3_NTC.8
  crRNA array
  misc_feature (148)..(157): n is a, c, g, or t
cttggctttatatatcttgtggaaaggacgaaacaccgtaatttctactaagtgtagatacgccaatcgacatgatgattaatttctactaagtgtagatcgaccgaggttacgctgggataatttctactaagtgtagatttttttnnnnnnnnnnaagcttggcgtggatccgatatcaactagatcttgagacaaatggcagtattcatccacaattttaaaagaaaaggggggattggggggtacagtgcaggggaaagaatagtagacataatagcaacagacatacaaactaaag

SEQ ID NO: 15117 - DNA, 301 bp, Artificial Sequence
  Apc.3_NTC.9
  crRNA array
  misc_feature (148)..(157): n is a, c, g, or t
cttggctttatatatcttgtggaaaggacgaaacaccgtaatttctactaagtgtagatacgccaatcgacatgatgattaatttctactaagtgtagatatcgccgtacggctatggcataatttctactaagtgtagatttttttnnnnnnnnnnaagcttggcgtggatccgatatcaactagatcttgagacaaatggcagtattcatccacaattttaaaagaaaaggggggattggggggtacagtgcaggggaaagaatagtagacataatagcaacagacatacaaactaaag

SEQ ID NO: 15118 - DNA, 301 bp, Artificial Sequence
  Apc.4_NTC.0
  crRNA array
  misc_feature (148)..(157): n is a, c, g, or t
cttggctttatatatcttgtggaaaggacgaaacaccgtaatttctactaagtgtagatcaccaggggatgatgtgccctaatttctactaagtgtagattatagcgtcgcgcgctaatttaatttctactaagtgtagatttttttnnnnnnnnnnaagcttggcgtggatccgatatcaactagatcttgagacaaatggcagtattcatccacaattttaaaagaaaaggggggattggggggtacagtgcaggggaaagaatagtagacataatagcaacagacatacaaactaaag

SEQ ID NO: 15119 - DNA, 301 bp, Artificial Sequence
  Apc.4_NTC.1
  crRNA array
  misc_feature (148)..(157): n is a, c, g, or t
cttggctttatatatcttgtggaaaggacgaaacaccgtaatttctactaagtgtagatcaccaggggatgatgtgccctaatttctactaagtgtagatcgcgtaaccgttccggctcctaatttctactaagtgtagatttttttnnnnnnnnnnaagcttggcgtggatccgatatcaactagatcttgagacaaatggcagtattcatccacaattttaaaagaaaaggggggattggggggtacagtgcaggggaaagaatagtagacataatagcaacagacatacaaactaaag

SEQ ID NO: 15120 - DNA, 301 bp, Artificial Sequence
  Apc.4_NTC.10
  crRNA array
  misc_feature (148)..(157): n is a, c, g, or t
cttggctttatatatcttgtggaaaggacgaaacaccgtaatttctactaagtgtagatcaccaggggatgatgtgccctaatttctactaagtgtagatcgctaagttcgcgcgggccgtaatttctactaagtgtagatttttttnnnnnnnnnnaagcttggcgtggatccgatatcaactagatcttgagacaaatggcagtattcatccacaattttaaaagaaaaggggggattggggggtacagtgcaggggaaagaatagtagacataatagcaacagacatacaaactaaag

SEQ ID NO: 15121 - DNA, 301 bp, Artificial Sequence
  Apc.4_NTC.11
  crRNA array
  misc_feature (148)..(157): n is a, c, g, or t
cttggctttatatatcttgtggaaaggacgaaacaccgtaatttctactaagtgtagatcaccaggggatgatgtgccctaatttctactaagtgtagatcgttcgtcgacgaagcaatctaatttctactaagtgtagatttttttnnnnnnnnnnaagcttggcgtggatccgatatcaactagatcttgagacaaatggcagtattcatccacaattttaaaagaaaaggggggattggggggtacagtgcaggggaaagaatagtagacataatagcaacagacatacaaactaaag

SEQ ID NO: 15122 - DNA, 301 bp, Artificial Sequence
  Apc.4_NTC.12
  crRNA array
  misc_feature (148)..(157): n is a, c, g, or t
cttggctttatatatcttgtggaaaggacgaaacaccgtaatttctactaagtgtagatcaccaggggatgatgtgccctaatttctactaagtgtagatcgccgacgattaatcaatagtaatttctactaagtgtagatttttttnnnnnnnnnnaagcttggcgtggatccgatatcaactagatcttgagacaaatggcagtattcatccacaattttaaaagaaaaggggggattggggggtacagtgcaggggaaagaatagtagacataatagcaacagacatacaaactaaag

SEQ ID NO: 15123 - DNA, 301 bp, Artificial Sequence
  Apc.4_NTC.13
  crRNA array
  misc_feature (148)..(157): n is a, c, g, or t
cttggctttatatatcttgtggaaaggacgaaacaccgtaatttctactaagtgtagatcaccaggggatgatgtgccctaatttctactaagtgtagatgaccgttgtatcgcgatcaataatttctactaagtgtagatttttttnnnnnnnnnnaagcttggcgtggatccgatatcaactagatcttgagacaaatggcagtattcatccacaattttaaaagaaaaggggggattggggggtacagtgcaggggaaagaatagtagacataatagcaacagacatacaaactaaag

SEQ ID NO: 15124 - DNA, 301 bp, Artificial Sequence
  Apc.4_NTC.14
  crRNA array
  misc_feature (148)..(157): n is a, c, g, or t
cttggctttatatatcttgtggaaaggacgaaacaccgtaatttctactaagtgtagatcaccaggggatgatgtgccctaatttctactaagtgtagatccgttcgtgcgatagtgttttaatttctactaagtgtagatttttttnnnnnnnnnnaagcttggcgtggatccgatatcaactagatcttgagacaaatggcagtattcatccacaattttaaaagaaaaggggggattggggggtacagtgcaggggaaagaatagtagacataatagcaacagacatacaaactaaag

SEQ ID NO: 15125 - DNA, 301 bp, Artificial Sequence
  Apc.4_NTC.15
  crRNA array
  misc_feature (148)..(157): n is a, c, g, or t
cttggctttatatatcttgtggaaaggacgaaacaccgtaatttctactaagtgtagatcaccaggggatgatgtgccctaatttctactaagtgtagatgttgtcgtgccgcgaatttataatttctactaagtgtagatttttttnnnnnnnnnnaagcttggcgtggatccgatatcaactagatcttgagacaaatggcagtattcatccacaattttaaaagaaaaggggggattggggggtacagtgcaggggaaagaatagtagacataatagcaacagacatacaaactaaag

SEQ ID NO: 15126 - DNA, 301 bp, Artificial Sequence
  Apc.4_NTC.16
  crRNA array
  misc_feature (148)..(157): n is a, c, g, or t
cttggctttatatatcttgtggaaaggacgaaacaccgtaatttctactaagtgtagatcaccaggggatgatgtgccctaatttctactaagtgtagatcggtacgttagacgaaaatttaatttctactaagtgtagatttttttnnnnnnnnnnaagcttggcgtggatccgatatcaactagatcttgagacaaatggcagtattcatccacaattttaaaagaaaaggggggattggggggtacagtgcaggggaaagaatagtagacataatagcaacagacatacaaactaaag

SEQ ID NO: 15127 - DNA, 301 bp, Artificial Sequence
  Apc.4_NTC.17
  crRNA array
  misc_feature (148)..(157): n is a, c, g, or t
cttggctttatatatcttgtggaaaggacgaaacaccgtaatttctactaagtgtagatcaccaggggatgatgtgccctaatttctactaagtgtagattatcgaacgctatcgaacgttaatttctactaagtgtagatttttttnnnnnnnnnnaagcttggcgtggatccgatatcaactagatcttgagacaaatggcagtattcatccacaattttaaaagaaaaggggggattggggggtacagtgcaggggaaagaatagtagacataatagcaacagacatacaaactaaag

SEQ ID NO: 15128 - DNA, 301 bp, Artificial Sequence
  Apc.4_NTC.18
  crRNA array
  misc_feature (148)..(157): n is a, c, g, or t
cttggctttatatatcttgtggaaaggacgaaacaccgtaatttctactaagtgtagatcaccaggggatgatgtgccctaatttctactaagtgtagattccggttacgaccggcaaaataatttctactaagtgtagatttttttnnnnnnnnnnaagcttggcgtggatccgatatcaactagatcttgagacaaatggcagtattcatccacaattttaaaagaaaaggggggattggggggtacagtgcaggggaaagaatagtagacataatagcaacagacatacaaactaaag

SEQ ID NO: 15129 - DNA, 301 bp, Artificial Sequence
  Apc.4_NTC.19
  crRNA array
  misc_feature (148)..(157): n is a, c, g, or t
cttggctttatatatcttgtggaaaggacgaaacaccgtaatttctactaagtgtagatcaccaggggatgatgtgccctaatttctactaagtgtagatcgtcgtagaacgatacccgataatttctactaagtgtagatttttttnnnnnnnnnnaagcttggcgtggatccgatatcaactagatcttgagacaaatggcagtattcatccacaattttaaaagaaaaggggggattggggggtacagtgcaggggaaagaatagtagacataatagcaacagacatacaaactaaag

SEQ ID NO: 15130 - DNA, 301 bp, Artificial Sequence
  Apc.4_NTC.2
  crRNA array
  misc_feature (148)..(157): n is a, c, g, or t
cttggctttatatatcttgtggaaaggacgaaacaccgtaatttctactaagtgtagatcaccaggggatgatgtgccctaatttctactaagtgtagatttatgtcgcgccgcgacccgtaatttctactaagtgtagatttttttnnnnnnnnnnaagcttggcgtggatccgatatcaactagatcttgagacaaatggcagtattcatccacaattttaaaagaaaaggggggattggggggtacagtgcaggggaaagaatagtagacataatagcaacagacatacaaactaaag

SEQ ID NO: 15131 - DNA, 301 bp, Artificial Sequence
  Apc.4_NTC.20
  crRNA array
  misc_feature (148)..(157): n is a, c, g, or t
cttggctttatatatcttgtggaaaggacgaaacaccgtaatttctactaagtgtagatcaccaggggatgatgtgccctaatttctactaagtgtagatattccggcgcgaccagaagataatttctactaagtgtagatttttttnnnnnnnnnnaagcttggcgtggatccgatatcaactagatcttgagacaaatggcagtattcatccacaattttaaaagaaaaggggggattggggggtacagtgcaggggaaagaatagtagacataatagcaacagacatacaaactaaag

SEQ ID NO: 15132 - DNA, 301 bp, Artificial Sequence
  Apc.4_NTC.21
  crRNA array
  misc_feature (148)..(157): n is a, c, g, or t
cttggctttatatatcttgtggaaaggacgaaacaccgtaatttctactaagtgtagatcaccaggggatgatgtgccctaatttctactaagtgtagatgtataacttcgcgcggtccgtaatttctactaagtgtagatttttttnnnnnnnnnnaagcttggcgtggatccgatatcaactagatcttgagacaaatggcagtattcatccacaattttaaaagaaaaggggggattggggggtacagtgcaggggaaagaatagtagacataatagcaacagacatacaaactaaag

SEQ ID NO: 15133 - DNA, 301 bp, Artificial Sequence
  Apc.4_NTC.22
  crRNA array
  misc_feature (148)..(157): n is a, c, g, or t
cttggctttatatatcttgtggaaaggacgaaacaccgtaatttctactaagtgtagatcaccaggggatgatgtgccctaatttctactaagtgtagatgcgcgtcaacgtaatgtgcctaatttctactaagtgtagatttttttnnnnnnnnnnaagcttggcgtggatccgatatcaactagatcttgagacaaatggcagtattcatccacaattttaaaagaaaaggggggattggggggtacagtgcaggggaaagaatagtagacataatagcaacagacatacaaactaaag

SEQ ID NO: 15134 - DNA, 301 bp, Artificial Sequence
  Apc.4_NTC.23
  crRNA array
  misc_feature (148)..(157): n is a, c, g, or t
cttggctttatatatcttgtggaaaggacgaaacaccgtaatttctactaagtgtagatcaccaggggatgatgtgccctaatttctactaagtgtagatacgcgctattatcgtaggtgtaatttctactaagtgtagatttttttnnnnnnnnnnaagcttggcgtggatccgatatcaactagatcttgagacaaatggcagtattcatccacaattttaaaagaaaaggggggattggggggtacagtgcaggggaaagaatagtagacataatagcaacagacatacaaactaaag

SEQ ID NO: 15135 - DNA, 301 bp, Artificial Sequence
  Apc.4_NTC.24
  crRNA array
  misc_feature (148)..(157): n is a, c, g, or t
cttggctttatatatcttgtggaaaggacgaaacaccgtaatttctactaagtgtagatcaccaggggatgatgtgccctaatttctactaagtgtagatactatcgacgttcgtcccggtaatttctactaagtgtagatttttttnnnnnnnnnnaagcttggcgtggatccgatatcaactagatcttgagacaaatggcagtattcatccacaattttaaaagaaaaggggggattggggggtacagtgcaggggaaagaatagtagacataatagcaacagacatacaaactaaag

SEQ ID NO: 15136 - DNA, 301 bp, Artificial Sequence
  Apc.4_NTC.25
  crRNA array
  misc_feature (148)..(157): n is a, c, g, or t
cttggctttatatatcttgtggaaaggacgaaacaccgtaatttctactaagtgtagatcaccaggggatgatgtgccctaatttctactaagtgtagattcgcgttatcgtgccgtgcgtaatttctactaagtgtagatttttttnnnnnnnnnnaagcttggcgtggatccgatatcaactagatcttgagacaaatggcagtattcatccacaattttaaaagaaaaggggggattggggggtacagtgcaggggaaagaatagtagacataatagcaacagacatacaaactaaag

SEQ ID NO: 15137 - DNA, 301 bp, Artificial Sequence
  Apc.4_NTC.26
  crRNA array
  misc_feature (148)..(157): n is a, c, g, or t
cttggctttatatatcttgtggaaaggacgaaacaccgtaatttctactaagtgtagatcaccaggggatgatgtgccctaatttctactaagtgtagatcgcgacggcggttttaacactaatttctactaagtgtagatttttttnnnnnnnnnnaagcttggcgtggatccgatatcaactagatcttgagacaaatggcagtattcatccacaattttaaaagaaaaggggggattggggggtacagtgcaggggaaagaatagtagacataatagcaacagacatacaaactaaag

SEQ ID NO: 15138 - DNA, 301 bp, Artificial Sequence
  Apc.4_NTC.27
  crRNA array
  misc_feature (148)..(157): n is a, c, g, or t
cttggctttatatatcttgtggaaaggacgaaacaccgtaatttctactaagtgtagatcaccaggggatgatgtgccctaatttctactaagtgtagatgtcgcgttgcgaccggcgcttaatttctactaagtgtagatttttttnnnnnnnnnnaagcttggcgtggatccgatatcaactagatcttgagacaaatggcagtattcatccacaattttaaaagaaaaggggggattggggggtacagtgcaggggaaagaatagtagacataatagcaacagacatacaaactaaag

SEQ ID NO: 15139 - DNA, 301 bp, Artificial Sequence
  Apc.4_NTC.28
  crRNA array
  misc_feature (148)..(157): n is a, c, g, or t
cttggctttatatatcttgtggaaaggacgaaacaccgtaatttctactaagtgtagatcaccaggggatgatgtgccctaatttctactaagtgtagataccgctaatcggcgtaaacttaatttctactaagtgtagatttttttnnnnnnnnnnaagcttggcgtggatccgatatcaactagatcttgagacaaatggcagtattcatccacaattttaaaagaaaaggggggattggggggtacagtgcaggggaaagaatagtagacataatagcaacagacatacaaactaaag

SEQ ID NO: 15140 - DNA, 301 bp, Artificial Sequence
  Apc.4_NTC.29
  crRNA array
  misc_feature (148)..(157): n is a, c, g, or t
cttggctttatatatcttgtggaaaggacgaaacaccgtaatttctactaagtgtagatcaccaggggatgatgtgccctaatttctactaagtgtagatcgcgatctataccgtctatataatttctactaagtgtagatttttttnnnnnnnnnnaagcttggcgtggatccgatatcaactagatcttgagacaaatggcagtattcatccacaattttaaaagaaaaggggggattggggggtacagtgcaggggaaagaatagtagacataatagcaacagacatacaaactaaag

SEQ ID NO: 15141 - DNA, 301 bp, Artificial Sequence
  Apc.4_NTC.3
  crRNA array
  misc_feature (148)..(157): n is a, c, g, or t
cttggctttatatatcttgtggaaaggacgaaacaccgtaatttctactaagtgtagatcaccaggggatgatgtgccctaatttctactaagtgtagattcgacgcgagacgacgtacataatttctactaagtgtagatttttttnnnnnnnnnnaagcttggcgtggatccgatatcaactagatcttgagacaaatggcagtattcatccacaattttaaaagaaaaggggggattggggggtacagtgcaggggaaagaatagtagacataatagcaacagacatacaaactaaag

SEQ ID NO: 15142 - DNA, 301 bp, Artificial Sequence
  Apc.4_NTC.30
  crRNA array
  misc_feature (148)..(157): n is a, c, g, or t
cttggctttatatatcttgtggaaaggacgaaacaccgtaatttctactaagtgtagatcaccaggggatgatgtgccctaatttctactaagtgtagatcgatcgtacgggtgtcctaataatttctactaagtgtagatttttttnnnnnnnnnnaagcttggcgtggatccgatatcaactagatcttgagacaaatggcagtattcatccacaattttaaaagaaaaggggggattggggggtacagtgcaggggaaagaatagtagacataatagcaacagacatacaaactaaag

SEQ ID NO: 15143 - DNA, 301 bp, Artificial Sequence
  Apc.4_NTC.31
  crRNA array
  misc_feature (148)..(157): n is a, c, g, or t
cttggctttatatatcttgtggaaaggacgaaacaccgtaatttctactaagtgtagatcaccaggggatgatgtgccctaatttctactaagtgtagatgccgaccgcgtgattgtaggtaatttctactaagtgtagatttttttnnnnnnnnnnaagcttggcgtggatccgatatcaactagatcttgagacaaatggcagtattcatccacaattttaaaagaaaaggggggattggggggtacagtgcaggggaaagaatagtagacataatagcaacagacatacaaactaaag

SEQ ID NO: 15144 - DNA, 301 bp, Artificial Sequence
  Apc.4_NTC.32
  crRNA array
  misc_feature (148)..(157): n is a, c, g, or t
cttggctttatatatcttgtggaaaggacgaaacaccgtaatttctactaagtgtagatcaccaggggatgatgtgccctaatttctactaagtgtagatgcacgttacgcccgggtcactaatttctactaagtgtagatttttttnnnnnnnnnnaagcttggcgtggatccgatatcaactagatcttgagacaaatggcagtattcatccacaattttaaaagaaaaggggggattggggggtacagtgcaggggaaagaatagtagacataatagcaacagacatacaaactaaag

SEQ ID NO: 15145 - DNA, 301 bp, Artificial Sequence
  Apc.4_NTC.33
  crRNA array
  misc_feature (148)..(157): n is a, c, g, or t
cttggctttatatatcttgtggaaaggacgaaacaccgtaatttctactaagtgtagatcaccaggggatgatgtgccctaatttctactaagtgtagattaagcgaccgacgcattcgctaatttctactaagtgtagatttttttnnnnnnnnnnaagcttggcgtggatccgatatcaactagatcttgagacaaatggcagtattcatccacaattttaaaagaaaaggggggattggggggtacagtgcaggggaaagaatagtagacataatagcaacagacatacaaactaaag

SEQ ID NO: 15146 - DNA, 301 bp, Artificial Sequence
  Apc.4_NTC.34
  crRNA array
  misc_feature (148)..(157): n is a, c, g, or t
cttggctttatatatcttgtggaaaggacgaaacaccgtaatttctactaagtgtagatcaccaggggatgatgtgccctaatttctactaagtgtagattagcgttcgacacgtgaaactaatttctactaagtgtagatttttttnnnnnnnnnnaagcttggcgtggatccgatatcaactagatcttgagacaaatggcagtattcatccacaattttaaaagaaaaggggggattggggggtacagtgcaggggaaagaatagtagacataatagcaacagacatacaaactaaag

SEQ ID NO: 15147 - DNA, 301 bp, Artificial Sequence
  Apc.4_NTC.35
  crRNA array
  misc_feature (148)..(157): n is a, c, g, or t
cttggctttatatatcttgtggaaaggacgaaacaccgtaatttctactaagtgtagatcaccaggggatgatgtgccctaatttctactaagtgtagattggcgcgtaatcgctattcgtaatttctactaagtgtagatttttttnnnnnnnnnnaagcttggcgtggatccgatatcaactagatcttgagacaaatggcagtattcatccacaattttaaaagaaaaggggggattggggggtacagtgcaggggaaagaatagtagacataatagcaacagacatacaaactaaag

SEQ ID NO: 15148 - DNA, 301 bp, Artificial Sequence
  Apc.4_NTC.36
  crRNA array
  misc_feature (148)..(157): n is a, c, g, or t
cttggctttatatatcttgtggaaaggacgaaacaccgtaatttctactaagtgtagatcaccaggggatgatgtgccctaatttctactaagtgtagatcaacccgccgtagcgggccttaatttctactaagtgtagatttttttnnnnnnnnnnaagcttggcgtggatccgatatcaactagatcttgagacaaatggcagtattcatccacaattttaaaagaaaaggggggattggggggtacagtgcaggggaaagaatagtagacataatagcaacagacatacaaactaaag

SEQ ID NO: 15149 - DNA, 301 bp, Artificial Sequence
  Apc.4_NTC.37
  crRNA array
  misc_feature (148)..(157): n is a, c, g, or t
cttggctttatatatcttgtggaaaggacgaaacaccgtaatttctactaagtgtagatcaccaggggatgatgtgccctaatttctactaagtgtagattttgcgttgacgcgattacttaatttctactaagtgtagatttttttnnnnnnnnnnaagcttggcgtggatccgatatcaactagatcttgagacaaatggcagtattcatccacaattttaaaagaaaaggggggattggggggtacagtgcaggggaaagaatagtagacataatagcaacagacatacaaactaaag

SEQ ID NO: 15150 - DNA, 301 bp, Artificial Sequence
  Apc.4_NTC.38
  crRNA array
  misc_feature (148)..(157): n is a, c, g, or t
cttggctttatatatcttgtggaaaggacgaaacaccgtaatttctactaagtgtagatcaccaggggatgatgtgccctaatttctactaagtgtagataacggagcgcgatactaccataatttctactaagtgtagatttttttnnnnnnnnnnaagcttggcgtggatccgatatcaactagatcttgagacaaatggcagtattcatccacaattttaaaagaaaaggggggattggggggtacagtgcaggggaaagaatagtagacataatagcaacagacatacaaactaaag

SEQ ID NO: 15151 - DNA, 301 bp, Artificial Sequence
  Apc.4_NTC.39
  crRNA array
  misc_feature (148)..(157): n is a, c, g, or t
cttggctttatatatcttgtggaaaggacgaaacaccgtaatttctactaagtgtagatcaccaggggatgatgtgccctaatttctactaagtgtagatccggacgttataacgtttcttaatttctactaagtgtagatttttttnnnnnnnnnnaagcttggcgtggatccgatatcaactagatcttgagacaaatggcagtattcatccacaattttaaaagaaaaggggggattggggggtacagtgcaggggaaagaatagtagacataatagcaacagacatacaaactaaag

SEQ ID NO: 15152 - DNA, 301 bp, Artificial Sequence
  Apc.4_NTC.4
  crRNA array
  misc_feature (148)..(157): n is a, c, g, or t
cttggctttatatatcttgtggaaaggacgaaacaccgtaatttctactaagtgtagatcaccaggggatgatgtgccctaatttctactaagtgtagatatacccgtcgcgaacgtgagtaatttctactaagtgtagatttttttnnnnnnnnnnaagcttggcgtggatccgatatcaactagatcttgagacaaatggcagtattcatccacaattttaaaagaaaaggggggattggggggtacagtgcaggggaaagaatagtagacataatagcaacagacatacaaactaaag

SEQ ID NO: 15153 - DNA, 301 bp, Artificial Sequence
  Apc.4_NTC.40
  crRNA array
  misc_feature (148)..(157): n is a, c, g, or t
cttggctttatatatcttgtggaaaggacgaaacaccgtaatttctactaagtgtagatcaccaggggatgatgtgccctaatttctactaagtgtagatattcgcgaacccggccggaataatttctactaagtgtagatttttttnnnnnnnnnnaagcttggcgtggatccgatatcaactagatcttgagacaaatggcagtattcatccacaattttaaaagaaaaggggggattggggggtacagtgcaggggaaagaatagtagacataatagcaacagacatacaaactaaag

SEQ ID NO: 15154 - DNA, 301 bp, Artificial Sequence
  Apc.4_NTC.41
  crRNA array
  misc_feature (148)..(157): n is a, c, g, or t
cttggctttatatatcttgtggaaaggacgaaacaccgtaatttctactaagtgtagatcaccaggggatgatgtgccctaatttctactaagtgtagatttgatggcgcgacgcgttattaatttctactaagtgtagatttttttnnnnnnnnnnaagcttggcgtggatccgatatcaactagatcttgagacaaatggcagtattcatccacaattttaaaagaaaaggggggattggggggtacagtgcaggggaaagaatagtagacataatagcaacagacatacaaactaaag

SEQ ID NO: 15155 - DNA, 301 bp, Artificial Sequence
  Apc.4_NTC.42
  crRNA array
  misc_feature (148)..(157): n is a, c, g, or t
cttggctttatatatcttgtggaaaggacgaaacaccgtaatttctactaagtgtagatcaccaggggatgatgtgccctaatttctactaagtgtagatggtcaaatcgcggcgataactaatttctactaagtgtagatttttttnnnnnnnnnnaagcttggcgtggatccgatatcaactagatcttgagacaaatggcagtattcatccacaattttaaaagaaaaggggggattggggggtacagtgcaggggaaagaatagtagacataatagcaacagacatacaaactaaag

SEQ ID NO: 15156 - DNA, 301 bp, Artificial Sequence
  Apc.4_NTC.43
  crRNA array
  misc_feature (148)..(157): n is a, c, g, or t
cttggctttatatatcttgtggaaaggacgaaacaccgtaatttctactaagtgtagatcaccaggggatgatgtgccctaatttctactaagtgtagatcgactcgcgcattgaactggtaatttctactaagtgtagatttttttnnnnnnnnnnaagcttggcgtggatccgatatcaactagatcttgagacaaatggcagtattcatccacaattttaaaagaaaaggggggattggggggtacagtgcaggggaaagaatagtagacataatagcaacagacatacaaactaaag

SEQ ID NO: 15157 - DNA, 301 bp, Artificial Sequence
  Apc.4_NTC.44
  crRNA array
  misc_feature (148)..(157): n is a, c, g, or t
cttggctttatatatcttgtggaaaggacgaaacaccgtaatttctactaagtgtagatcaccaggggatgatgtgccctaatttctactaagtgtagatagcgtcgtacgatttatcgttaatttctactaagtgtagatttttttnnnnnnnnnnaagcttggcgtggatccgatatcaactagatcttgagacaaatggcagtattcatccacaattttaaaagaaaaggggggattggggggtacagtgcaggggaaagaatagtagacataatagcaacagacatacaaactaaag

SEQ ID NO: 15158 - DNA, 301 bp, Artificial Sequence
  Apc.4_NTC.45
  crRNA array
  misc_feature (148)..(157): n is a, c, g, or t
cttggctttatatatcttgtggaaaggacgaaacaccgtaatttctactaagtgtagatcaccaggggatgatgtgccctaatttctactaagtgtagatcggaacgcgtgatactagggtaatttctactaagtgtagatttttttnnnnnnnnnnaagcttggcgtggatccgatatcaactagatcttgagacaaatggcagtattcatccacaattttaaaagaaaaggggggattggggggtacagtgcaggggaaagaatagtagacataatagcaacagacatacaaactaaag

SEQ ID NO: 15159 - DNA, 301 bp, Artificial Sequence
  Apc.4_NTC.46
  crRNA array
  misc_feature (148)..(157): n is a, c, g, or t
cttggctttatatatcttgtggaaaggacgaaacaccgtaatttctactaagtgtagatcaccaggggatgatgtgccctaatttctactaagtgtagatagcgggtcgtagacgcgcggtaatttctactaagtgtagatttttttnnnnnnnnnnaagcttggcgtggatccgatatcaactagatcttgagacaaatggcagtattcatccacaattttaaaagaaaaggggggattggggggtacagtgcaggggaaagaatagtagacataatagcaacagacatacaaactaaag

SEQ ID NO: 15160 - DNA, 301 bp, Artificial Sequence
  Apc.4_NTC.47
  crRNA array
  misc_feature (148)..(157): n is a, c, g, or t
cttggctttatatatcttgtggaaaggacgaaacaccgtaatttctactaagtgtagatcaccaggggatgatgtgccctaatttctactaagtgtagattctcgtatcgcgattgttaataatttctactaagtgtagatttttttnnnnnnnnnnaagcttggcgtggatccgatatcaactagatcttgagacaaatggcagtattcatccacaattttaaaagaaaaggggggattggggggtacagtgcaggggaaagaatagtagacataatagcaacagacatacaaactaaag

SEQ ID NO: 15161 - DNA, 301 bp, Artificial Sequence
  Apc.4_NTC.48
  crRNA array
  misc_feature (148)..(157): n is a, c, g, or t
cttggctttatatatcttgtggaaaggacgaaacaccgtaatttctactaagtgtagatcaccaggggatgatgtgccctaatttctactaagtgtagatcggtcgactacggctgttagtaatttctactaagtgtagatttttttnnnnnnnnnnaagcttggcgtggatccgatatcaactagatcttgagacaaatggcagtattcatccacaattttaaaagaaaaggggggattggggggtacagtgcaggggaaagaatagtagacataatagcaacagacatacaaactaaag

SEQ ID NO: 15162 - DNA, 301 bp, Artificial Sequence
  Apc.4_NTC.49
  crRNA array
  misc_feature (148)..(157): n is a, c, g, or t
cttggctttatatatcttgtggaaaggacgaaacaccgtaatttctactaagtgtagatcaccaggggatgatgtgccctaatttctactaagtgtagattcggggcgcgtcaactgaattaatttctactaagtgtagatttttttnnnnnnnnnnaagcttggcgtggatccgatatcaactagatcttgagacaaatggcagtattcatccacaattttaaaagaaaaggggggattggggggtacagtgcaggggaaagaatagtagacataatagcaacagacatacaaactaaag

SEQ ID NO: 15163 - DNA, 301 bp, Artificial Sequence
  Apc.4_NTC.5
  crRNA array
  misc_feature (148)..(157): n is a, c, g, or t
cttggctttatatatcttgtggaaaggacgaaacaccgtaatttctactaagtgtagatcaccaggggatgatgtgccctaatttctactaagtgtagatgcttacgcgtcgcgaatgtataatttctactaagtgtagatttttttnnnnnnnnnnaagcttggcgtggatccgatatcaactagatcttgagacaaatggcagtattcatccacaattttaaaagaaaaggggggattggggggtacagtgcaggggaaagaatagtagacataatagcaacagacatacaaactaaag

SEQ ID NO: 15164 - DNA, 301 bp, Artificial Sequence
  Apc.4_NTC.50
  crRNA array
  misc_feature (148)..(157): n is a, c, g, or t
cttggctttatatatcttgtggaaaggacgaaacaccgtaatttctactaagtgtagatcaccaggggatgatgtgccctaatttctactaagtgtagatattgccgctcgcgcaaaatctaatttctactaagtgtagatttttttnnnnnnnnnnaagcttggcgtggatccgatatcaactagatcttgagacaaatggcagtattcatccacaattttaaaagaaaaggggggattggggggtacagtgcaggggaaagaatagtagacataatagcaacagacatacaaactaaag

SEQ ID NO: 15165 - DNA, 301 bp, Artificial Sequence
  Apc.4_NTC.51
  crRNA array
  misc_feature (148)..(157): n is a, c, g, or t
cttggctttatatatcttgtggaaaggacgaaacaccgtaatttctactaagtgtagatcaccaggggatgatgtgccctaatttctactaagtgtagattaacgcgcaacacgccaatgtaatttctactaagtgtagatttttttnnnnnnnnnnaagcttggcgtggatccgatatcaactagatcttgagacaaatggcagtattcatccacaattttaaaagaaaaggggggattggggggtacagtgcaggggaaagaatagtagacataatagcaacagacatacaaactaaag

SEQ ID NO: 15166 - DNA, 301 bp, Artificial Sequence
  Apc.4_NTC.6
  crRNA array
  misc_feature (148)..(157): n is a, c, g, or t
cttggctttatatatcttgtggaaaggacgaaacaccgtaatttctactaagtgtagatcaccaggggatgatgtgccctaatttctactaagtgtagatcgaatcgcgcctacgggaattaatttctactaagtgtagatttttttnnnnnnnnnnaagcttggcgtggatccgatatcaactagatcttgagacaaatggcagtattcatccacaattttaaaagaaaaggggggattggggggtacagtgcaggggaaagaatagtagacataatagcaacagacatacaaactaaag

SEQ ID NO: 15167 - DNA, 301 bp, Artificial Sequence
  Apc.4_NTC.7
  crRNA array
  misc_feature (148)..(157): n is a, c, g, or t
cttggctttatatatcttgtggaaaggacgaaacaccgtaatttctactaagtgtagatcaccaggggatgatgtgccctaatttctactaagtgtagatcgccgaacggataagactattaatttctactaagtgtagatttttttnnnnnnnnnnaagcttggcgtggatccgatatcaactagatcttgagacaaatggcagtattcatccacaattttaaaagaaaaggggggattggggggtacagtgcaggggaaagaatagtagacataatagcaacagacatacaaactaaag

SEQ ID NO: 15168 - DNA, 301 bp, Artificial Sequence
  Apc.4_NTC.8
  crRNA array
  misc_feature (148)..(157): n is a, c, g, or t
cttggctttatatatcttgtggaaaggacgaaacaccgtaatttctactaagtgtagatcaccaggggatgatgtgccctaatttctactaagtgtagatcgaccgaggttacgctgggataatttctactaagtgtagatttttttnnnnnnnnnnaagcttggcgtggatccgatatcaactagatcttgagacaaatggcagtattcatccacaattttaaaagaaaaggggggattggggggtacagtgcaggggaaagaatagtagacataatagcaacagacatacaaactaaag

SEQ ID NO: 15169 - DNA, 301 bp, Artificial Sequence
  Apc.4_NTC.9
  crRNA array
  misc_feature (148)..(157): n is a, c, g, or t
cttggctttatatatcttgtggaaaggacgaaacaccgtaatttctactaagtgtagatcaccaggggatgatgtgccctaatttctactaagtgtagatatcgccgtacggctatggcataatttctactaagtgtagatttttttnnnnnnnnnnaagcttggcgtggatccgatatcaactagatcttgagacaaatggcagtattcatccacaattttaaaagaaaaggggggattggggggtacagtgcaggggaaagaatagtagacataatagcaacagacatacaaactaaag

SEQ ID NO: 15170 - DNA, 301 bp, Artificial Sequence
  Arid1a.1_NTC.0
  crRNA array
  misc_feature (148)..(157): n is a, c, g, or t
cttggctttatatatcttgtggaaaggacgaaacaccgtaatttctactaagtgtagatcccgcgctcggccgctgccgtaatttctactaagtgtagattatagcgtcgcgcgctaatttaatttctactaagtgtagatttttttnnnnnnnnnnaagcttggcgtggatccgatatcaactagatcttgagacaaatggcagtattcatccacaattttaaaagaaaaggggggattggggggtacagtgcaggggaaagaatagtagacataatagcaacagacatacaaactaaag

SEQ ID NO: 15171 - DNA, 301 bp, Artificial Sequence
  Arid1a.1_NTC.1
  crRNA array
  misc_feature (148)..(157): n is a, c, g, or t
cttggctttatatatcttgtggaaaggacgaaacaccgtaatttctactaagtgtagatcccgcgctcggccgctgccgtaatttctactaagtgtagatcgcgtaaccgttccggctcctaatttctactaagtgtagatttttttnnnnnnnnnnaagcttggcgtggatccgatatcaactagatcttgagacaaatggcagtattcatccacaattttaaaagaaaaggggggattggggggtacagtgcaggggaaagaatagtagacataatagcaacagacatacaaactaaag

SEQ ID NO: 15172 - DNA, 301 bp, Artificial Sequence
  Arid1a.1_NTC.10
  crRNA array
  misc_feature (148)..(157): n is a, c, g, or t
cttggctttatatatcttgtggaaaggacgaaacaccgtaatttctactaagtgtagatcccgcgctcggccgctgccgtaatttctactaagtgtagatcgctaagttcgcgcgggccgtaatttctactaagtgtagatttttttnnnnnnnnnnaagcttggcgtggatccgatatcaactagatcttgagacaaatggcagtattcatccacaattttaaaagaaaaggggggattggggggtacagtgcaggggaaagaatagtagacataatagcaacagacatacaaactaaag

SEQ ID NO: 15173 - DNA, 301 bp, Artificial Sequence
  Arid1a.1_NTC.11
  crRNA array
  misc_feature (148)..(157): n is a, c, g, or t
cttggctttatatatcttgtggaaaggacgaaacaccgtaatttctactaagtgtagatcccgcgctcggccgctgccgtaatttctactaagtgtagatcgttcgtcgacgaagcaatctaatttctactaagtgtagatttttttnnnnnnnnnnaagcttggcgtggatccgatatcaactagatcttgagacaaatggcagtattcatccacaattttaaaagaaaaggggggattggggggtacagtgcaggggaaagaatagtagacataatagcaacagacatacaaactaaag

SEQ ID NO: 15174 - DNA, 301 bp, Artificial Sequence
  Arid1a.1_NTC.12
  crRNA array
  misc_feature (148)..(157): n is a, c, g, or t
cttggctttatatatcttgtggaaaggacgaaacaccgtaatttctactaagtgtagatcccgcgctcggccgctgccgtaatttctactaagtgtagatcgccgacgattaatcaatagtaatttctactaagtgtagatttttttnnnnnnnnnnaagcttggcgtggatccgatatcaactagatcttgagacaaatggcagtattcatccacaattttaaaagaaaaggggggattggggggtacagtgcaggggaaagaatagtagacataatagcaacagacatacaaactaaag

SEQ ID NO: 15175 - DNA, 301 bp, Artificial Sequence
  Arid1a.1_NTC.13
  crRNA array
  misc_feature (148)..(157): n is a, c, g, or t
cttggctttatatatcttgtggaaaggacgaaacaccgtaatttctactaagtgtagatcccgcgctcggccgctgccgtaatttctactaagtgtagatgaccgttgtatcgcgatcaataatttctactaagtgtagatttttttnnnnnnnnnnaagcttggcgtggatccgatatcaactagatcttgagacaaatggcagtattcatccacaattttaaaagaaaaggggggattggggggtacagtgcaggggaaagaatagtagacataatagcaacagacatacaaactaaag

SEQ ID NO: 15176 - DNA, 301 bp, Artificial Sequence
  Arid1a.1_NTC.14
  crRNA array
  misc_feature (148)..(157): n is a, c, g, or t
cttggctttatatatcttgtggaaaggacgaaacaccgtaatttctactaagtgtagatcccgcgctcggccgctgccgtaatttctactaagtgtagatccgttcgtgcgatagtgttttaatttctactaagtgtagatttttttnnnnnnnnnnaagcttggcgtggatccgatatcaactagatcttgagacaaatggcagtattcatccacaattttaaaagaaaaggggggattggggggtacagtgcaggggaaagaatagtagacataatagcaacagacatacaaactaaag

SEQ ID NO: 15177 - DNA, 301 bp, Artificial Sequence
  Arid1a.1_NTC.15
  crRNA array
  misc_feature (148)..(157): n is a, c, g, or t
cttggctttatatatcttgtggaaaggacgaaacaccgtaatttctactaagtgtagatcccgcgctcggccgctgccgtaatttctactaagtgtagatgttgtcgtgccgcgaatttataatttctactaagtgtagatttttttnnnnnnnnnnaagcttggcgtggatccgatatcaactagatcttgagacaaatggcagtattcatccacaattttaaaagaaaaggggggattggggggtacagtgcaggggaaagaatagtagacataatagcaacagacatacaaactaaag

SEQ ID NO: 15178 - DNA, 301 bp, Artificial Sequence
  Arid1a.1_NTC.16
  crRNA array
  misc_feature (148)..(157): n is a, c, g, or t
cttggctttatatatcttgtggaaaggacgaaacaccgtaatttctactaagtgtagatcccgcgctcggccgctgccgtaatttctactaagtgtagatcggtacgttagacgaaaatttaatttctactaagtgtagatttttttnnnnnnnnnnaagcttggcgtggatccgatatcaactagatcttgagacaaatggcagtattcatccacaattttaaaagaaaaggggggattggggggtacagtgcaggggaaagaatagtagacataatagcaacagacatacaaactaaag

SEQ ID NO: 15179 - DNA, 301 bp, Artificial Sequence
  Arid1a.1_NTC.17
  crRNA array
  misc_feature (148)..(157): n is a, c, g, or t
cttggctttatatatcttgtggaaaggacgaaacaccgtaatttctactaagtgtagatcccgcgctcggccgctgccgtaatttctactaagtgtagattatcgaacgctatcgaacgttaatttctactaagtgtagatttttttnnnnnnnnnnaagcttggcgtggatccgatatcaactagatcttgagacaaatggcagtattcatccacaattttaaaagaaaaggggggattggggggtacagtgcaggggaaagaatagtagacataatagcaacagacatacaaactaaag

SEQ ID NO: 15180 - DNA, 301 bp, Artificial Sequence
  Arid1a.1_NTC.18
  crRNA array
  misc_feature (148)..(157): n is a, c, g, or t
cttggctttatatatcttgtggaaaggacgaaacaccgtaatttctactaagtgtagatcccgcgctcggccgctgccgtaatttctactaagtgtagattccggttacgaccggcaaaataatttctactaagtgtagatttttttnnnnnnnnnnaagcttggcgtggatccgatatcaactagatcttgagacaaatggcagtattcatccacaattttaaaagaaaaggggggattggggggtacagtgcaggggaaagaatagtagacataatagcaacagacatacaaactaaag

SEQ ID NO: 15181 - DNA, 301 bp, Artificial Sequence
  Arid1a.1_NTC.19
  crRNA array
  misc_feature (148)..(157): n is a, c, g, or t
cttggctttatatatcttgtggaaaggacgaaacaccgtaatttctactaagtgtagatcccgcgctcggccgctgccgtaatttctactaagtgtagatcgtcgtagaacgatacccgataatttctactaagtgtagatttttttnnnnnnnnnnaagcttggcgtggatccgatatcaactagatcttgagacaaatggcagtattcatccacaattttaaaagaaaaggggggattggggggtacagtgcaggggaaagaatagtagacataatagcaacagacatacaaactaaag

SEQ ID NO: 15182 - DNA, 301 bp, Artificial Sequence
  Arid1a.1_NTC.2
  crRNA array
  misc_feature (148)..(157): n is a, c, g, or t
cttggctttatatatcttgtggaaaggacgaaacaccgtaatttctactaagtgtagatcccgcgctcggccgctgccgtaatttctactaagtgtagatttatgtcgcgccgcgacccgtaatttctactaagtgtagatttttttnnnnnnnnnnaagcttggcgtggatccgatatcaactagatcttgagacaaatggcagtattcatccacaattttaaaagaaaaggggggattggggggtacagtgcaggggaaagaatagtagacataatagcaacagacatacaaactaaag

SEQ ID NO: 15183 - DNA, 301 bp, Artificial Sequence
  Arid1a.1_NTC.20
  crRNA array
  misc_feature (148)..(157): n is a, c, g, or t
cttggctttatatatcttgtggaaaggacgaaacaccgtaatttctactaagtgtagatcccgcgctcggccgctgccgtaatttctactaagtgtagatattccggcgcgaccagaagataatttctactaagtgtagatttttttnnnnnnnnnnaagcttggcgtggatccgatatcaactagatcttgagacaaatggcagtattcatccacaattttaaaagaaaaggggggattggggggtacagtgcaggggaaagaatagtagacataatagcaacagacatacaaactaaag

SEQ ID NO: 15184 - DNA, 301 bp, Artificial Sequence
  Arid1a.1_NTC.21
  crRNA array
  misc_feature (148)..(157): n is a, c, g, or t
cttggctttatatatcttgtggaaaggacgaaacaccgtaatttctactaagtgtagatcccgcgctcggccgctgccgtaatttctactaagtgtagatgtataacttcgcgcggtccgtaatttctactaagtgtagatttttttnnnnnnnnnnaagcttggcgtggatccgatatcaactagatcttgagacaaatggcagtattcatccacaattttaaaagaaaaggggggattggggggtacagtgcaggggaaagaatagtagacataatagcaacagacatacaaactaaag

SEQ ID NO: 15185 - DNA, 301 bp, Artificial Sequence
  Arid1a.1_NTC.22
  crRNA array
  misc_feature (148)..(157): n is a, c, g, or t
cttggctttatatatcttgtggaaaggacgaaacaccgtaatttctactaagtgtagatcccgcgctcggccgctgccgtaatttctactaagtgtagatgcgcgtcaacgtaatgtgcctaatttctactaagtgtagatttttttnnnnnnnnnnaagcttggcgtggatccgatatcaactagatcttgagacaaatggcagtattcatccacaattttaaaagaaaaggggggattggggggtacagtgcaggggaaagaatagtagacataatagcaacagacatacaaactaaag

SEQ ID NO: 15186 - DNA, 301 bp, Artificial Sequence
  Arid1a.1_NTC.23
  crRNA array
  misc_feature (148)..(157): n is a, c, g, or t
cttggctttatatatcttgtggaaaggacgaaacaccgtaatttctactaagtgtagatcccgcgctcggccgctgccgtaatttctactaagtgtagatacgcgctattatcgtaggtgtaatttctactaagtgtagatttttttnnnnnnnnnnaagcttggcgtggatccgatatcaactagatcttgagacaaatggcagtattcatccacaattttaaaagaaaaggggggattggggggtacagtgcaggggaaagaatagtagacataatagcaacagacatacaaactaaag

SEQ ID NO: 15187 - DNA, 301 bp, Artificial Sequence
  Arid1a.1_NTC.24
  crRNA array
  misc_feature (148)..(157): n is a, c, g, or t
cttggctttatatatcttgtggaaaggacgaaacaccgtaatttctactaagtgtagatcccgcgctcggccgctgccgtaatttctactaagtgtagatactatcgacgttcgtcccggtaatttctactaagtgtagatttttttnnnnnnnnnnaagcttggcgtggatccgatatcaactagatcttgagacaaatggcagtattcatccacaattttaaaagaaaaggggggattggggggtacagtgcaggggaaagaatagtagacataatagcaacagacatacaaactaaag

SEQ ID NO: 15188 - DNA, 301 bp, Artificial Sequence
  Arid1a.1_NTC.25
  crRNA array
  misc_feature (148)..(157): n is a, c, g, or t
cttggctttatatatcttgtggaaaggacgaaacaccgtaatttctactaagtgtagatcccgcgctcggccgctgccgtaatttctactaagtgtagattcgcgttatcgtgccgtgcgtaatttctactaagtgtagatttttttnnnnnnnnnnaagcttggcgtggatccgatatcaactagatcttgagacaaatggcagtattcatccacaattttaaaagaaaaggggggattggggggtacagtgcaggggaaagaatagtagacataatagcaacagacatacaaactaaag

SEQ ID NO: 15189 - DNA, 301 bp, Artificial Sequence
  Arid1a.1_NTC.26
  crRNA array
  misc_feature (148)..(157): n is a, c, g, or t
cttggctttatatatcttgtggaaaggacgaaacaccgtaatttctactaagtgtagatcccgcgctcggccgctgccgtaatttctactaagtgtagatcgcgacggcggttttaacactaatttctactaagtgtagatttttttnnnnnnnnnnaagcttggcgtggatccgatatcaactagatcttgagacaaatggcagtattcatccacaattttaaaagaaaaggggggattggggggtacagtgcaggggaaagaatagtagacataatagcaacagacatacaaactaaag

SEQ ID NO: 15190 - DNA, 301 bp, Artificial Sequence
  Arid1a.1_NTC.27
  crRNA array
  misc_feature (148)..(157): n is a, c, g, or t
cttggctttatatatcttgtggaaaggacgaaacaccgtaatttctactaagtgtagatcccgcgctcggccgctgccgtaatttctactaagtgtagatgtcgcgttgcgaccggcgcttaatttctactaagtgtagatttttttnnnnnnnnnnaagcttggcgtggatccgatatcaactagatcttgagacaaatggcagtattcatccacaattttaaaagaaaaggggggattggggggtacagtgcaggggaaagaatagtagacataatagcaacagacatacaaactaaag

SEQ ID NO: 15191 - DNA, 301 bp, Artificial Sequence
  Arid1a.1_NTC.28
  crRNA array
  misc_feature (148)..(157): n is a, c, g, or t
cttggctttatatatcttgtggaaaggacgaaacaccgtaatttctactaagtgtagatcccgcgctcggccgctgccgtaatttctactaagtgtagataccgctaatcggcgtaaacttaatttctactaagtgtagatttttttnnnnnnnnnnaagcttggcgtggatccgatatcaactagatcttgagacaaatggcagtattcatccacaattttaaaagaaaaggggggattggggggtacagtgcaggggaaagaatagtagacataatagcaacagacatacaaactaaag

SEQ ID NO: 15192 - DNA, 301 bp, Artificial Sequence
  Arid1a.1_NTC.29
  crRNA array
  misc_feature (148)..(157): n is a, c, g, or t
cttggctttatatatcttgtggaaaggacgaaacaccgtaatttctactaagtgtagatcccgcgctcggccgctgccgtaatttctactaagtgtagatcgcgatctataccgtctatataatttctactaagtgtagatttttttnnnnnnnnnnaagcttggcgtggatccgatatcaactagatcttgagacaaatggcagtattcatccacaattttaaaagaaaaggggggattggggggtacagtgcaggggaaagaatagtagacataatagcaacagacatacaaactaaag

SEQ ID NO: 15193 - DNA, 301 bp, Artificial Sequence
  Arid1a.1_NTC.3
  crRNA array
  misc_feature (148)..(157): n is a, c, g, or t
cttggctttatatatcttgtggaaaggacgaaacaccgtaatttctactaagtgtagatcccgcgctcggccgctgccgtaatttctactaagtgtagattcgacgcgagacgacgtacataatttctactaagtgtagatttttttnnnnnnnnnnaagcttggcgtggatccgatatcaactagatcttgagacaaatggcagtattcatccacaattttaaaagaaaaggggggattggggggtacagtgcaggggaaagaatagtagacataatagcaacagacatacaaactaaag

SEQ ID NO: 15194 - DNA, 301 bp, Artificial Sequence
  Arid1a.1_NTC.30
  crRNA array
  misc_feature (148)..(157): n is a, c, g, or t
cttggctttatatatcttgtggaaaggacgaaacaccgtaatttctactaagtgtagatcccgcgctcggccgctgccgtaatttctactaagtgtagatcgatcgtacgggtgtcctaataatttctactaagtgtagatttttttnnnnnnnnnnaagcttggcgtggatccgatatcaactagatcttgagacaaatggcagtattcatccacaattttaaaagaaaaggggggattggggggtacagtgcaggggaaagaatagtagacataatagcaacagacatacaaactaaag

SEQ ID NO: 15195 - DNA, 301 bp, Artificial Sequence
  Arid1a.1_NTC.31
  crRNA array
  misc_feature (148)..(157): n is a, c, g, or t
cttggctttatatatcttgtggaaaggacgaaacaccgtaatttctactaagtgtagatcccgcgctcggccgctgccgtaatttctactaagtgtagatgccgaccgcgtgattgtaggtaatttctactaagtgtagatttttttnnnnnnnnnnaagcttggcgtggatccgatatcaactagatcttgagacaaatggcagtattcatccacaattttaaaagaaaaggggggattggggggtacagtgcaggggaaagaatagtagacataatagcaacagacatacaaactaaag

SEQ ID NO: 15196 - DNA, 301 bp, Artificial Sequence
  Arid1a.1_NTC.32
  crRNA array
  misc_feature (148)..(157): n is a, c, g, or t
cttggctttatatatcttgtggaaaggacgaaacaccgtaatttctactaagtgtagatcccgcgctcggccgctgccgtaatttctactaagtgtagatgcacgttacgcccgggtcactaatttctactaagtgtagatttttttnnnnnnnnnnaagcttggcgtggatccgatatcaactagatcttgagacaaatggcagtattcatccacaattttaaaagaaaaggggggattggggggtacagtgcaggggaaagaatagtagacataatagcaacagacatacaaactaaag

SEQ ID NO: 15197 - DNA, 301 bp, Artificial Sequence
  Arid1a.1_NTC.33
  crRNA array
  misc_feature (148)..(157): n is a, c, g, or t
cttggctttatatatcttgtggaaaggacgaaacaccgtaatttctactaagtgtagatcccgcgctcggccgctgccgtaatttctactaagtgtagattaagcgaccgacgcattcgctaatttctactaagtgtagatttttttnnnnnnnnnnaagcttggcgtggatccgatatcaactagatcttgagacaaatggcagtattcatccacaattttaaaagaaaaggggggattggggggtacagtgcaggggaaagaatagtagacataatagcaacagacatacaaactaaag

SEQ ID NO: 15198 - DNA, 301 bp, Artificial Sequence
  Arid1a.1_NTC.34
  crRNA array
  misc_feature (148)..(157): n is a, c, g, or t
cttggctttatatatcttgtggaaaggacgaaacaccgtaatttctactaagtgtagatcccgcgctcggccgctgccgtaatttctactaagtgtagattagcgttcgacacgtgaaactaatttctactaagtgtagatttttttnnnnnnnnnnaagcttggcgtggatccgatatcaactagatcttgagacaaatggcagtattcatccacaattttaaaagaaaaggggggattggggggtacagtgcaggggaaagaatagtagacataatagcaacagacatacaaactaaag

SEQ ID NO: 15199 - DNA, 301 bp, Artificial Sequence
  Arid1a.1_NTC.35
  crRNA array
  misc_feature (148)..(157): n is a, c, g, or t
cttggctttatatatcttgtggaaaggacgaaacaccgtaatttctactaagtgtagatcccgcgctcggccgctgccgtaatttctactaagtgtagattggcgcgtaatcgctattcgtaatttctactaagtgtagatttttttnnnnnnnnnnaagcttggcgtggatccgatatcaactagatcttgagacaaatggcagtattcatccacaattttaaaagaaaaggggggattggggggtacagtgcaggggaaagaatagtagacataatagcaacagacatacaaactaaag

SEQ ID NO: 15200 - DNA, 301 bp, Artificial Sequence
  Arid1a.1_NTC.36
  crRNA array
  misc_feature (148)..(157): n is a, c, g, or t
cttggctttatatatcttgtggaaaggacgaaacaccgtaatttctactaagtgtagatcccgcgctcggccgctgccgtaatttctactaagtgtagatcaacccgccgtagcgggccttaatttctactaagtgtagatttttttnnnnnnnnnnaagcttggcgtggatccgatatcaactagatcttgagacaaatggcagtattcatccacaattttaaaagaaaaggggggattggggggtacagtgcaggggaaagaatagtagacataatagcaacagacatacaaactaaag

SEQ ID NO: 15201 - DNA, 301 bp, Artificial Sequence
  Arid1a.1_NTC.37
  crRNA array
  misc_feature (148)..(157): n is a, c, g, or t
cttggctttatatatcttgtggaaaggacgaaacaccgtaatttctactaagtgtagatcccgcgctcggccgctgccgtaatttctactaagtgtagattttgcgttgacgcgattacttaatttctactaagtgtagatttttttnnnnnnnnnnaagcttggcgtggatccgatatcaactagatcttgagacaaatggcagtattcatccacaattttaaaagaaaaggggggattggggggtacagtgcaggggaaagaatagtagacataatagcaacagacatacaaactaaag

SEQ ID NO: 15202 - DNA, 301 bp, Artificial Sequence
  Arid1a.1_NTC.38
  crRNA array
  misc_feature (148)..(157): n is a, c, g, or t
cttggctttatatatcttgtggaaaggacgaaacaccgtaatttctactaagtgtagatcccgcgctcggccgctgccgtaatttctactaagtgtagataacggagcgcgatactaccataatttctactaagtgtagatttttttnnnnnnnnnnaagcttggcgtggatccgatatcaactagatcttgagacaaatggcagtattcatccacaattttaaaagaaaaggggggattggggggtacagtgcaggggaaagaatagtagacataatagcaacagacatacaaactaaag

SEQ ID NO: 15203 - DNA, 301 bp, Artificial Sequence
  Arid1a.1_NTC.39
  crRNA array
  misc_feature (148)..(157): n is a, c, g, or t
cttggctttatatatcttgtggaaaggacgaaacaccgtaatttctactaagtgtagatcccgcgctcggccgctgccgtaatttctactaagtgtagatccggacgttataacgtttcttaatttctactaagtgtagatttttttnnnnnnnnnnaagcttggcgtggatccgatatcaactagatcttgagacaaatggcagtattcatccacaattttaaaagaaaaggggggattggggggtacagtgcaggggaaagaatagtagacataatagcaacagacatacaaactaaag

SEQ ID NO: 15204 - DNA, 301 bp, Artificial Sequence
  Arid1a.1_NTC.4
  crRNA array
  misc_feature (148)..(157): n is a, c, g, or t
cttggctttatatatcttgtggaaaggacgaaacaccgtaatttctactaagtgtagatcccgcgctcggccgctgccgtaatttctactaagtgtagatatacccgtcgcgaacgtgagtaatttctactaagtgtagatttttttnnnnnnnnnnaagcttggcgtggatccgatatcaactagatcttgagacaaatggcagtattcatccacaattttaaaagaaaaggggggattggggggtacagtgcaggggaaagaatagtagacataatagcaacagacatacaaactaaag

SEQ ID NO: 15205 - DNA, 301 bp, Artificial Sequence
  Arid1a.1_NTC.40
  crRNA array
  misc_feature (148)..(157): n is a, c, g, or t
cttggctttatatatcttgtggaaaggacgaaacaccgtaatttctactaagtgtagatcccgcgctcggccgctgccgtaatttctactaagtgtagatattcgcgaacccggccggaataatttctactaagtgtagatttttttnnnnnnnnnnaagcttggcgtggatccgatatcaactagatcttgagacaaatggcagtattcatccacaattttaaaagaaaaggggggattggggggtacagtgcaggggaaagaatagtagacataatagcaacagacatacaaactaaag

SEQ ID NO: 15206 - DNA, 301 bp, Artificial Sequence
  Arid1a.1_NTC.41
  crRNA array
  misc_feature (148)..(157): n is a, c, g, or t
cttggctttatatatcttgtggaaaggacgaaacaccgtaatttctactaagtgtagatcccgcgctcggccgctgccgtaatttctactaagtgtagatttgatggcgcgacgcgttattaatttctactaagtgtagatttttttnnnnnnnnnnaagcttggcgtggatccgatatcaactagatcttgagacaaatggcagtattcatccacaattttaaaagaaaaggggggattggggggtacagtgcaggggaaagaatagtagacataatagcaacagacatacaaactaaag

SEQ ID NO: 15207 - DNA, 301 bp, Artificial Sequence
  Arid1a.1_NTC.42
  crRNA array
  misc_feature (148)..(157): n is a, c, g, or t
cttggctttatatatcttgtggaaaggacgaaacaccgtaatttctactaagtgtagatcccgcgctcggccgctgccgtaatttctactaagtgtagatggtcaaatcgcggcgataactaatttctactaagtgtagatttttttnnnnnnnnnnaagcttggcgtggatccgatatcaactagatcttgagacaaatggcagtattcatccacaattttaaaagaaaaggggggattggggggtacagtgcaggggaaagaatagtagacataatagcaacagacatacaaactaaag

SEQ ID NO: 15208 - DNA, 301 bp, Artificial Sequence
  Arid1a.1_NTC.43
  crRNA array
  misc_feature (148)..(157): n is a, c, g, or t
cttggctttatatatcttgtggaaaggacgaaacaccgtaatttctactaagtgtagatcccgcgctcggccgctgccgtaatttctactaagtgtagatcgactcgcgcattgaactggtaatttctactaagtgtagatttttttnnnnnnnnnnaagcttggcgtggatccgatatcaactagatcttgagacaaatggcagtattcatccacaattttaaaagaaaaggggggattggggggtacagtgcaggggaaagaatagtagacataatagcaacagacatacaaactaaag

SEQ ID NO: 15209 - DNA, 301 bp, Artificial Sequence
  Arid1a.1_NTC.44
  crRNA array
  misc_feature (148)..(157): n is a, c, g, or t
cttggctttatatatcttgtggaaaggacgaaacaccgtaatttctactaagtgtagatcccgcgctcggccgctgccgtaatttctactaagtgtagatagcgtcgtacgatttatcgttaatttctactaagtgtagatttttttnnnnnnnnnnaagcttggcgtggatccgatatcaactagatcttgagacaaatggcagtattcatccacaattttaaaagaaaaggggggattggggggtacagtgcaggggaaagaatagtagacataatagcaacagacatacaaactaaag

SEQ ID NO: 15210 - DNA, 301 bp, Artificial Sequence
  Arid1a.1_NTC.45
  crRNA array
  misc_feature (148)..(157): n is a, c, g, or t
cttggctttatatatcttgtggaaaggacgaaacaccgtaatttctactaagtgtagatcccgcgctcggccgctgccgtaatttctactaagtgtagatcggaacgcgtgatactagggtaatttctactaagtgtagatttttttnnnnnnnnnnaagcttggcgtggatccgatatcaactagatcttgagacaaatggcagtattcatccacaattttaaaagaaaaggggggattggggggtacagtgcaggggaaagaatagtagacataatagcaacagacatacaaactaaag

SEQ ID NO: 15211 - DNA, 301 bp, Artificial Sequence
  Arid1a.1_NTC.46
  crRNA array
  misc_feature (148)..(157): n is a, c, g, or t
cttggctttatatatcttgtggaaaggacgaaacaccgtaatttctactaagtgtagatcccgcgctcggccgctgccgtaatttctactaagtgtagatagcgggtcgtagacgcgcggtaatttctactaagtgtagatttttttnnnnnnnnnnaagcttggcgtggatccgatatcaactagatcttgagacaaatggcagtattcatccacaattttaaaagaaaaggggggattggggggtacagtgcaggggaaagaatagtagacataatagcaacagacatacaaactaaag

SEQ ID NO: 15212 - DNA, 301 bp, Artificial Sequence
  Arid1a.1_NTC.47
  crRNA array
  misc_feature (148)..(157): n is a, c, g, or t
cttggctttatatatcttgtggaaaggacgaaacaccgtaatttctactaagtgtagatcccgcgctcggccgctgccgtaatttctactaagtgtagattctcgtatcgcgattgttaataatttctactaagtgtagatttttttnnnnnnnnnnaagcttggcgtggatccgatatcaactagatcttgagacaaatggcagtattcatccacaattttaaaagaaaaggggggattggggggtacagtgcaggggaaagaatagtagacataatagcaacagacatacaaactaaag

SEQ ID NO: 15213 - DNA, 301 bp, Artificial Sequence
  Arid1a.1_NTC.48
  crRNA array
  misc_feature (148)..(157): n is a, c, g, or t
cttggctttatatatcttgtggaaaggacgaaacaccgtaatttctactaagtgtagatcccgcgctcggccgctgccgtaatttctactaagtgtagatcggtcgactacggctgttagtaatttctactaagtgtagatttttttnnnnnnnnnnaagcttggcgtggatccgatatcaactagatcttgagacaaatggcagtattcatccacaattttaaaagaaaaggggggattggggggtacagtgcaggggaaagaatagtagacataatagcaacagacatacaaactaaag

SEQ ID NO: 15214 - DNA, 301 bp, Artificial Sequence
  Arid1a.1_NTC.49
  crRNA array
  misc_feature (148)..(157): n is a, c, g, or t
cttggctttatatatcttgtggaaaggacgaaacaccgtaatttctactaagtgtagatcccgcgctcggccgctgccgtaatttctactaagtgtagattcggggcgcgtcaactgaattaatttctactaagtgtagatttttttnnnnnnnnnnaagcttggcgtggatccgatatcaactagatcttgagacaaatggcagtattcatccacaattttaaaagaaaaggggggattggggggtacagtgcaggggaaagaatagtagacataatagcaacagacatacaaactaaag

SEQ ID NO: 15215 - DNA, 301 bp, Artificial Sequence
  Arid1a.1_NTC.5
  crRNA array
  misc_feature (148)..(157): n is a, c, g, or t
cttggctttatatatcttgtggaaaggacgaaacaccgtaatttctactaagtgtagatcccgcgctcggccgctgccgtaatttctactaagtgtagatgcttacgcgtcgcgaatgtataatttctactaagtgtagatttttttnnnnnnnnnnaagcttggcgtggatccgatatcaactagatcttgagacaaatggcagtattcatccacaattttaaaagaaaaggggggattggggggtacagtgcaggggaaagaatagtagacataatagcaacagacatacaaactaaag

SEQ ID NO: 15216 - DNA, 301 bp, Artificial Sequence
  Arid1a.1_NTC.50
  crRNA array
  misc_feature (148)..(157): n is a, c, g, or t
cttggctttatatatcttgtggaaaggacgaaacaccgtaatttctactaagtgtagatcccgcgctcggccgctgccgtaatttctactaagtgtagatattgccgctcgcgcaaaatctaatttctactaagtgtagatttttttnnnnnnnnnnaagcttggcgtggatccgatatcaactagatcttgagacaaatggcagtattcatccacaattttaaaagaaaaggggggattggggggtacagtgcaggggaaagaatagtagacataatagcaacagacatacaaactaaag

SEQ ID NO: 15217 - DNA, 301 bp, Artificial Sequence
  Arid1a.1_NTC.51
  crRNA array
  misc_feature (148)..(157): n is a, c, g, or t
cttggctttatatatcttgtggaaaggacgaaacaccgtaatttctactaagtgtagatcccgcgctcggccgctgccgtaatttctactaagtgtagattaacgcgcaacacgccaatgtaatttctactaagtgtagatttttttnnnnnnnnnnaagcttggcgtggatccgatatcaactagatcttgagacaaatggcagtattcatccacaattttaaaagaaaaggggggattggggggtacagtgcaggggaaagaatagtagacataatagcaacagacatacaaactaaag

SEQ ID NO: 15218 - DNA, 301 bp, Artificial Sequence
  Arid1a.1_NTC.6
  crRNA array
  misc_feature (148)..(157): n is a, c, g, or t
cttggctttatatatcttgtggaaaggacgaaacaccgtaatttctactaagtgtagatcccgcgctcggccgctgccgtaatttctactaagtgtagatcgaatcgcgcctacgggaattaatttctactaagtgtagatttttttnnnnnnnnnnaagcttggcgtggatccgatatcaactagatcttgagacaaatggcagtattcatccacaattttaaaagaaaaggggggattggggggtacagtgcaggggaaagaatagtagacataatagcaacagacatacaaactaaag

SEQ ID NO: 15219 - DNA, 301 bp, Artificial Sequence
  Arid1a.1_NTC.7
  crRNA array
  misc_feature (148)..(157): n is a, c, g, or t
cttggctttatatatcttgtggaaaggacgaaacaccgtaatttctactaagtgtagatcccgcgctcggccgctgccgtaatttctactaagtgtagatcgccgaacggataagactattaatttctactaagtgtagatttttttnnnnnnnnnnaagcttggcgtggatccgatatcaactagatcttgagacaaatggcagtattcatccacaattttaaaagaaaaggggggattggggggtacagtgcaggggaaagaatagtagacataatagcaacagacatacaaactaaag

SEQ ID NO: 15220 - DNA, 301 bp, Artificial Sequence
  Arid1a.1_NTC.8
  crRNA array
  misc_feature (148)..(157): n is a, c, g, or t
cttggctttatatatcttgtggaaaggacgaaacaccgtaatttctactaagtgtagatcccgcgctcggccgctgccgtaatttctactaagtgtagatcgaccgaggttacgctgggataatttctactaagtgtagatttttttnnnnnnnnnnaagcttggcgtggatccgatatcaactagatcttgagacaaatggcagtattcatccacaattttaaaagaaaaggggggattggggggtacagtgcaggggaaagaatagtagacataatagcaacagacatacaaactaaag

SEQ ID NO: 15221 - DNA, 301 bp, Artificial Sequence
  Arid1a.1_NTC.9
  crRNA array
  misc_feature (148)..(157): n is a, c, g, or t
cttggctttatatatcttgtggaaaggacgaaacaccgtaatttctactaagtgtagatcccgcgctcggccgctgccgtaatttctactaagtgtagatatcgccgtacggctatggcataatttctactaagtgtagatttttttnnnnnnnnnnaagcttggcgtggatccgatatcaactagatcttgagacaaatggcagtattcatccacaattttaaaagaaaaggggggattggggggtacagtgcaggggaaagaatagtagacataatagcaacagacatacaaactaaag

SEQ ID NO: 15222 - DNA, 301 bp, Artificial Sequence
  Arid1a.2_NTC.0
  crRNA array
  misc_feature (148)..(157): n is a, c, g, or t
cttggctttatatatcttgtggaaaggacgaaacaccgtaatttctactaagtgtagatagtgcaagatcgagcgtggataatttctactaagtgtagattatagcgtcgcgcgctaatttaatttctactaagtgtagatttttttnnnnnnnnnnaagcttggcgtggatccgatatcaactagatcttgagacaaatggcagtattcatccacaattttaaaagaaaaggggggattggggggtacagtgcaggggaaagaatagtagacataatagcaacagacatacaaactaaag

SEQ ID NO: 15223 - DNA, 301 bp, Artificial Sequence
  Arid1a.2_NTC.1
  crRNA array
  misc_feature (148)..(157): n is a, c, g, or t
cttggctttatatatcttgtggaaaggacgaaacaccgtaatttctactaagtgtagatagtgcaagatcgagcgtggataatttctactaagtgtagatcgcgtaaccgttccggctcctaatttctactaagtgtagatttttttnnnnnnnnnnaagcttggcgtggatccgatatcaactagatcttgagacaaatggcagtattcatccacaattttaaaagaaaaggggggattggggggtacagtgcaggggaaagaatagtagacataatagcaacagacatacaaactaaag

SEQ ID NO: 15224 - DNA, 301 bp, Artificial Sequence
  Arid1a.2_NTC.10
  crRNA array
  misc_feature (148)..(157): n is a, c, g, or t
cttggctttatatatcttgtggaaaggacgaaacaccgtaatttctactaagtgtagatagtgcaagatcgagcgtggataatttctactaagtgtagatcgctaagttcgcgcgggccgtaatttctactaagtgtagatttttttnnnnnnnnnnaagcttggcgtggatccgatatcaactagatcttgagacaaatggcagtattcatccacaattttaaaagaaaaggggggattggggggtacagtgcaggggaaagaatagtagacataatagcaacagacatacaaactaaag

SEQ ID NO: 15225 - DNA, 301 bp, Artificial Sequence
  Arid1a.2_NTC.11
  crRNA array
  misc_feature (148)..(157): n is a, c, g, or t
cttggctttatatatcttgtggaaaggacgaaacaccgtaatttctactaagtgtagatagtgcaagatcgagcgtggataatttctactaagtgtagatcgttcgtcgacgaagcaatctaatttctactaagtgtagatttttttnnnnnnnnnnaagcttggcgtggatccgatatcaactagatcttgagacaaatggcagtattcatccacaattttaaaagaaaaggggggattggggggtacagtgcaggggaaagaatagtagacataatagcaacagacatacaaactaaag

SEQ ID NO: 15226 - DNA, 301 bp, Artificial Sequence
  Arid1a.2_NTC.12
  crRNA array
  misc_feature (148)..(157): n is a, c, g, or t
cttggctttatatatcttgtggaaaggacgaaacaccgtaatttctactaagtgtagatagtgcaagatcgagcgtggataatttctactaagtgtagatcgccgacgattaatcaatagtaatttctactaagtgtagatttttttnnnnnnnnnnaagcttggcgtggatccgatatcaactagatcttgagacaaatggcagtattcatccacaattttaaaagaaaaggggggattggggggtacagtgcaggggaaagaatagtagacataatagcaacagacatacaaactaaag

SEQ ID NO: 15227 - DNA, 301 bp, Artificial Sequence
  Arid1a.2_NTC.13
  crRNA array
  misc_feature (148)..(157): n is a, c, g, or t
cttggctttatatatcttgtggaaaggacgaaacaccgtaatttctactaagtgtagatagtgcaagatcgagcgtggataatttctactaagtgtagatgaccgttgtatcgcgatcaataatttctactaagtgtagatttttttnnnnnnnnnnaagcttggcgtggatccgatatcaactagatcttgagacaaatggcagtattcatccacaattttaaaagaaaaggggggattggggggtacagtgcaggggaaagaatagtagacataatagcaacagacatacaaactaaag

SEQ ID NO: 15228 - DNA, 301 bp, Artificial Sequence
  Arid1a.2_NTC.14
  crRNA array
  misc_feature (148)..(157): n is a, c, g, or t
cttggctttatatatcttgtggaaaggacgaaacaccgtaatttctactaagtgtagatagtgcaagatcgagcgtggataatttctactaagtgtagatccgttcgtgcgatagtgttttaatttctactaagtgtagatttttttnnnnnnnnnnaagcttggcgtggatccgatatcaactagatcttgagacaaatggcagtattcatccacaattttaaaagaaaaggggggattggggggtacagtgcaggggaaagaatagtagacataatagcaacagacatacaaactaaag

SEQ ID NO: 15229 - DNA, 301 bp, Artificial Sequence
  Arid1a.2_NTC.15
  crRNA array
  misc_feature (148)..(157): n is a, c, g, or t
cttggctttatatatcttgtggaaaggacgaaacaccgtaatttctactaagtgtagatagtgcaagatcgagcgtggataatttctactaagtgtagatgttgtcgtgccgcgaatttataatttctactaagtgtagatttttttnnnnnnnnnnaagcttggcgtggatccgatatcaactagatcttgagacaaatggcagtattcatccacaattttaaaagaaaaggggggattggggggtacagtgcaggggaaagaatagtagacataatagcaacagacatacaaactaaag

SEQ ID NO: 15230 - DNA, 301 bp, Artificial Sequence
  Arid1a.2_NTC.16
  crRNA array
  misc_feature (148)..(157): n is a, c, g, or t
cttggctttatatatcttgtggaaaggacgaaacaccgtaatttctactaagtgtagatagtgcaagatcgagcgtggataatttctactaagtgtagatcggtacgttagacgaaaatttaatttctactaagtgtagatttttttnnnnnnnnnnaagcttggcgtggatccgatatcaactagatcttgagacaaatggcagtattcatccacaattttaaaagaaaaggggggattggggggtacagtgcaggggaaagaatagtagacataatagcaacagacatacaaactaaag

SEQ ID NO: 15231 - DNA, 301 bp, Artificial Sequence
  Arid1a.2_NTC.17
  crRNA array
  misc_feature (148)..(157): n is a, c, g, or t
cttggctttatatatcttgtggaaaggacgaaacaccgtaatttctactaagtgtagatagtgcaagatcgagcgtggataatttctactaagtgtagattatcgaacgctatcgaacgttaatttctactaagtgtagatttttttnnnnnnnnnnaagcttggcgtggatccgatatcaactagatcttgagacaaatggcagtattcatccacaattttaaaagaaaaggggggattggggggtacagtgcaggggaaagaatagtagacataatagcaacagacatacaaactaaag

SEQ ID NO: 15232 - DNA, 301 bp, Artificial Sequence
  Arid1a.2_NTC.18
  crRNA array
  misc_feature (148)..(157): n is a, c, g, or t
cttggctttatatatcttgtggaaaggacgaaacaccgtaatttctactaagtgtagatagtgcaagatcgagcgtggataatttctactaagtgtagattccggttacgaccggcaaaataatttctactaagtgtagatttttttnnnnnnnnnnaagcttggcgtggatccgatatcaactagatcttgagacaaatggcagtattcatccacaattttaaaagaaaaggggggattggggggtacagtgcaggggaaagaatagtagacataatagcaacagacatacaaactaaag

SEQ ID NO: 15233 - DNA, 301 bp, Artificial Sequence
  Arid1a.2_NTC.19
  crRNA array
  misc_feature (148)..(157): n is a, c, g, or t
cttggctttatatatcttgtggaaaggacgaaacaccgtaatttctactaagtgtagatagtgcaagatcgagcgtggataatttctactaagtgtagatcgtcgtagaacgatacccgataatttctactaagtgtagatttttttnnnnnnnnnnaagcttggcgtggatccgatatcaactagatcttgagacaaatggcagtattcatccacaattttaaaagaaaaggggggattggggggtacagtgcaggggaaagaatagtagacataatagcaacagacatacaaactaaag

SEQ ID NO: 15234 - DNA, 301 bp, Artificial Sequence
  Arid1a.2_NTC.2
  crRNA array
  misc_feature (148)..(157): n is a, c, g, or t
cttggctttatatatcttgtggaaaggacgaaacaccgtaatttctactaagtgtagatagtgcaagatcgagcgtggataatttctactaagtgtagatttatgtcgcgccgcgacccgtaatttctactaagtgtagatttttttnnnnnnnnnnaagcttggcgtggatccgatatcaactagatcttgagacaaatggcagtattcatccacaattttaaaagaaaaggggggattggggggtacagtgcaggggaaagaatagtagacataatagcaacagacatacaaactaaag

SEQ ID NO: 15235 - DNA, 301 bp, Artificial Sequence
  Arid1a.2_NTC.20
  crRNA array
  misc_feature (148)..(157): n is a, c, g, or t
cttggctttatatatcttgtggaaaggacgaaacaccgtaatttctactaagtgtagatagtgcaagatcgagcgtggataatttctactaagtgtagatattccggcgcgaccagaagataatttctactaagtgtagatttttttnnnnnnnnnnaagcttggcgtggatccgatatcaactagatcttgagacaaatggcagtattcatccacaattttaaaagaaaaggggggattggggggtacagtgcaggggaaagaatagtagacataatagcaacagacatacaaactaaag

SEQ ID NO: 15236 - DNA, 301 bp, Artificial Sequence
  Arid1a.2_NTC.21
  crRNA array
  misc_feature (148)..(157): n is a, c, g, or t
cttggctttatatatcttgtggaaaggacgaaacaccgtaatttctactaagtgtagatagtgcaagatcgagcgtggataatttctactaagtgtagatgtataacttcgcgcggtccgtaatttctactaagtgtagatttttttnnnnnnnnnnaagcttggcgtggatccgatatcaactagatcttgagacaaatggcagtattcatccacaattttaaaagaaaaggggggattggggggtacagtgcaggggaaagaatagtagacataatagcaacagacatacaaactaaag

SEQ ID NO: 15237 - DNA, 301 bp, Artificial Sequence
  Arid1a.2_NTC.22
  crRNA array
  misc_feature (148)..(157): n is a, c, g, or t
cttggctttatatatcttgtggaaaggacgaaacaccgtaatttctactaagtgtagatagtgcaagatcgagcgtggataatttctactaagtgtagatgcgcgtcaacgtaatgtgcctaatttctactaagtgtagatttttttnnnnnnnnnnaagcttggcgtggatccgatatcaactagatcttgagacaaatggcagtattcatccacaattttaaaagaaaaggggggattggggggtacagtgcaggggaaagaatagtagacataatagcaacagacatacaaactaaag

SEQ ID NO: 15238 - DNA, 301 bp, Artificial Sequence
  Arid1a.2_NTC.23
  crRNA array
  misc_feature (148)..(157): n is a, c, g, or t
cttggctttatatatcttgtggaaaggacgaaacaccgtaatttctactaagtgtagatagtgcaagatcgagcgtggataatttctactaagtgtagatacgcgctattatcgtaggtgtaatttctactaagtgtagatttttttnnnnnnnnnnaagcttggcgtggatccgatatcaactagatcttgagacaaatggcagtattcatccacaattttaaaagaaaaggggggattggggggtacagtgcaggggaaagaatagtagacataatagcaacagacatacaaactaaag

SEQ ID NO: 15239 - DNA, 301 bp, Artificial Sequence
  Arid1a.2_NTC.24
  crRNA array
  misc_feature (148)..(157): n is a, c, g, or t
cttggctttatatatcttgtggaaaggacgaaacaccgtaatttctactaagtgtagatagtgcaagatcgagcgtggataatttctactaagtgtagatactatcgacgttcgtcccggtaatttctactaagtgtagatttttttnnnnnnnnnnaagcttggcgtggatccgatatcaactagatcttgagacaaatggcagtattcatccacaattttaaaagaaaaggggggattggggggtacagtgcaggggaaagaatagtagacataatagcaacagacatacaaactaaag

SEQ ID NO: 15240 - DNA, 301 bp, Artificial Sequence
  Arid1a.2_NTC.25
  crRNA array
  misc_feature (148)..(157): n is a, c, g, or t
cttggctttatatatcttgtggaaaggacgaaacaccgtaatttctactaagtgtagatagtgcaagatcgagcgtggataatttctactaagtgtagattcgcgttatcgtgccgtgcgtaatttctactaagtgtagatttttttnnnnnnnnnnaagcttggcgtggatccgatatcaactagatcttgagacaaatggcagtattcatccacaattttaaaagaaaaggggggattggggggtacagtgcaggggaaagaatagtagacataatagcaacagacatacaaactaaag

SEQ ID NO: 15241 - DNA, 301 bp, Artificial Sequence
  Arid1a.2_NTC.26
  crRNA array
  misc_feature (148)..(157): n is a, c, g, or t
cttggctttatatatcttgtggaaaggacgaaacaccgtaatttctactaagtgtagatagtgcaagatcgagcgtggataatttctactaagtgtagatcgcgacggcggttttaacactaatttctactaagtgtagatttttttnnnnnnnnnnaagcttggcgtggatccgatatcaactagatcttgagacaaatggcagtattcatccacaattttaaaagaaaaggggggattggggggtacagtgcaggggaaagaatagtagacataatagcaacagacatacaaactaaag

SEQ ID NO: 15242 - DNA, 301 bp, Artificial Sequence
  Arid1a.2_NTC.27
  crRNA array
  misc_feature (148)..(157): n is a, c, g, or t
cttggctttatatatcttgtggaaaggacgaaacaccgtaatttctactaagtgtagatagtgcaagatcgagcgtggataatttctactaagtgtagatgtcgcgttgcgaccggcgcttaatttctactaagtgtagatttttttnnnnnnnnnnaagcttggcgtggatccgatatcaactagatcttgagacaaatggcagtattcatccacaattttaaaagaaaaggggggattggggggtacagtgcaggggaaagaatagtagacataatagcaacagacatacaaactaaag

SEQ ID NO: 15243 - DNA, 301 bp, Artificial Sequence
  Arid1a.2_NTC.28
  crRNA array
  misc_feature (148)..(157): n is a, c, g, or t
cttggctttatatatcttgtggaaaggacgaaacaccgtaatttctactaagtgtagatagtgcaagatcgagcgtggataatttctactaagtgtagataccgctaatcggcgtaaacttaatttctactaagtgtagatttttttnnnnnnnnnnaagcttggcgtggatccgatatcaactagatcttgagacaaatggcagtattcatccacaattttaaaagaaaaggggggattggggggtacagtgcaggggaaagaatagtagacataatagcaacagacatacaaactaaag

SEQ ID NO: 15244 - DNA, 301 bp, Artificial Sequence
  Arid1a.2_NTC.29
  crRNA array
  misc_feature (148)..(157): n is a, c, g, or t
cttggctttatatatcttgtggaaaggacgaaacaccgtaatttctactaagtgtagatagtgcaagatcgagcgtggataatttctactaagtgtagatcgcgatctataccgtctatataatttctactaagtgtagatttttttnnnnnnnnnnaagcttggcgtggatccgatatcaactagatcttgagacaaatggcagtattcatccacaattttaaaagaaaaggggggattggggggtacagtgcaggggaaagaatagtagacataatagcaacagacatacaaactaaag

SEQ ID NO: 15245 - DNA, 301 bp, Artificial Sequence
  Arid1a.2_NTC.3
  crRNA array
  misc_feature (148)..(157): n is a, c, g, or t
cttggctttatatatcttgtggaaaggacgaaacaccgtaatttctactaagtgtagatagtgcaagatcgagcgtggataatttctactaagtgtagattcgacgcgagacgacgtacataatttctactaagtgtagatttttttnnnnnnnnnnaagcttggcgtggatccgatatcaactagatcttgagacaaatggcagtattcatccacaattttaaaagaaaaggggggattggggggtacagtgcaggggaaagaatagtagacataatagcaacagacatacaaactaaag

SEQ ID NO: 15246 - DNA, 301 bp, Artificial Sequence
  Arid1a.2_NTC.30
  crRNA array
  misc_feature (148)..(157): n is a, c, g, or t
cttggctttatatatcttgtggaaaggacgaaacaccgtaatttctactaagtgtagatagtgcaagatcgagcgtggataatttctactaagtgtagatcgatcgtacgggtgtcctaataatttctactaagtgtagatttttttnnnnnnnnnnaagcttggcgtggatccgatatcaactagatcttgagacaaatggcagtattcatccacaattttaaaagaaaaggggggattggggggtacagtgcaggggaaagaatagtagacataatagcaacagacatacaaactaaag

SEQ ID NO: 15247 - DNA, 301 bp, Artificial Sequence
  Arid1a.2_NTC.31
  crRNA array
  misc_feature (148)..(157): n is a, c, g, or t
cttggctttatatatcttgtggaaaggacgaaacaccgtaatttctactaagtgtagatagtgcaagatcgagcgtggataatttctactaagtgtagatgccgaccgcgtgattgtaggtaatttctactaagtgtagatttttttnnnnnnnnnnaagcttggcgtggatccgatatcaactagatcttgagacaaatggcagtattcatccacaattttaaaagaaaaggggggattggggggtacagtgcaggggaaagaatagtagacataatagcaacagacatacaaactaaag

SEQ ID NO: 15248 - DNA, 301 bp, Artificial Sequence
  Arid1a.2_NTC.32
  crRNA array
  misc_feature (148)..(157): n is a, c, g, or t
cttggctttatatatcttgtggaaaggacgaaacaccgtaatttctactaagtgtagatagtgcaagatcgagcgtggataatttctactaagtgtagatgcacgttacgcccgggtcactaatttctactaagtgtagatttttttnnnnnnnnnnaagcttggcgtggatccgatatcaactagatcttgagacaaatggcagtattcatccacaattttaaaagaaaaggggggattggggggtacagtgcaggggaaagaatagtagacataatagcaacagacatacaaactaaag

SEQ ID NO: 15249 - DNA, 301 bp, Artificial Sequence
  Arid1a.2_NTC.33
  crRNA array
  misc_feature (148)..(157): n is a, c, g, or t
cttggctttatatatcttgtggaaaggacgaaacaccgtaatttctactaagtgtagatagtgcaagatcgagcgtggataatttctactaagtgtagattaagcgaccgacgcattcgctaatttctactaagtgtagatttttttnnnnnnnnnnaagcttggcgtggatccgatatcaactagatcttgagacaaatggcagtattcatccacaattttaaaagaaaaggggggattggggggtacagtgcaggggaaagaatagtagacataatagcaacagacatacaaactaaag

SEQ ID NO: 15250 - DNA, 301 bp, Artificial Sequence
  Arid1a.2_NTC.34
  crRNA array
  misc_feature (148)..(157): n is a, c, g, or t
cttggctttatatatcttgtggaaaggacgaaacaccgtaatttctactaagtgtagatagtgcaagatcgagcgtggataatttctactaagtgtagattagcgttcgacacgtgaaactaatttctactaagtgtagatttttttnnnnnnnnnnaagcttggcgtggatccgatatcaactagatcttgagacaaatggcagtattcatccacaattttaaaagaaaaggggggattggggggtacagtgcaggggaaagaatagtagacataatagcaacagacatacaaactaaag

SEQ ID NO: 15251 - DNA, 301 bp, Artificial Sequence
  Arid1a.2_NTC.35
  crRNA array
  misc_feature (148)..(157): n is a, c, g, or t
cttggctttatatatcttgtggaaaggacgaaacaccgtaatttctactaagtgtagatagtgcaagatcgagcgtggataatttctactaagtgtagattggcgcgtaatcgctattcgtaatttctactaagtgtagatttttttnnnnnnnnnnaagcttggcgtggatccgatatcaactagatcttgagacaaatggcagtattcatccacaattttaaaagaaaaggggggattggggggtacagtgcaggggaaagaatagtagacataatagcaacagacatacaaactaaag

SEQ ID NO: 15252 - DNA, 301 bp, Artificial Sequence
  Arid1a.2_NTC.36
  crRNA array
  misc_feature (148)..(157): n is a, c, g, or t
cttggctttatatatcttgtggaaaggacgaaacaccgtaatttctactaagtgtagatagtgcaagatcgagcgtggataatttctactaagtgtagatcaacccgccgtagcgggccttaatttctactaagtgtagatttttttnnnnnnnnnnaagcttggcgtggatccgatatcaactagatcttgagacaaatggcagtattcatccacaattttaaaagaaaaggggggattggggggtacagtgcaggggaaagaatagtagacataatagcaacagacatacaaactaaag

SEQ ID NO: 15253 - DNA, 301 bp, Artificial Sequence
  Arid1a.2_NTC.37
  crRNA array
  misc_feature (148)..(157): n is a, c, g, or t
cttggctttatatatcttgtggaaaggacgaaacaccgtaatttctactaagtgtagatagtgcaagatcgagcgtggataatttctactaagtgtagattttgcgttgacgcgattacttaatttctactaagtgtagatttttttnnnnnnnnnnaagcttggcgtggatccgatatcaactagatcttgagacaaatggcagtattcatccacaattttaaaagaaaaggggggattggggggtacagtgcaggggaaagaatagtagacataatagcaacagacatacaaactaaag

SEQ ID NO: 15254 - DNA, 301 bp, Artificial Sequence
  Arid1a.2_NTC.38
  crRNA array
  misc_feature (148)..(157): n is a, c, g, or t
cttggctttatatatcttgtggaaaggacgaaacaccgtaatttctactaagtgtagatagtgcaagatcgagcgtggataatttctactaagtgtagataacggagcgcgatactaccataatttctactaagtgtagatttttttnnnnnnnnnnaagcttggcgtggatccgatatcaactagatcttgagacaaatggcagtattcatccacaattttaaaagaaaaggggggattggggggtacagtgcaggggaaagaatagtagacataatagcaacagacatacaaactaaag

SEQ ID NO: 15255 - DNA, 301 bp, Artificial Sequence
  Arid1a.2_NTC.39
  crRNA array
  misc_feature (148)..(157): n is a, c, g, or t
cttggctttatatatcttgtggaaaggacgaaacaccgtaatttctactaagtgtagatagtgcaagatcgagcgtggataatttctactaagtgtagatccggacgttataacgtttcttaatttctactaagtgtagatttttttnnnnnnnnnnaagcttggcgtggatccgatatcaactagatcttgagacaaatggcagtattcatccacaattttaaaagaaaaggggggattggggggtacagtgcaggggaaagaatagtagacataatagcaacagacatacaaactaaag

SEQ ID NO: 15256 - DNA, 301 bp, Artificial Sequence
  Arid1a.2_NTC.4
  crRNA array
  misc_feature (148)..(157): n is a, c, g, or t
cttggctttatatatcttgtggaaaggacgaaacaccgtaatttctactaagtgtagatagtgcaagatcgagcgtggataatttctactaagtgtagatatacccgtcgcgaacgtgagtaatttctactaagtgtagatttttttnnnnnnnnnnaagcttggcgtggatccgatatcaactagatcttgagacaaatggcagtattcatccacaattttaaaagaaaaggggggattggggggtacagtgcaggggaaagaatagtagacataatagcaacagacatacaaactaaag

SEQ ID NO: 15257 - DNA, 301 bp, Artificial Sequence
  Arid1a.2_NTC.40
  crRNA array
  misc_feature (148)..(157): n is a, c, g, or t
cttggctttatatatcttgtggaaaggacgaaacaccgtaatttctactaagtgtagatagtgcaagatcgagcgtggataatttctactaagtgtagatattcgcgaacccggccggaataatttctactaagtgtagatttttttnnnnnnnnnnaagcttggcgtggatccgatatcaactagatcttgagacaaatggcagtattcatccacaattttaaaagaaaaggggggattggggggtacagtgcaggggaaagaatagtagacataatagcaacagacatacaaactaaag

SEQ ID NO: 15258 - DNA, 301 bp, Artificial Sequence
  Arid1a.2_NTC.41
  crRNA array
  misc_feature (148)..(157): n is a, c, g, or t
cttggctttatatatcttgtggaaaggacgaaacaccgtaatttctactaagtgtagatagtgcaagatcgagcgtggataatttctactaagtgtagatttgatggcgcgacgcgttattaatttctactaagtgtagatttttttnnnnnnnnnnaagcttggcgtggatccgatatcaactagatcttgagacaaatggcagtattcatccacaattttaaaagaaaaggggggattggggggtacagtgcaggggaaagaatagtagacataatagcaacagacatacaaactaaag

SEQ ID NO: 15259 - DNA, 301 bp, Artificial Sequence
  Arid1a.2_NTC.42
  crRNA array
  misc_feature (148)..(157): n is a, c, g, or t
cttggctttatatatcttgtggaaaggacgaaacaccgtaatttctactaagtgtagatagtgcaagatcgagcgtggataatttctactaagtgtagatggtcaaatcgcggcgataactaatttctactaagtgtagatttttttnnnnnnnnnnaagcttggcgtggatccgatatcaactagatcttgagacaaatggcagtattcatccacaattttaaaagaaaaggggggattggggggtacagtgcaggggaaagaatagtagacataatagcaacagacatacaaactaaag

SEQ ID NO: 15260 - DNA, 301 bp, Artificial Sequence
  Arid1a.2_NTC.43
  crRNA array
  misc_feature (148)..(157): n is a, c, g, or t
cttggctttatatatcttgtggaaaggacgaaacaccgtaatttctactaagtgtagatagtgcaagatcgagcgtggataatttctactaagtgtagatcgactcgcgcattgaactggtaatttctactaagtgtagatttttttnnnnnnnnnnaagcttggcgtggatccgatatcaactagatcttgagacaaatggcagtattcatccacaattttaaaagaaaaggggggattggggggtacagtgcaggggaaagaatagtagacataatagcaacagacatacaaactaaag

SEQ ID NO: 15261 - DNA, 301 bp, Artificial Sequence
  Arid1a.2_NTC.44
  crRNA array
  misc_feature (148)..(157): n is a, c, g, or t
cttggctttatatatcttgtggaaaggacgaaacaccgtaatttctactaagtgtagatagtgcaagatcgagcgtggataatttctactaagtgtagatagcgtcgtacgatttatcgttaatttctactaagtgtagatttttttnnnnnnnnnnaagcttggcgtggatccgatatcaactagatcttgagacaaatggcagtattcatccacaattttaaaagaaaaggggggattggggggtacagtgcaggggaaagaatagtagacataatagcaacagacatacaaactaaag

SEQ ID NO: 15262 - DNA, 301 bp, Artificial Sequence
  Arid1a.2_NTC.45
  crRNA array
  misc_feature (148)..(157): n is a, c, g, or t
cttggctttatatatcttgtggaaaggacgaaacaccgtaatttctactaagtgtagatagtgcaagatcgagcgtggataatttctactaagtgtagatcggaacgcgtgatactagggtaatttctactaagtgtagatttttttnnnnnnnnnnaagcttggcgtggatccgatatcaactagatcttgagacaaatggcagtattcatccacaattttaaaagaaaaggggggattggggggtacagtgcaggggaaagaatagtagacataatagcaacagacatacaaactaaag

SEQ ID NO: 15263 - DNA, 301 bp, Artificial Sequence
  Arid1a.2_NTC.46
  crRNA array
  misc_feature (148)..(157): n is a, c, g, or t
cttggctttatatatcttgtggaaaggacgaaacaccgtaatttctactaagtgtagatagtgcaagatcgagcgtggataatttctactaagtgtagatagcgggtcgtagacgcgcggtaatttctactaagtgtagatttttttnnnnnnnnnnaagcttggcgtggatccgatatcaactagatcttgagacaaatggcagtattcatccacaattttaaaagaaaaggggggattggggggtacagtgcaggggaaagaatagtagacataatagcaacagacatacaaactaaag

SEQ ID NO: 15264 - DNA, 301 bp, Artificial Sequence
  Arid1a.2_NTC.47
  crRNA array
  misc_feature (148)..(157): n is a, c, g, or t
cttggctttatatatcttgtggaaaggacgaaacaccgtaatttctactaagtgtagatagtgcaagatcgagcgtggataatttctactaagtgtagattctcgtatcgcgattgttaataatttctactaagtgtagatttttttnnnnnnnnnnaagcttggcgtggatccgatatcaactagatcttgagacaaatggcagtattcatccacaattttaaaagaaaaggggggattggggggtacagtgcaggggaaagaatagtagacataatagcaacagacatacaaactaaag

SEQ ID NO: 15265 - DNA, 301 bp, Artificial Sequence
  Arid1a.2_NTC.48
  crRNA array
  misc_feature (148)..(157): n is a, c, g, or t
cttggctttatatatcttgtggaaaggacgaaacaccgtaatttctactaagtgtagatagtgcaagatcgagcgtggataatttctactaagtgtagatcggtcgactacggctgttagtaatttctactaagtgtagatttttttnnnnnnnnnnaagcttggcgtggatccgatatcaactagatcttgagacaaatggcagtattcatccacaattttaaaagaaaaggggggattggggggtacagtgcaggggaaagaatagtagacataatagcaacagacatacaaactaaag

SEQ ID NO: 15266 - DNA, 301 bp, Artificial Sequence
  Arid1a.2_NTC.49
  crRNA array
  misc_feature (148)..(157): n is a, c, g, or t
cttggctttatatatcttgtggaaaggacgaaacaccgtaatttctactaagtgtagatagtgcaagatcgagcgtggataatttctactaagtgtagattcggggcgcgtcaactgaattaatttctactaagtgtagatttttttnnnnnnnnnnaagcttggcgtggatccgatatcaactagatcttgagacaaatggcagtattcatccacaattttaaaagaaaaggggggattggggggtacagtgcaggggaaagaatagtagacataatagcaacagacatacaaactaaag

SEQ ID NO: 15267 - DNA, 301 bp, Artificial Sequence
  Arid1a.2_NTC.5
  crRNA array
  misc_feature (148)..(157): n is a, c, g, or t
cttggctttatatatcttgtggaaaggacgaaacaccgtaatttctactaagtgtagatagtgcaagatcgagcgtggataatttctactaagtgtagatgcttacgcgtcgcgaatgtataatttctactaagtgtagatttttttnnnnnnnnnnaagcttggcgtggatccgatatcaactagatcttgagacaaatggcagtattcatccacaattttaaaagaaaaggggggattggggggtacagtgcaggggaaagaatagtagacataatagcaacagacatacaaactaaag

SEQ ID NO: 15268 - DNA, 301 bp, Artificial Sequence
  Arid1a.2_NTC.50
  crRNA array
  misc_feature (148)..(157): n is a, c, g, or t
cttggctttatatatcttgtggaaaggacgaaacaccgtaatttctactaagtgtagatagtgcaagatcgagcgtggataatttctactaagtgtagatattgccgctcgcgcaaaatctaatttctactaagtgtagatttttttnnnnnnnnnnaagcttggcgtggatccgatatcaactagatcttgagacaaatggcagtattcatccacaattttaaaagaaaaggggggattggggggtacagtgcaggggaaagaatagtagacataatagcaacagacatacaaactaaag

SEQ ID NO: 15269 - DNA, 301 bp, Artificial Sequence
  Arid1a.2_NTC.51
  crRNA array
  misc_feature (148)..(157): n is a, c, g, or t
cttggctttatatatcttgtggaaaggacgaaacaccgtaatttctactaagtgtagatagtgcaagatcgagcgtggataatttctactaagtgtagattaacgcgcaacacgccaatgtaatttctactaagtgtagatttttttnnnnnnnnnnaagcttggcgtggatccgatatcaactagatcttgagacaaatggcagtattcatccacaattttaaaagaaaaggggggattggggggtacagtgcaggggaaagaatagtagacataatagcaacagacatacaaactaaag

SEQ ID NO: 15270 - DNA, 301 bp, Artificial Sequence
  Arid1a.2_NTC.6
  crRNA array
  misc_feature (148)..(157): n is a, c, g, or t
cttggctttatatatcttgtggaaaggacgaaacaccgtaatttctactaagtgtagatagtgcaagatcgagcgtggataatttctactaagtgtagatcgaatcgcgcctacgggaattaatttctactaagtgtagatttttttnnnnnnnnnnaagcttggcgtggatccgatatcaactagatcttgagacaaatggcagtattcatccacaattttaaaagaaaaggggggattggggggtacagtgcaggggaaagaatagtagacataatagcaacagacatacaaactaaag

SEQ ID NO: 15271 - DNA, 301 bp, Artificial Sequence
  Arid1a.2_NTC.7
  crRNA array
  misc_feature (148)..(157): n is a, c, g, or t
cttggctttatatatcttgtggaaaggacgaaacaccgtaatttctactaagtgtagatagtgcaagatcgagcgtggataatttctactaagtgtagatcgccgaacggataagactattaatttctactaagtgtagatttttttnnnnnnnnnnaagcttggcgtggatccgatatcaactagatcttgagacaaatggcagtattcatccacaattttaaaagaaaaggggggattggggggtacagtgcaggggaaagaatagtagacataatagcaacagacatacaaactaaag

SEQ ID NO: 15272 - DNA, 301 bp, Artificial Sequence
  Arid1a.2_NTC.8
  crRNA array
  misc_feature (148)..(157): n is a, c, g, or t
cttggctttatatatcttgtggaaaggacgaaacaccgtaatttctactaagtgtagatagtgcaagatcgagcgtggataatttctactaagtgtagatcgaccgaggttacgctgggataatttctactaagtgtagatttttttnnnnnnnnnnaagcttggcgtggatccgatatcaactagatcttgagacaaatggcagtattcatccacaattttaaaagaaaaggggggattggggggtacagtgcaggggaaagaatagtagacataatagcaacagacatacaaactaaag

SEQ ID NO: 15273 - DNA, 301 bp, Artificial Sequence
  Arid1a.2_NTC.9
  crRNA array
  misc_feature (148)..(157): n is a, c, g, or t
cttggctttatatatcttgtggaaaggacgaaacaccgtaatttctactaagtgtagatagtgcaagatcgagcgtggataatttctactaagtgtagatatcgccgtacggctatggcataatttctactaagtgtagatttttttnnnnnnnnnnaagcttggcgtggatccgatatcaactagatcttgagacaaatggcagtattcatccacaattttaaaagaaaaggggggattggggggtacagtgcaggggaaagaatagtagacataatagcaacagacatacaaactaaag

SEQ ID NO: 15274 - DNA, 301 bp, Artificial Sequence
  Arid1a.3_NTC.0
  crRNA array
  misc_feature (148)..(157): n is a, c, g, or t
cttggctttatatatcttgtggaaaggacgaaacaccgtaatttctactaagtgtagatagtgagctggcagcactgcttaatttctactaagtgtagattatagcgtcgcgcgctaatttaatttctactaagtgtagatttttttnnnnnnnnnnaagcttggcgtggatccgatatcaactagatcttgagacaaatggcagtattcatccacaattttaaaagaaaaggggggattggggggtacagtgcaggggaaagaatagtagacataatagcaacagacatacaaactaaag

SEQ ID NO: 15275 - DNA, 301 bp, Artificial Sequence
  Arid1a.3_NTC.1
  crRNA array
  misc_feature (148)..(157): n is a, c, g, or t
cttggctttatatatcttgtggaaaggacgaaacaccgtaatttctactaagtgtagatagtgagctggcagcactgcttaatttctactaagtgtagatcgcgtaaccgttccggctcctaatttctactaagtgtagatttttttnnnnnnnnnnaagcttggcgtggatccgatatcaactagatcttgagacaaatggcagtattcatccacaattttaaaagaaaaggggggattggggggtacagtgcaggggaaagaatagtagacataatagcaacagacatacaaactaaag

SEQ ID NO: 15276 - DNA, 301 bp, Artificial Sequence
  Arid1a.3_NTC.10
  crRNA array
  misc_feature (148)..(157): n is a, c, g, or t
cttggctttatatatcttgtggaaaggacgaaacaccgtaatttctactaagtgtagatagtgagctggcagcactgcttaatttctactaagtgtagatcgctaagttcgcgcgggccgtaatttctactaagtgtagatttttttnnnnnnnnnnaagcttggcgtggatccgatatcaactagatcttgagacaaatggcagtattcatccacaattttaaaagaaaaggggggattggggggtacagtgcaggggaaagaatagtagacataatagcaacagacatacaaactaaag

SEQ ID NO: 15277 - DNA, 301 bp, Artificial Sequence
  Arid1a.3_NTC.11
  crRNA array
  misc_feature (148)..(157): n is a, c, g, or t
cttggctttatatatcttgtggaaaggacgaaacaccgtaatttctactaagtgtagatagtgagctggcagcactgcttaatttctactaagtgtagatcgttcgtcgacgaagcaatctaatttctactaagtgtagatttttttnnnnnnnnnnaagcttggcgtggatccgatatcaactagatcttgagacaaatggcagtattcatccacaattttaaaagaaaaggggggattggggggtacagtgcaggggaaagaatagtagacataatagcaacagacatacaaactaaag

SEQ ID NO: 15278 - DNA, 301 bp, Artificial Sequence
  Arid1a.3_NTC.12
  crRNA array
  misc_feature (148)..(157): n is a, c, g, or t
cttggctttatatatcttgtggaaaggacgaaacaccgtaatttctactaagtgtagatagtgagctggcagcactgcttaatttctactaagtgtagatcgccgacgattaatcaatagtaatttctactaagtgtagatttttttnnnnnnnnnnaagcttggcgtggatccgatatcaactagatcttgagacaaatggcagtattcatccacaattttaaaagaaaaggggggattggggggtacagtgcaggggaaagaatagtagacataatagcaacagacatacaaactaaag

SEQ ID NO: 15279 - DNA, 301 bp, Artificial Sequence
  Arid1a.3_NTC.13
  crRNA array
  misc_feature (148)..(157): n is a, c, g, or t
cttggctttatatatcttgtggaaaggacgaaacaccgtaatttctactaagtgtagatagtgagctggcagcactgcttaatttctactaagtgtagatgaccgttgtatcgcgatcaataatttctactaagtgtagatttttttnnnnnnnnnnaagcttggcgtggatccgatatcaactagatcttgagacaaatggcagtattcatccacaattttaaaagaaaaggggggattggggggtacagtgcaggggaaagaatagtagacataatagcaacagacatacaaactaaag

SEQ ID NO: 15280 - DNA, 301 bp, Artificial Sequence
  Arid1a.3_NTC.14
  crRNA array
  misc_feature (148)..(157): n is a, c, g, or t
cttggctttatatatcttgtggaaaggacgaaacaccgtaatttctactaagtgtagatagtgagctggcagcactgcttaatttctactaagtgtagatccgttcgtgcgatagtgttttaatttctactaagtgtagatttttttnnnnnnnnnnaagcttggcgtggatccgatatcaactagatcttgagacaaatggcagtattcatccacaattttaaaagaaaaggggggattggggggtacagtgcaggggaaagaatagtagacataatagcaacagacatacaaactaaag

SEQ ID NO: 15281 - DNA, 301 bp, Artificial Sequence
  Arid1a.3_NTC.15
  crRNA array
  misc_feature (148)..(157): n is a, c, g, or t
cttggctttatatatcttgtggaaaggacgaaacaccgtaatttctactaagtgtagatagtgagctggcagcactgcttaatttctactaagtgtagatgttgtcgtgccgcgaatttataatttctactaagtgtagatttttttnnnnnnnnnnaagcttggcgtggatccgatatcaactagatcttgagacaaatggcagtattcatccacaattttaaaagaaaaggggggattggggggtacagtgcaggggaaagaatagtagacataatagcaacagacatacaaactaaag

SEQ ID NO: 15282 - DNA, 301 bp, Artificial Sequence
  Arid1a.3_NTC.16
  crRNA array
  misc_feature (148)..(157): n is a, c, g, or t
cttggctttatatatcttgtggaaaggacgaaacaccgtaatttctactaagtgtagatagtgagctggcagcactgcttaatttctactaagtgtagatcggtacgttagacgaaaatttaatttctactaagtgtagatttttttnnnnnnnnnnaagcttggcgtggatccgatatcaactagatcttgagacaaatggcagtattcatccacaattttaaaagaaaaggggggattggggggtacagtgcaggggaaagaatagtagacataatagcaacagacatacaaactaaag

SEQ ID NO: 15283 - DNA, 301 bp, Artificial Sequence
  Arid1a.3_NTC.17
  crRNA array
  misc_feature (148)..(157): n is a, c, g, or t
cttggctttatatatcttgtggaaaggacgaaacaccgtaatttctactaagtgtagatagtgagctggcagcactgcttaatttctactaagtgtagattatcgaacgctatcgaacgttaatttctactaagtgtagatttttttnnnnnnnnnnaagcttggcgtggatccgatatcaactagatcttgagacaaatggcagtattcatccacaattttaaaagaaaaggggggattggggggtacagtgcaggggaaagaatagtagacataatagcaacagacatacaaactaaag

SEQ ID NO: 15284 - DNA, 301 bp, Artificial Sequence
  Arid1a.3_NTC.18
  crRNA array
  misc_feature (148)..(157): n is a, c, g, or t
cttggctttatatatcttgtggaaaggacgaaacaccgtaatttctactaagtgtagatagtgagctggcagcactgcttaatttctactaagtgtagattccggttacgaccggcaaaataatttctactaagtgtagatttttttnnnnnnnnnnaagcttggcgtggatccgatatcaactagatcttgagacaaatggcagtattcatccacaattttaaaagaaaaggggggattggggggtacagtgcaggggaaagaatagtagacataatagcaacagacatacaaactaaag

SEQ ID NO: 15285 - DNA, 301 bp, Artificial Sequence
  Arid1a.3_NTC.19
  crRNA array
  misc_feature (148)..(157): n is a, c, g, or t
cttggctttatatatcttgtggaaaggacgaaacaccgtaatttctactaagtgtagatagtgagctggcagcactgcttaatttctactaagtgtagatcgtcgtagaacgatacccgataatttctactaagtgtagatttttttnnnnnnnnnnaagcttggcgtggatccgatatcaactagatcttgagacaaatggcagtattcatccacaattttaaaagaaaaggggggattggggggtacagtgcaggggaaagaatagtagacataatagcaacagacatacaaactaaag

SEQ ID NO: 15286 - DNA, 301 bp, Artificial Sequence
  Arid1a.3_NTC.2
  crRNA array
  misc_feature (148)..(157): n is a, c, g, or t
cttggctttatatatcttgtggaaaggacgaaacaccgtaatttctactaagtgtagatagtgagctggcagcactgcttaatttctactaagtgtagatttatgtcgcgccgcgacccgtaatttctactaagtgtagatttttttnnnnnnnnnnaagcttggcgtggatccgatatcaactagatcttgagacaaatggcagtattcatccacaattttaaaagaaaaggggggattggggggtacagtgcaggggaaagaatagtagacataatagcaacagacatacaaactaaag

SEQ ID NO: 15287 - DNA, 301 bp, Artificial Sequence
  Arid1a.3_NTC.20
  crRNA array
  misc_feature (148)..(157): n is a, c, g, or t
cttggctttatatatcttgtggaaaggacgaaacaccgtaatttctactaagtgtagatagtgagctggcagcactgcttaatttctactaagtgtagatattccggcgcgaccagaagataatttctactaagtgtagatttttttnnnnnnnnnnaagcttggcgtggatccgatatcaactagatcttgagacaaatggcagtattcatccacaattttaaaagaaaaggggggattggggggtacagtgcaggggaaagaatagtagacataatagcaacagacatacaaactaaag

SEQ ID NO: 15288 - DNA, 301 bp, Artificial Sequence
  Arid1a.3_NTC.21
  crRNA array
  misc_feature (148)..(157): n is a, c, g, or t
cttggctttatatatcttgtggaaaggacgaaacaccgtaatttctactaagtgtagatagtgagctggcagcactgcttaatttctactaagtgtagatgtataacttcgcgcggtccgtaatttctactaagtgtagatttttttnnnnnnnnnnaagcttggcgtggatccgatatcaactagatcttgagacaaatggcagtattcatccacaattttaaaagaaaaggggggattggggggtacagtgcaggggaaagaatagtagacataatagcaacagacatacaaactaaag

SEQ ID NO: 15289 - DNA, 301 bp, Artificial Sequence
  Arid1a.3_NTC.22
  crRNA array
  misc_feature (148)..(157): n is a, c, g, or t
cttggctttatatatcttgtggaaaggacgaaacaccgtaatttctactaagtgtagatagtgagctggcagcactgcttaatttctactaagtgtagatgcgcgtcaacgtaatgtgcctaatttctactaagtgtagatttttttnnnnnnnnnnaagcttggcgtggatccgatatcaactagatcttgagacaaatggcagtattcatccacaattttaaaagaaaaggggggattggggggtacagtgcaggggaaagaatagtagacataatagcaacagacatacaaactaaag

SEQ ID NO: 15290 - DNA, 301 bp, Artificial Sequence
  Arid1a.3_NTC.23
  crRNA array
  misc_feature (148)..(157): n is a, c, g, or t
cttggctttatatatcttgtggaaaggacgaaacaccgtaatttctactaagtgtagatagtgagctggcagcactgcttaatttctactaagtgtagatacgcgctattatcgtaggtgtaatttctactaagtgtagatttttttnnnnnnnnnnaagcttggcgtggatccgatatcaactagatcttgagacaaatggcagtattcatccacaattttaaaagaaaaggggggattggggggtacagtgcaggggaaagaatagtagacataatagcaacagacatacaaactaaag

SEQ ID NO: 15291 - DNA, 301 bp, Artificial Sequence
  Arid1a.3_NTC.24
  crRNA array
  misc_feature (148)..(157): n is a, c, g, or t
cttggctttatatatcttgtggaaaggacgaaacaccgtaatttctactaagtgtagatagtgagctggcagcactgcttaatttctactaagtgtagatactatcgacgttcgtcccggtaatttctactaagtgtagatttttttnnnnnnnnnnaagcttggcgtggatccgatatcaactagatcttgagacaaatggcagtattcatccacaattttaaaagaaaaggggggattggggggtacagtgcaggggaaagaatagtagacataatagcaacagacatacaaactaaag

SEQ ID NO: 15292 - DNA, 301 bp, Artificial Sequence
  Arid1a.3_NTC.25
  crRNA array
  misc_feature (148)..(157): n is a, c, g, or t
cttggctttatatatcttgtggaaaggacgaaacaccgtaatttctactaagtgtagatagtgagctggcagcactgcttaatttctactaagtgtagattcgcgttatcgtgccgtgcgtaatttctactaagtgtagatttttttnnnnnnnnnnaagcttggcgtggatccgatatcaactagatcttgagacaaatggcagtattcatccacaattttaaaagaaaaggggggattggggggtacagtgcaggggaaagaatagtagacataatagcaacagacatacaaactaaag

SEQ ID NO: 15293 - DNA, 301 bp, Artificial Sequence
  Arid1a.3_NTC.26
  crRNA array
  misc_feature (148)..(157): n is a, c, g, or t
cttggctttatatatcttgtggaaaggacgaaacaccgtaatttctactaagtgtagatagtgagctggcagcactgcttaatttctactaagtgtagatcgcgacggcggttttaacactaatttctactaagtgtagatttttttnnnnnnnnnnaagcttggcgtggatccgatatcaactagatcttgagacaaatggcagtattcatccacaattttaaaagaaaaggggggattggggggtacagtgcaggggaaagaatagtagacataatagcaacagacatacaaactaaag

SEQ ID NO: 15294 - DNA, 301 bp, Artificial Sequence
  Arid1a.3_NTC.27
  crRNA array
  misc_feature (148)..(157): n is a, c, g, or t
cttggctttatatatcttgtggaaaggacgaaacaccgtaatttctactaagtgtagatagtgagctggcagcactgcttaatttctactaagtgtagatgtcgcgttgcgaccggcgcttaatttctactaagtgtagatttttttnnnnnnnnnnaagcttggcgtggatccgatatcaactagatcttgagacaaatggcagtattcatccacaattttaaaagaaaaggggggattggggggtacagtgcaggggaaagaatagtagacataatagcaacagacatacaaactaaag

SEQ ID NO: 15295 - DNA, 301 bp, Artificial Sequence
  Arid1a.3_NTC.28
  crRNA array
  misc_feature (148)..(157): n is a, c, g, or t
cttggctttatatatcttgtggaaaggacgaaacaccgtaatttctactaagtgtagatagtgagctggcagcactgcttaatttctactaagtgtagataccgctaatcggcgtaaacttaatttctactaagtgtagatttttttnnnnnnnnnnaagcttggcgtggatccgatatcaactagatcttgagacaaatggcagtattcatccacaattttaaaagaaaaggggggattggggggtacagtgcaggggaaagaatagtagacataatagcaacagacatacaaactaaag

SEQ ID NO: 15296 - DNA, 301 bp, Artificial Sequence
  Arid1a.3_NTC.29
  crRNA array
  misc_feature (148)..(157): n is a, c, g, or t
cttggctttatatatcttgtggaaaggacgaaacaccgtaatttctactaagtgtagatagtgagctggcagcactgcttaatttctactaagtgtagatcgcgatctataccgtctatataatttctactaagtgtagatttttttnnnnnnnnnnaagcttggcgtggatccgatatcaactagatcttgagacaaatggcagtattcatccacaattttaaaagaaaaggggggattggggggtacagtgcaggggaaagaatagtagacataatagcaacagacatacaaactaaag

SEQ ID NO: 15297 - DNA, 301 bp, Artificial Sequence
  Arid1a.3_NTC.3
  crRNA array
  misc_feature (148)..(157): n is a, c, g, or t
cttggctttatatatcttgtggaaaggacgaaacaccgtaatttctactaagtgtagatagtgagctggcagcactgcttaatttctactaagtgtagattcgacgcgagacgacgtacataatttctactaagtgtagatttttttnnnnnnnnnnaagcttggcgtggatccgatatcaactagatcttgagacaaatggcagtattcatccacaattttaaaagaaaaggggggattggggggtacagtgcaggggaaagaatagtagacataatagcaacagacatacaaactaaag

SEQ ID NO: 15298 - DNA, 301 bp, Artificial Sequence
  Arid1a.3_NTC.30
  crRNA array
  misc_feature (148)..(157): n is a, c, g, or t
cttggctttatatatcttgtggaaaggacgaaacaccgtaatttctactaagtgtagatagtgagctggcagcactgcttaatttctactaagtgtagatcgatcgtacgggtgtcctaataatttctactaagtgtagatttttttnnnnnnnnnnaagcttggcgtggatccgatatcaactagatcttgagacaaatggcagtattcatccacaattttaaaagaaaaggggggattggggggtacagtgcaggggaaagaatagtagacataatagcaacagacatacaaactaaag

SEQ ID NO: 15299 - DNA, 301 bp, Artificial Sequence
  Arid1a.3_NTC.31
  crRNA array
  misc_feature (148)..(157): n is a, c, g, or t
cttggctttatatatcttgtggaaaggacgaaacaccgtaatttctactaagtgtagatagtgagctggcagcactgcttaatttctactaagtgtagatgccgaccgcgtgattgtaggtaatttctactaagtgtagatttttttnnnnnnnnnnaagcttggcgtggatccgatatcaactagatcttgagacaaatggcagtattcatccacaattttaaaagaaaaggggggattggggggtacagtgcaggggaaagaatagtagacataatagcaacagacatacaaactaaag

SEQ ID NO: 15300 - DNA, 301 bp, Artificial Sequence
  Arid1a.3_NTC.32
  crRNA array
  misc_feature (148)..(157): n is a, c, g, or t
cttggctttatatatcttgtggaaaggacgaaacaccgtaatttctactaagtgtagatagtgagctggcagcactgcttaatttctactaagtgtagatgcacgttacgcccgggtcactaatttctactaagtgtagatttttttnnnnnnnnnnaagcttggcgtggatccgatatcaactagatcttgagacaaatggcagtattcatccacaattttaaaagaaaaggggggattggggggtacagtgcaggggaaagaatagtagacataatagcaacagacatacaaactaaag

SEQ ID NO: 15301 - DNA, 301 bp, Artificial Sequence
  Arid1a.3_NTC.33
  crRNA array
  misc_feature (148)..(157): n is a, c, g, or t
cttggctttatatatcttgtggaaaggacgaaacaccgtaatttctactaagtgtagatagtgagctggcagcactgcttaatttctactaagtgtagattaagcgaccgacgcattcgctaatttctactaagtgtagatttttttnnnnnnnnnnaagcttggcgtggatccgatatcaactagatcttgagacaaatggcagtattcatccacaattttaaaagaaaaggggggattggggggtacagtgcaggggaaagaatagtagacataatagcaacagacatacaaactaaag

SEQ ID NO: 15302 - DNA, 301 bp, Artificial Sequence
  Arid1a.3_NTC.34
  crRNA array
  misc_feature (148)..(157): n is a, c, g, or t
cttggctttatatatcttgtggaaaggacgaaacaccgtaatttctactaagtgtagatagtgagctggcagcactgcttaatttctactaagtgtagattagcgttcgacacgtgaaactaatttctactaagtgtagatttttttnnnnnnnnnnaagcttggcgtggatccgatatcaactagatcttgagacaaatggcagtattcatccacaattttaaaagaaaaggggggattggggggtacagtgcaggggaaagaatagtagacataatagcaacagacatacaaactaaag

SEQ ID NO: 15303 - DNA, 301 bp, Artificial Sequence
  Arid1a.3_NTC.35
  crRNA array
  misc_feature (148)..(157): n is a, c, g, or t
cttggctttatatatcttgtggaaaggacgaaacaccgtaatttctactaagtgtagatagtgagctggcagcactgcttaatttctactaagtgtagattggcgcgtaatcgctattcgtaatttctactaagtgtagatttttttnnnnnnnnnnaagcttggcgtggatccgatatcaactagatcttgagacaaatggcagtattcatccacaattttaaaagaaaaggggggattggggggtacagtgcaggggaaagaatagtagacataatagcaacagacatacaaactaaag

SEQ ID NO: 15304 - DNA, 301 bp, Artificial Sequence
  Arid1a.3_NTC.36
  crRNA array
  misc_feature (148)..(157): n is a, c, g, or t
cttggctttatatatcttgtggaaaggacgaaacaccgtaatttctactaagtgtagatagtgagctggcagcactgcttaatttctactaagtgtagatcaacccgccgtagcgggccttaatttctactaagtgtagatttttttnnnnnnnnnnaagcttggcgtggatccgatatcaactagatcttgagacaaatggcagtattcatccacaattttaaaagaaaaggggggattggggggtacagtgcaggggaaagaatagtagacataatagcaacagacatacaaactaaag

SEQ ID NO: 15305 - DNA, 301 bp, Artificial Sequence
  Arid1a.3_NTC.37
  crRNA array
  misc_feature (148)..(157): n is a, c, g, or t
cttggctttatatatcttgtggaaaggacgaaacaccgtaatttctactaagtgtagatagtgagctggcagcactgcttaatttctactaagtgtagattttgcgttgacgcgattacttaatttctactaagtgtagatttttttnnnnnnnnnnaagcttggcgtggatccgatatcaactagatcttgagacaaatggcagtattcatccacaattttaaaagaaaaggggggattggggggtacagtgcaggggaaagaatagtagacataatagcaacagacatacaaactaaag

SEQ ID NO: 15306 - DNA, 301 bp, Artificial Sequence
  Arid1a.3_NTC.38
  crRNA array
  misc_feature (148)..(157): n is a, c, g, or t
cttggctttatatatcttgtggaaaggacgaaacaccgtaatttctactaagtgtagatagtgagctggcagcactgcttaatttctactaagtgtagataacggagcgcgatactaccataatttctactaagtgtagatttttttnnnnnnnnnnaagcttggcgtggatccgatatcaactagatcttgagacaaatggcagtattcatccacaattttaaaagaaaaggggggattggggggtacagtgcaggggaaagaatagtagacataatagcaacagacatacaaactaaag

SEQ ID NO: 15307 - DNA, 301 bp, Artificial Sequence
  Arid1a.3_NTC.39
  crRNA array
  misc_feature (148)..(157): n is a, c, g, or t
cttggctttatatatcttgtggaaaggacgaaacaccgtaatttctactaagtgtagatagtgagctggcagcactgcttaatttctactaagtgtagatccggacgttataacgtttcttaatttctactaagtgtagatttttttnnnnnnnnnnaagcttggcgtggatccgatatcaactagatcttgagacaaatggcagtattcatccacaattttaaaagaaaaggggggattggggggtacagtgcaggggaaagaatagtagacataatagcaacagacatacaaactaaag

SEQ ID NO: 15308 - DNA, 301 bp, Artificial Sequence
  Arid1a.3_NTC.4
  crRNA array
  misc_feature (148)..(157): n is a, c, g, or t
cttggctttatatatcttgtggaaaggacgaaacaccgtaatttctactaagtgtagatagtgagctggcagcactgcttaatttctactaagtgtagatatacccgtcgcgaacgtgagtaatttctactaagtgtagatttttttnnnnnnnnnnaagcttggcgtggatccgatatcaactagatcttgagacaaatggcagtattcatccacaattttaaaagaaaaggggggattggggggtacagtgcaggggaaagaatagtagacataatagcaacagacatacaaactaaag

SEQ ID NO: 15309 - DNA, 301 bp, Artificial Sequence
  Arid1a.3_NTC.40
  crRNA array
  misc_feature (148)..(157): n is a, c, g, or t
cttggctttatatatcttgtggaaaggacgaaacaccgtaatttctactaagtgtagatagtgagctggcagcactgcttaatttctactaagtgtagatattcgcgaacccggccggaataatttctactaagtgtagatttttttnnnnnnnnnnaagcttggcgtggatccgatatcaactagatcttgagacaaatggcagtattcatccacaattttaaaagaaaaggggggattggggggtacagtgcaggggaaagaatagtagacataatagcaacagacatacaaactaaag

SEQ ID NO: 15310 - DNA, 301 bp, Artificial Sequence
  Arid1a.3_NTC.41
  crRNA array
  misc_feature (148)..(157): n is a, c, g, or t
cttggctttatatatcttgtggaaaggacgaaacaccgtaatttctactaagtgtagatagtgagctggcagcactgcttaatttctactaagtgtagatttgatggcgcgacgcgttattaatttctactaagtgtagatttttttnnnnnnnnnnaagcttggcgtggatccgatatcaactagatcttgagacaaatggcagtattcatccacaattttaaaagaaaaggggggattggggggtacagtgcaggggaaagaatagtagacataatagcaacagacatacaaactaaag

SEQ ID NO: 15311 - DNA, 301 bp, Artificial Sequence
  Arid1a.3_NTC.42
  crRNA array
  misc_feature (148)..(157): n is a, c, g, or t
cttggctttatatatcttgtggaaaggacgaaacaccgtaatttctactaagtgtagatagtgagctggcagcactgcttaatttctactaagtgtagatggtcaaatcgcggcgataactaatttctactaagtgtagatttttttnnnnnnnnnnaagcttggcgtggatccgatatcaactagatcttgagacaaatggcagtattcatccacaattttaaaagaaaaggggggattggggggtacagtgcaggggaaagaatagtagacataatagcaacagacatacaaactaaag

SEQ ID NO: 15312 - DNA, 301 bp, Artificial Sequence
  Arid1a.3_NTC.43
  crRNA array
  misc_feature (148)..(157): n is a, c, g, or t
cttggctttatatatcttgtggaaaggacgaaacaccgtaatttctactaagtgtagatagtgagctggcagcactgcttaatttctactaagtgtagatcgactcgcgcattgaactggtaatttctactaagtgtagatttttttnnnnnnnnnnaagcttggcgtggatccgatatcaactagatcttgagacaaatggcagtattcatccacaattttaaaagaaaaggggggattggggggtacagtgcaggggaaagaatagtagacataatagcaacagacatacaaactaaag

SEQ ID NO: 15313 - DNA, 301 bp, Artificial Sequence
  Arid1a.3_NTC.44
  crRNA array
  misc_feature (148)..(157): n is a, c, g, or t
cttggctttatatatcttgtggaaaggacgaaacaccgtaatttctactaagtgtagatagtgagctggcagcactgcttaatttctactaagtgtagatagcgtcgtacgatttatcgttaatttctactaagtgtagatttttttnnnnnnnnnnaagcttggcgtggatccgatatcaactagatcttgagacaaatggcagtattcatccacaattttaaaagaaaaggggggattggggggtacagtgcaggggaaagaatagtagacataatagcaacagacatacaaactaaag

SEQ ID NO: 15314 - DNA, 301 bp, Artificial Sequence
  Arid1a.3_NTC.45
  crRNA array
  misc_feature (148)..(157): n is a, c, g, or t
cttggctttatatatcttgtggaaaggacgaaacaccgtaatttctactaagtgtagatagtgagctggcagcactgcttaatttctactaagtgtagatcggaacgcgtgatactagggtaatttctactaagtgtagatttttttnnnnnnnnnnaagcttggcgtggatccgatatcaactagatcttgagacaaatggcagtattcatccacaattttaaaagaaaaggggggattggggggtacagtgcaggggaaagaatagtagacataatagcaacagacatacaaactaaag

SEQ ID NO: 15315 - DNA, 301 bp, Artificial Sequence
  Arid1a.3_NTC.46
  crRNA array
  misc_feature (148)..(157): n is a, c, g, or t
cttggctttatatatcttgtggaaaggacgaaacaccgtaatttctactaagtgtagatagtgagctggcagcactgcttaatttctactaagtgtagatagcgggtcgtagacgcgcggtaatttctactaagtgtagatttttttnnnnnnnnnnaagcttggcgtggatccgatatcaactagatcttgagacaaatggcagtattcatccacaattttaaaagaaaaggggggattggggggtacagtgcaggggaaagaatagtagacataatagcaacagacatacaaactaaag

SEQ ID NO: 15316 - DNA, 301 bp, Artificial Sequence
  Arid1a.3_NTC.47
  crRNA array
  misc_feature (148)..(157): n is a, c, g, or t
cttggctttatatatcttgtggaaaggacgaaacaccgtaatttctactaagtgtagatagtgagctggcagcactgcttaatttctactaagtgtagattctcgtatcgcgattgttaataatttctactaagtgtagatttttttnnnnnnnnnnaagcttggcgtggatccgatatcaactagatcttgagacaaatggcagtattcatccacaattttaaaagaaaaggggggattggggggtacagtgcaggggaaagaatagtagacataatagcaacagacatacaaactaaag

SEQ ID NO: 15317 - DNA, 301 bp, Artificial Sequence
  Arid1a.3_NTC.48
  crRNA array
  misc_feature (148)..(157): n is a, c, g, or t
cttggctttatatatcttgtggaaaggacgaaacaccgtaatttctactaagtgtagatagtgagctggcagcactgcttaatttctactaagtgtagatcggtcgactacggctgttagtaatttctactaagtgtagatttttttnnnnnnnnnnaagcttggcgtggatccgatatcaactagatcttgagacaaatggcagtattcatccacaattttaaaagaaaaggggggattggggggtacagtgcaggggaaagaatagtagacataatagcaacagacatacaaactaaag

SEQ ID NO: 15318 - DNA, 301 bp, Artificial Sequence
  Arid1a.3_NTC.49
  crRNA array
  misc_feature (148)..(157): n is a, c, g, or t
cttggctttatatatcttgtggaaaggacgaaacaccgtaatttctactaagtgtagatagtgagctggcagcactgcttaatttctactaagtgtagattcggggcgcgtcaactgaattaatttctactaagtgtagatttttttnnnnnnnnnnaagcttggcgtggatccgatatcaactagatcttgagacaaatggcagtattcatccacaattttaaaagaaaaggggggattggggggtacagtgcaggggaaagaatagtagacataatagcaacagacatacaaactaaag

SEQ ID NO: 15319 - DNA, 301 bp, Artificial Sequence
  Arid1a.3_NTC.5
  crRNA array
  misc_feature (148)..(157): n is a, c, g, or t
cttggctttatatatcttgtggaaaggacgaaacaccgtaatttctactaagtgtagatagtgagctggcagcactgcttaatttctactaagtgtagatgcttacgcgtcgcgaatgtataatttctactaagtgtagatttttttnnnnnnnnnnaagcttggcgtggatccgatatcaactagatcttgagacaaatggcagtattcatccacaattttaaaagaaaaggggggattggggggtacagtgcaggggaaagaatagtagacataatagcaacagacatacaaactaaag

SEQ ID NO: 15320 - DNA, 301 bp, Artificial Sequence
  Arid1a.3_NTC.50
  crRNA array
  misc_feature (148)..(157): n is a, c, g, or t
cttggctttatatatcttgtggaaaggacgaaacaccgtaatttctactaagtgtagatagtgagctggcagcactgcttaatttctactaagtgtagatattgccgctcgcgcaaaatctaatttctactaagtgtagatttttttnnnnnnnnnnaagcttggcgtggatccgatatcaactagatcttgagacaaatggcagtattcatccacaattttaaaagaaaaggggggattggggggtacagtgcaggggaaagaatagtagacataatagcaacagacatacaaactaaag

SEQ ID NO: 15321 - DNA, 301 bp, Artificial Sequence
  Arid1a.3_NTC.51
  crRNA array
  misc_feature (148)..(157): n is a, c, g, or t
cttggctttatatatcttgtggaaaggacgaaacaccgtaatttctactaagtgtagatagtgagctggcagcactgcttaatttctactaagtgtagattaacgcgcaacacgccaatgtaatttctactaagtgtagatttttttnnnnnnnnnnaagcttggcgtggatccgatatcaactagatcttgagacaaatggcagtattcatccacaattttaaaagaaaaggggggattggggggtacagtgcaggggaaagaatagtagacataatagcaacagacatacaaactaaag

SEQ ID NO: 15322 - DNA, 301 bp, Artificial Sequence
  Arid1a.3_NTC.6
  crRNA array
  misc_feature (148)..(157): n is a, c, g, or t
cttggctttatatatcttgtggaaaggacgaaacaccgtaatttctactaagtgtagatagtgagctggcagcactgcttaatttctactaagtgtagatcgaatcgcgcctacgggaattaatttctactaagtgtagatttttttnnnnnnnnnnaagcttggcgtggatccgatatcaactagatcttgagacaaatggcagtattcatccacaattttaaaagaaaaggggggattggggggtacagtgcaggggaaagaatagtagacataatagcaacagacatacaaactaaag

SEQ ID NO: 15323 - DNA, 301 bp, Artificial Sequence
  Arid1a.3_NTC.7
  crRNA array
  misc_feature (148)..(157): n is a, c, g, or t
cttggctttatatatcttgtggaaaggacgaaacaccgtaatttctactaagtgtagatagtgagctggcagcactgcttaatttctactaagtgtagatcgccgaacggataagactattaatttctactaagtgtagatttttttnnnnnnnnnnaagcttggcgtggatccgatatcaactagatcttgagacaaatggcagtattcatccacaattttaaaagaaaaggggggattggggggtacagtgcaggggaaagaatagtagacataatagcaacagacatacaaactaaag

SEQ ID NO: 15324 - DNA, 301 bp, Artificial Sequence
  Arid1a.3_NTC.8
  crRNA array
  misc_feature (148)..(157): n is a, c, g, or t
cttggctttatatatcttgtggaaaggacgaaacaccgtaatttctactaagtgtagatagtgagctggcagcactgcttaatttctactaagtgtagatcgaccgaggttacgctgggataatttctactaagtgtagatttttttnnnnnnnnnnaagcttggcgtggatccgatatcaactagatcttgagacaaatggcagtattcatccacaattttaaaagaaaaggggggattggggggtacagtgcaggggaaagaatagtagacataatagcaacagacatacaaactaaag

SEQ ID NO: 15325 - DNA, 301 bp, Artificial Sequence
  Arid1a.3_NTC.9
  crRNA array
  misc_feature (148)..(157): n is a, c, g, or t
cttggctttatatatcttgtggaaaggacgaaacaccgtaatttctactaagtgtagatagtgagctggcagcactgcttaatttctactaagtgtagatatcgccgtacggctatggcataatttctactaagtgtagatttttttnnnnnnnnnnaagcttggcgtggatccgatatcaactagatcttgagacaaatggcagtattcatccacaattttaaaagaaaaggggggattggggggtacagtgcaggggaaagaatagtagacataatagcaacagacatacaaactaaag

SEQ ID NO: 15326 - DNA, 301 bp, Artificial Sequence
  Arid1a.4_NTC.0
  crRNA array
  misc_feature (148)..(157): n is a, c, g, or t
cttggctttatatatcttgtggaaaggacgaaacaccgtaatttctactaagtgtagatgccgagaccgagtctctgcataatttctactaagtgtagattatagcgtcgcgcgctaatttaatttctactaagtgtagatttttttnnnnnnnnnnaagcttggcgtggatccgatatcaactagatcttgagacaaatggcagtattcatccacaattttaaaagaaaaggggggattggggggtacagtgcaggggaaagaatagtagacataatagcaacagacatacaaactaaag

SEQ ID NO: 15327 - DNA, 301 bp, Artificial Sequence
  Arid1a.4_NTC.1
  crRNA array
  misc_feature (148)..(157): n is a, c, g, or t
cttggctttatatatcttgtggaaaggacgaaacaccgtaatttctactaagtgtagatgccgagaccgagtctctgcataatttctactaagtgtagatcgcgtaaccgttccggctcctaatttctactaagtgtagatttttttnnnnnnnnnnaagcttggcgtggatccgatatcaactagatcttgagacaaatggcagtattcatccacaattttaaaagaaaaggggggattggggggtacagtgcaggggaaagaatagtagacataatagcaacagacatacaaactaaag

SEQ ID NO: 15328 - DNA, 301 bp, Artificial Sequence
  Arid1a.4_NTC.10
  crRNA array
  misc_feature (148)..(157): n is a, c, g, or t
cttggctttatatatcttgtggaaaggacgaaacaccgtaatttctactaagtgtagatgccgagaccgagtctctgcataatttctactaagtgtagatcgctaagttcgcgcgggccgtaatttctactaagtgtagatttttttnnnnnnnnnnaagcttggcgtggatccgatatcaactagatcttgagacaaatggcagtattcatccacaattttaaaagaaaaggggggattggggggtacagtgcaggggaaagaatagtagacataatagcaacagacatacaaactaaag

SEQ ID NO: 15329 - DNA, 301 bp, Artificial Sequence
  Arid1a.4_NTC.11
  crRNA array
  misc_feature (148)..(157): n is a, c, g, or t
cttggctttatatatcttgtggaaaggacgaaacaccgtaatttctactaagtgtagatgccgagaccgagtctctgcataatttctactaagtgtagatcgttcgtcgacgaagcaatctaatttctactaagtgtagatttttttnnnnnnnnnnaagcttggcgtggatccgatatcaactagatcttgagacaaatggcagtattcatccacaattttaaaagaaaaggggggattggggggtacagtgcaggggaaagaatagtagacataatagcaacagacatacaaactaaag

SEQ ID NO: 15330 - DNA, 301 bp, Artificial Sequence
  Arid1a.4_NTC.12
  crRNA array
  misc_feature (148)..(157): n is a, c, g, or t
cttggctttatatatcttgtggaaaggacgaaacaccgtaatttctactaagtgtagatgccgagaccgagtctctgcataatttctactaagtgtagatcgccgacgattaatcaatagtaatttctactaagtgtagatttttttnnnnnnnnnnaagcttggcgtggatccgatatcaactagatcttgagacaaatggcagtattcatccacaattttaaaagaaaaggggggattggggggtacagtgcaggggaaagaatagtagacataatagcaacagacatacaaactaaag

SEQ ID NO: 15331 - DNA, 301 bp, Artificial Sequence
  Arid1a.4_NTC.13
  crRNA array
  misc_feature (148)..(157): n is a, c, g, or t
cttggctttatatatcttgtggaaaggacgaaacaccgtaatttctactaagtgtagatgccgagaccgagtctctgcataatttctactaagtgtagatgaccgttgtatcgcgatcaataatttctactaagtgtagatttttttnnnnnnnnnnaagcttggcgtggatccgatatcaactagatcttgagacaaatggcagtattcatccacaattttaaaagaaaaggggggattggggggtacagtgcaggggaaagaatagtagacataatagcaacagacatacaaactaaag

SEQ ID NO: 15332 - DNA, 301 bp, Artificial Sequence
  Arid1a.4_NTC.14
  crRNA array
  misc_feature (148)..(157): n is a, c, g, or t
cttggctttatatatcttgtggaaaggacgaaacaccgtaatttctactaagtgtagatgccgagaccgagtctctgcataatttctactaagtgtagatccgttcgtgcgatagtgttttaatttctactaagtgtagatttttttnnnnnnnnnnaagcttggcgtggatccgatatcaactagatcttgagacaaatggcagtattcatccacaattttaaaagaaaaggggggattggggggtacagtgcaggggaaagaatagtagacataatagcaacagacatacaaactaaag

SEQ ID NO: 15333 - DNA, 301 bp, Artificial Sequence
  Arid1a.4_NTC.15
  crRNA array
  misc_feature (148)..(157): n is a, c, g, or t
cttggctttatatatcttgtggaaaggacgaaacaccgtaatttctactaagtgtagatgccgagaccgagtctctgcataatttctactaagtgtagatgttgtcgtgccgcgaatttataatttctactaagtgtagatttttttnnnnnnnnnnaagcttggcgtggatccgatatcaactagatcttgagacaaatggcagtattcatccacaattttaaaagaaaaggggggattggggggtacagtgcaggggaaagaatagtagacataatagcaacagacatacaaactaaag

SEQ ID NO: 15334 - DNA, 301 bp, Artificial Sequence
  Arid1a.4_NTC.16
  crRNA array
  misc_feature (148)..(157): n is a, c, g, or t
cttggctttatatatcttgtggaaaggacgaaacaccgtaatttctactaagtgtagatgccgagaccgagtctctgcataatttctactaagtgtagatcggtacgttagacgaaaatttaatttctactaagtgtagatttttttnnnnnnnnnnaagcttggcgtggatccgatatcaactagatcttgagacaaatggcagtattcatccacaattttaaaagaaaaggggggattggggggtacagtgcaggggaaagaatagtagacataatagcaacagacatacaaactaaag

SEQ ID NO: 15335 - DNA, 301 bp, Artificial Sequence
  Arid1a.4_NTC.17
  crRNA array
  misc_feature (148)..(157): n is a, c, g, or t
cttggctttatatatcttgtggaaaggacgaaacaccgtaatttctactaagtgtagatgccgagaccgagtctctgcataatttctactaagtgtagattatcgaacgctatcgaacgttaatttctactaagtgtagatttttttnnnnnnnnnnaagcttggcgtggatccgatatcaactagatcttgagacaaatggcagtattcatccacaattttaaaagaaaaggggggattggggggtacagtgcaggggaaagaatagtagacataatagcaacagacatacaaactaaag

SEQ ID NO: 15336 - DNA, 301 bp, Artificial Sequence
  Arid1a.4_NTC.18
  crRNA array
  misc_feature (148)..(157): n is a, c, g, or t
cttggctttatatatcttgtggaaaggacgaaacaccgtaatttctactaagtgtagatgccgagaccgagtctctgcataatttctactaagtgtagattccggttacgaccggcaaaataatttctactaagtgtagatttttttnnnnnnnnnnaagcttggcgtggatccgatatcaactagatcttgagacaaatggcagtattcatccacaattttaaaagaaaaggggggattggggggtacagtgcaggggaaagaatagtagacataatagcaacagacatacaaactaaag

SEQ ID NO: 15337 - DNA, 301 bp, Artificial Sequence
  Arid1a.4_NTC.19
  crRNA array
  misc_feature (148)..(157): n is a, c, g, or t
cttggctttatatatcttgtggaaaggacgaaacaccgtaatttctactaagtgtagatgccgagaccgagtctctgcataatttctactaagtgtagatcgtcgtagaacgatacccgataatttctactaagtgtagatttttttnnnnnnnnnnaagcttggcgtggatccgatatcaactagatcttgagacaaatggcagtattcatccacaattttaaaagaaaaggggggattggggggtacagtgcaggggaaagaatagtagacataatagcaacagacatacaaactaaag

SEQ ID NO: 15338 - DNA, 301 bp, Artificial Sequence
  Arid1a.4_NTC.2
  crRNA array
  misc_feature (148)..(157): n is a, c, g, or t
cttggctttatatatcttgtggaaaggacgaaacaccgtaatttctactaagtgtagatgccgagaccgagtctctgcataatttctactaagtgtagatttatgtcgcgccgcgacccgtaatttctactaagtgtagatttttttnnnnnnnnnnaagcttggcgtggatccgatatcaactagatcttgagacaaatggcagtattcatccacaattttaaaagaaaaggggggattggggggtacagtgcaggggaaagaatagtagacataatagcaacagacatacaaactaaag

SEQ ID NO: 15339 - DNA, 301 bp, Artificial Sequence
  Arid1a.4_NTC.20
  crRNA array
  misc_feature (148)..(157): n is a, c, g, or t
cttggctttatatatcttgtggaaaggacgaaacaccgtaatttctactaagtgtagatgccgagaccgagtctctgcataatttctactaagtgtagatattccggcgcgaccagaagataatttctactaagtgtagatttttttnnnnnnnnnnaagcttggcgtggatccgatatcaactagatcttgagacaaatggcagtattcatccacaattttaaaagaaaaggggggattggggggtacagtgcaggggaaagaatagtagacataatagcaacagacatacaaactaaag

SEQ ID NO: 15340 - DNA, 301 bp, Artificial Sequence
  Arid1a.4_NTC.21
  crRNA array
  misc_feature (148)..(157): n is a, c, g, or t
cttggctttatatatcttgtggaaaggacgaaacaccgtaatttctactaagtgtagatgccgagaccgagtctctgcataatttctactaagtgtagatgtataacttcgcgcggtccgtaatttctactaagtgtagatttttttnnnnnnnnnnaagcttggcgtggatccgatatcaactagatcttgagacaaatggcagtattcatccacaattttaaaagaaaaggggggattggggggtacagtgcaggggaaagaatagtagacataatagcaacagacatacaaactaaag

SEQ ID NO: 15341 - DNA, 301 bp, Artificial Sequence
  Arid1a.4_NTC.22
  crRNA array
  misc_feature (148)..(157): n is a, c, g, or t
cttggctttatatatcttgtggaaaggacgaaacaccgtaatttctactaagtgtagatgccgagaccgagtctctgcataatttctactaagtgtagatgcgcgtcaacgtaatgtgcctaatttctactaagtgtagatttttttnnnnnnnnnnaagcttggcgtggatccgatatcaactagatcttgagacaaatggcagtattcatccacaattttaaaagaaaaggggggattggggggtacagtgcaggggaaagaatagtagacataatagcaacagacatacaaactaaag

SEQ ID NO: 15342 - DNA, 301 bp, Artificial Sequence
  Arid1a.4_NTC.23
  crRNA array
  misc_feature (148)..(157): n is a, c, g, or t
cttggctttatatatcttgtggaaaggacgaaacaccgtaatttctactaagtgtagatgccgagaccgagtctctgcataatttctactaagtgtagatacgcgctattatcgtaggtgtaatttctactaagtgtagatttttttnnnnnnnnnnaagcttggcgtggatccgatatcaactagatcttgagacaaatggcagtattcatccacaattttaaaagaaaaggggggattggggggtacagtgcaggggaaagaatagtagacataatagcaacagacatacaaactaaag

SEQ ID NO: 15343 - DNA, 301 bp, Artificial Sequence
  Arid1a.4_NTC.24
  crRNA array
  misc_feature (148)..(157): n is a, c, g, or t
cttggctttatatatcttgtggaaaggacgaaacaccgtaatttctactaagtgtagatgccgagaccgagtctctgcataatttctactaagtgtagatactatcgacgttcgtcccggtaatttctactaagtgtagatttttttnnnnnnnnnnaagcttggcgtggatccgatatcaactagatcttgagacaaatggcagtattcatccacaattttaaaagaaaaggggggattggggggtacagtgcaggggaaagaatagtagacataatagcaacagacatacaaactaaag

SEQ ID NO: 15344 - DNA, 301 bp, Artificial Sequence
  Arid1a.4_NTC.25
  crRNA array
  misc_feature (148)..(157): n is a, c, g, or t
cttggctttatatatcttgtggaaaggacgaaacaccgtaatttctactaagtgtagatgccgagaccgagtctctgcataatttctactaagtgtagattcgcgttatcgtgccgtgcgtaatttctactaagtgtagatttttttnnnnnnnnnnaagcttggcgtggatccgatatcaactagatcttgagacaaatggcagtattcatccacaattttaaaagaaaaggggggattggggggtacagtgcaggggaaagaatagtagacataatagcaacagacatacaaactaaag

SEQ ID NO: 15345 - DNA, 301 bp, Artificial Sequence
  Arid1a.4_NTC.26
  crRNA array
  misc_feature (148)..(157): n is a, c, g, or t
cttggctttatatatcttgtggaaaggacgaaacaccgtaatttctactaagtgtagatgccgagaccgagtctctgcataatttctactaagtgtagatcgcgacggcggttttaacactaatttctactaagtgtagatttttttnnnnnnnnnnaagcttggcgtggatccgatatcaactagatcttgagacaaatggcagtattcatccacaattttaaaagaaaaggggggattggggggtacagtgcaggggaaagaatagtagacataatagcaacagacatacaaactaaag

SEQ ID NO: 15346 - DNA, 301 bp, Artificial Sequence
  Arid1a.4_NTC.27
  crRNA array
  misc_feature (148)..(157): n is a, c, g, or t
cttggctttatatatcttgtggaaaggacgaaacaccgtaatttctactaagtgtagatgccgagaccgagtctctgcataatttctactaagtgtagatgtcgcgttgcgaccggcgcttaatttctactaagtgtagatttttttnnnnnnnnnnaagcttggcgtggatccgatatcaactagatcttgagacaaatggcagtattcatccacaattttaaaagaaaaggggggattggggggtacagtgcaggggaaagaatagtagacataatagcaacagacatacaaactaaag

SEQ ID NO: 15347 - DNA, 301 bp, Artificial Sequence
  Arid1a.4_NTC.28
  crRNA array
  misc_feature (148)..(157): n is a, c, g, or t
cttggctttatatatcttgtggaaaggacgaaacaccgtaatttctactaagtgtagatgccgagaccgagtctctgcataatttctactaagtgtagataccgctaatcggcgtaaacttaatttctactaagtgtagatttttttnnnnnnnnnnaagcttggcgtggatccgatatcaactagatcttgagacaaatggcagtattcatccacaattttaaaagaaaaggggggattggggggtacagtgcaggggaaagaatagtagacataatagcaacagacatacaaactaaag

SEQ ID NO: 15348 - DNA, 301 bp, Artificial Sequence
  Arid1a.4_NTC.29
  crRNA array
  misc_feature (148)..(157): n is a, c, g, or t
cttggctttatatatcttgtggaaaggacgaaacaccgtaatttctactaagtgtagatgccgagaccgagtctctgcataatttctactaagtgtagatcgcgatctataccgtctatataatttctactaagtgtagatttttttnnnnnnnnnnaagcttggcgtggatccgatatcaactagatcttgagacaaatggcagtattcatccacaattttaaaagaaaaggggggattggggggtacagtgcaggggaaagaatagtagacataatagcaacagacatacaaactaaag

SEQ ID NO: 15349 - DNA, 301 bp, Artificial Sequence
  Arid1a.4_NTC.3
  crRNA array
  misc_feature (148)..(157): n is a, c, g, or t
cttggctttatatatcttgtggaaaggacgaaacaccgtaatttctactaagtgtagatgccgagaccgagtctctgcataatttctactaagtgtagattcgacgcgagacgacgtacataatttctactaagtgtagatttttttnnnnnnnnnnaagcttggcgtggatccgatatcaactagatcttgagacaaatggcagtattcatccacaattttaaaagaaaaggggggattggggggtacagtgcaggggaaagaatagtagacataatagcaacagacatacaaactaaag

SEQ ID NO: 15350 - DNA, 301 bp, Artificial Sequence
  Arid1a.4_NTC.30
  crRNA array
  misc_feature (148)..(157): n is a, c, g, or t
cttggctttatatatcttgtggaaaggacgaaacaccgtaatttctactaagtgtagatgccgagaccgagtctctgcataatttctactaagtgtagatcgatcgtacgggtgtcctaataatttctactaagtgtagatttttttnnnnnnnnnnaagcttggcgtggatccgatatcaactagatcttgagacaaatggcagtattcatccacaattttaaaagaaaaggggggattggggggtacagtgcaggggaaagaatagtagacataatagcaacagacatacaaactaaag

SEQ ID NO: 15351 - DNA, 301 bp, Artificial Sequence
  Arid1a.4_NTC.31
  crRNA array
  misc_feature (148)..(157): n is a, c, g, or t
cttggctttatatatcttgtggaaaggacgaaacaccgtaatttctactaagtgtagatgccgagaccgagtctctgcataatttctactaagtgtagatgccgaccgcgtgattgtaggtaatttctactaagtgtagatttttttnnnnnnnnnnaagcttggcgtggatccgatatcaactagatcttgagacaaatggcagtattcatccacaattttaaaagaaaaggggggattggggggtacagtgcaggggaaagaatagtagacataatagcaacagacatacaaactaaag

SEQ ID NO: 15352 - DNA, 301 bp, Artificial Sequence
  Arid1a.4_NTC.32
  crRNA array
  misc_feature (148)..(157): n is a, c, g, or t
cttggctttatatatcttgtggaaaggacgaaacaccgtaatttctactaagtgtagatgccgagaccgagtctctgcataatttctactaagtgtagatgcacgttacgcccgggtcactaatttctactaagtgtagatttttttnnnnnnnnnnaagcttggcgtggatccgatatcaactagatcttgagacaaatggcagtattcatccacaattttaaaagaaaaggggggattggggggtacagtgcaggggaaagaatagtagacataatagcaacagacatacaaactaaag

SEQ ID NO: 15353 - DNA, 301 bp, Artificial Sequence
  Arid1a.4_NTC.33
  crRNA array
  misc_feature (148)..(157): n is a, c, g, or t
cttggctttatatatcttgtggaaaggacgaaacaccgtaatttctactaagtgtagatgccgagaccgagtctctgcataatttctactaagtgtagattaagcgaccgacgcattcgctaatttctactaagtgtagatttttttnnnnnnnnnnaagcttggcgtggatccgatatcaactagatcttgagacaaatggcagtattcatccacaattttaaaagaaaaggggggattggggggtacagtgcaggggaaagaatagtagacataatagcaacagacatacaaactaaag

SEQ ID NO: 15354 - DNA, 301 bp, Artificial Sequence
  Arid1a.4_NTC.34
  crRNA array
  misc_feature (148)..(157): n is a, c, g, or t
cttggctttatatatcttgtggaaaggacgaaacaccgtaatttctactaagtgtagatgccgagaccgagtctctgcataatttctactaagtgtagattagcgttcgacacgtgaaactaatttctactaagtgtagatttttttnnnnnnnnnnaagcttggcgtggatccgatatcaactagatcttgagacaaatggcagtattcatccacaattttaaaagaaaaggggggattggggggtacagtgcaggggaaagaatagtagacataatagcaacagacatacaaactaaag

SEQ ID NO: 15355 - DNA, 301 bp, Artificial Sequence
  Arid1a.4_NTC.35
  crRNA array
  misc_feature (148)..(157): n is a, c, g, or t
cttggctttatatatcttgtggaaaggacgaaacaccgtaatttctactaagtgtagatgccgagaccgagtctctgcataatttctactaagtgtagattggcgcgtaatcgctattcgtaatttctactaagtgtagatttttttnnnnnnnnnnaagcttggcgtggatccgatatcaactagatcttgagacaaatggcagtattcatccacaattttaaaagaaaaggggggattggggggtacagtgcaggggaaagaatagtagacataatagcaacagacatacaaactaaag

SEQ ID NO: 15356 - DNA, 301 bp, Artificial Sequence
  Arid1a.4_NTC.36
  crRNA array
  misc_feature (148)..(157): n is a, c, g, or t
cttggctttatatatcttgtggaaaggacgaaacaccgtaatttctactaagtgtagatgccgagaccgagtctctgcataatttctactaagtgtagatcaacccgccgtagcgggccttaatttctactaagtgtagatttttttnnnnnnnnnnaagcttggcgtggatccgatatcaactagatcttgagacaaatggcagtattcatccacaattttaaaagaaaaggggggattggggggtacagtgcaggggaaagaatagtagacataatagcaacagacatacaaactaaag

SEQ ID NO: 15357 - DNA, 301 bp, Artificial Sequence
  Arid1a.4_NTC.37
  crRNA array
  misc_feature (148)..(157): n is a, c, g, or t
cttggctttatatatcttgtggaaaggacgaaacaccgtaatttctactaagtgtagatgccgagaccgagtctctgcataatttctactaagtgtagattttgcgttgacgcgattacttaatttctactaagtgtagatttttttnnnnnnnnnnaagcttggcgtggatccgatatcaactagatcttgagacaaatggcagtattcatccacaattttaaaagaaaaggggggattggggggtacagtgcaggggaaagaatagtagacataatagcaacagacatacaaactaaag

SEQ ID NO: 15358 - DNA, 301 bp, Artificial Sequence
  Arid1a.4_NTC.38
  crRNA array
  misc_feature (148)..(157): n is a, c, g, or t
cttggctttatatatcttgtggaaaggacgaaacaccgtaatttctactaagtgtagatgccgagaccgagtctctgcataatttctactaagtgtagataacggagcgcgatactaccataatttctactaagtgtagatttttttnnnnnnnnnnaagcttggcgtggatccgatatcaactagatcttgagacaaatggcagtattcatccacaattttaaaagaaaaggggggattggggggtacagtgcaggggaaagaatagtagacataatagcaacagacatacaaactaaag

SEQ ID NO: 15359 - DNA, 301 bp, Artificial Sequence
  Arid1a.4_NTC.39
  crRNA array
  misc_feature (148)..(157): n is a, c, g, or t
cttggctttatatatcttgtggaaaggacgaaacaccgtaatttctactaagtgtagatgccgagaccgagtctctgcataatttctactaagtgtagatccggacgttataacgtttcttaatttctactaagtgtagatttttttnnnnnnnnnnaagcttggcgtggatccgatatcaactagatcttgagacaaatggcagtattcatccacaattttaaaagaaaaggggggattggggggtacagtgcaggggaaagaatagtagacataatagcaacagacatacaaactaaag

SEQ ID NO: 15360 - DNA, 301 bp, Artificial Sequence
  Arid1a.4_NTC.4
  crRNA array
  misc_feature (148)..(157): n is a, c, g, or t
cttggctttatatatcttgtggaaaggacgaaacaccgtaatttctactaagtgtagatgccgagaccgagtctctgcataatttctactaagtgtagatatacccgtcgcgaacgtgagtaatttctactaagtgtagatttttttnnnnnnnnnnaagcttggcgtggatccgatatcaactagatcttgagacaaatggcagtattcatccacaattttaaaagaaaaggggggattggggggtacagtgcaggggaaagaatagtagacataatagcaacagacatacaaactaaag

SEQ ID NO: 15361 - DNA, 301 bp, Artificial Sequence
  Arid1a.4_NTC.40
  crRNA array
  misc_feature (148)..(157): n is a, c, g, or t
cttggctttatatatcttgtggaaaggacgaaacaccgtaatttctactaagtgtagatgccgagaccgagtctctgcataatttctactaagtgtagatattcgcgaacccggccggaataatttctactaagtgtagatttttttnnnnnnnnnnaagcttggcgtggatccgatatcaactagatcttgagacaaatggcagtattcatccacaattttaaaagaaaaggggggattggggggtacagtgcaggggaaagaatagtagacataatagcaacagacatacaaactaaag

SEQ ID NO: 15362 - DNA, 301 bp, Artificial Sequence
  Arid1a.4_NTC.41
  crRNA array
  misc_feature (148)..(157): n is a, c, g, or t
cttggctttatatatcttgtggaaaggacgaaacaccgtaatttctactaagtgtagatgccgagaccgagtctctgcataatttctactaagtgtagatttgatggcgcgacgcgttattaatttctactaagtgtagatttttttnnnnnnnnnnaagcttggcgtggatccgatatcaactagatcttgagacaaatggcagtattcatccacaattttaaaagaaaaggggggattggggggtacagtgcaggggaaagaatagtagacataatagcaacagacatacaaactaaag

SEQ ID NO: 15363 - DNA, 301 bp, Artificial Sequence
  Arid1a.4_NTC.42
  crRNA array
  misc_feature (148)..(157): n is a, c, g, or t
cttggctttatatatcttgtggaaaggacgaaacaccgtaatttctactaagtgtagatgccgagaccgagtctctgcataatttctactaagtgtagatggtcaaatcgcggcgataactaatttctactaagtgtagatttttttnnnnnnnnnnaagcttggcgtggatccgatatcaactagatcttgagacaaatggcagtattcatccacaattttaaaagaaaaggggggattggggggtacagtgcaggggaaagaatagtagacataatagcaacagacatacaaactaaag

SEQ ID NO: 15364 - DNA, 301 bp, Artificial Sequence
  Arid1a.4_NTC.43
  crRNA array
  misc_feature (148)..(157): n is a, c, g, or t
cttggctttatatatcttgtggaaaggacgaaacaccgtaatttctactaagtgtagatgccgagaccgagtctctgcataatttctactaagtgtagatcgactcgcgcattgaactggtaatttctactaagtgtagatttttttnnnnnnnnnnaagcttggcgtggatccgatatcaactagatcttgagacaaatggcagtattcatccacaattttaaaagaaaaggggggattggggggtacagtgcaggggaaagaatagtagacataatagcaacagacatacaaactaaag

SEQ ID NO: 15365 - DNA, 301 bp, Artificial Sequence
  Arid1a.4_NTC.44
  crRNA array
  misc_feature (148)..(157): n is a, c, g, or t
cttggctttatatatcttgtggaaaggacgaaacaccgtaatttctactaagtgtagatgccgagaccgagtctctgcataatttctactaagtgtagatagcgtcgtacgatttatcgttaatttctactaagtgtagatttttttnnnnnnnnnnaagcttggcgtggatccgatatcaactagatcttgagacaaatggcagtattcatccacaattttaaaagaaaaggggggattggggggtacagtgcaggggaaagaatagtagacataatagcaacagacatacaaactaaag

SEQ ID NO: 15366 - DNA, 301 bp, Artificial Sequence
  Arid1a.4_NTC.45
  crRNA array
  misc_feature (148)..(157): n is a, c, g, or t
cttggctttatatatcttgtggaaaggacgaaacaccgtaatttctactaagtgtagatgccgagaccgagtctctgcataatttctactaagtgtagatcggaacgcgtgatactagggtaatttctactaagtgtagatttttttnnnnnnnnnnaagcttggcgtggatccgatatcaactagatcttgagacaaatggcagtattcatccacaattttaaaagaaaaggggggattggggggtacagtgcaggggaaagaatagtagacataatagcaacagacatacaaactaaag

SEQ ID NO: 15367 - DNA, 301 bp, Artificial Sequence
  Arid1a.4_NTC.46
  crRNA array
  misc_feature (148)..(157): n is a, c, g, or t
cttggctttatatatcttgtggaaaggacgaaacaccgtaatttctactaagtgtagatgccgagaccgagtctctgcataatttctactaagtgtagatagcgggtcgtagacgcgcggtaatttctactaagtgtagatttttttnnnnnnnnnnaagcttggcgtggatccgatatcaactagatcttgagacaaatggcagtattcatccacaattttaaaagaaaaggggggattggggggtacagtgcaggggaaagaatagtagacataatagcaacagacatacaaactaaag

SEQ ID NO: 15368 - DNA, 301 bp, Artificial Sequence
  Arid1a.4_NTC.47
  crRNA array
  misc_feature (148)..(157): n is a, c, g, or t
cttggctttatatatcttgtggaaaggacgaaacaccgtaatttctactaagtgtagatgccgagaccgagtctctgcataatttctactaagtgtagattctcgtatcgcgattgttaataatttctactaagtgtagatttttttnnnnnnnnnnaagcttggcgtggatccgatatcaactagatcttgagacaaatggcagtattcatccacaattttaaaagaaaaggggggattggggggtacagtgcaggggaaagaatagtagacataatagcaacagacatacaaactaaag

SEQ ID NO: 15369 - DNA, 301 bp, Artificial Sequence
  Arid1a.4_NTC.48
  crRNA array
  misc_feature (148)..(157): n is a, c, g, or t
cttggctttatatatcttgtggaaaggacgaaacaccgtaatttctactaagtgtagatgccgagaccgagtctctgcataatttctactaagtgtagatcggtcgactacggctgttagtaatttctactaagtgtagatttttttnnnnnnnnnnaagcttggcgtggatccgatatcaactagatcttgagacaaatggcagtattcatccacaattttaaaagaaaaggggggattggggggtacagtgcaggggaaagaatagtagacataatagcaacagacatacaaactaaag

SEQ ID NO: 15370 - DNA, 301 bp, Artificial Sequence
  Arid1a.4_NTC.49
  crRNA array
  misc_feature (148)..(157): n is a, c, g, or t
cttggctttatatatcttgtggaaaggacgaaacaccgtaatttctactaagtgtagatgccgagaccgagtctctgcataatttctactaagtgtagattcggggcgcgtcaactgaattaatttctactaagtgtagatttttttnnnnnnnnnnaagcttggcgtggatccgatatcaactagatcttgagacaaatggcagtattcatccacaattttaaaagaaaaggggggattggggggtacagtgcaggggaaagaatagtagacataatagcaacagacatacaaactaaag

SEQ ID NO: 15371 - DNA, 301 bp, Artificial Sequence
  Arid1a.4_NTC.5
  crRNA array
  misc_feature (148)..(157): n is a, c, g, or t
cttggctttatatatcttgtggaaaggacgaaacaccgtaatttctactaagtgtagatgccgagaccgagtctctgcataatttctactaagtgtagatgcttacgcgtcgcgaatgtataatttctactaagtgtagatttttttnnnnnnnnnnaagcttggcgtggatccgatatcaactagatcttgagacaaatggcagtattcatccacaattttaaaagaaaaggggggattggggggtacagtgcaggggaaagaatagtagacataatagcaacagacatacaaactaaag

SEQ ID NO: 15372 - DNA, 301 bp, Artificial Sequence
  Arid1a.4_NTC.50
  crRNA array
  misc_feature (148)..(157): n is a, c, g, or t
cttggctttatatatcttgtggaaaggacgaaacaccgtaatttctactaagtgtagatgccgagaccgagtctctgcataatttctactaagtgtagatattgccgctcgcgcaaaatctaatttctactaagtgtagatttttttnnnnnnnnnnaagcttggcgtggatccgatatcaactagatcttgagacaaatggcagtattcatccacaattttaaaagaaaaggggggattggggggtacagtgcaggggaaagaatagtagacataatagcaacagacatacaaactaaag

SEQ ID NO: 15373 - DNA, 301 bp, Artificial Sequence
  Arid1a.4_NTC.51
  crRNA array
  misc_feature (148)..(157): n is a, c, g, or t
cttggctttatatatcttgtggaaaggacgaaacaccgtaatttctactaagtgtagatgccgagaccgagtctctgcataatttctactaagtgtagattaacgcgcaacacgccaatgtaatttctactaagtgtagatttttttnnnnnnnnnnaagcttggcgtggatccgatatcaactagatcttgagacaaatggcagtattcatccacaattttaaaagaaaaggggggattggggggtacagtgcaggggaaagaatagtagacataatagcaacagacatacaaactaaag

SEQ ID NO: 15374 - DNA, 301 bp, Artificial Sequence
  Arid1a.4_NTC.6
  crRNA array
  misc_feature (148)..(157): n is a, c, g, or t
cttggctttatatatcttgtggaaaggacgaaacaccgtaatttctactaagtgtagatgccgagaccgagtctctgcataatttctactaagtgtagatcgaatcgcgcctacgggaattaatttctactaagtgtagatttttttnnnnnnnnnnaagcttggcgtggatccgatatcaactagatcttgagacaaatggcagtattcatccacaattttaaaagaaaaggggggattggggggtacagtgcaggggaaagaatagtagacataatagcaacagacatacaaactaaag

SEQ ID NO: 15375 - DNA, 301 bp, Artificial Sequence
  Arid1a.4_NTC.7
  crRNA array
  misc_feature (148)..(157): n is a, c, g, or t
cttggctttatatatcttgtggaaaggacgaaacaccgtaatttctactaagtgtagatgccgagaccgagtctctgcataatttctactaagtgtagatcgccgaacggataagactattaatttctactaagtgtagatttttttnnnnnnnnnnaagcttggcgtggatccgatatcaactagatcttgagacaaatggcagtattcatccacaattttaaaagaaaaggggggattggggggtacagtgcaggggaaagaatagtagacataatagcaacagacatacaaactaaag

SEQ ID NO: 15376 - DNA, 301 bp, Artificial Sequence
  Arid1a.4_NTC.8
  crRNA array
  misc_feature (148)..(157): n is a, c, g, or t
cttggctttatatatcttgtggaaaggacgaaacaccgtaatttctactaagtgtagatgccgagaccgagtctctgcataatttctactaagtgtagatcgaccgaggttacgctgggataatttctactaagtgtagatttttttnnnnnnnnnnaagcttggcgtggatccgatatcaactagatcttgagacaaatggcagtattcatccacaattttaaaagaaaaggggggattggggggtacagtgcaggggaaagaatagtagacataatagcaacagacatacaaactaaag

SEQ ID NO: 15377 - DNA, 301 bp, Artificial Sequence
  Arid1a.4_NTC.9
  crRNA array
  misc_feature (148)..(157): n is a, c, g, or t
cttggctttatatatcttgtggaaaggacgaaacaccgtaatttctactaagtgtagatgccgagaccgagtctctgcataatttctactaagtgtagatatcgccgtacggctatggcataatttctactaagtgtagatttttttnnnnnnnnnnaagcttggcgtggatccgatatcaactagatcttgagacaaatggcagtattcatccacaattttaaaagaaaaggggggattggggggtacagtgcaggggaaagaatagtagacataatagcaacagacatacaaactaaag

SEQ ID NO: 15378 - DNA, 301 bp, Artificial Sequence
  Arid1b.1_NTC.0
  crRNA array
  misc_feature (148)..(157): n is a, c, g, or t
cttggctttatatatcttgtggaaaggacgaaacaccgtaatttctactaagtgtagatgctgctgctgtagtgcgtggtaatttctactaagtgtagattatagcgtcgcgcgctaatttaatttctactaagtgtagatttttttnnnnnnnnnnaagcttggcgtggatccgatatcaactagatcttgagacaaatggcagtattcatccacaattttaaaagaaaaggggggattggggggtacagtgcaggggaaagaatagtagacataatagcaacagacatacaaactaaag

SEQ ID NO: 15379 - DNA, 301 bp, Artificial Sequence
  Arid1b.1_NTC.1
  crRNA array
  misc_feature (148)..(157): n is a, c, g, or t
cttggctttatatatcttgtggaaaggacgaaacaccgtaatttctactaagtgtagatgctgctgctgtagtgcgtggtaatttctactaagtgtagatcgcgtaaccgttccggctcctaatttctactaagtgtagatttttttnnnnnnnnnnaagcttggcgtggatccgatatcaactagatcttgagacaaatggcagtattcatccacaattttaaaagaaaaggggggattggggggtacagtgcaggggaaagaatagtagacataatagcaacagacatacaaactaaag

SEQ ID NO: 15380 - DNA, 301 bp, Artificial Sequence
  Arid1b.1_NTC.10
  crRNA array
  misc_feature (148)..(157): n is a, c, g, or t
cttggctttatatatcttgtggaaaggacgaaacaccgtaatttctactaagtgtagatgctgctgctgtagtgcgtggtaatttctactaagtgtagatcgctaagttcgcgcgggccgtaatttctactaagtgtagatttttttnnnnnnnnnnaagcttggcgtggatccgatatcaactagatcttgagacaaatggcagtattcatccacaattttaaaagaaaaggggggattggggggtacagtgcaggggaaagaatagtagacataatagcaacagacatacaaactaaag

SEQ ID NO: 15381 - DNA, 301 bp, Artificial Sequence
  Arid1b.1_NTC.11
  crRNA array
  misc_feature (148)..(157): n is a, c, g, or t
cttggctttatatatcttgtggaaaggacgaaacaccgtaatttctactaagtgtagatgctgctgctgtagtgcgtggtaatttctactaagtgtagatcgttcgtcgacgaagcaatctaatttctactaagtgtagatttttttnnnnnnnnnnaagcttggcgtggatccgatatcaactagatcttgagacaaatggcagtattcatccacaattttaaaagaaaaggggggattggggggtacagtgcaggggaaagaatagtagacataatagcaacagacatacaaactaaag

SEQ ID NO: 15382 - DNA, 301 bp, Artificial Sequence
  Arid1b.1_NTC.12
  crRNA array
  misc_feature (148)..(157): n is a, c, g, or t
cttggctttatatatcttgtggaaaggacgaaacaccgtaatttctactaagtgtagatgctgctgctgtagtgcgtggtaatttctactaagtgtagatcgccgacgattaatcaatagtaatttctactaagtgtagatttttttnnnnnnnnnnaagcttggcgtggatccgatatcaactagatcttgagacaaatggcagtattcatccacaattttaaaagaaaaggggggattggggggtacagtgcaggggaaagaatagtagacataatagcaacagacatacaaactaaag

SEQ ID NO: 15383 - DNA, 301 bp, Artificial Sequence
  Arid1b.1_NTC.13
  crRNA array
  misc_feature (148)..(157): n is a, c, g, or t
cttggctttatatatcttgtggaaaggacgaaacaccgtaatttctactaagtgtagatgctgctgctgtagtgcgtggtaatttctactaagtgtagatgaccgttgtatcgcgatcaataatttctactaagtgtagatttttttnnnnnnnnnnaagcttggcgtggatccgatatcaactagatcttgagacaaatggcagtattcatccacaattttaaaagaaaaggggggattggggggtacagtgcaggggaaagaatagtagacataatagcaacagacatacaaactaaag

SEQ ID NO: 15384 - DNA, 301 bp, Artificial Sequence
  Arid1b.1_NTC.14
  crRNA array
  misc_feature (148)..(157): n is a, c, g, or t
cttggctttatatatcttgtggaaaggacgaaacaccgtaatttctactaagtgtagatgctgctgctgtagtgcgtggtaatttctactaagtgtagatccgttcgtgcgatagtgttttaatttctactaagtgtagatttttttnnnnnnnnnnaagcttggcgtggatccgatatcaactagatcttgagacaaatggcagtattcatccacaattttaaaagaaaaggggggattggggggtacagtgcaggggaaagaatagtagacataatagcaacagacatacaaactaaag

SEQ ID NO: 15385 - DNA, 301 bp, Artificial Sequence
  Arid1b.1_NTC.15
  crRNA array
  misc_feature (148)..(157): n is a, c, g, or t
cttggctttatatatcttgtggaaaggacgaaacaccgtaatttctactaagtgtagatgctgctgctgtagtgcgtggtaatttctactaagtgtagatgttgtcgtgccgcgaatttataatttctactaagtgtagatttttttnnnnnnnnnnaagcttggcgtggatccgatatcaactagatcttgagacaaatggcagtattcatccacaattttaaaagaaaaggggggattggggggtacagtgcaggggaaagaatagtagacataatagcaacagacatacaaactaaag

SEQ ID NO: 15386 - DNA, 301 bp, Artificial Sequence
  Arid1b.1_NTC.16
  crRNA array
  misc_feature (148)..(157): n is a, c, g, or t
cttggctttatatatcttgtggaaaggacgaaacaccgtaatttctactaagtgtagatgctgctgctgtagtgcgtggtaatttctactaagtgtagatcggtacgttagacgaaaatttaatttctactaagtgtagatttttttnnnnnnnnnnaagcttggcgtggatccgatatcaactagatcttgagacaaatggcagtattcatccacaattttaaaagaaaaggggggattggggggtacagtgcaggggaaagaatagtagacataatagcaacagacatacaaactaaag

SEQ ID NO: 15387 - DNA, 301 bp, Artificial Sequence
  Arid1b.1_NTC.17
  crRNA array
  misc_feature (148)..(157): n is a, c, g, or t
cttggctttatatatcttgtggaaaggacgaaacaccgtaatttctactaagtgtagatgctgctgctgtagtgcgtggtaatttctactaagtgtagattatcgaacgctatcgaacgttaatttctactaagtgtagatttttttnnnnnnnnnnaagcttggcgtggatccgatatcaactagatcttgagacaaatggcagtattcatccacaattttaaaagaaaaggggggattggggggtacagtgcaggggaaagaatagtagacataatagcaacagacatacaaactaaag

SEQ ID NO: 15388 - DNA, 301 bp, Artificial Sequence
  Arid1b.1_NTC.18
  crRNA array
  misc_feature (148)..(157): n is a, c, g, or t
cttggctttatatatcttgtggaaaggacgaaacaccgtaatttctactaagtgtagatgctgctgctgtagtgcgtggtaatttctactaagtgtagattccggttacgaccggcaaaataatttctactaagtgtagatttttttnnnnnnnnnnaagcttggcgtggatccgatatcaactagatcttgagacaaatggcagtattcatccacaattttaaaagaaaaggggggattggggggtacagtgcaggggaaagaatagtagacataatagcaacagacatacaaactaaag

SEQ ID NO: 15389 - DNA, 301 bp, Artificial Sequence
  Arid1b.1_NTC.19
  crRNA array
  misc_feature (148)..(157): n is a, c, g, or t
cttggctttatatatcttgtggaaaggacgaaacaccgtaatttctactaagtgtagatgctgctgctgtagtgcgtggtaatttctactaagtgtagatcgtcgtagaacgatacccgataatttctactaagtgtagatttttttnnnnnnnnnnaagcttggcgtggatccgatatcaactagatcttgagacaaatggcagtattcatccacaattttaaaagaaaaggggggattggggggtacagtgcaggggaaagaatagtagacataatagcaacagacatacaaactaaag

SEQ ID NO: 15390 - DNA, 301 bp, Artificial Sequence
  Arid1b.1_NTC.2
  crRNA array
  misc_feature (148)..(157): n is a, c, g, or t
cttggctttatatatcttgtggaaaggacgaaacaccgtaatttctactaagtgtagatgctgctgctgtagtgcgtggtaatttctactaagtgtagatttatgtcgcgccgcgacccgtaatttctactaagtgtagatttttttnnnnnnnnnnaagcttggcgtggatccgatatcaactagatcttgagacaaatggcagtattcatccacaattttaaaagaaaaggggggattggggggtacagtgcaggggaaagaatagtagacataatagcaacagacatacaaactaaag

SEQ ID NO: 15391 - DNA, 301 bp, Artificial Sequence
  Arid1b.1_NTC.20
  crRNA array
  misc_feature (148)..(157): n is a, c, g, or t
cttggctttatatatcttgtggaaaggacgaaacaccgtaatttctactaagtgtagatgctgctgctgtagtgcgtggtaatttctactaagtgtagatattccggcgcgaccagaagataatttctactaagtgtagatttttttnnnnnnnnnnaagcttggcgtggatccgatatcaactagatcttgagacaaatggcagtattcatccacaattttaaaagaaaaggggggattggggggtacagtgcaggggaaagaatagtagacataatagcaacagacatacaaactaaag

SEQ ID NO: 15392 - DNA, 301 bp, Artificial Sequence
  Arid1b.1_NTC.21
  crRNA array
  misc_feature (148)..(157): n is a, c, g, or t
cttggctttatatatcttgtggaaaggacgaaacaccgtaatttctactaagtgtagatgctgctgctgtagtgcgtggtaatttctactaagtgtagatgtataacttcgcgcggtccgtaatttctactaagtgtagatttttttnnnnnnnnnnaagcttggcgtggatccgatatcaactagatcttgagacaaatggcagtattcatccacaattttaaaagaaaaggggggattggggggtacagtgcaggggaaagaatagtagacataatagcaacagacatacaaactaaag

SEQ ID NO: 15393 - DNA, 301 bp, Artificial Sequence
  Arid1b.1_NTC.22
  crRNA array
  misc_feature (148)..(157): n is a, c, g, or t
cttggctttatatatcttgtggaaaggacgaaacaccgtaatttctactaagtgtagatgctgctgctgtagtgcgtggtaatttctactaagtgtagatgcgcgtcaacgtaatgtgcctaatttctactaagtgtagatttttttnnnnnnnnnnaagcttggcgtggatccgatatcaactagatcttgagacaaatggcagtattcatccacaattttaaaagaaaaggggggattggggggtacagtgcaggggaaagaatagtagacataatagcaacagacatacaaactaaag

SEQ ID NO: 15394 - DNA, 301 bp, Artificial Sequence
  Arid1b.1_NTC.23
  crRNA array
  misc_feature (148)..(157): n is a, c, g, or t
cttggctttatatatcttgtggaaaggacgaaacaccgtaatttctactaagtgtagatgctgctgctgtagtgcgtggtaatttctactaagtgtagatacgcgctattatcgtaggtgtaatttctactaagtgtagatttttttnnnnnnnnnnaagcttggcgtggatccgatatcaactagatcttgagacaaatggcagtattcatccacaattttaaaagaaaaggggggattggggggtacagtgcaggggaaagaatagtagacataatagcaacagacatacaaactaaag

SEQ ID NO: 15395 - DNA, 301 bp, Artificial Sequence
  Arid1b.1_NTC.24
  crRNA array
  misc_feature (148)..(157): n is a, c, g, or t
cttggctttatatatcttgtggaaaggacgaaacaccgtaatttctactaagtgtagatgctgctgctgtagtgcgtggtaatttctactaagtgtagatactatcgacgttcgtcccggtaatttctactaagtgtagatttttttnnnnnnnnnnaagcttggcgtggatccgatatcaactagatcttgagacaaatggcagtattcatccacaattttaaaagaaaaggggggattggggggtacagtgcaggggaaagaatagtagacataatagcaacagacatacaaactaaag

SEQ ID NO: 15396 - DNA, 301 bp, Artificial Sequence
  Arid1b.1_NTC.25
  crRNA array
  misc_feature (148)..(157): n is a, c, g, or t
cttggctttatatatcttgtggaaaggacgaaacaccgtaatttctactaagtgtagatgctgctgctgtagtgcgtggtaatttctactaagtgtagattcgcgttatcgtgccgtgcgtaatttctactaagtgtagatttttttnnnnnnnnnnaagcttggcgtggatccgatatcaactagatcttgagacaaatggcagtattcatccacaattttaaaagaaaaggggggattggggggtacagtgcaggggaaagaatagtagacataatagcaacagacatacaaactaaag

SEQ ID NO: 15397 - DNA, 301 bp, Artificial Sequence
  Arid1b.1_NTC.26
  crRNA array
  misc_feature (148)..(157): n is a, c, g, or t
cttggctttatatatcttgtggaaaggacgaaacaccgtaatttctactaagtgtagatgctgctgctgtagtgcgtggtaatttctactaagtgtagatcgcgacggcggttttaacactaatttctactaagtgtagatttttttnnnnnnnnnnaagcttggcgtggatccgatatcaactagatcttgagacaaatggcagtattcatccacaattttaaaagaaaaggggggattggggggtacagtgcaggggaaagaatagtagacataatagcaacagacatacaaactaaag

SEQ ID NO: 15398 - DNA, 301 bp, Artificial Sequence
  Arid1b.1_NTC.27
  crRNA array
  misc_feature (148)..(157): n is a, c, g, or t
cttggctttatatatcttgtggaaaggacgaaacaccgtaatttctactaagtgtagatgctgctgctgtagtgcgtggtaatttctactaagtgtagatgtcgcgttgcgaccggcgcttaatttctactaagtgtagatttttttnnnnnnnnnnaagcttggcgtggatccgatatcaactagatcttgagacaaatggcagtattcatccacaattttaaaagaaaaggggggattggggggtacagtgcaggggaaagaatagtagacataatagcaacagacatacaaactaaag

SEQ ID NO: 15399 - DNA, 301 bp, Artificial Sequence
  Arid1b.1_NTC.28
  crRNA array
  misc_feature (148)..(157): n is a, c, g, or t
cttggctttatatatcttgtggaaaggacgaaacaccgtaatttctactaagtgtagatgctgctgctgtagtgcgtggtaatttctactaagtgtagataccgctaatcggcgtaaacttaatttctactaagtgtagatttttttnnnnnnnnnnaagcttggcgtggatccgatatcaactagatcttgagacaaatggcagtattcatccacaattttaaaagaaaaggggggattggggggtacagtgcaggggaaagaatagtagacataatagcaacagacatacaaactaaag

SEQ ID NO: 15400 - DNA, 301 bp, Artificial Sequence
  Arid1b.1_NTC.29
  crRNA array
  misc_feature (148)..(157): n is a, c, g, or t
cttggctttatatatcttgtggaaaggacgaaacaccgtaatttctactaagtgtagatgctgctgctgtagtgcgtggtaatttctactaagtgtagatcgcgatctataccgtctatataatttctactaagtgtagatttttttnnnnnnnnnnaagcttggcgtggatccgatatcaactagatcttgagacaaatggcagtattcatccacaattttaaaagaaaaggggggattggggggtacagtgcaggggaaagaatagtagacataatagcaacagacatacaaactaaag

SEQ ID NO: 15401 - DNA, 301 bp, Artificial Sequence
  Arid1b.1_NTC.3
  crRNA array
  misc_feature (148)..(157): n is a, c, g, or t
cttggctttatatatcttgtggaaaggacgaaacaccgtaatttctactaagtgtagatgctgctgctgtagtgcgtggtaatttctactaagtgtagattcgacgcgagacgacgtacataatttctactaagtgtagatttttttnnnnnnnnnnaagcttggcgtggatccgatatcaactagatcttgagacaaatggcagtattcatccacaattttaaaagaaaaggggggattggggggtacagtgcaggggaaagaatagtagacataatagcaacagacatacaaactaaag

SEQ ID NO: 15402 - DNA, 301 bp, Artificial Sequence
  Arid1b.1_NTC.30
  crRNA array
  misc_feature (148)..(157): n is a, c, g, or t
cttggctttatatatcttgtggaaaggacgaaacaccgtaatttctactaagtgtagatgctgctgctgtagtgcgtggtaatttctactaagtgtagatcgatcgtacgggtgtcctaataatttctactaagtgtagatttttttnnnnnnnnnnaagcttggcgtggatccgatatcaactagatcttgagacaaatggcagtattcatccacaattttaaaagaaaaggggggattggggggtacagtgcaggggaaagaatagtagacataatagcaacagacatacaaactaaag

SEQ ID NO: 15403 - DNA, 301 bp, Artificial Sequence
  Arid1b.1_NTC.31
  crRNA array
  misc_feature (148)..(157): n is a, c, g, or t
cttggctttatatatcttgtggaaaggacgaaacaccgtaatttctactaagtgtagatgctgctgctgtagtgcgtggtaatttctactaagtgtagatgccgaccgcgtgattgtaggtaatttctactaagtgtagatttttttnnnnnnnnnnaagcttggcgtggatccgatatcaactagatcttgagacaaatggcagtattcatccacaattttaaaagaaaaggggggattggggggtacagtgcaggggaaagaatagtagacataatagcaacagacatacaaactaaag

SEQ ID NO: 15404 - DNA, 301 bp, Artificial Sequence
  Arid1b.1_NTC.32
  crRNA array
  misc_feature (148)..(157): n is a, c, g, or t
cttggctttatatatcttgtggaaaggacgaaacaccgtaatttctactaagtgtagatgctgctgctgtagtgcgtggtaatttctactaagtgtagatgcacgttacgcccgggtcactaatttctactaagtgtagatttttttnnnnnnnnnnaagcttggcgtggatccgatatcaactagatcttgagacaaatggcagtattcatccacaattttaaaagaaaaggggggattggggggtacagtgcaggggaaagaatagtagacataatagcaacagacatacaaactaaag

SEQ ID NO: 15405 - DNA, 301 bp, Artificial Sequence
  Arid1b.1_NTC.33
  crRNA array
  misc_feature (148)..(157): n is a, c, g, or t
cttggctttatatatcttgtggaaaggacgaaacaccgtaatttctactaagtgtagatgctgctgctgtagtgcgtggtaatttctactaagtgtagattaagcgaccgacgcattcgctaatttctactaagtgtagatttttttnnnnnnnnnnaagcttggcgtggatccgatatcaactagatcttgagacaaatggcagtattcatccacaattttaaaagaaaaggggggattggggggtacagtgcaggggaaagaatagtagacataatagcaacagacatacaaactaaag

SEQ ID NO: 15406 - DNA, 301 bp, Artificial Sequence
  Arid1b.1_NTC.34
  crRNA array
  misc_feature (148)..(157): n is a, c, g, or t
cttggctttatatatcttgtggaaaggacgaaacaccgtaatttctactaagtgtagatgctgctgctgtagtgcgtggtaatttctactaagtgtagattagcgttcgacacgtgaaactaatttctactaagtgtagatttttttnnnnnnnnnnaagcttggcgtggatccgatatcaactagatcttgagacaaatggcagtattcatccacaattttaaaagaaaaggggggattggggggtacagtgcaggggaaagaatagtagacataatagcaacagacatacaaactaaag

SEQ ID NO: 15407 - DNA, 301 bp, Artificial Sequence
  Arid1b.1_NTC.35
  crRNA array
  misc_feature (148)..(157): n is a, c, g, or t
cttggctttatatatcttgtggaaaggacgaaacaccgtaatttctactaagtgtagatgctgctgctgtagtgcgtggtaatttctactaagtgtagattggcgcgtaatcgctattcgtaatttctactaagtgtagatttttttnnnnnnnnnnaagcttggcgtggatccgatatcaactagatcttgagacaaatggcagtattcatccacaattttaaaagaaaaggggggattggggggtacagtgcaggggaaagaatagtagacataatagcaacagacatacaaactaaag

SEQ ID NO: 15408 - DNA, 301 bp, Artificial Sequence
  Arid1b.1_NTC.36
  crRNA array
  misc_feature (148)..(157): n is a, c, g, or t
cttggctttatatatcttgtggaaaggacgaaacaccgtaatttctactaagtgtagatgctgctgctgtagtgcgtggtaatttctactaagtgtagatcaacccgccgtagcgggccttaatttctactaagtgtagatttttttnnnnnnnnnnaagcttggcgtggatccgatatcaactagatcttgagacaaatggcagtattcatccacaattttaaaagaaaaggggggattggggggtacagtgcaggggaaagaatagtagacataatagcaacagacatacaaactaaag

SEQ ID NO: 15409 - DNA, 301 bp, Artificial Sequence
  Arid1b.1_NTC.37
  crRNA array
  misc_feature (148)..(157): n is a, c, g, or t
cttggctttatatatcttgtggaaaggacgaaacaccgtaatttctactaagtgtagatgctgctgctgtagtgcgtggtaatttctactaagtgtagattttgcgttgacgcgattacttaatttctactaagtgtagatttttttnnnnnnnnnnaagcttggcgtggatccgatatcaactagatcttgagacaaatggcagtattcatccacaattttaaaagaaaaggggggattggggggtacagtgcaggggaaagaatagtagacataatagcaacagacatacaaactaaag

SEQ ID NO: 15410 - DNA, 301 bp, Artificial Sequence
  Arid1b.1_NTC.38
  crRNA array
  misc_feature (148)..(157): n is a, c, g, or t
cttggctttatatatcttgtggaaaggacgaaacaccgtaatttctactaagtgtagatgctgctgctgtagtgcgtggtaatttctactaagtgtagataacggagcgcgatactaccataatttctactaagtgtagatttttttnnnnnnnnnnaagcttggcgtggatccgatatcaactagatcttgagacaaatggcagtattcatccacaattttaaaagaaaaggggggattggggggtacagtgcaggggaaagaatagtagacataatagcaacagacatacaaactaaag

SEQ ID NO: 15411 - DNA, 301 bp, Artificial Sequence
  Arid1b.1_NTC.39
  crRNA array
  misc_feature (148)..(157): n is a, c, g, or t
cttggctttatatatcttgtggaaaggacgaaacaccgtaatttctactaagtgtagatgctgctgctgtagtgcgtggtaatttctactaagtgtagatccggacgttataacgtttcttaatttctactaagtgtagatttttttnnnnnnnnnnaagcttggcgtggatccgatatcaactagatcttgagacaaatggcagtattcatccacaattttaaaagaaaaggggggattggggggtacagtgcaggggaaagaatagtagacataatagcaacagacatacaaactaaag

SEQ ID NO: 15412 - DNA, 301 bp, Artificial Sequence
  Arid1b.1_NTC.4
  crRNA array
  misc_feature (148)..(157): n is a, c, g, or t
cttggctttatatatcttgtggaaaggacgaaacaccgtaatttctactaagtgtagatgctgctgctgtagtgcgtggtaatttctactaagtgtagatatacccgtcgcgaacgtgagtaatttctactaagtgtagatttttttnnnnnnnnnnaagcttggcgtggatccgatatcaactagatcttgagacaaatggcagtattcatccacaattttaaaagaaaaggggggattggggggtacagtgcaggggaaagaatagtagacataatagcaacagacatacaaactaaag

SEQ ID NO: 15413 - DNA, 301 bp, Artificial Sequence
  Arid1b.1_NTC.40
  crRNA array
  misc_feature (148)..(157): n is a, c, g, or t
cttggctttatatatcttgtggaaaggacgaaacaccgtaatttctactaagtgtagatgctgctgctgtagtgcgtggtaatttctactaagtgtagatattcgcgaacccggccggaataatttctactaagtgtagatttttttnnnnnnnnnnaagcttggcgtggatccgatatcaactagatcttgagacaaatggcagtattcatccacaattttaaaagaaaaggggggattggggggtacagtgcaggggaaagaatagtagacataatagcaacagacatacaaactaaag

SEQ ID NO: 15414 - DNA, 301 bp, Artificial Sequence
  Arid1b.1_NTC.41
  crRNA array
  misc_feature (148)..(157): n is a, c, g, or t
cttggctttatatatcttgtggaaaggacgaaacaccgtaatttctactaagtgtagatgctgctgctgtagtgcgtggtaatttctactaagtgtagatttgatggcgcgacgcgttattaatttctactaagtgtagatttttttnnnnnnnnnnaagcttggcgtggatccgatatcaactagatcttgagacaaatggcagtattcatccacaattttaaaagaaaaggggggattggggggtacagtgcaggggaaagaatagtagacataatagcaacagacatacaaactaaag

SEQ ID NO: 15415 - DNA, 301 bp, Artificial Sequence
  Arid1b.1_NTC.42
  crRNA array
  misc_feature (148)..(157): n is a, c, g, or t
cttggctttatatatcttgtggaaaggacgaaacaccgtaatttctactaagtgtagatgctgctgctgtagtgcgtggtaatttctactaagtgtagatggtcaaatcgcggcgataactaatttctactaagtgtagatttttttnnnnnnnnnnaagcttggcgtggatccgatatcaactagatcttgagacaaatggcagtattcatccacaattttaaaagaaaaggggggattggggggtacagtgcaggggaaagaatagtagacataatagcaacagacatacaaactaaag

SEQ ID NO: 15416 - DNA, 301 bp, Artificial Sequence
  Arid1b.1_NTC.43
  crRNA array
  misc_feature (148)..(157): n is a, c, g, or t
cttggctttatatatcttgtggaaaggacgaaacaccgtaatttctactaagtgtagatgctgctgctgtagtgcgtggtaatttctactaagtgtagatcgactcgcgcattgaactggtaatttctactaagtgtagatttttttnnnnnnnnnnaagcttggcgtggatccgatatcaactagatcttgagacaaatggcagtattcatccacaattttaaaagaaaaggggggattggggggtacagtgcaggggaaagaatagtagacataatagcaacagacatacaaactaaag

SEQ ID NO: 15417 - DNA, 301 bp, Artificial Sequence
  Arid1b.1_NTC.44
  crRNA array
  misc_feature (148)..(157): n is a, c, g, or t
cttggctttatatatcttgtggaaaggacgaaacaccgtaatttctactaagtgtagatgctgctgctgtagtgcgtggtaatttctactaagtgtagatagcgtcgtacgatttatcgttaatttctactaagtgtagatttttttnnnnnnnnnnaagcttggcgtggatccgatatcaactagatcttgagacaaatggcagtattcatccacaattttaaaagaaaaggggggattggggggtacagtgcaggggaaagaatagtagacataatagcaacagacatacaaactaaag

SEQ ID NO: 15418 - DNA, 301 bp, Artificial Sequence
  Arid1b.1_NTC.45
  crRNA array
  misc_feature (148)..(157): n is a, c, g, or t
cttggctttatatatcttgtggaaaggacgaaacaccgtaatttctactaagtgtagatgctgctgctgtagtgcgtggtaatttctactaagtgtagatcggaacgcgtgatactagggtaatttctactaagtgtagatttttttnnnnnnnnnnaagcttggcgtggatccgatatcaactagatcttgagacaaatggcagtattcatccacaattttaaaagaaaaggggggattggggggtacagtgcaggggaaagaatagtagacataatagcaacagacatacaaactaaag

SEQ ID NO: 15419 - DNA, 301 bp, Artificial Sequence
  Arid1b.1_NTC.46
  crRNA array
  misc_feature (148)..(157): n is a, c, g, or t
cttggctttatatatcttgtggaaaggacgaaacaccgtaatttctactaagtgtagatgctgctgctgtagtgcgtggtaatttctactaagtgtagatagcgggtcgtagacgcgcggtaatttctactaagtgtagatttttttnnnnnnnnnnaagcttggcgtggatccgatatcaactagatcttgagacaaatggcagtattcatccacaattttaaaagaaaaggggggattggggggtacagtgcaggggaaagaatagtagacataatagcaacagacatacaaactaaag

SEQ ID NO: 15420 - DNA, 301 bp, Artificial Sequence
  Arid1b.1_NTC.47
  crRNA array
  misc_feature (148)..(157): n is a, c, g, or t
cttggctttatatatcttgtggaaaggacgaaacaccgtaatttctactaagtgtagatgctgctgctgtagtgcgtggtaatttctactaagtgtagattctcgtatcgcgattgttaataatttctactaagtgtagatttttttnnnnnnnnnnaagcttggcgtggatccgatatcaactagatcttgagacaaatggcagtattcatccacaattttaaaagaaaaggggggattggggggtacagtgcaggggaaagaatagtagacataatagcaacagacatacaaactaaag

SEQ ID NO: 15421 - DNA, 301 bp, Artificial Sequence
  Arid1b.1_NTC.48
  crRNA array
  misc_feature (148)..(157): n is a, c, g, or t
cttggctttatatatcttgtggaaaggacgaaacaccgtaatttctactaagtgtagatgctgctgctgtagtgcgtggtaatttctactaagtgtagatcggtcgactacggctgttagtaatttctactaagtgtagatttttttnnnnnnnnnnaagcttggcgtggatccgatatcaactagatcttgagacaaatggcagtattcatccacaattttaaaagaaaaggggggattggggggtacagtgcaggggaaagaatagtagacataatagcaacagacatacaaactaaag

SEQ ID NO: 15422 - DNA, 301 bp, Artificial Sequence
  Arid1b.1_NTC.49
  crRNA array
  misc_feature (148)..(157): n is a, c, g, or t
cttggctttatatatcttgtggaaaggacgaaacaccgtaatttctactaagtgtagatgctgctgctgtagtgcgtggtaatttctactaagtgtagattcggggcgcgtcaactgaattaatttctactaagtgtagatttttttnnnnnnnnnnaagcttggcgtggatccgatatcaactagatcttgagacaaatggcagtattcatccacaattttaaaagaaaaggggggattggggggtacagtgcaggggaaagaatagtagacataatagcaacagacatacaaactaaag

SEQ ID NO: 15423 - DNA, 301 bp, Artificial Sequence
  Arid1b.1_NTC.5
  crRNA array
  misc_feature (148)..(157): n is a, c, g, or t
cttggctttatatatcttgtggaaaggacgaaacaccgtaatttctactaagtgtagatgctgctgctgtagtgcgtggtaatttctactaagtgtagatgcttacgcgtcgcgaatgtataatttctactaagtgtagatttttttnnnnnnnnnnaagcttggcgtggatccgatatcaactagatcttgagacaaatggcagtattcatccacaattttaaaagaaaaggggggattggggggtacagtgcaggggaaagaatagtagacataatagcaacagacatacaaactaaag

SEQ ID NO: 15424 - DNA, 301 bp, Artificial Sequence
  Arid1b.1_NTC.50
  crRNA array
  misc_feature (148)..(157): n is a, c, g, or t
cttggctttatatatcttgtggaaaggacgaaacaccgtaatttctactaagtgtagatgctgctgctgtagtgcgtggtaatttctactaagtgtagatattgccgctcgcgcaaaatctaatttctactaagtgtagatttttttnnnnnnnnnnaagcttggcgtggatccgatatcaactagatcttgagacaaatggcagtattcatccacaattttaaaagaaaaggggggattggggggtacagtgcaggggaaagaatagtagacataatagcaacagacatacaaactaaag

SEQ ID NO: 15425 - DNA, 301 bp, Artificial Sequence
  Arid1b.1_NTC.51
  crRNA array
  misc_feature (148)..(157): n is a, c, g, or t
cttggctttatatatcttgtggaaaggacgaaacaccgtaatttctactaagtgtagatgctgctgctgtagtgcgtggtaatttctactaagtgtagattaacgcgcaacacgccaatgtaatttctactaagtgtagatttttttnnnnnnnnnnaagcttggcgtggatccgatatcaactagatcttgagacaaatggcagtattcatccacaattttaaaagaaaaggggggattggggggtacagtgcaggggaaagaatagtagacataatagcaacagacatacaaactaaag

SEQ ID NO: 15426 - DNA, 301 bp, Artificial Sequence
  Arid1b.1_NTC.6
  crRNA array
  misc_feature (148)..(157): n is a, c, g, or t
cttggctttatatatcttgtggaaaggacgaaacaccgtaatttctactaagtgtagatgctgctgctgtagtgcgtggtaatttctactaagtgtagatcgaatcgcgcctacgggaattaatttctactaagtgtagatttttttnnnnnnnnnnaagcttggcgtggatccgatatcaactagatcttgagacaaatggcagtattcatccacaattttaaaagaaaaggggggattggggggtacagtgcaggggaaagaatagtagacataatagcaacagacatacaaactaaag

SEQ ID NO: 15427 - DNA, 301 bp, Artificial Sequence
  Arid1b.1_NTC.7
  crRNA array
  misc_feature (148)..(157): n is a, c, g, or t
cttggctttatatatcttgtggaaaggacgaaacaccgtaatttctactaagtgtagatgctgctgctgtagtgcgtggtaatttctactaagtgtagatcgccgaacggataagactattaatttctactaagtgtagatttttttnnnnnnnnnnaagcttggcgtggatccgatatcaactagatcttgagacaaatggcagtattcatccacaattttaaaagaaaaggggggattggggggtacagtgcaggggaaagaatagtagacataatagcaacagacatacaaactaaag

SEQ ID NO: 15428 - DNA, 301 bp, Artificial Sequence
  Arid1b.1_NTC.8
  crRNA array
  misc_feature (148)..(157): n is a, c, g, or t
cttggctttatatatcttgtggaaaggacgaaacaccgtaatttctactaagtgtagatgctgctgctgtagtgcgtggtaatttctactaagtgtagatcgaccgaggttacgctgggataatttctactaagtgtagatttttttnnnnnnnnnnaagcttggcgtggatccgatatcaactagatcttgagacaaatggcagtattcatccacaattttaaaagaaaaggggggattggggggtacagtgcaggggaaagaatagtagacataatagcaacagacatacaaactaaag

SEQ ID NO: 15429 - DNA, 301 bp, Artificial Sequence
  Arid1b.1_NTC.9
  crRNA array
  misc_feature (148)..(157): n is a, c, g, or t
cttggctttatatatcttgtggaaaggacgaaacaccgtaatttctactaagtgtagatgctgctgctgtagtgcgtggtaatttctactaagtgtagatatcgccgtacggctatggcataatttctactaagtgtagatttttttnnnnnnnnnnaagcttggcgtggatccgatatcaactagatcttgagacaaatggcagtattcatccacaattttaaaagaaaaggggggattggggggtacagtgcaggggaaagaatagtagacataatagcaacagacatacaaactaaag

SEQ ID NO: 15430 - DNA, 301 bp, Artificial Sequence
  Arid1b.2_NTC.0
  crRNA array
  misc_feature (148)..(157): n is a, c, g, or t
cttggctttatatatcttgtggaaaggacgaaacaccgtaatttctactaagtgtagatagtgcaaaactgagcgcgggtaatttctactaagtgtagattatagcgtcgcgcgctaatttaatttctactaagtgtagatttttttnnnnnnnnnnaagcttggcgtggatccgatatcaactagatcttgagacaaatggcagtattcatccacaattttaaaagaaaaggggggattggggggtacagtgcaggggaaagaatagtagacataatagcaacagacatacaaactaaag

SEQ ID NO: 15431 - DNA, 301 bp, Artificial Sequence
  Arid1b.2_NTC.1
  crRNA array
  misc_feature (148)..(157): n is a, c, g, or t
cttggctttatatatcttgtggaaaggacgaaacaccgtaatttctactaagtgtagatagtgcaaaactgagcgcgggtaatttctactaagtgtagatcgcgtaaccgttccggctcctaatttctactaagtgtagatttttttnnnnnnnnnnaagcttggcgtggatccgatatcaactagatcttgagacaaatggcagtattcatccacaattttaaaagaaaaggggggattggggggtacagtgcaggggaaagaatagtagacataatagcaacagacatacaaactaaag

SEQ ID NO: 15432 - DNA, 301 bp, Artificial Sequence
  Arid1b.2_NTC.10
  crRNA array
  misc_feature (148)..(157): n is a, c, g, or t
cttggctttatatatcttgtggaaaggacgaaacaccgtaatttctactaagtgtagatagtgcaaaactgagcgcgggtaatttctactaagtgtagatcgctaagttcgcgcgggccgtaatttctactaagtgtagatttttttnnnnnnnnnnaagcttggcgtggatccgatatcaactagatcttgagacaaatggcagtattcatccacaattttaaaagaaaaggggggattggggggtacagtgcaggggaaagaatagtagacataatagcaacagacatacaaactaaag

SEQ ID NO: 15433 - DNA, 301 bp, Artificial Sequence
  Arid1b.2_NTC.11
  crRNA array
  misc_feature (148)..(157): n is a, c, g, or t
cttggctttatatatcttgtggaaaggacgaaacaccgtaatttctactaagtgtagatagtgcaaaactgagcgcgggtaatttctactaagtgtagatcgttcgtcgacgaagcaatctaatttctactaagtgtagatttttttnnnnnnnnnnaagcttggcgtggatccgatatcaactagatcttgagacaaatggcagtattcatccacaattttaaaagaaaaggggggattggggggtacagtgcaggggaaagaatagtagacataatagcaacagacatacaaactaaag

SEQ ID NO: 15434 - DNA, 301 bp, Artificial Sequence
  Arid1b.2_NTC.12
  crRNA array
  misc_feature (148)..(157): n is a, c, g, or t
cttggctttatatatcttgtggaaaggacgaaacaccgtaatttctactaagtgtagatagtgcaaaactgagcgcgggtaatttctactaagtgtagatcgccgacgattaatcaatagtaatttctactaagtgtagatttttttnnnnnnnnnnaagcttggcgtggatccgatatcaactagatcttgagacaaatggcagtattcatccacaattttaaaagaaaaggggggattggggggtacagtgcaggggaaagaatagtagacataatagcaacagacatacaaactaaag

SEQ ID NO: 15435 - DNA, 301 bp, Artificial Sequence
  Arid1b.2_NTC.13
  crRNA array
  misc_feature (148)..(157): n is a, c, g, or t
cttggctttatatatcttgtggaaaggacgaaacaccgtaatttctactaagtgtagatagtgcaaaactgagcgcgggtaatttctactaagtgtagatgaccgttgtatcgcgatcaataatttctactaagtgtagatttttttnnnnnnnnnnaagcttggcgtggatccgatatcaactagatcttgagacaaatggcagtattcatccacaattttaaaagaaaaggggggattggggggtacagtgcaggggaaagaatagtagacataatagcaacagacatacaaactaaag

SEQ ID NO: 15436 - DNA, 301 bp, Artificial Sequence
  Arid1b.2_NTC.14
  crRNA array
  misc_feature (148)..(157): n is a, c, g, or t
cttggctttatatatcttgtggaaaggacgaaacaccgtaatttctactaagtgtagatagtgcaaaactgagcgcgggtaatttctactaagtgtagatccgttcgtgcgatagtgttttaatttctactaagtgtagatttttttnnnnnnnnnnaagcttggcgtggatccgatatcaactagatcttgagacaaatggcagtattcatccacaattttaaaagaaaaggggggattggggggtacagtgcaggggaaagaatagtagacataatagcaacagacatacaaactaaag

SEQ ID NO: 15437 - DNA, 301 bp, Artificial Sequence
  Arid1b.2_NTC.15
  crRNA array
  misc_feature (148)..(157): n is a, c, g, or t
cttggctttatatatcttgtggaaaggacgaaacaccgtaatttctactaagtgtagatagtgcaaaactgagcgcgggtaatttctactaagtgtagatgttgtcgtgccgcgaatttataatttctactaagtgtagatttttttnnnnnnnnnnaagcttggcgtggatccgatatcaactagatcttgagacaaatggcagtattcatccacaattttaaaagaaaaggggggattggggggtacagtgcaggggaaagaatagtagacataatagcaacagacatacaaactaaag

SEQ ID NO: 15438 - DNA, 301 bp, Artificial Sequence
  Arid1b.2_NTC.16
  crRNA array
  misc_feature (148)..(157): n is a, c, g, or t
cttggctttatatatcttgtggaaaggacgaaacaccgtaatttctactaagtgtagatagtgcaaaactgagcgcgggtaatttctactaagtgtagatcggtacgttagacgaaaatttaatttctactaagtgtagatttttttnnnnnnnnnnaagcttggcgtggatccgatatcaactagatcttgagacaaatggcagtattcatccacaattttaaaagaaaaggggggattggggggtacagtgcaggggaaagaatagtagacataatagcaacagacatacaaactaaag

SEQ ID NO: 15439 - DNA, 301 bp, Artificial Sequence
  Arid1b.2_NTC.17
  crRNA array
  misc_feature (148)..(157): n is a, c, g, or t
cttggctttatatatcttgtggaaaggacgaaacaccgtaatttctactaagtgtagatagtgcaaaactgagcgcgggtaatttctactaagtgtagattatcgaacgctatcgaacgttaatttctactaagtgtagatttttttnnnnnnnnnnaagcttggcgtggatccgatatcaactagatcttgagacaaatggcagtattcatccacaattttaaaagaaaaggggggattggggggtacagtgcaggggaaagaatagtagacataatagcaacagacatacaaactaaag

SEQ ID NO: 15440 - DNA, 301 bp, Artificial Sequence
  Arid1b.2_NTC.18
  crRNA array
  misc_feature (148)..(157): n is a, c, g, or t
cttggctttatatatcttgtggaaaggacgaaacaccgtaatttctactaagtgtagatagtgcaaaactgagcgcgggtaatttctactaagtgtagattccggttacgaccggcaaaataatttctactaagtgtagatttttttnnnnnnnnnnaagcttggcgtggatccgatatcaactagatcttgagacaaatggcagtattcatccacaattttaaaagaaaaggggggattggggggtacagtgcaggggaaagaatagtagacataatagcaacagacatacaaactaaag

SEQ ID NO: 15441 - DNA, 301 bp, Artificial Sequence
  Arid1b.2_NTC.19
  crRNA array
  misc_feature (148)..(157): n is a, c, g, or t
cttggctttatatatcttgtggaaaggacgaaacaccgtaatttctactaagtgtagatagtgcaaaactgagcgcgggtaatttctactaagtgtagatcgtcgtagaacgatacccgataatttctactaagtgtagatttttttnnnnnnnnnnaagcttggcgtggatccgatatcaactagatcttgagacaaatggcagtattcatccacaattttaaaagaaaaggggggattggggggtacagtgcaggggaaagaatagtagacataatagcaacagacatacaaactaaag

SEQ ID NO: 15442 - DNA, 301 bp, Artificial Sequence
  Arid1b.2_NTC.2
  crRNA array
  misc_feature (148)..(157): n is a, c, g, or t
cttggctttatatatcttgtggaaaggacgaaacaccgtaatttctactaagtgtagatagtgcaaaactgagcgcgggtaatttctactaagtgtagatttatgtcgcgccgcgacccgtaatttctactaagtgtagatttttttnnnnnnnnnnaagcttggcgtggatccgatatcaactagatcttgagacaaatggcagtattcatccacaattttaaaagaaaaggggggattggggggtacagtgcaggggaaagaatagtagacataatagcaacagacatacaaactaaag

SEQ ID NO: 15443 - DNA, 301 bp, Artificial Sequence
  Arid1b.2_NTC.20
  crRNA array
  misc_feature (148)..(157): n is a, c, g, or t
cttggctttatatatcttgtggaaaggacgaaacaccgtaatttctactaagtgtagatagtgcaaaactgagcgcgggtaatttctactaagtgtagatattccggcgcgaccagaagataatttctactaagtgtagatttttttnnnnnnnnnnaagcttggcgtggatccgatatcaactagatcttgagacaaatggcagtattcatccacaattttaaaagaaaaggggggattggggggtacagtgcaggggaaagaatagtagacataatagcaacagacatacaaactaaag

SEQ ID NO: 15444 - DNA, 301 bp, Artificial Sequence
  Arid1b.2_NTC.21
  crRNA array
  misc_feature (148)..(157): n is a, c, g, or t
cttggctttatatatcttgtggaaaggacgaaacaccgtaatttctactaagtgtagatagtgcaaaactgagcgcgggtaatttctactaagtgtagatgtataacttcgcgcggtccgtaatttctactaagtgtagatttttttnnnnnnnnnnaagcttggcgtggatccgatatcaactagatcttgagacaaatggcagtattcatccacaattttaaaagaaaaggggggattggggggtacagtgcaggggaaagaatagtagacataatagcaacagacatacaaactaaag

SEQ ID NO: 15445 - DNA, 301 bp, Artificial Sequence
  Arid1b.2_NTC.22
  crRNA array
  misc_feature (148)..(157): n is a, c, g, or t
cttggctttatatatcttgtggaaaggacgaaacaccgtaatttctactaagtgtagatagtgcaaaactgagcgcgggtaatttctactaagtgtagatgcgcgtcaacgtaatgtgcctaatttctactaagtgtagatttttttnnnnnnnnnnaagcttggcgtggatccgatatcaactagatcttgagacaaatggcagtattcatccacaattttaaaagaaaaggggggattggggggtacagtgcaggggaaagaatagtagacataatagcaacagacatacaaactaaag

SEQ ID NO: 15446 - DNA, 301 bp, Artificial Sequence
  Arid1b.2_NTC.23
  crRNA array
  misc_feature (148)..(157): n is a, c, g, or t
cttggctttatatatcttgtggaaaggacgaaacaccgtaatttctactaagtgtagatagtgcaaaactgagcgcgggtaatttctactaagtgtagatacgcgctattatcgtaggtgtaatttctactaagtgtagatttttttnnnnnnnnnnaagcttggcgtggatccgatatcaactagatcttgagacaaatggcagtattcatccacaattttaaaagaaaaggggggattggggggtacagtgcaggggaaagaatagtagacataatagcaacagacatacaaactaaag

SEQ ID NO: 15447 - DNA, 301 bp, Artificial Sequence
  Arid1b.2_NTC.24
  crRNA array
  misc_feature (148)..(157): n is a, c, g, or t
cttggctttatatatcttgtggaaaggacgaaacaccgtaatttctactaagtgtagatagtgcaaaactgagcgcgggtaatttctactaagtgtagatactatcgacgttcgtcccggtaatttctactaagtgtagatttttttnnnnnnnnnnaagcttggcgtggatccgatatcaactagatcttgagacaaatggcagtattcatccacaattttaaaagaaaaggggggattggggggtacagtgcaggggaaagaatagtagacataatagcaacagacatacaaactaaag

SEQ ID NO: 15448 - DNA, 301 bp, Artificial Sequence
  Arid1b.2_NTC.25
  crRNA array
  misc_feature (148)..(157): n is a, c, g, or t
cttggctttatatatcttgtggaaaggacgaaacaccgtaatttctactaagtgtagatagtgcaaaactgagcgcgggtaatttctactaagtgtagattcgcgttatcgtgccgtgcgtaatttctactaagtgtagatttttttnnnnnnnnnnaagcttggcgtggatccgatatcaactagatcttgagacaaatggcagtattcatccacaattttaaaagaaaaggggggattggggggtacagtgcaggggaaagaatagtagacataatagcaacagacatacaaactaaag

SEQ ID NO: 15449 - DNA, 301 bp, Artificial Sequence
  Arid1b.2_NTC.26
  crRNA array
  misc_feature (148)..(157): n is a, c, g, or t
cttggctttatatatcttgtggaaaggacgaaacaccgtaatttctactaagtgtagatagtgcaaaactgagcgcgggtaatttctactaagtgtagatcgcgacggcggttttaacactaatttctactaagtgtagatttttttnnnnnnnnnnaagcttggcgtggatccgatatcaactagatcttgagacaaatggcagtattcatccacaattttaaaagaaaaggggggattggggggtacagtgcaggggaaagaatagtagacataatagcaacagacatacaaactaaag

SEQ ID NO: 15450 - DNA, 301 bp, Artificial Sequence
  Arid1b.2_NTC.27
  crRNA array
  misc_feature (148)..(157): n is a, c, g, or t
cttggctttatatatcttgtggaaaggacgaaacaccgtaatttctactaagtgtagatagtgcaaaactgagcgcgggtaatttctactaagtgtagatgtcgcgttgcgaccggcgcttaatttctactaagtgtagatttttttnnnnnnnnnnaagcttggcgtggatccgatatcaactagatcttgagacaaatggcagtattcatccacaattttaaaagaaaaggggggattggggggtacagtgcaggggaaagaatagtagacataatagcaacagacatacaaactaaag

SEQ ID NO: 15451 - DNA, 301 bp, Artificial Sequence
  Arid1b.2_NTC.28
  crRNA array
  misc_feature (148)..(157): n is a, c, g, or t
cttggctttatatatcttgtggaaaggacgaaacaccgtaatttctactaagtgtagatagtgcaaaactgagcgcgggtaatttctactaagtgtagataccgctaatcggcgtaaacttaatttctactaagtgtagatttttttnnnnnnnnnnaagcttggcgtggatccgatatcaactagatcttgagacaaatggcagtattcatccacaattttaaaagaaaaggggggattggggggtacagtgcaggggaaagaatagtagacataatagcaacagacatacaaactaaag

SEQ ID NO: 15452 - DNA, 301 bp, Artificial Sequence
  Arid1b.2_NTC.29
  crRNA array
  misc_feature (148)..(157): n is a, c, g, or t
cttggctttatatatcttgtggaaaggacgaaacaccgtaatttctactaagtgtagatagtgcaaaactgagcgcgggtaatttctactaagtgtagatcgcgatctataccgtctatataatttctactaagtgtagatttttttnnnnnnnnnnaagcttggcgtggatccgatatcaactagatcttgagacaaatggcagtattcatccacaattttaaaagaaaaggggggattggggggtacagtgcaggggaaagaatagtagacataatagcaacagacatacaaactaaag

SEQ ID NO: 15453 - DNA, 301 bp, Artificial Sequence
  Arid1b.2_NTC.3
  crRNA array
  misc_feature (148)..(157): n is a, c, g, or t
cttggctttatatatcttgtggaaaggacgaaacaccgtaatttctactaagtgtagatagtgcaaaactgagcgcgggtaatttctactaagtgtagattcgacgcgagacgacgtacataatttctactaagtgtagatttttttnnnnnnnnnnaagcttggcgtggatccgatatcaactagatcttgagacaaatggcagtattcatccacaattttaaaagaaaaggggggattggggggtacagtgcaggggaaagaatagtagacataatagcaacagacatacaaactaaag

SEQ ID NO: 15454 - DNA, 301 bp, Artificial Sequence
  Arid1b.2_NTC.30
  crRNA array
  misc_feature (148)..(157): n is a, c, g, or t
cttggctttatatatcttgtggaaaggacgaaacaccgtaatttctactaagtgtagatagtgcaaaactgagcgcgggtaatttctactaagtgtagatcgatcgtacgggtgtcctaataatttctactaagtgtagatttttttnnnnnnnnnnaagcttggcgtggatccgatatcaactagatcttgagacaaatggcagtattcatccacaattttaaaagaaaaggggggattggggggtacagtgcaggggaaagaatagtagacataatagcaacagacatacaaactaaag

SEQ ID NO: 15455 - DNA, 301 bp, Artificial Sequence
  Arid1b.2_NTC.31
  crRNA array
  misc_feature (148)..(157): n is a, c, g, or t
cttggctttatatatcttgtggaaaggacgaaacaccgtaatttctactaagtgtagatagtgcaaaactgagcgcgggtaatttctactaagtgtagatgccgaccgcgtgattgtaggtaatttctactaagtgtagatttttttnnnnnnnnnnaagcttggcgtggatccgatatcaactagatcttgagacaaatggcagtattcatccacaattttaaaagaaaaggggggattggggggtacagtgcaggggaaagaatagtagacataatagcaacagacatacaaactaaag

SEQ ID NO: 15456 - DNA, 301 bp, Artificial Sequence
  Arid1b.2_NTC.32
  crRNA array
  misc_feature (148)..(157): n is a, c, g, or t
cttggctttatatatcttgtggaaaggacgaaacaccgtaatttctactaagtgtagatagtgcaaaactgagcgcgggtaatttctactaagtgtagatgcacgttacgcccgggtcactaatttctactaagtgtagatttttttnnnnnnnnnnaagcttggcgtggatccgatatcaactagatcttgagacaaatggcagtattcatccacaattttaaaagaaaaggggggattggggggtacagtgcaggggaaagaatagtagacataatagcaacagacatacaaactaaag

SEQ ID NO: 15457 - DNA, 301 bp, Artificial Sequence
  Arid1b.2_NTC.33
  crRNA array
  misc_feature (148)..(157): n is a, c, g, or t
cttggctttatatatcttgtggaaaggacgaaacaccgtaatttctactaagtgtagatagtgcaaaactgagcgcgggtaatttctactaagtgtagattaagcgaccgacgcattcgctaatttctactaagtgtagatttttttnnnnnnnnnnaagcttggcgtggatccgatatcaactagatcttgagacaaatggcagtattcatccacaattttaaaagaaaaggggggattggggggtacagtgcaggggaaagaatagtagacataatagcaacagacatacaaactaaag

SEQ ID NO: 15458 - DNA, 301 bp, Artificial Sequence
  Arid1b.2_NTC.34
  crRNA array
  misc_feature (148)..(157): n is a, c, g, or t
cttggctttatatatcttgtggaaaggacgaaacaccgtaatttctactaagtgtagatagtgcaaaactgagcgcgggtaatttctactaagtgtagattagcgttcgacacgtgaaactaatttctactaagtgtagatttttttnnnnnnnnnnaagcttggcgtggatccgatatcaactagatcttgagacaaatggcagtattcatccacaattttaaaagaaaaggggggattggggggtacagtgcaggggaaagaatagtagacataatagcaacagacatacaaactaaag

SEQ ID NO: 15459 - DNA, 301 bp, Artificial Sequence
  Arid1b.2_NTC.35
  crRNA array
  misc_feature (148)..(157): n is a, c, g, or t
cttggctttatatatcttgtggaaaggacgaaacaccgtaatttctactaagtgtagatagtgcaaaactgagcgcgggtaatttctactaagtgtagattggcgcgtaatcgctattcgtaatttctactaagtgtagatttttttnnnnnnnnnnaagcttggcgtggatccgatatcaactagatcttgagacaaatggcagtattcatccacaattttaaaagaaaaggggggattggggggtacagtgcaggggaaagaatagtagacataatagcaacagacatacaaactaaag

SEQ ID NO: 15460 - DNA, 301 bp, Artificial Sequence
  Arid1b.2_NTC.36
  crRNA array
  misc_feature (148)..(157): n is a, c, g, or t
cttggctttatatatcttgtggaaaggacgaaacaccgtaatttctactaagtgtagatagtgcaaaactgagcgcgggtaatttctactaagtgtagatcaacccgccgtagcgggccttaatttctactaagtgtagatttttttnnnnnnnnnnaagcttggcgtggatccgatatcaactagatcttgagacaaatggcagtattcatccacaattttaaaagaaaaggggggattggggggtacagtgcaggggaaagaatagtagacataatagcaacagacatacaaactaaag

SEQ ID NO: 15461 - DNA, 301 bp, Artificial Sequence
  Arid1b.2_NTC.37
  crRNA array
  misc_feature (148)..(157): n is a, c, g, or t
cttggctttatatatcttgtggaaaggacgaaacaccgtaatttctactaagtgtagatagtgcaaaactgagcgcgggtaatttctactaagtgtagattttgcgttgacgcgattacttaatttctactaagtgtagatttttttnnnnnnnnnnaagcttggcgtggatccgatatcaactagatcttgagacaaatggcagtattcatccacaattttaaaagaaaaggggggattggggggtacagtgcaggggaaagaatagtagacataatagcaacagacatacaaactaaag

SEQ ID NO: 15462 - DNA, 301 bp, Artificial Sequence
  Arid1b.2_NTC.38
  crRNA array
  misc_feature (148)..(157): n is a, c, g, or t
cttggctttatatatcttgtggaaaggacgaaacaccgtaatttctactaagtgtagatagtgcaaaactgagcgcgggtaatttctactaagtgtagataacggagcgcgatactaccataatttctactaagtgtagatttttttnnnnnnnnnnaagcttggcgtggatccgatatcaactagatcttgagacaaatggcagtattcatccacaattttaaaagaaaaggggggattggggggtacagtgcaggggaaagaatagtagacataatagcaacagacatacaaactaaag

SEQ ID NO: 15463 - DNA, 301 bp, Artificial Sequence
  Arid1b.2_NTC.39
  crRNA array
  misc_feature (148)..(157): n is a, c, g, or t
cttggctttatatatcttgtggaaaggacgaaacaccgtaatttctactaagtgtagatagtgcaaaactgagcgcgggtaatttctactaagtgtagatccggacgttataacgtttcttaatttctactaagtgtagatttttttnnnnnnnnnnaagcttggcgtggatccgatatcaactagatcttgagacaaatggcagtattcatccacaattttaaaagaaaaggggggattggggggtacagtgcaggggaaagaatagtagacataatagcaacagacatacaaactaaag

SEQ ID NO: 15464 - DNA, 301 bp, Artificial Sequence
  Arid1b.2_NTC.4
  crRNA array
  misc_feature (148)..(157): n is a, c, g, or t
cttggctttatatatcttgtggaaaggacgaaacaccgtaatttctactaagtgtagatagtgcaaaactgagcgcgggtaatttctactaagtgtagatatacccgtcgcgaacgtgagtaatttctactaagtgtagatttttttnnnnnnnnnnaagcttggcgtggatccgatatcaactagatcttgagacaaatggcagtattcatccacaattttaaaagaaaaggggggattggggggtacagtgcaggggaaagaatagtagacataatagcaacagacatacaaactaaag

SEQ ID NO: 15465 - DNA, 301 bp, Artificial Sequence
  Arid1b.2_NTC.40
  crRNA array
  misc_feature (148)..(157): n is a, c, g, or t
cttggctttatatatcttgtggaaaggacgaaacaccgtaatttctactaagtgtagatagtgcaaaactgagcgcgggtaatttctactaagtgtagatattcgcgaacccggccggaataatttctactaagtgtagatttttttnnnnnnnnnnaagcttggcgtggatccgatatcaactagatcttgagacaaatggcagtattcatccacaattttaaaagaaaaggggggattggggggtacagtgcaggggaaagaatagtagacataatagcaacagacatacaaactaaag

SEQ ID NO: 15466 - DNA, 301 bp, Artificial Sequence
  Arid1b.2_NTC.41
  crRNA array
  misc_feature (148)..(157): n is a, c, g, or t
cttggctttatatatcttgtggaaaggacgaaacaccgtaatttctactaagtgtagatagtgcaaaactgagcgcgggtaatttctactaagtgtagatttgatggcgcgacgcgttattaatttctactaagtgtagatttttttnnnnnnnnnnaagcttggcgtggatccgatatcaactagatcttgagacaaatggcagtattcatccacaattttaaaagaaaaggggggattggggggtacagtgcaggggaaagaatagtagacataatagcaacagacatacaaactaaag

SEQ ID NO: 15467 - DNA, 301 bp, Artificial Sequence
  Arid1b.2_NTC.42
  crRNA array
  misc_feature (148)..(157): n is a, c, g, or t
cttggctttatatatcttgtggaaaggacgaaacaccgtaatttctactaagtgtagatagtgcaaaactgagcgcgggtaatttctactaagtgtagatggtcaaatcgcggcgataactaatttctactaagtgtagatttttttnnnnnnnnnnaagcttggcgtggatccgatatcaactagatcttgagacaaatggcagtattcatccacaattttaaaagaaaaggggggattggggggtacagtgcaggggaaagaatagtagacataatagcaacagacatacaaactaaag

SEQ ID NO: 15468 - DNA, 301 bp, Artificial Sequence
  Arid1b.2_NTC.43
  crRNA array
  misc_feature (148)..(157): n is a, c, g, or t
cttggctttatatatcttgtggaaaggacgaaacaccgtaatttctactaagtgtagatagtgcaaaactgagcgcgggtaatttctactaagtgtagatcgactcgcgcattgaactggtaatttctactaagtgtagatttttttnnnnnnnnnnaagcttggcgtggatccgatatcaactagatcttgagacaaatggcagtattcatccacaattttaaaagaaaaggggggattggggggtacagtgcaggggaaagaatagtagacataatagcaacagacatacaaactaaag

SEQ ID NO: 15469 - DNA, 301 bp, Artificial Sequence
  Arid1b.2_NTC.44
  crRNA array
  misc_feature (148)..(157): n is a, c, g, or t
cttggctttatatatcttgtggaaaggacgaaacaccgtaatttctactaagtgtagatagtgcaaaactgagcgcgggtaatttctactaagtgtagatagcgtcgtacgatttatcgttaatttctactaagtgtagatttttttnnnnnnnnnnaagcttggcgtggatccgatatcaactagatcttgagacaaatggcagtattcatccacaattttaaaagaaaaggggggattggggggtacagtgcaggggaaagaatagtagacataatagcaacagacatacaaactaaag

SEQ ID NO: 15470 - DNA, 301 bp, Artificial Sequence
  Arid1b.2_NTC.45
  crRNA array
  misc_feature (148)..(157): n is a, c, g, or t
cttggctttatatatcttgtggaaaggacgaaacaccgtaatttctactaagtgtagatagtgcaaaactgagcgcgggtaatttctactaagtgtagatcggaacgcgtgatactagggtaatttctactaagtgtagatttttttnnnnnnnnnnaagcttggcgtggatccgatatcaactagatcttgagacaaatggcagtattcatccacaattttaaaagaaaaggggggattggggggtacagtgcaggggaaagaatagtagacataatagcaacagacatacaaactaaag

SEQ ID NO: 15471 - DNA, 301 bp, Artificial Sequence
  Arid1b.2_NTC.46
  crRNA array
  misc_feature (148)..(157): n is a, c, g, or t
cttggctttatatatcttgtggaaaggacgaaacaccgtaatttctactaagtgtagatagtgcaaaactgagcgcgggtaatttctactaagtgtagatagcgggtcgtagacgcgcggtaatttctactaagtgtagatttttttnnnnnnnnnnaagcttggcgtggatccgatatcaactagatcttgagacaaatggcagtattcatccacaattttaaaagaaaaggggggattggggggtacagtgcaggggaaagaatagtagacataatagcaacagacatacaaactaaag

SEQ ID NO: 15472 - DNA, 301 bp, Artificial Sequence
  Arid1b.2_NTC.47
  crRNA array
  misc_feature (148)..(157): n is a, c, g, or t
cttggctttatatatcttgtggaaaggacgaaacaccgtaatttctactaagtgtagatagtgcaaaactgagcgcgggtaatttctactaagtgtagattctcgtatcgcgattgttaataatttctactaagtgtagatttttttnnnnnnnnnnaagcttggcgtggatccgatatcaactagatcttgagacaaatggcagtattcatccacaattttaaaagaaaaggggggattggggggtacagtgcaggggaaagaatagtagacataatagcaacagacatacaaactaaag

SEQ ID NO: 15473 - DNA, 301 bp, Artificial Sequence
  Arid1b.2_NTC.48
  crRNA array
  misc_feature (148)..(157): n is a, c, g, or t
cttggctttatatatcttgtggaaaggacgaaacaccgtaatttctactaagtgtagatagtgcaaaactgagcgcgggtaatttctactaagtgtagatcggtcgactacggctgttagtaatttctactaagtgtagatttttttnnnnnnnnnnaagcttggcgtggatccgatatcaactagatcttgagacaaatggcagtattcatccacaattttaaaagaaaaggggggattggggggtacagtgcaggggaaagaatagtagacataatagcaacagacatacaaactaaag

SEQ ID NO: 15474 - DNA, 301 bp, Artificial Sequence
  Arid1b.2_NTC.49
  crRNA array
  misc_feature (148)..(157): n is a, c, g, or t
cttggctttatatatcttgtggaaaggacgaaacaccgtaatttctactaagtgtagatagtgcaaaactgagcgcgggtaatttctactaagtgtagattcggggcgcgtcaactgaattaatttctactaagtgtagatttttttnnnnnnnnnnaagcttggcgtggatccgatatcaactagatcttgagacaaatggcagtattcatccacaattttaaaagaaaaggggggattggggggtacagtgcaggggaaagaatagtagacataatagcaacagacatacaaactaaag

SEQ ID NO: 15475 - DNA, 301 bp, Artificial Sequence
  Arid1b.2_NTC.5
  crRNA array
  misc_feature (148)..(157): n is a, c, g, or t
cttggctttatatatcttgtggaaaggacgaaacaccgtaatttctactaagtgtagatagtgcaaaactgagcgcgggtaatttctactaagtgtagatgcttacgcgtcgcgaatgtataatttctactaagtgtagatttttttnnnnnnnnnnaagcttggcgtggatccgatatcaactagatcttgagacaaatggcagtattcatccacaattttaaaagaaaaggggggattggggggtacagtgcaggggaaagaatagtagacataatagcaacagacatacaaactaaag

SEQ ID NO: 15476 - DNA, 301 bp, Artificial Sequence
  Arid1b.2_NTC.50
  crRNA array
  misc_feature (148)..(157): n is a, c, g, or t
cttggctttatatatcttgtggaaaggacgaaacaccgtaatttctactaagtgtagatagtgcaaaactgagcgcgggtaatttctactaagtgtagatattgccgctcgcgcaaaatctaatttctactaagtgtagatttttttnnnnnnnnnnaagcttggcgtggatccgatatcaactagatcttgagacaaatggcagtattcatccacaattttaaaagaaaaggggggattggggggtacagtgcaggggaaagaatagtagacataatagcaacagacatacaaactaaag

SEQ ID NO: 15477 - DNA, 301 bp, Artificial Sequence
  Arid1b.2_NTC.51
  crRNA array
  misc_feature (148)..(157): n is a, c, g, or t
cttggctttatatatcttgtggaaaggacgaaacaccgtaatttctactaagtgtagatagtgcaaaactgagcgcgggtaatttctactaagtgtagattaacgcgcaacacgccaatgtaatttctactaagtgtagatttttttnnnnnnnnnnaagcttggcgtggatccgatatcaactagatcttgagacaaatggcagtattcatccacaattttaaaagaaaaggggggattggggggtacagtgcaggggaaagaatagtagacataatagcaacagacatacaaactaaag

SEQ ID NO: 15478 - DNA, 301 bp, Artificial Sequence
  Arid1b.2_NTC.6
  crRNA array
  misc_feature (148)..(157): n is a, c, g, or t
cttggctttatatatcttgtggaaaggacgaaacaccgtaatttctactaagtgtagatagtgcaaaactgagcgcgggtaatttctactaagtgtagatcgaatcgcgcctacgggaattaatttctactaagtgtagatttttttnnnnnnnnnnaagcttggcgtggatccgatatcaactagatcttgagacaaatggcagtattcatccacaattttaaaagaaaaggggggattggggggtacagtgcaggggaaagaatagtagacataatagcaacagacatacaaactaaag

SEQ ID NO: 15479 - DNA, 301 bp, Artificial Sequence
  Arid1b.2_NTC.7
  crRNA array
  misc_feature (148)..(157): n is a, c, g, or t
cttggctttatatatcttgtggaaaggacgaaacaccgtaatttctactaagtgtagatagtgcaaaactgagcgcgggtaatttctactaagtgtagatcgccgaacggataagactattaatttctactaagtgtagatttttttnnnnnnnnnnaagcttggcgtggatccgatatcaactagatcttgagacaaatggcagtattcatccacaattttaaaagaaaaggggggattggggggtacagtgcaggggaaagaatagtagacataatagcaacagacatacaaactaaag

SEQ ID NO: 15480 - DNA, 301 bp, Artificial Sequence
  Arid1b.2_NTC.8
  crRNA array
  misc_feature (148)..(157): n is a, c, g, or t
cttggctttatatatcttgtggaaaggacgaaacaccgtaatttctactaagtgtagatagtgcaaaactgagcgcgggtaatttctactaagtgtagatcgaccgaggttacgctgggataatttctactaagtgtagatttttttnnnnnnnnnnaagcttggcgtggatccgatatcaactagatcttgagacaaatggcagtattcatccacaattttaaaagaaaaggggggattggggggtacagtgcaggggaaagaatagtagacataatagcaacagacatacaaactaaag

SEQ ID NO: 15481 - DNA, 301 bp, Artificial Sequence
  Arid1b.2_NTC.9
  crRNA array
  misc_feature (148)..(157): n is a, c, g, or t
cttggctttatatatcttgtggaaaggacgaaacaccgtaatttctactaagtgtagatagtgcaaaactgagcgcgggtaatttctactaagtgtagatatcgccgtacggctatggcataatttctactaagtgtagatttttttnnnnnnnnnnaagcttggcgtggatccgatatcaactagatcttgagacaaatggcagtattcatccacaattttaaaagaaaaggggggattggggggtacagtgcaggggaaagaatagtagacataatagcaacagacatacaaactaaag

SEQ ID NO: 15482 - DNA, 301 bp, Artificial Sequence
  Arid1b.3_NTC.0
  crRNA array
  misc_feature (148)..(157): n is a, c, g, or t
cttggctttatatatcttgtggaaaggacgaaacaccgtaatttctactaagtgtagatcactcaaaggcgaacaggtataatttctactaagtgtagattatagcgtcgcgcgctaatttaatttctactaagtgtagatttttttnnnnnnnnnnaagcttggcgtggatccgatatcaactagatcttgagacaaatggcagtattcatccacaattttaaaagaaaaggggggattggggggtacagtgcaggggaaagaatagtagacataatagcaacagacatacaaactaaag

SEQ ID NO: 15483 - DNA, 301 bp, Artificial Sequence
  Arid1b.3_NTC.1
  crRNA array
  misc_feature (148)..(157): n is a, c, g, or t
cttggctttatatatcttgtggaaaggacgaaacaccgtaatttctactaagtgtagatcactcaaaggcgaacaggtataatttctactaagtgtagatcgcgtaaccgttccggctcctaatttctactaagtgtagatttttttnnnnnnnnnnaagcttggcgtggatccgatatcaactagatcttgagacaaatggcagtattcatccacaattttaaaagaaaaggggggattggggggtacagtgcaggggaaagaatagtagacataatagcaacagacatacaaactaaag

SEQ ID NO: 15484 - DNA, 301 bp, Artificial Sequence
  Arid1b.3_NTC.10
  crRNA array
  misc_feature (148)..(157): n is a, c, g, or t
cttggctttatatatcttgtggaaaggacgaaacaccgtaatttctactaagtgtagatcactcaaaggcgaacaggtataatttctactaagtgtagatcgctaagttcgcgcgggccgtaatttctactaagtgtagatttttttnnnnnnnnnnaagcttggcgtggatccgatatcaactagatcttgagacaaatggcagtattcatccacaattttaaaagaaaaggggggattggggggtacagtgcaggggaaagaatagtagacataatagcaacagacatacaaactaaag

SEQ ID NO: 15485 - DNA, 301 bp, Artificial Sequence
  Arid1b.3_NTC.11
  crRNA array
  misc_feature (148)..(157): n is a, c, g, or t
cttggctttatatatcttgtggaaaggacgaaacaccgtaatttctactaagtgtagatcactcaaaggcgaacaggtataatttctactaagtgtagatcgttcgtcgacgaagcaatctaatttctactaagtgtagatttttttnnnnnnnnnnaagcttggcgtggatccgatatcaactagatcttgagacaaatggcagtattcatccacaattttaaaagaaaaggggggattggggggtacagtgcaggggaaagaatagtagacataatagcaacagacatacaaactaaag

SEQ ID NO: 15486 - DNA, 301 bp, Artificial Sequence
  Arid1b.3_NTC.12
  crRNA array
  misc_feature (148)..(157): n is a, c, g, or t
cttggctttatatatcttgtggaaaggacgaaacaccgtaatttctactaagtgtagatcactcaaaggcgaacaggtataatttctactaagtgtagatcgccgacgattaatcaatagtaatttctactaagtgtagatttttttnnnnnnnnnnaagcttggcgtggatccgatatcaactagatcttgagacaaatggcagtattcatccacaattttaaaagaaaaggggggattggggggtacagtgcaggggaaagaatagtagacataatagcaacagacatacaaactaaag

SEQ ID NO: 15487 - DNA, 301 bp, Artificial Sequence
  Arid1b.3_NTC.13
  crRNA array
  misc_feature (148)..(157): n is a, c, g, or t
cttggctttatatatcttgtggaaaggacgaaacaccgtaatttctactaagtgtagatcactcaaaggcgaacaggtataatttctactaagtgtagatgaccgttgtatcgcgatcaataatttctactaagtgtagatttttttnnnnnnnnnnaagcttggcgtggatccgatatcaactagatcttgagacaaatggcagtattcatccacaattttaaaagaaaaggggggattggggggtacagtgcaggggaaagaatagtagacataatagcaacagacatacaaactaaag

SEQ ID NO: 15488 - DNA, 301 bp, Artificial Sequence
  Arid1b.3_NTC.14
  crRNA array
  misc_feature (148)..(157): n is a, c, g, or t
cttggctttatatatcttgtggaaaggacgaaacaccgtaatttctactaagtgtagatcactcaaaggcgaacaggtataatttctactaagtgtagatccgttcgtgcgatagtgttttaatttctactaagtgtagatttttttnnnnnnnnnnaagcttggcgtggatccgatatcaactagatcttgagacaaatggcagtattcatccacaattttaaaagaaaaggggggattggggggtacagtgcaggggaaagaatagtagacataatagcaacagacatacaaactaaag

SEQ ID NO: 15489 - DNA, 301 bp, Artificial Sequence
  Arid1b.3_NTC.15
  crRNA array
  misc_feature (148)..(157): n is a, c, g, or t
cttggctttatatatcttgtggaaaggacgaaacaccgtaatttctactaagtgtagatcactcaaaggcgaacaggtataatttctactaagtgtagatgttgtcgtgccgcgaatttataatttctactaagtgtagatttttttnnnnnnnnnnaagcttggcgtggatccgatatcaactagatcttgagacaaatggcagtattcatccacaattttaaaagaaaaggggggattggggggtacagtgcaggggaaagaatagtagacataatagcaacagacatacaaactaaag

SEQ ID NO: 15490 - DNA, 301 bp, Artificial Sequence
  Arid1b.3_NTC.16
  crRNA array
  misc_feature (148)..(157): n is a, c, g, or t
cttggctttatatatcttgtggaaaggacgaaacaccgtaatttctactaagtgtagatcactcaaaggcgaacaggtataatttctactaagtgtagatcggtacgttagacgaaaatttaatttctactaagtgtagatttttttnnnnnnnnnnaagcttggcgtggatccgatatcaactagatcttgagacaaatggcagtattcatccacaattttaaaagaaaaggggggattggggggtacagtgcaggggaaagaatagtagacataatagcaacagacatacaaactaaag

SEQ ID NO: 15491 - DNA, 301 bp, Artificial Sequence
  Arid1b.3_NTC.17
  crRNA array
  misc_feature (148)..(157): n is a, c, g, or t
cttggctttatatatcttgtggaaaggacgaaacaccgtaatttctactaagtgtagatcactcaaaggcgaacaggtataatttctactaagtgtagattatcgaacgctatcgaacgttaatttctactaagtgtagatttttttnnnnnnnnnnaagcttggcgtggatccgatatcaactagatcttgagacaaatggcagtattcatccacaattttaaaagaaaaggggggattggggggtacagtgcaggggaaagaatagtagacataatagcaacagacatacaaactaaag

SEQ ID NO: 15492 - DNA, 301 bp, Artificial Sequence
  Arid1b.3_NTC.18
  crRNA array
  misc_feature (148)..(157): n is a, c, g, or t
cttggctttatatatcttgtggaaaggacgaaacaccgtaatttctactaagtgtagatcactcaaaggcgaacaggtataatttctactaagtgtagattccggttacgaccggcaaaataatttctactaagtgtagatttttttnnnnnnnnnnaagcttggcgtggatccgatatcaactagatcttgagacaaatggcagtattcatccacaattttaaaagaaaaggggggattggggggtacagtgcaggggaaagaatagtagacataatagcaacagacatacaaactaaag

SEQ ID NO: 15493 - DNA, 301 bp, Artificial Sequence
  Arid1b.3_NTC.19
  crRNA array
  misc_feature (148)..(157): n is a, c, g, or t
cttggctttatatatcttgtggaaaggacgaaacaccgtaatttctactaagtgtagatcactcaaaggcgaacaggtataatttctactaagtgtagatcgtcgtagaacgatacccgataatttctactaagtgtagatttttttnnnnnnnnnnaagcttggcgtggatccgatatcaactagatcttgagacaaatggcagtattcatccacaattttaaaagaaaaggggggattggggggtacagtgcaggggaaagaatagtagacataatagcaacagacatacaaactaaag

SEQ ID NO: 15494 - DNA, 301 bp, Artificial Sequence
  Arid1b.3_NTC.2
  crRNA array
  misc_feature (148)..(157): n is a, c, g, or t
cttggctttatatatcttgtggaaaggacgaaacaccgtaatttctactaagtgtagatcactcaaaggcgaacaggtataatttctactaagtgtagatttatgtcgcgccgcgacccgtaatttctactaagtgtagatttttttnnnnnnnnnnaagcttggcgtggatccgatatcaactagatcttgagacaaatggcagtattcatccacaattttaaaagaaaaggggggattggggggtacagtgcaggggaaagaatagtagacataatagcaacagacatacaaactaaag

SEQ ID NO: 15495 - DNA, 301 bp, Artificial Sequence
  Arid1b.3_NTC.20
  crRNA array
  misc_feature (148)..(157): n is a, c, g, or t
cttggctttatatatcttgtggaaaggacgaaacaccgtaatttctactaagtgtagatcactcaaaggcgaacaggtataatttctactaagtgtagatattccggcgcgaccagaagataatttctactaagtgtagatttttttnnnnnnnnnnaagcttggcgtggatccgatatcaactagatcttgagacaaatggcagtattcatccacaattttaaaagaaaaggggggattggggggtacagtgcaggggaaagaatagtagacataatagcaacagacatacaaactaaag

SEQ ID NO: 15496 - DNA, 301 bp, Artificial Sequence
  Arid1b.3_NTC.21
  crRNA array
  misc_feature (148)..(157): n is a, c, g, or t
cttggctttatatatcttgtggaaaggacgaaacaccgtaatttctactaagtgtagatcactcaaaggcgaacaggtataatttctactaagtgtagatgtataacttcgcgcggtccgtaatttctactaagtgtagatttttttnnnnnnnnnnaagcttggcgtggatccgatatcaactagatcttgagacaaatggcagtattcatccacaattttaaaagaaaaggggggattggggggtacagtgcaggggaaagaatagtagacataatagcaacagacatacaaactaaag

SEQ ID NO: 15497 - DNA, 301 bp, Artificial Sequence
  Arid1b.3_NTC.22
  crRNA array
  misc_feature (148)..(157): n is a, c, g, or t
cttggctttatatatcttgtggaaaggacgaaacaccgtaatttctactaagtgtagatcactcaaaggcgaacaggtataatttctactaagtgtagatgcgcgtcaacgtaatgtgcctaatttctactaagtgtagatttttttnnnnnnnnnnaagcttggcgtggatccgatatcaactagatcttgagacaaatggcagtattcatccacaattttaaaagaaaaggggggattggggggtacagtgcaggggaaagaatagtagacataatagcaacagacatacaaactaaag

SEQ ID NO: 15498 - DNA, 301 bp, Artificial Sequence
  Arid1b.3_NTC.23
  crRNA array
  misc_feature (148)..(157): n is a, c, g, or t
cttggctttatatatcttgtggaaaggacgaaacaccgtaatttctactaagtgtagatcactcaaaggcgaacaggtataatttctactaagtgtagatacgcgctattatcgtaggtgtaatttctactaagtgtagatttttttnnnnnnnnnnaagcttggcgtggatccgatatcaactagatcttgagacaaatggcagtattcatccacaattttaaaagaaaaggggggattggggggtacagtgcaggggaaagaatagtagacataatagcaacagacatacaaactaaag

SEQ ID NO: 15499 - DNA, 301 bp, Artificial Sequence
  Arid1b.3_NTC.24
  crRNA array
  misc_feature (148)..(157): n is a, c, g, or t
cttggctttatatatcttgtggaaaggacgaaacaccgtaatttctactaagtgtagatcactcaaaggcgaacaggtataatttctactaagtgtagatactatcgacgttcgtcccggtaatttctactaagtgtagatttttttnnnnnnnnnnaagcttggcgtggatccgatatcaactagatcttgagacaaatggcagtattcatccacaattttaaaagaaaaggggggattggggggtacagtgcaggggaaagaatagtagacataatagcaacagacatacaaactaaag

SEQ ID NO: 15500 - DNA, 301 bp, Artificial Sequence
  Arid1b.3_NTC.25
  crRNA array
  misc_feature (148)..(157): n is a, c, g, or t
cttggctttatatatcttgtggaaaggacgaaacaccgtaatttctactaagtgtagatcactcaaaggcgaacaggtataatttctactaagtgtagattcgcgttatcgtgccgtgcgtaatttctactaagtgtagatttttttnnnnnnnnnnaagcttggcgtggatccgatatcaactagatcttgagacaaatggcagtattcatccacaattttaaaagaaaaggggggattggggggtacagtgcaggggaaagaatagtagacataatagcaacagacatacaaactaaag

SEQ ID NO: 15501 - DNA, 301 bp, Artificial Sequence
  Arid1b.3_NTC.26
  crRNA array
  misc_feature (148)..(157): n is a, c, g, or t
cttggctttatatatcttgtggaaaggacgaaacaccgtaatttctactaagtgtagatcactcaaaggcgaacaggtataatttctactaagtgtagatcgcgacggcggttttaacactaatttctactaagtgtagatttttttnnnnnnnnnnaagcttggcgtggatccgatatcaactagatcttgagacaaatggcagtattcatccacaattttaaaagaaaaggggggattggggggtacagtgcaggggaaagaatagtagacataatagcaacagacatacaaactaaag

SEQ ID NO: 15502 - DNA, 301 bp, Artificial Sequence
  Arid1b.3_NTC.27
  crRNA array
  misc_feature (148)..(157): n is a, c, g, or t
cttggctttatatatcttgtggaaaggacgaaacaccgtaatttctactaagtgtagatcactcaaaggcgaacaggtataatttctactaagtgtagatgtcgcgttgcgaccggcgcttaatttctactaagtgtagatttttttnnnnnnnnnnaagcttggcgtggatccgatatcaactagatcttgagacaaatggcagtattcatccacaattttaaaagaaaaggggggattggggggtacagtgcaggggaaagaatagtagacataatagcaacagacatacaaactaaag

SEQ ID NO: 15503 - DNA, 301 bp, Artificial Sequence
  Arid1b.3_NTC.28
  crRNA array
  misc_feature (148)..(157): n is a, c, g, or t
cttggctttatatatcttgtggaaaggacgaaacaccgtaatttctactaagtgtagatcactcaaaggcgaacaggtataatttctactaagtgtagataccgctaatcggcgtaaacttaatttctactaagtgtagatttttttnnnnnnnnnnaagcttggcgtggatccgatatcaactagatcttgagacaaatggcagtattcatccacaattttaaaagaaaaggggggattggggggtacagtgcaggggaaagaatagtagacataatagcaacagacatacaaactaaag

SEQ ID NO: 15504 - DNA, 301 bp, Artificial Sequence
  Arid1b.3_NTC.29
  crRNA array
  misc_feature (148)..(157): n is a, c, g, or t
cttggctttatatatcttgtggaaaggacgaaacaccgtaatttctactaagtgtagatcactcaaaggcgaacaggtataatttctactaagtgtagatcgcgatctataccgtctatataatttctactaagtgtagatttttttnnnnnnnnnnaagcttggcgtggatccgatatcaactagatcttgagacaaatggcagtattcatccacaattttaaaagaaaaggggggattggggggtacagtgcaggggaaagaatagtagacataatagcaacagacatacaaactaaag

SEQ ID NO: 15505 - DNA, 301 bp, Artificial Sequence
  Arid1b.3_NTC.3
  crRNA array
  misc_feature (148)..(157): n is a, c, g, or t
cttggctttatatatcttgtggaaaggacgaaacaccgtaatttctactaagtgtagatcactcaaaggcgaacaggtataatttctactaagtgtagattcgacgcgagacgacgtacataatttctactaagtgtagatttttttnnnnnnnnnnaagcttggcgtggatccgatatcaactagatcttgagacaaatggcagtattcatccacaattttaaaagaaaaggggggattggggggtacagtgcaggggaaagaatagtagacataatagcaacagacatacaaactaaag

SEQ ID NO: 15506 - DNA, 301 bp, Artificial Sequence
  Arid1b.3_NTC.30
  crRNA array
  misc_feature (148)..(157): n is a, c, g, or t
cttggctttatatatcttgtggaaaggacgaaacaccgtaatttctactaagtgtagatcactcaaaggcgaacaggtataatttctactaagtgtagatcgatcgtacgggtgtcctaataatttctactaagtgtagatttttttnnnnnnnnnnaagcttggcgtggatccgatatcaactagatcttgagacaaatggcagtattcatccacaattttaaaagaaaaggggggattggggggtacagtgcaggggaaagaatagtagacataatagcaacagacatacaaactaaag

SEQ ID NO: 15507 - DNA, 301 bp, Artificial Sequence
  Arid1b.3_NTC.31
  crRNA array
  misc_feature (148)..(157): n is a, c, g, or t
cttggctttatatatcttgtggaaaggacgaaacaccgtaatttctactaagtgtagatcactcaaaggcgaacaggtataatttctactaagtgtagatgccgaccgcgtgattgtaggtaatttctactaagtgtagatttttttnnnnnnnnnnaagcttggcgtggatccgatatcaactagatcttgagacaaatggcagtattcatccacaattttaaaagaaaaggggggattggggggtacagtgcaggggaaagaatagtagacataatagcaacagacatacaaactaaag

SEQ ID NO: 15508 - DNA, 301 bp, Artificial Sequence
  Arid1b.3_NTC.32
  crRNA array
  misc_feature (148)..(157): n is a, c, g, or t
cttggctttatatatcttgtggaaaggacgaaacaccgtaatttctactaagtgtagatcactcaaaggcgaacaggtataatttctactaagtgtagatgcacgttacgcccgggtcactaatttctactaagtgtagatttttttnnnnnnnnnnaagcttggcgtggatccgatatcaactagatcttgagacaaatggcagtattcatccacaattttaaaagaaaaggggggattggggggtacagtgcaggggaaagaatagtagacataatagcaacagacatacaaactaaag

SEQ ID NO: 15509 - DNA, 301 bp, Artificial Sequence
  Arid1b.3_NTC.33
  crRNA array
  misc_feature (148)..(157): n is a, c, g, or t
cttggctttatatatcttgtggaaaggacgaaacaccgtaatttctactaagtgtagatcactcaaaggcgaacaggtataatttctactaagtgtagattaagcgaccgacgcattcgctaatttctactaagtgtagatttttttnnnnnnnnnnaagcttggcgtggatccgatatcaactagatcttgagacaaatggcagtattcatccacaattttaaaagaaaaggggggattggggggtacagtgcaggggaaagaatagtagacataatagcaacagacatacaaactaaag

SEQ ID NO: 15510 - DNA, 301 bp, Artificial Sequence
  Arid1b.3_NTC.34
  crRNA array
  misc_feature (148)..(157): n is a, c, g, or t
cttggctttatatatcttgtggaaaggacgaaacaccgtaatttctactaagtgtagatcactcaaaggcgaacaggtataatttctactaagtgtagattagcgttcgacacgtgaaactaatttctactaagtgtagatttttttnnnnnnnnnnaagcttggcgtggatccgatatcaactagatcttgagacaaatggcagtattcatccacaattttaaaagaaaaggggggattggggggtacagtgcaggggaaagaatagtagacataatagcaacagacatacaaactaaag

SEQ ID NO: 15511 - DNA, 301 bp, Artificial Sequence
  Arid1b.3_NTC.35
  crRNA array
  misc_feature (148)..(157): n is a, c, g, or t
cttggctttatatatcttgtggaaaggacgaaacaccgtaatttctactaagtgtagatcactcaaaggcgaacaggtataatttctactaagtgtagattggcgcgtaatcgctattcgtaatttctactaagtgtagatttttttnnnnnnnnnnaagcttggcgtggatccgatatcaactagatcttgagacaaatggcagtattcatccacaattttaaaagaaaaggggggattggggggtacagtgcaggggaaagaatagtagacataatagcaacagacatacaaactaaag

SEQ ID NO: 15512 - DNA, 301 bp, Artificial Sequence
  Arid1b.3_NTC.36
  crRNA array
  misc_feature (148)..(157): n is a, c, g, or t
cttggctttatatatcttgtggaaaggacgaaacaccgtaatttctactaagtgtagatcactcaaaggcgaacaggtataatttctactaagtgtagatcaacccgccgtagcgggccttaatttctactaagtgtagatttttttnnnnnnnnnnaagcttggcgtggatccgatatcaactagatcttgagacaaatggcagtattcatccacaattttaaaagaaaaggggggattggggggtacagtgcaggggaaagaatagtagacataatagcaacagacatacaaactaaag

SEQ ID NO: 15513 - DNA, 301 bp, Artificial Sequence
  Arid1b.3_NTC.37
  crRNA array
  misc_feature (148)..(157): n is a, c, g, or t
cttggctttatatatcttgtggaaaggacgaaacaccgtaatttctactaagtgtagatcactcaaaggcgaacaggtataatttctactaagtgtagattttgcgttgacgcgattacttaatttctactaagtgtagatttttttnnnnnnnnnnaagcttggcgtggatccgatatcaactagatcttgagacaaatggcagtattcatccacaattttaaaagaaaaggggggattggggggtacagtgcaggggaaagaatagtagacataatagcaacagacatacaaactaaag

SEQ ID NO: 15514 - DNA, 301 bp, Artificial Sequence
  Arid1b.3_NTC.38
  crRNA array
  misc_feature (148)..(157): n is a, c, g, or t
cttggctttatatatcttgtggaaaggacgaaacaccgtaatttctactaagtgtagatcactcaaaggcgaacaggtataatttctactaagtgtagataacggagcgcgatactaccataatttctactaagtgtagatttttttnnnnnnnnnnaagcttggcgtggatccgatatcaactagatcttgagacaaatggcagtattcatccacaattttaaaagaaaaggggggattggggggtacagtgcaggggaaagaatagtagacataatagcaacagacatacaaactaaag

SEQ ID NO: 15515 - DNA, 301 bp, Artificial Sequence
  Arid1b.3_NTC.39
  crRNA array
  misc_feature (148)..(157): n is a, c, g, or t
cttggctttatatatcttgtggaaaggacgaaacaccgtaatttctactaagtgtagatcactcaaaggcgaacaggtataatttctactaagtgtagatccggacgttataacgtttcttaatttctactaagtgtagatttttttnnnnnnnnnnaagcttggcgtggatccgatatcaactagatcttgagacaaatggcagtattcatccacaattttaaaagaaaaggggggattggggggtacagtgcaggggaaagaatagtagacataatagcaacagacatacaaactaaag

SEQ ID NO: 15516 - DNA, 301 bp, Artificial Sequence
  Arid1b.3_NTC.4
  crRNA array
  misc_feature (148)..(157): n is a, c, g, or t
cttggctttatatatcttgtggaaaggacgaaacaccgtaatttctactaagtgtagatcactcaaaggcgaacaggtataatttctactaagtgtagatatacccgtcgcgaacgtgagtaatttctactaagtgtagatttttttnnnnnnnnnnaagcttggcgtggatccgatatcaactagatcttgagacaaatggcagtattcatccacaattttaaaagaaaaggggggattggggggtacagtgcaggggaaagaatagtagacataatagcaacagacatacaaactaaag

SEQ ID NO: 15517 - DNA, 301 bp, Artificial Sequence
  Arid1b.3_NTC.40
  crRNA array
  misc_feature (148)..(157): n is a, c, g, or t
cttggctttatatatcttgtggaaaggacgaaacaccgtaatttctactaagtgtagatcactcaaaggcgaacaggtataatttctactaagtgtagatattcgcgaacccggccggaataatttctactaagtgtagatttttttnnnnnnnnnnaagcttggcgtggatccgatatcaactagatcttgagacaaatggcagtattcatccacaattttaaaagaaaaggggggattggggggtacagtgcaggggaaagaatagtagacataatagcaacagacatacaaactaaag

SEQ ID NO: 15518 - DNA, 301 bp, Artificial Sequence
  Arid1b.3_NTC.41
  crRNA array
  misc_feature (148)..(157): n is a, c, g, or t
cttggctttatatatcttgtggaaaggacgaaacaccgtaatttctactaagtgtagatcactcaaaggcgaacaggtataatttctactaagtgtagatttgatggcgcgacgcgttattaatttctactaagtgtagatttttttnnnnnnnnnnaagcttggcgtggatccgatatcaactagatcttgagacaaatggcagtattcatccacaattttaaaagaaaaggggggattggggggtacagtgcaggggaaagaatagtagacataatagcaacagacatacaaactaaag

SEQ ID NO: 15519 - DNA, 301 bp, Artificial Sequence
  Arid1b.3_NTC.42
  crRNA array
  misc_feature (148)..(157): n is a, c, g, or t
cttggctttatatatcttgtggaaaggacgaaacaccgtaatttctactaagtgtagatcactcaaaggcgaacaggtataatttctactaagtgtagatggtcaaatcgcggcgataactaatttctactaagtgtagatttttttnnnnnnnnnnaagcttggcgtggatccgatatcaactagatcttgagacaaatggcagtattcatccacaattttaaaagaaaaggggggattggggggtacagtgcaggggaaagaatagtagacataatagcaacagacatacaaactaaag

SEQ ID NO: 15520 - DNA, 301 bp, Artificial Sequence
  Arid1b.3_NTC.43
  crRNA array
  misc_feature (148)..(157): n is a, c, g, or t
cttggctttatatatcttgtggaaaggacgaaacaccgtaatttctactaagtgtagatcactcaaaggcgaacaggtataatttctactaagtgtagatcgactcgcgcattgaactggtaatttctactaagtgtagatttttttnnnnnnnnnnaagcttggcgtggatccgatatcaactagatcttgagacaaatggcagtattcatccacaattttaaaagaaaaggggggattggggggtacagtgcaggggaaagaatagtagacataatagcaacagacatacaaactaaag

SEQ ID NO: 15521 - DNA, 301 bp, Artificial Sequence
  Arid1b.3_NTC.44
  crRNA array
  misc_feature (148)..(157): n is a, c, g, or t
cttggctttatatatcttgtggaaaggacgaaacaccgtaatttctactaagtgtagatcactcaaaggcgaacaggtataatttctactaagtgtagatagcgtcgtacgatttatcgttaatttctactaagtgtagatttttttnnnnnnnnnnaagcttggcgtggatccgatatcaactagatcttgagacaaatggcagtattcatccacaattttaaaagaaaaggggggattggggggtacagtgcaggggaaagaatagtagacataatagcaacagacatacaaactaaag

SEQ ID NO: 15522 - DNA, 301 bp, Artificial Sequence
  Arid1b.3_NTC.45
  crRNA array
  misc_feature (148)..(157): n is a, c, g, or t
cttggctttatatatcttgtggaaaggacgaaacaccgtaatttctactaagtgtagatcactcaaaggcgaacaggtataatttctactaagtgtagatcggaacgcgtgatactagggtaatttctactaagtgtagatttttttnnnnnnnnnnaagcttggcgtggatccgatatcaactagatcttgagacaaatggcagtattcatccacaattttaaaagaaaaggggggattggggggtacagtgcaggggaaagaatagtagacataatagcaacagacatacaaactaaag

SEQ ID NO: 15523 - DNA, 301 bp, Artificial Sequence
  Arid1b.3_NTC.46
  crRNA array
  misc_feature (148)..(157): n is a, c, g, or t
cttggctttatatatcttgtggaaaggacgaaacaccgtaatttctactaagtgtagatcactcaaaggcgaacaggtataatttctactaagtgtagatagcgggtcgtagacgcgcggtaatttctactaagtgtagatttttttnnnnnnnnnnaagcttggcgtggatccgatatcaactagatcttgagacaaatggcagtattcatccacaattttaaaagaaaaggggggattggggggtacagtgcaggggaaagaatagtagacataatagcaacagacatacaaactaaag

SEQ ID NO: 15524 - DNA, 301 bp, Artificial Sequence
  Arid1b.3_NTC.47
  crRNA array
  misc_feature (148)..(157): n is a, c, g, or t
cttggctttatatatcttgtggaaaggacgaaacaccgtaatttctactaagtgtagatcactcaaaggcgaacaggtataatttctactaagtgtagattctcgtatcgcgattgttaataatttctactaagtgtagatttttttnnnnnnnnnnaagcttggcgtggatccgatatcaactagatcttgagacaaatggcagtattcatccacaattttaaaagaaaaggggggattggggggtacagtgcaggggaaagaatagtagacataatagcaacagacatacaaactaaag

SEQ ID NO: 15525 - DNA, 301 bp, Artificial Sequence
  Arid1b.3_NTC.48
  crRNA array
  misc_feature (148)..(157): n is a, c, g, or t
cttggctttatatatcttgtggaaaggacgaaacaccgtaatttctactaagtgtagatcactcaaaggcgaacaggtataatttctactaagtgtagatcggtcgactacggctgttagtaatttctactaagtgtagatttttttnnnnnnnnnnaagcttggcgtggatccgatatcaactagatcttgagacaaatggcagtattcatccacaattttaaaagaaaaggggggattggggggtacagtgcaggggaaagaatagtagacataatagcaacagacatacaaactaaag

SEQ ID NO: 15526 - DNA, 301 bp, Artificial Sequence
  Arid1b.3_NTC.49
  crRNA array
  misc_feature (148)..(157): n is a, c, g, or t
cttggctttatatatcttgtggaaaggacgaaacaccgtaatttctactaagtgtagatcactcaaaggcgaacaggtataatttctactaagtgtagattcggggcgcgtcaactgaattaatttctactaagtgtagatttttttnnnnnnnnnnaagcttggcgtggatccgatatcaactagatcttgagacaaatggcagtattcatccacaattttaaaagaaaaggggggattggggggtacagtgcaggggaaagaatagtagacataatagcaacagacatacaaactaaag

SEQ ID NO: 15527 - DNA, 301 bp, Artificial Sequence
  Arid1b.3_NTC.5
  crRNA array
  misc_feature (148)..(157): n is a, c, g, or t
cttggctttatatatcttgtggaaaggacgaaacaccgtaatttctactaagtgtagatcactcaaaggcgaacaggtataatttctactaagtgtagatgcttacgcgtcgcgaatgtataatttctactaagtgtagatttttttnnnnnnnnnnaagcttggcgtggatccgatatcaactagatcttgagacaaatggcagtattcatccacaattttaaaagaaaaggggggattggggggtacagtgcaggggaaagaatagtagacataatagcaacagacatacaaactaaag

SEQ ID NO: 15528 - DNA, 301 bp, Artificial Sequence
  Arid1b.3_NTC.50
  crRNA array
  misc_feature (148)..(157): n is a, c, g, or t
cttggctttatatatcttgtggaaaggacgaaacaccgtaatttctactaagtgtagatcactcaaaggcgaacaggtataatttctactaagtgtagatattgccgctcgcgcaaaatctaatttctactaagtgtagatttttttnnnnnnnnnnaagcttggcgtggatccgatatcaactagatcttgagacaaatggcagtattcatccacaattttaaaagaaaaggggggattggggggtacagtgcaggggaaagaatagtagacataatagcaacagacatacaaactaaag

SEQ ID NO: 15529 - DNA, 301 bp, Artificial Sequence
  Arid1b.3_NTC.51
  crRNA array
  misc_feature (148)..(157): n is a, c, g, or t
cttggctttatatatcttgtggaaaggacgaaacaccgtaatttctactaagtgtagatcactcaaaggcgaacaggtataatttctactaagtgtagattaacgcgcaacacgccaatgtaatttctactaagtgtagatttttttnnnnnnnnnnaagcttggcgtggatccgatatcaactagatcttgagacaaatggcagtattcatccacaattttaaaagaaaaggggggattggggggtacagtgcaggggaaagaatagtagacataatagcaacagacatacaaactaaag

SEQ ID NO: 15530 - DNA, 301 bp, Artificial Sequence
  Arid1b.3_NTC.6
  crRNA array
  misc_feature (148)..(157): n is a, c, g, or t
cttggctttatatatcttgtggaaaggacgaaacaccgtaatttctactaagtgtagatcactcaaaggcgaacaggtataatttctactaagtgtagatcgaatcgcgcctacgggaattaatttctactaagtgtagatttttttnnnnnnnnnnaagcttggcgtggatccgatatcaactagatcttgagacaaatggcagtattcatccacaattttaaaagaaaaggggggattggggggtacagtgcaggggaaagaatagtagacataatagcaacagacatacaaactaaag

SEQ ID NO: 15531 - DNA, 301 bp, Artificial Sequence
  Arid1b.3_NTC.7
  crRNA array
  misc_feature (148)..(157): n is a, c, g, or t
cttggctttatatatcttgtggaaaggacgaaacaccgtaatttctactaagtgtagatcactcaaaggcgaacaggtataatttctactaagtgtagatcgccgaacggataagactattaatttctactaagtgtagatttttttnnnnnnnnnnaagcttggcgtggatccgatatcaactagatcttgagacaaatggcagtattcatccacaattttaaaagaaaaggggggattggggggtacagtgcaggggaaagaatagtagacataatagcaacagacatacaaactaaag

SEQ ID NO: 15532 - DNA, 301 bp, Artificial Sequence
  Arid1b.3_NTC.8
  crRNA array
  misc_feature (148)..(157): n is a, c, g, or t
cttggctttatatatcttgtggaaaggacgaaacaccgtaatttctactaagtgtagatcactcaaaggcgaacaggtataatttctactaagtgtagatcgaccgaggttacgctgggataatttctactaagtgtagatttttttnnnnnnnnnnaagcttggcgtggatccgatatcaactagatcttgagacaaatggcagtattcatccacaattttaaaagaaaaggggggattggggggtacagtgcaggggaaagaatagtagacataatagcaacagacatacaaactaaag

SEQ ID NO: 15533 - DNA, 301 bp, Artificial Sequence
  Arid1b.3_NTC.9
  crRNA array
  misc_feature (148)..(157): n is a, c, g, or t
cttggctttatatatcttgtggaaaggacgaaacaccgtaatttctactaagtgtagatcactcaaaggcgaacaggtataatttctactaagtgtagatatcgccgtacggctatggcataatttctactaagtgtagatttttttnnnnnnnnnnaagcttggcgtggatccgatatcaactagatcttgagacaaatggcagtattcatccacaattttaaaagaaaaggggggattggggggtacagtgcaggggaaagaatagtagacataatagcaacagacatacaaactaaag

SEQ ID NO: 15534 - DNA, 301 bp, Artificial Sequence
  Arid1b.4_NTC.0
  crRNA array
  misc_feature (148)..(157): n is a, c, g, or t
cttggctttatatatcttgtggaaaggacgaaacaccgtaatttctactaagtgtagatctcctggctccgtagaagcataatttctactaagtgtagattatagcgtcgcgcgctaatttaatttctactaagtgtagatttttttnnnnnnnnnnaagcttggcgtggatccgatatcaactagatcttgagacaaatggcagtattcatccacaattttaaaagaaaaggggggattggggggtacagtgcaggggaaagaatagtagacataatagcaacagacatacaaactaaag

SEQ ID NO: 15535 - DNA, 301 bp, Artificial Sequence
  Arid1b.4_NTC.1
  crRNA array
  misc_feature (148)..(157): n is a, c, g, or t
cttggctttatatatcttgtggaaaggacgaaacaccgtaatttctactaagtgtagatctcctggctccgtagaagcataatttctactaagtgtagatcgcgtaaccgttccggctcctaatttctactaagtgtagatttttttnnnnnnnnnnaagcttggcgtggatccgatatcaactagatcttgagacaaatggcagtattcatccacaattttaaaagaaaaggggggattggggggtacagtgcaggggaaagaatagtagacataatagcaacagacatacaaactaaag

SEQ ID NO: 15536 - DNA, 301 bp, Artificial Sequence
  Arid1b.4_NTC.10
  crRNA array
  misc_feature (148)..(157): n is a, c, g, or t
cttggctttatatatcttgtggaaaggacgaaacaccgtaatttctactaagtgtagatctcctggctccgtagaagcataatttctactaagtgtagatcgctaagttcgcgcgggccgtaatttctactaagtgtagatttttttnnnnnnnnnnaagcttggcgtggatccgatatcaactagatcttgagacaaatggcagtattcatccacaattttaaaagaaaaggggggattggggggtacagtgcaggggaaagaatagtagacataatagcaacagacatacaaactaaag

SEQ ID NO: 15537 - DNA, 301 bp, Artificial Sequence
  Arid1b.4_NTC.11
  crRNA array
  misc_feature (148)..(157): n is a, c, g, or t
cttggctttatatatcttgtggaaaggacgaaacaccgtaatttctactaagtgtagatctcctggctccgtagaagcataatttctactaagtgtagatcgttcgtcgacgaagcaatctaatttctactaagtgtagatttttttnnnnnnnnnnaagcttggcgtggatccgatatcaactagatcttgagacaaatggcagtattcatccacaattttaaaagaaaaggggggattggggggtacagtgcaggggaaagaatagtagacataatagcaacagacatacaaactaaag

SEQ ID NO: 15538 - DNA, 301 bp, Artificial Sequence
  Arid1b.4_NTC.12
  crRNA array
  misc_feature (148)..(157): n is a, c, g, or t
cttggctttatatatcttgtggaaaggacgaaacaccgtaatttctactaagtgtagatctcctggctccgtagaagcataatttctactaagtgtagatcgccgacgattaatcaatagtaatttctactaagtgtagatttttttnnnnnnnnnnaagcttggcgtggatccgatatcaactagatcttgagacaaatggcagtattcatccacaattttaaaagaaaaggggggattggggggtacagtgcaggggaaagaatagtagacataatagcaacagacatacaaactaaag

SEQ ID NO: 15539 - DNA, 301 bp, Artificial Sequence
  Arid1b.4_NTC.13
  crRNA array
  misc_feature (148)..(157): n is a, c, g, or t
cttggctttatatatcttgtggaaaggacgaaacaccgtaatttctactaagtgtagatctcctggctccgtagaagcataatttctactaagtgtagatgaccgttgtatcgcgatcaataatttctactaagtgtagatttttttnnnnnnnnnnaagcttggcgtggatccgatatcaactagatcttgagacaaatggcagtattcatccacaattttaaaagaaaaggggggattggggggtacagtgcaggggaaagaatagtagacataatagcaacagacatacaaactaaag

SEQ ID NO: 15540 - DNA, 301 bp, Artificial Sequence
  Arid1b.4_NTC.14
  crRNA array
  misc_feature (148)..(157): n is a, c, g, or t
cttggctttatatatcttgtggaaaggacgaaacaccgtaatttctactaagtgtagatctcctggctccgtagaagcataatttctactaagtgtagatccgttcgtgcgatagtgttttaatttctactaagtgtagatttttttnnnnnnnnnnaagcttggcgtggatccgatatcaactagatcttgagacaaatggcagtattcatccacaattttaaaagaaaaggggggattggggggtacagtgcaggggaaagaatagtagacataatagcaacagacatacaaactaaag

SEQ ID NO: 15541 - DNA, 301 bp, Artificial Sequence
  Arid1b.4_NTC.15
  crRNA array
  misc_feature (148)..(157): n is a, c, g, or t
cttggctttatatatcttgtggaaaggacgaaacaccgtaatttctactaagtgtagatctcctggctccgtagaagcataatttctactaagtgtagatgttgtcgtgccgcgaatttataatttctactaagtgtagatttttttnnnnnnnnnnaagcttggcgtggatccgatatcaactagatcttgagacaaatggcagtattcatccacaattttaaaagaaaaggggggattggggggtacagtgcaggggaaagaatagtagacataatagcaacagacatacaaactaaag

SEQ ID NO: 15542 - DNA, 301 bp, Artificial Sequence
  Arid1b.4_NTC.16
  crRNA array
  misc_feature (148)..(157): n is a, c, g, or t
cttggctttatatatcttgtggaaaggacgaaacaccgtaatttctactaagtgtagatctcctggctccgtagaagcataatttctactaagtgtagatcggtacgttagacgaaaatttaatttctactaagtgtagatttttttnnnnnnnnnnaagcttggcgtggatccgatatcaactagatcttgagacaaatggcagtattcatccacaattttaaaagaaaaggggggattggggggtacagtgcaggggaaagaatagtagacataatagcaacagacatacaaactaaag

SEQ ID NO: 15543 - DNA, 301 bp, Artificial Sequence
  Arid1b.4_NTC.17
  crRNA array
  misc_feature (148)..(157): n is a, c, g, or t
cttggctttatatatcttgtggaaaggacgaaacaccgtaatttctactaagtgtagatctcctggctccgtagaagcataatttctactaagtgtagattatcgaacgctatcgaacgttaatttctactaagtgtagatttttttnnnnnnnnnnaagcttggcgtggatccgatatcaactagatcttgagacaaatggcagtattcatccacaattttaaaagaaaaggggggattggggggtacagtgcaggggaaagaatagtagacataatagcaacagacatacaaactaaag

SEQ ID NO: 15544 - DNA, 301 bp, Artificial Sequence
  Arid1b.4_NTC.18
  crRNA array
  misc_feature (148)..(157): n is a, c, g, or t
cttggctttatatatcttgtggaaaggacgaaacaccgtaatttctactaagtgtagatctcctggctccgtagaagcataatttctactaagtgtagattccggttacgaccggcaaaataatttctactaagtgtagatttttttnnnnnnnnnnaagcttggcgtggatccgatatcaactagatcttgagacaaatggcagtattcatccacaattttaaaagaaaaggggggattggggggtacagtgcaggggaaagaatagtagacataatagcaacagacatacaaactaaag

SEQ ID NO: 15545 - DNA, 301 bp, Artificial Sequence
  Arid1b.4_NTC.19
  crRNA array
  misc_feature (148)..(157): n is a, c, g, or t
cttggctttatatatcttgtggaaaggacgaaacaccgtaatttctactaagtgtagatctcctggctccgtagaagcataatttctactaagtgtagatcgtcgtagaacgatacccgataatttctactaagtgtagatttttttnnnnnnnnnnaagcttggcgtggatccgatatcaactagatcttgagacaaatggcagtattcatccacaattttaaaagaaaaggggggattggggggtacagtgcaggggaaagaatagtagacataatagcaacagacatacaaactaaag

SEQ ID NO: 15546 - DNA, 301 bp, Artificial Sequence
  Arid1b.4_NTC.2
  crRNA array
  misc_feature (148)..(157): n is a, c, g, or t
cttggctttatatatcttgtggaaaggacgaaacaccgtaatttctactaagtgtagatctcctggctccgtagaagcataatttctactaagtgtagatttatgtcgcgccgcgacccgtaatttctactaagtgtagatttttttnnnnnnnnnnaagcttggcgtggatccgatatcaactagatcttgagacaaatggcagtattcatccacaattttaaaagaaaaggggggattggggggtacagtgcaggggaaagaatagtagacataatagcaacagacatacaaactaaag

SEQ ID NO: 15547 - DNA, 301 bp, Artificial Sequence
  Arid1b.4_NTC.20
  crRNA array
  misc_feature (148)..(157): n is a, c, g, or t
cttggctttatatatcttgtggaaaggacgaaacaccgtaatttctactaagtgtagatctcctggctccgtagaagcataatttctactaagtgtagatattccggcgcgaccagaagataatttctactaagtgtagatttttttnnnnnnnnnnaagcttggcgtggatccgatatcaactagatcttgagacaaatggcagtattcatccacaattttaaaagaaaaggggggattggggggtacagtgcaggggaaagaatagtagacataatagcaacagacatacaaactaaag

SEQ ID NO: 15548 - DNA, 301 bp, Artificial Sequence
  Arid1b.4_NTC.21
  crRNA array
  misc_feature (148)..(157): n is a, c, g, or t
cttggctttatatatcttgtggaaaggacgaaacaccgtaatttctactaagtgtagatctcctggctccgtagaagcataatttctactaagtgtagatgtataacttcgcgcggtccgtaatttctactaagtgtagatttttttnnnnnnnnnnaagcttggcgtggatccgatatcaactagatcttgagacaaatggcagtattcatccacaattttaaaagaaaaggggggattggggggtacagtgcaggggaaagaatagtagacataatagcaacagacatacaaactaaag

SEQ ID NO: 15549 - DNA, 301 bp, Artificial Sequence
  Arid1b.4_NTC.22
  crRNA array
  misc_feature (148)..(157): n is a, c, g, or t
cttggctttatatatcttgtggaaaggacgaaacaccgtaatttctactaagtgtagatctcctggctccgtagaagcataatttctactaagtgtagatgcgcgtcaacgtaatgtgcctaatttctactaagtgtagatttttttnnnnnnnnnnaagcttggcgtggatccgatatcaactagatcttgagacaaatggcagtattcatccacaattttaaaagaaaaggggggattggggggtacagtgcaggggaaagaatagtagacataatagcaacagacatacaaactaaag

SEQ ID NO: 15550 - DNA, 301 bp, Artificial Sequence
  Arid1b.4_NTC.23
  crRNA array
  misc_feature (148)..(157): n is a, c, g, or t
cttggctttatatatcttgtggaaaggacgaaacaccgtaatttctactaagtgtagatctcctggctccgtagaagcataatttctactaagtgtagatacgcgctattatcgtaggtgtaatttctactaagtgtagatttttttnnnnnnnnnnaagcttggcgtggatccgatatcaactagatcttgagacaaatggcagtattcatccacaattttaaaagaaaaggggggattggggggtacagtgcaggggaaagaatagtagacataatagcaacagacatacaaactaaag

SEQ ID NO: 15551 - DNA, 301 bp, Artificial Sequence
  Arid1b.4_NTC.24
  crRNA array
  misc_feature (148)..(157): n is a, c, g, or t
cttggctttatatatcttgtggaaaggacgaaacaccgtaatttctactaagtgtagatctcctggctccgtagaagcataatttctactaagtgtagatactatcgacgttcgtcccggtaatttctactaagtgtagatttttttnnnnnnnnnnaagcttggcgtggatccgatatcaactagatcttgagacaaatggcagtattcatccacaattttaaaagaaaaggggggattggggggtacagtgcaggggaaagaatagtagacataatagcaacagacatacaaactaaag

SEQ ID NO: 15552 - DNA, 301 bp, Artificial Sequence
  Arid1b.4_NTC.25
  crRNA array
  misc_feature (148)..(157): n is a, c, g, or t
cttggctttatatatcttgtggaaaggacgaaacaccgtaatttctactaagtgtagatctcctggctccgtagaagcataatttctactaagtgtagattcgcgttatcgtgccgtgcgtaatttctactaagtgtagatttttttnnnnnnnnnnaagcttggcgtggatccgatatcaactagatcttgagacaaatggcagtattcatccacaattttaaaagaaaaggggggattggggggtacagtgcaggggaaagaatagtagacataatagcaacagacatacaaactaaag

SEQ ID NO: 15553 - DNA, 301 bp, Artificial Sequence
  Arid1b.4_NTC.26
  crRNA array
  misc_feature (148)..(157): n is a, c, g, or t
cttggctttatatatcttgtggaaaggacgaaacaccgtaatttctactaagtgtagatctcctggctccgtagaagcataatttctactaagtgtagatcgcgacggcggttttaacactaatttctactaagtgtagatttttttnnnnnnnnnnaagcttggcgtggatccgatatcaactagatcttgagacaaatggcagtattcatccacaattttaaaagaaaaggggggattggggggtacagtgcaggggaaagaatagtagacataatagcaacagacatacaaactaaag

SEQ ID NO: 15554 - DNA, 301 bp, Artificial Sequence
  Arid1b.4_NTC.27
  crRNA array
  misc_feature (148)..(157): n is a, c, g, or t
cttggctttatatatcttgtggaaaggacgaaacaccgtaatttctactaagtgtagatctcctggctccgtagaagcataatttctactaagtgtagatgtcgcgttgcgaccggcgcttaatttctactaagtgtagatttttttnnnnnnnnnnaagcttggcgtggatccgatatcaactagatcttgagacaaatggcagtattcatccacaattttaaaagaaaaggggggattggggggtacagtgcaggggaaagaatagtagacataatagcaacagacatacaaactaaag

SEQ ID NO: 15555 - DNA, 301 bp, Artificial Sequence
  Arid1b.4_NTC.28
  crRNA array
  misc_feature (148)..(157): n is a, c, g, or t
cttggctttatatatcttgtggaaaggacgaaacaccgtaatttctactaagtgtagatctcctggctccgtagaagcataatttctactaagtgtagataccgctaatcggcgtaaacttaatttctactaagtgtagatttttttnnnnnnnnnnaagcttggcgtggatccgatatcaactagatcttgagacaaatggcagtattcatccacaattttaaaagaaaaggggggattggggggtacagtgcaggggaaagaatagtagacataatagcaacagacatacaaactaaag

SEQ ID NO: 15556 - DNA, 301 bp, Artificial Sequence
  Arid1b.4_NTC.29
  crRNA array
  misc_feature (148)..(157): n is a, c, g, or t
cttggctttatatatcttgtggaaaggacgaaacaccgtaatttctactaagtgtagatctcctggctccgtagaagcataatttctactaagtgtagatcgcgatctataccgtctatataatttctactaagtgtagatttttttnnnnnnnnnnaagcttggcgtggatccgatatcaactagatcttgagacaaatggcagtattcatccacaattttaaaagaaaaggggggattggggggtacagtgcaggggaaagaatagtagacataatagcaacagacatacaaactaaag

SEQ ID NO: 15557 - DNA, 301 bp, Artificial Sequence
  Arid1b.4_NTC.3
  crRNA array
  misc_feature (148)..(157): n is a, c, g, or t
cttggctttatatatcttgtggaaaggacgaaacaccgtaatttctactaagtgtagatctcctggctccgtagaagcataatttctactaagtgtagattcgacgcgagacgacgtacataatttctactaagtgtagatttttttnnnnnnnnnnaagcttggcgtggatccgatatcaactagatcttgagacaaatggcagtattcatccacaattttaaaagaaaaggggggattggggggtacagtgcaggggaaagaatagtagacataatagcaacagacatacaaactaaag

SEQ ID NO: 15558 - DNA, 301 bp, Artificial Sequence
  Arid1b.4_NTC.30
  crRNA array
  misc_feature (148)..(157): n is a, c, g, or t
cttggctttatatatcttgtggaaaggacgaaacaccgtaatttctactaagtgtagatctcctggctccgtagaagcataatttctactaagtgtagatcgatcgtacgggtgtcctaataatttctactaagtgtagatttttttnnnnnnnnnnaagcttggcgtggatccgatatcaactagatcttgagacaaatggcagtattcatccacaattttaaaagaaaaggggggattggggggtacagtgcaggggaaagaatagtagacataatagcaacagacatacaaactaaag

SEQ ID NO: 15559 - DNA, 301 bp, Artificial Sequence
  Arid1b.4_NTC.31
  crRNA array
  misc_feature (148)..(157): n is a, c, g, or t
cttggctttatatatcttgtggaaaggacgaaacaccgtaatttctactaagtgtagatctcctggctccgtagaagcataatttctactaagtgtagatgccgaccgcgtgattgtaggtaatttctactaagtgtagatttttttnnnnnnnnnnaagcttggcgtggatccgatatcaactagatcttgagacaaatggcagtattcatccacaattttaaaagaaaaggggggattggggggtacagtgcaggggaaagaatagtagacataatagcaacagacatacaaactaaag

SEQ ID NO: 15560 - DNA, 301 bp, Artificial Sequence
  Arid1b.4_NTC.32
  crRNA array
  misc_feature (148)..(157): n is a, c, g, or t
cttggctttatatatcttgtggaaaggacgaaacaccgtaatttctactaagtgtagatctcctggctccgtagaagcataatttctactaagtgtagatgcacgttacgcccgggtcactaatttctactaagtgtagatttttttnnnnnnnnnnaagcttggcgtggatccgatatcaactagatcttgagacaaatggcagtattcatccacaattttaaaagaaaaggggggattggggggtacagtgcaggggaaagaatagtagacataatagcaacagacatacaaactaaag

SEQ ID NO: 15561 - DNA, 301 bp, Artificial Sequence
  Arid1b.4_NTC.33
  crRNA array
  misc_feature (148)..(157): n is a, c, g, or t
cttggctttatatatcttgtggaaaggacgaaacaccgtaatttctactaagtgtagatctcctggctccgtagaagcataatttctactaagtgtagattaagcgaccgacgcattcgctaatttctactaagtgtagatttttttnnnnnnnnnnaagcttggcgtggatccgatatcaactagatcttgagacaaatggcagtattcatccacaattttaaaagaaaaggggggattggggggtacagtgcaggggaaagaatagtagacataatagcaacagacatacaaactaaag

SEQ ID NO: 15562 - DNA, 301 bp, Artificial Sequence
  Arid1b.4_NTC.34
  crRNA array
  misc_feature (148)..(157): n is a, c, g, or t
cttggctttatatatcttgtggaaaggacgaaacaccgtaatttctactaagtgtagatctcctggctccgtagaagcataatttctactaagtgtagattagcgttcgacacgtgaaactaatttctactaagtgtagatttttttnnnnnnnnnnaagcttggcgtggatccgatatcaactagatcttgagacaaatggcagtattcatccacaattttaaaagaaaaggggggattggggggtacagtgcaggggaaagaatagtagacataatagcaacagacatacaaactaaag

SEQ ID NO: 15563 - DNA, 301 bp, Artificial Sequence
  Arid1b.4_NTC.35
  crRNA array
  misc_feature (148)..(157): n is a, c, g, or t
cttggctttatatatcttgtggaaaggacgaaacaccgtaatttctactaagtgtagatctcctggctccgtagaagcataatttctactaagtgtagattggcgcgtaatcgctattcgtaatttctactaagtgtagatttttttnnnnnnnnnnaagcttggcgtggatccgatatcaactagatcttgagacaaatggcagtattcatccacaattttaaaagaaaaggggggattggggggtacagtgcaggggaaagaatagtagacataatagcaacagacatacaaactaaag

SEQ ID NO: 15564 - DNA, 301 bp, Artificial Sequence
  Arid1b.4_NTC.36
  crRNA array
  misc_feature (148)..(157): n is a, c, g, or t
cttggctttatatatcttgtggaaaggacgaaacaccgtaatttctactaagtgtagatctcctggctccgtagaagcataatttctactaagtgtagatcaacccgccgtagcgggccttaatttctactaagtgtagatttttttnnnnnnnnnnaagcttggcgtggatccgatatcaactagatcttgagacaaatggcagtattcatccacaattttaaaagaaaaggggggattggggggtacagtgcaggggaaagaatagtagacataatagcaacagacatacaaactaaag

SEQ ID NO: 15565 - DNA, 301 bp, Artificial Sequence
  Arid1b.4_NTC.37
  crRNA array
  misc_feature (148)..(157): n is a, c, g, or t
cttggctttatatatcttgtggaaaggacgaaacaccgtaatttctactaagtgtagatctcctggctccgtagaagcataatttctactaagtgtagattttgcgttgacgcgattacttaatttctactaagtgtagatttttttnnnnnnnnnnaagcttggcgtggatccgatatcaactagatcttgagacaaatggcagtattcatccacaattttaaaagaaaaggggggattggggggtacagtgcaggggaaagaatagtagacataatagcaacagacatacaaactaaag

SEQ ID NO: 15566 - DNA, 301 bp, Artificial Sequence
  Arid1b.4_NTC.38
  crRNA array
  misc_feature (148)..(157): n is a, c, g, or t
cttggctttatatatcttgtggaaaggacgaaacaccgtaatttctactaagtgtagatctcctggctccgtagaagcataatttctactaagtgtagataacggagcgcgatactaccataatttctactaagtgtagatttttttnnnnnnnnnnaagcttggcgtggatccgatatcaactagatcttgagacaaatggcagtattcatccacaattttaaaagaaaaggggggattggggggtacagtgcaggggaaagaatagtagacataatagcaacagacatacaaactaaag

SEQ ID NO: 15567 - DNA, 301 bp, Artificial Sequence
  Arid1b.4_NTC.39
  crRNA array
  misc_feature (148)..(157): n is a, c, g, or t
cttggctttatatatcttgtggaaaggacgaaacaccgtaatttctactaagtgtagatctcctggctccgtagaagcataatttctactaagtgtagatccggacgttataacgtttcttaatttctactaagtgtagatttttttnnnnnnnnnnaagcttggcgtggatccgatatcaactagatcttgagacaaatggcagtattcatccacaattttaaaagaaaaggggggattggggggtacagtgcaggggaaagaatagtagacataatagcaacagacatacaaactaaag

SEQ ID NO: 15568 - DNA, 301 bp, Artificial Sequence
  Arid1b.4_NTC.4
  crRNA array
  misc_feature (148)..(157): n is a, c, g, or t
cttggctttatatatcttgtggaaaggacgaaacaccgtaatttctactaagtgtagatctcctggctccgtagaagcataatttctactaagtgtagatatacccgtcgcgaacgtgagtaatttctactaagtgtagatttttttnnnnnnnnnnaagcttggcgtggatccgatatcaactagatcttgagacaaatggcagtattcatccacaattttaaaagaaaaggggggattggggggtacagtgcaggggaaagaatagtagacataatagcaacagacatacaaactaaag

SEQ ID NO: 15569 - DNA, 301 bp, Artificial Sequence
  Arid1b.4_NTC.40
  crRNA array
  misc_feature (148)..(157): n is a, c, g, or t
cttggctttatatatcttgtggaaaggacgaaacaccgtaatttctactaagtgtagatctcctggctccgtagaagcataatttctactaagtgtagatattcgcgaacccggccggaataatttctactaagtgtagatttttttnnnnnnnnnnaagcttggcgtggatccgatatcaactagatcttgagacaaatggcagtattcatccacaattttaaaagaaaaggggggattggggggtacagtgcaggggaaagaatagtagacataatagcaacagacatacaaactaaag

SEQ ID NO: 15570 - DNA, 301 bp, Artificial Sequence
  Arid1b.4_NTC.41
  crRNA array
  misc_feature (148)..(157): n is a, c, g, or t
cttggctttatatatcttgtggaaaggacgaaacaccgtaatttctactaagtgtagatctcctggctccgtagaagcataatttctactaagtgtagatttgatggcgcgacgcgttattaatttctactaagtgtagatttttttnnnnnnnnnnaagcttggcgtggatccgatatcaactagatcttgagacaaatggcagtattcatccacaattttaaaagaaaaggggggattggggggtacagtgcaggggaaagaatagtagacataatagcaacagacatacaaactaaag

SEQ ID NO: 15571 - DNA, 301 bp, Artificial Sequence
  Arid1b.4_NTC.42
  crRNA array
  misc_feature (148)..(157): n is a, c, g, or t
cttggctttatatatcttgtggaaaggacgaaacaccgtaatttctactaagtgtagatctcctggctccgtagaagcataatttctactaagtgtagatggtcaaatcgcggcgataactaatttctactaagtgtagatttttttnnnnnnnnnnaagcttggcgtggatccgatatcaactagatcttgagacaaatggcagtattcatccacaattttaaaagaaaaggggggattggggggtacagtgcaggggaaagaatagtagacataatagcaacagacatacaaactaaag

SEQ ID NO: 15572 - DNA, 301 bp, Artificial Sequence
  Arid1b.4_NTC.43
  crRNA array
  misc_feature (148)..(157): n is a, c, g, or t
cttggctttatatatcttgtggaaaggacgaaacaccgtaatttctactaagtgtagatctcctggctccgtagaagcataatttctactaagtgtagatcgactcgcgcattgaactggtaatttctactaagtgtagatttttttnnnnnnnnnnaagcttggcgtggatccgatatcaactagatcttgagacaaatggcagtattcatccacaattttaaaagaaaaggggggattggggggtacagtgcaggggaaagaatagtagacataatagcaacagacatacaaactaaag

SEQ ID NO: 15573 - DNA, 301 bp, Artificial Sequence
  Arid1b.4_NTC.44
  crRNA array
  misc_feature (148)..(157): n is a, c, g, or t
cttggctttatatatcttgtggaaaggacgaaacaccgtaatttctactaagtgtagatctcctggctccgtagaagcataatttctactaagtgtagatagcgtcgtacgatttatcgttaatttctactaagtgtagatttttttnnnnnnnnnnaagcttggcgtggatccgatatcaactagatcttgagacaaatggcagtattcatccacaattttaaaagaaaaggggggattggggggtacagtgcaggggaaagaatagtagacataatagcaacagacatacaaactaaag

SEQ ID NO: 15574 - DNA, 301 bp, Artificial Sequence
  Arid1b.4_NTC.45
  crRNA array
  misc_feature (148)..(157): n is a, c, g, or t
cttggctttatatatcttgtggaaaggacgaaacaccgtaatttctactaagtgtagatctcctggctccgtagaagcataatttctactaagtgtagatcggaacgcgtgatactagggtaatttctactaagtgtagatttttttnnnnnnnnnnaagcttggcgtggatccgatatcaactagatcttgagacaaatggcagtattcatccacaattttaaaagaaaaggggggattggggggtacagtgcaggggaaagaatagtagacataatagcaacagacatacaaactaaag

SEQ ID NO: 15575 - DNA, 301 bp, Artificial Sequence
  Arid1b.4_NTC.46
  crRNA array
  misc_feature (148)..(157): n is a, c, g, or t
cttggctttatatatcttgtggaaaggacgaaacaccgtaatttctactaagtgtagatctcctggctccgtagaagcataatttctactaagtgtagatagcgggtcgtagacgcgcggtaatttctactaagtgtagatttttttnnnnnnnnnnaagcttggcgtggatccgatatcaactagatcttgagacaaatggcagtattcatccacaattttaaaagaaaaggggggattggggggtacagtgcaggggaaagaatagtagacataatagcaacagacatacaaactaaag

SEQ ID NO: 15576 - DNA, 301 bp, Artificial Sequence
  Arid1b.4_NTC.47
  crRNA array
  misc_feature (148)..(157): n is a, c, g, or t
cttggctttatatatcttgtggaaaggacgaaacaccgtaatttctactaagtgtagatctcctggctccgtagaagcataatttctactaagtgtagattctcgtatcgcgattgttaataatttctactaagtgtagatttttttnnnnnnnnnnaagcttggcgtggatccgatatcaactagatcttgagacaaatggcagtattcatccacaattttaaaagaaaaggggggattggggggtacagtgcaggggaaagaatagtagacataatagcaacagacatacaaactaaag

SEQ ID NO: 15577 - DNA, 301 bp, Artificial Sequence
  Arid1b.4_NTC.48
  crRNA array
  misc_feature (148)..(157): n is a, c, g, or t
cttggctttatatatcttgtggaaaggacgaaacaccgtaatttctactaagtgtagatctcctggctccgtagaagcataatttctactaagtgtagatcggtcgactacggctgttagtaatttctactaagtgtagatttttttnnnnnnnnnnaagcttggcgtggatccgatatcaactagatcttgagacaaatggcagtattcatccacaattttaaaagaaaaggggggattggggggtacagtgcaggggaaagaatagtagacataatagcaacagacatacaaactaaag

SEQ ID NO: 15578 - DNA, 301 bp, Artificial Sequence
  Arid1b.4_NTC.49
  crRNA array
  misc_feature (148)..(157): n is a, c, g, or t
cttggctttatatatcttgtggaaaggacgaaacaccgtaatttctactaagtgtagatctcctggctccgtagaagcataatttctactaagtgtagattcggggcgcgtcaactgaattaatttctactaagtgtagatttttttnnnnnnnnnnaagcttggcgtggatccgatatcaactagatcttgagacaaatggcagtattcatccacaattttaaaagaaaaggggggattggggggtacagtgcaggggaaagaatagtagacataatagcaacagacatacaaactaaag

SEQ ID NO: 15579 - DNA, 301 bp, Artificial Sequence
  Arid1b.4_NTC.5
  crRNA array
  misc_feature (148)..(157): n is a, c, g, or t
cttggctttatatatcttgtggaaaggacgaaacaccgtaatttctactaagtgtagatctcctggctccgtagaagcataatttctactaagtgtagatgcttacgcgtcgcgaatgtataatttctactaagtgtagatttttttnnnnnnnnnnaagcttggcgtggatccgatatcaactagatcttgagacaaatggcagtattcatccacaattttaaaagaaaaggggggattggggggtacagtgcaggggaaagaatagtagacataatagcaacagacatacaaactaaag

SEQ ID NO: 15580 - DNA, 301 bp, Artificial Sequence
  Arid1b.4_NTC.50
  crRNA array
  misc_feature (148)..(157): n is a, c, g, or t
cttggctttatatatcttgtggaaaggacgaaacaccgtaatttctactaagtgtagatctcctggctccgtagaagcataatttctactaagtgtagatattgccgctcgcgcaaaatctaatttctactaagtgtagatttttttnnnnnnnnnnaagcttggcgtggatccgatatcaactagatcttgagacaaatggcagtattcatccacaattttaaaagaaaaggggggattggggggtacagtgcaggggaaagaatagtagacataatagcaacagacatacaaactaaag

SEQ ID NO: 15581 - DNA, 301 bp, Artificial Sequence
  Arid1b.4_NTC.51
  crRNA array
  misc_feature (148)..(157): n is a, c, g, or t
cttggctttatatatcttgtggaaaggacgaaacaccgtaatttctactaagtgtagatctcctggctccgtagaagcataatttctactaagtgtagattaacgcgcaacacgccaatgtaatttctactaagtgtagatttttttnnnnnnnnnnaagcttggcgtggatccgatatcaactagatcttgagacaaatggcagtattcatccacaattttaaaagaaaaggggggattggggggtacagtgcaggggaaagaatagtagacataatagcaacagacatacaaactaaag

SEQ ID NO: 15582 - DNA, 301 bp, Artificial Sequence
  Arid1b.4_NTC.6
  crRNA array
  misc_feature (148)..(157): n is a, c, g, or t
cttggctttatatatcttgtggaaaggacgaaacaccgtaatttctactaagtgtagatctcctggctccgtagaagcataatttctactaagtgtagatcgaatcgcgcctacgggaattaatttctactaagtgtagatttttttnnnnnnnnnnaagcttggcgtggatccgatatcaactagatcttgagacaaatggcagtattcatccacaattttaaaagaaaaggggggattggggggtacagtgcaggggaaagaatagtagacataatagcaacagacatacaaactaaag

SEQ ID NO: 15583 - DNA, 301 bp, Artificial Sequence
  Arid1b.4_NTC.7
  crRNA array
  misc_feature (148)..(157): n is a, c, g, or t
cttggctttatatatcttgtggaaaggacgaaacaccgtaatttctactaagtgtagatctcctggctccgtagaagcataatttctactaagtgtagatcgccgaacggataagactattaatttctactaagtgtagatttttttnnnnnnnnnnaagcttggcgtggatccgatatcaactagatcttgagacaaatggcagtattcatccacaattttaaaagaaaaggggggattggggggtacagtgcaggggaaagaatagtagacataatagcaacagacatacaaactaaag

SEQ ID NO: 15584 - DNA, 301 bp, Artificial Sequence
  Arid1b.4_NTC.8
  crRNA array
  misc_feature (148)..(157): n is a, c, g, or t
cttggctttatatatcttgtggaaaggacgaaacaccgtaatttctactaagtgtagatctcctggctccgtagaagcataatttctactaagtgtagatcgaccgaggttacgctgggataatttctactaagtgtagatttttttnnnnnnnnnnaagcttggcgtggatccgatatcaactagatcttgagacaaatggcagtattcatccacaattttaaaagaaaaggggggattggggggtacagtgcaggggaaagaatagtagacataatagcaacagacatacaaactaaag

SEQ ID NO: 15585 - DNA, 301 bp, Artificial Sequence
  Arid1b.4_NTC.9
  crRNA array
  misc_feature (148)..(157): n is a, c, g, or t
cttggctttatatatcttgtggaaaggacgaaacaccgtaatttctactaagtgtagatctcctggctccgtagaagcataatttctactaagtgtagatatcgccgtacggctatggcataatttctactaagtgtagatttttttnnnnnnnnnnaagcttggcgtggatccgatatcaactagatcttgagacaaatggcagtattcatccacaattttaaaagaaaaggggggattggggggtacagtgcaggggaaagaatagtagacataatagcaacagacatacaaactaaag

SEQ ID NO: 15586 - DNA, 301 bp, Artificial Sequence
  Atm.1_NTC.0
  crRNA array
  misc_feature (148)..(157): n is a, c, g, or t
cttggctttatatatcttgtggaaaggacgaaacaccgtaatttctactaagtgtagatgagaaagtctccgaatcgtttaatttctactaagtgtagattatagcgtcgcgcgctaatttaatttctactaagtgtagatttttttnnnnnnnnnnaagcttggcgtggatccgatatcaactagatcttgagacaaatggcagtattcatccacaattttaaaagaaaaggggggattggggggtacagtgcaggggaaagaatagtagacataatagcaacagacatacaaactaaag

SEQ ID NO: 15587 - DNA, 301 bp, Artificial Sequence
  Atm.1_NTC.1
  crRNA array
  misc_feature (148)..(157): n is a, c, g, or t
cttggctttatatatcttgtggaaaggacgaaacaccgtaatttctactaagtgtagatgagaaagtctccgaatcgtttaatttctactaagtgtagatcgcgtaaccgttccggctcctaatttctactaagtgtagatttttttnnnnnnnnnnaagcttggcgtggatccgatatcaactagatcttgagacaaatggcagtattcatccacaattttaaaagaaaaggggggattggggggtacagtgcaggggaaagaatagtagacataatagcaacagacatacaaactaaag

SEQ ID NO: 15588 - DNA, 301 bp, Artificial Sequence
  Atm.1_NTC.10
  crRNA array
  misc_feature (148)..(157): n is a, c, g, or t
cttggctttatatatcttgtggaaaggacgaaacaccgtaatttctactaagtgtagatgagaaagtctccgaatcgtttaatttctactaagtgtagatcgctaagttcgcgcgggccgtaatttctactaagtgtagatttttttnnnnnnnnnnaagcttggcgtggatccgatatcaactagatcttgagacaaatggcagtattcatccacaattttaaaagaaaaggggggattggggggtacagtgcaggggaaagaatagtagacataatagcaacagacatacaaactaaag

SEQ ID NO: 15589 - DNA, 301 bp, Artificial Sequence
  Atm.1_NTC.11
  crRNA array
  misc_feature (148)..(157): n is a, c, g, or t
cttggctttatatatcttgtggaaaggacgaaacaccgtaatttctactaagtgtagatgagaaagtctccgaatcgtttaatttctactaagtgtagatcgttcgtcgacgaagcaatctaatttctactaagtgtagatttttttnnnnnnnnnnaagcttggcgtggatccgatatcaactagatcttgagacaaatggcagtattcatccacaattttaaaagaaaaggggggattggggggtacagtgcaggggaaagaatagtagacataatagcaacagacatacaaactaaag

SEQ ID NO: 15590 - DNA, 301 bp, Artificial Sequence
  Atm.1_NTC.12
  crRNA array
  misc_feature (148)..(157): n is a, c, g, or t
cttggctttatatatcttgtggaaaggacgaaacaccgtaatttctactaagtgtagatgagaaagtctccgaatcgtttaatttctactaagtgtagatcgccgacgattaatcaatagtaatttctactaagtgtagatttttttnnnnnnnnnnaagcttggcgtggatccgatatcaactagatcttgagacaaatggcagtattcatccacaattttaaaagaaaaggggggattggggggtacagtgcaggggaaagaatagtagacataatagcaacagacatacaaactaaag

SEQ ID NO: 15591 - DNA, 301 bp, Artificial Sequence
  Atm.1_NTC.13
  crRNA array
  misc_feature (148)..(157): n is a, c, g, or t
cttggctttatatatcttgtggaaaggacgaaacaccgtaatttctactaagtgtagatgagaaagtctccgaatcgtttaatttctactaagtgtagatgaccgttgtatcgcgatcaataatttctactaagtgtagatttttttnnnnnnnnnnaagcttggcgtggatccgatatcaactagatcttgagacaaatggcagtattcatccacaattttaaaagaaaaggggggattggggggtacagtgcaggggaaagaatagtagacataatagcaacagacatacaaactaaag

SEQ ID NO: 15592 - DNA, 301 bp, Artificial Sequence
  Atm.1_NTC.14
  crRNA array
  misc_feature (148)..(157): n is a, c, g, or t
cttggctttatatatcttgtggaaaggacgaaacaccgtaatttctactaagtgtagatgagaaagtctccgaatcgtttaatttctactaagtgtagatccgttcgtgcgatagtgttttaatttctactaagtgtagatttttttnnnnnnnnnnaagcttggcgtggatccgatatcaactagatcttgagacaaatggcagtattcatccacaattttaaaagaaaaggggggattggggggtacagtgcaggggaaagaatagtagacataatagcaacagacatacaaactaaag

SEQ ID NO: 15593 - DNA, 301 bp, Artificial Sequence
  Atm.1_NTC.15
  crRNA array
  misc_feature (148)..(157): n is a, c, g, or t
cttggctttatatatcttgtggaaaggacgaaacaccgtaatttctactaagtgtagatgagaaagtctccgaatcgtttaatttctactaagtgtagatgttgtcgtgccgcgaatttataatttctactaagtgtagatttttttnnnnnnnnnnaagcttggcgtggatccgatatcaactagatcttgagacaaatggcagtattcatccacaattttaaaagaaaaggggggattggggggtacagtgcaggggaaagaatagtagacataatagcaacagacatacaaactaaag

SEQ ID NO: 15594 - DNA, 301 bp, Artificial Sequence
  Atm.1_NTC.16
  crRNA array
  misc_feature (148)..(157): n is a, c, g, or t
cttggctttatatatcttgtggaaaggacgaaacaccgtaatttctactaagtgtagatgagaaagtctccgaatcgtttaatttctactaagtgtagatcggtacgttagacgaaaatttaatttctactaagtgtagatttttttnnnnnnnnnnaagcttggcgtggatccgatatcaactagatcttgagacaaatggcagtattcatccacaattttaaaagaaaaggggggattggggggtacagtgcaggggaaagaatagtagacataatagcaacagacatacaaactaaag

SEQ ID NO: 15595 - DNA, 301 bp, Artificial Sequence
  Atm.1_NTC.17
  crRNA array
  misc_feature (148)..(157): n is a, c, g, or t
cttggctttatatatcttgtggaaaggacgaaacaccgtaatttctactaagtgtagatgagaaagtctccgaatcgtttaatttctactaagtgtagattatcgaacgctatcgaacgttaatttctactaagtgtagatttttttnnnnnnnnnnaagcttggcgtggatccgatatcaactagatcttgagacaaatggcagtattcatccacaattttaaaagaaaaggggggattggggggtacagtgcaggggaaagaatagtagacataatagcaacagacatacaaactaaag

SEQ ID NO: 15596 - DNA, 301 bp, Artificial Sequence
  Atm.1_NTC.18
  crRNA array
  misc_feature (148)..(157): n is a, c, g, or t
cttggctttatatatcttgtggaaaggacgaaacaccgtaatttctactaagtgtagatgagaaagtctccgaatcgtttaatttctactaagtgtagattccggttacgaccggcaaaataatttctactaagtgtagatttttttnnnnnnnnnnaagcttggcgtggatccgatatcaactagatcttgagacaaatggcagtattcatccacaattttaaaagaaaaggggggattggggggtacagtgcaggggaaagaatagtagacataatagcaacagacatacaaactaaag

SEQ ID NO: 15597 - DNA, 301 bp, Artificial Sequence
  Atm.1_NTC.19
  crRNA array
  misc_feature (148)..(157): n is a, c, g, or t
cttggctttatatatcttgtggaaaggacgaaacaccgtaatttctactaagtgtagatgagaaagtctccgaatcgtttaatttctactaagtgtagatcgtcgtagaacgatacccgataatttctactaagtgtagatttttttnnnnnnnnnnaagcttggcgtggatccgatatcaactagatcttgagacaaatggcagtattcatccacaattttaaaagaaaaggggggattggggggtacagtgcaggggaaagaatagtagacataatagcaacagacatacaaactaaag

SEQ ID NO: 15598 - DNA, 301 bp, Artificial Sequence
  Atm.1_NTC.2
  crRNA array
  misc_feature (148)..(157): n is a, c, g, or t
cttggctttatatatcttgtggaaaggacgaaacaccgtaatttctactaagtgtagatgagaaagtctccgaatcgtttaatttctactaagtgtagatttatgtcgcgccgcgacccgtaatttctactaagtgtagatttttttnnnnnnnnnnaagcttggcgtggatccgatatcaactagatcttgagacaaatggcagtattcatccacaattttaaaagaaaaggggggattggggggtacagtgcaggggaaagaatagtagacataatagcaacagacatacaaactaaag

SEQ ID NO: 15599 - DNA, 301 bp, Artificial Sequence
  Atm.1_NTC.20
  crRNA array
  misc_feature (148)..(157): n is a, c, g, or t
cttggctttatatatcttgtggaaaggacgaaacaccgtaatttctactaagtgtagatgagaaagtctccgaatcgtttaatttctactaagtgtagatattccggcgcgaccagaagataatttctactaagtgtagatttttttnnnnnnnnnnaagcttggcgtggatccgatatcaactagatcttgagacaaatggcagtattcatccacaattttaaaagaaaaggggggattggggggtacagtgcaggggaaagaatagtagacataatagcaacagacatacaaactaaag

SEQ ID NO: 15600 - DNA, 301 bp, Artificial Sequence
  Atm.1_NTC.21
  crRNA array
  misc_feature (148)..(157): n is a, c, g, or t
cttggctttatatatcttgtggaaaggacgaaacaccgtaatttctactaagtgtagatgagaaagtctccgaatcgtttaatttctactaagtgtagatgtataacttcgcgcggtccgtaatttctactaagtgtagatttttttnnnnnnnnnnaagcttggcgtggatccgatatcaactagatcttgagacaaatggcagtattcatccacaattttaaaagaaaaggggggattggggggtacagtgcaggggaaagaatagtagacataatagcaacagacatacaaactaaag

SEQ ID NO: 15601 - DNA, 301 bp, Artificial Sequence
  Atm.1_NTC.22
  crRNA array
  misc_feature (148)..(157): n is a, c, g, or t
cttggctttatatatcttgtggaaaggacgaaacaccgtaatttctactaagtgtagatgagaaagtctccgaatcgtttaatttctactaagtgtagatgcgcgtcaacgtaatgtgcctaatttctactaagtgtagatttttttnnnnnnnnnnaagcttggcgtggatccgatatcaactagatcttgagacaaatggcagtattcatccacaattttaaaagaaaaggggggattggggggtacagtgcaggggaaagaatagtagacataatagcaacagacatacaaactaaag

SEQ ID NO: 15602 - DNA, 301 bp, Artificial Sequence
  Atm.1_NTC.23
  crRNA array
  misc_feature (148)..(157): n is a, c, g, or t
cttggctttatatatcttgtggaaaggacgaaacaccgtaatttctactaagtgtagatgagaaagtctccgaatcgtttaatttctactaagtgtagatacgcgctattatcgtaggtgtaatttctactaagtgtagatttttttnnnnnnnnnnaagcttggcgtggatccgatatcaactagatcttgagacaaatggcagtattcatccacaattttaaaagaaaaggggggattggggggtacagtgcaggggaaagaatagtagacataatagcaacagacatacaaactaaag

SEQ ID NO: 15603 - DNA, 301 bp, Artificial Sequence
  Atm.1_NTC.24
  crRNA array
  misc_feature (148)..(157): n is a, c, g, or t
cttggctttatatatcttgtggaaaggacgaaacaccgtaatttctactaagtgtagatgagaaagtctccgaatcgtttaatttctactaagtgtagatactatcgacgttcgtcccggtaatttctactaagtgtagatttttttnnnnnnnnnnaagcttggcgtggatccgatatcaactagatcttgagacaaatggcagtattcatccacaattttaaaagaaaaggggggattggggggtacagtgcaggggaaagaatagtagacataatagcaacagacatacaaactaaag

SEQ ID NO: 15604 - DNA, 301 bp, Artificial Sequence
  Atm.1_NTC.25
  crRNA array
  misc_feature (148)..(157): n is a, c, g, or t
cttggctttatatatcttgtggaaaggacgaaacaccgtaatttctactaagtgtagatgagaaagtctccgaatcgtttaatttctactaagtgtagattcgcgttatcgtgccgtgcgtaatttctactaagtgtagatttttttnnnnnnnnnnaagcttggcgtggatccgatatcaactagatcttgagacaaatggcagtattcatccacaattttaaaagaaaaggggggattggggggtacagtgcaggggaaagaatagtagacataatagcaacagacatacaaactaaag

SEQ ID NO: 15605 - DNA, 301 bp, Artificial Sequence
  Atm.1_NTC.26
  crRNA array
  misc_feature (148)..(157): n is a, c, g, or t
cttggctttatatatcttgtggaaaggacgaaacaccgtaatttctactaagtgtagatgagaaagtctccgaatcgtttaatttctactaagtgtagatcgcgacggcggttttaacactaatttctactaagtgtagatttttttnnnnnnnnnnaagcttggcgtggatccgatatcaactagatcttgagacaaatggcagtattcatccacaattttaaaagaaaaggggggattggggggtacagtgcaggggaaagaatagtagacataatagcaacagacatacaaactaaag

SEQ ID NO: 15606 - DNA, 301 bp, Artificial Sequence
  Atm.1_NTC.27
  crRNA array
  misc_feature (148)..(157): n is a, c, g, or t
cttggctttatatatcttgtggaaaggacgaaacaccgtaatttctactaagtgtagatgagaaagtctccgaatcgtttaatttctactaagtgtagatgtcgcgttgcgaccggcgcttaatttctactaagtgtagatttttttnnnnnnnnnnaagcttggcgtggatccgatatcaactagatcttgagacaaatggcagtattcatccacaattttaaaagaaaaggggggattggggggtacagtgcaggggaaagaatagtagacataatagcaacagacatacaaactaaag

SEQ ID NO: 15607 - DNA, 301 bp, Artificial Sequence
  Atm.1_NTC.28
  crRNA array
  misc_feature (148)..(157): n is a, c, g, or t
cttggctttatatatcttgtggaaaggacgaaacaccgtaatttctactaagtgtagatgagaaagtctccgaatcgtttaatttctactaagtgtagataccgctaatcggcgtaaacttaatttctactaagtgtagatttttttnnnnnnnnnnaagcttggcgtggatccgatatcaactagatcttgagacaaatggcagtattcatccacaattttaaaagaaaaggggggattggggggtacagtgcaggggaaagaatagtagacataatagcaacagacatacaaactaaag

SEQ ID NO: 15608 - DNA, 301 bp, Artificial Sequence
  Atm.1_NTC.29
  crRNA array
  misc_feature (148)..(157): n is a, c, g, or t
cttggctttatatatcttgtggaaaggacgaaacaccgtaatttctactaagtgtagatgagaaagtctccgaatcgtttaatttctactaagtgtagatcgcgatctataccgtctatataatttctactaagtgtagatttttttnnnnnnnnnnaagcttggcgtggatccgatatcaactagatcttgagacaaatggcagtattcatccacaattttaaaagaaaaggggggattggggggtacagtgcaggggaaagaatagtagacataatagcaacagacatacaaactaaag

SEQ ID NO: 15609 - DNA, 301 bp, Artificial Sequence
  Atm.1_NTC.3
  crRNA array
  misc_feature (148)..(157): n is a, c, g, or t
cttggctttatatatcttgtggaaaggacgaaacaccgtaatttctactaagtgtagatgagaaagtctccgaatcgtttaatttctactaagtgtagattcgacgcgagacgacgtacataatttctactaagtgtagatttttttnnnnnnnnnnaagcttggcgtggatccgatatcaactagatcttgagacaaatggcagtattcatccacaattttaaaagaaaaggggggattggggggtacagtgcaggggaaagaatagtagacataatagcaacagacatacaaactaaag

SEQ ID NO: 15610 - DNA, 301 bp, Artificial Sequence
  Atm.1_NTC.30
  crRNA array
  misc_feature (148)..(157): n is a, c, g, or t
cttggctttatatatcttgtggaaaggacgaaacaccgtaatttctactaagtgtagatgagaaagtctccgaatcgtttaatttctactaagtgtagatcgatcgtacgggtgtcctaataatttctactaagtgtagatttttttnnnnnnnnnnaagcttggcgtggatccgatatcaactagatcttgagacaaatggcagtattcatccacaattttaaaagaaaaggggggattggggggtacagtgcaggggaaagaatagtagacataatagcaacagacatacaaactaaag

SEQ ID NO: 15611 - DNA, 301 bp, Artificial Sequence
  Atm.1_NTC.31
  crRNA array
  misc_feature (148)..(157): n is a, c, g, or t
cttggctttatatatcttgtggaaaggacgaaacaccgtaatttctactaagtgtagatgagaaagtctccgaatcgtttaatttctactaagtgtagatgccgaccgcgtgattgtaggtaatttctactaagtgtagatttttttnnnnnnnnnnaagcttggcgtggatccgatatcaactagatcttgagacaaatggcagtattcatccacaattttaaaagaaaaggggggattggggggtacagtgcaggggaaagaatagtagacataatagcaacagacatacaaactaaag

SEQ ID NO: 15612 - DNA, 301 bp, Artificial Sequence
  Atm.1_NTC.32
  crRNA array
  misc_feature (148)..(157): n is a, c, g, or t
cttggctttatatatcttgtggaaaggacgaaacaccgtaatttctactaagtgtagatgagaaagtctccgaatcgtttaatttctactaagtgtagatgcacgttacgcccgggtcactaatttctactaagtgtagatttttttnnnnnnnnnnaagcttggcgtggatccgatatcaactagatcttgagacaaatggcagtattcatccacaattttaaaagaaaaggggggattggggggtacagtgcaggggaaagaatagtagacataatagcaacagacatacaaactaaag

SEQ ID NO: 15613 - DNA, 301 bp, Artificial Sequence
  Atm.1_NTC.33
  crRNA array
  misc_feature (148)..(157): n is a, c, g, or t
cttggctttatatatcttgtggaaaggacgaaacaccgtaatttctactaagtgtagatgagaaagtctccgaatcgtttaatttctactaagtgtagattaagcgaccgacgcattcgctaatttctactaagtgtagatttttttnnnnnnnnnnaagcttggcgtggatccgatatcaactagatcttgagacaaatggcagtattcatccacaattttaaaagaaaaggggggattggggggtacagtgcaggggaaagaatagtagacataatagcaacagacatacaaactaaag

SEQ ID NO: 15614 - DNA, 301 bp, Artificial Sequence
  Atm.1_NTC.34
  crRNA array
  misc_feature (148)..(157): n is a, c, g, or t
cttggctttatatatcttgtggaaaggacgaaacaccgtaatttctactaagtgtagatgagaaagtctccgaatcgtttaatttctactaagtgtagattagcgttcgacacgtgaaactaatttctactaagtgtagatttttttnnnnnnnnnnaagcttggcgtggatccgatatcaactagatcttgagacaaatggcagtattcatccacaattttaaaagaaaaggggggattggggggtacagtgcaggggaaagaatagtagacataatagcaacagacatacaaactaaag

SEQ ID NO: 15615 - DNA, 301 bp, Artificial Sequence
  Atm.1_NTC.35
  crRNA array
  misc_feature (148)..(157): n is a, c, g, or t
cttggctttatatatcttgtggaaaggacgaaacaccgtaatttctactaagtgtagatgagaaagtctccgaatcgtttaatttctactaagtgtagattggcgcgtaatcgctattcgtaatttctactaagtgtagatttttttnnnnnnnnnnaagcttggcgtggatccgatatcaactagatcttgagacaaatggcagtattcatccacaattttaaaagaaaaggggggattggggggtacagtgcaggggaaagaatagtagacataatagcaacagacatacaaactaaag

SEQ ID NO: 15616 - DNA, 301 bp, Artificial Sequence
  Atm.1_NTC.36
  crRNA array
  misc_feature (148)..(157): n is a, c, g, or t
cttggctttatatatcttgtggaaaggacgaaacaccgtaatttctactaagtgtagatgagaaagtctccgaatcgtttaatttctactaagtgtagatcaacccgccgtagcgggccttaatttctactaagtgtagatttttttnnnnnnnnnnaagcttggcgtggatccgatatcaactagatcttgagacaaatggcagtattcatccacaattttaaaagaaaaggggggattggggggtacagtgcaggggaaagaatagtagacataatagcaacagacatacaaactaaag

SEQ ID NO: 15617 - DNA, 301 bp, Artificial Sequence
  Atm.1_NTC.37
  crRNA array
  misc_feature (148)..(157): n is a, c, g, or t
cttggctttatatatcttgtggaaaggacgaaacaccgtaatttctactaagtgtagatgagaaagtctccgaatcgtttaatttctactaagtgtagattttgcgttgacgcgattacttaatttctactaagtgtagatttttttnnnnnnnnnnaagcttggcgtggatccgatatcaactagatcttgagacaaatggcagtattcatccacaattttaaaagaaaaggggggattggggggtacagtgcaggggaaagaatagtagacataatagcaacagacatacaaactaaag

SEQ ID NO: 15618 - DNA, 301 bp, Artificial Sequence
  Atm.1_NTC.38
  crRNA array
  misc_feature (148)..(157): n is a, c, g, or t
cttggctttatatatcttgtggaaaggacgaaacaccgtaatttctactaagtgtagatgagaaagtctccgaatcgtttaatttctactaagtgtagataacggagcgcgatactaccataatttctactaagtgtagatttttttnnnnnnnnnnaagcttggcgtggatccgatatcaactagatcttgagacaaatggcagtattcatccacaattttaaaagaaaaggggggattggggggtacagtgcaggggaaagaatagtagacataatagcaacagacatacaaactaaag

SEQ ID NO: 15619 - DNA, 301 bp, Artificial Sequence
  Atm.1_NTC.39
  crRNA array
  misc_feature (148)..(157): n is a, c, g, or t
cttggctttatatatcttgtggaaaggacgaaacaccgtaatttctactaagtgtagatgagaaagtctccgaatcgtttaatttctactaagtgtagatccggacgttataacgtttcttaatttctactaagtgtagatttttttnnnnnnnnnnaagcttggcgtggatccgatatcaactagatcttgagacaaatggcagtattcatccacaattttaaaagaaaaggggggattggggggtacagtgcaggggaaagaatagtagacataatagcaacagacatacaaactaaag

SEQ ID NO: 15620 - DNA, 301 bp, Artificial Sequence
  Atm.1_NTC.4
  crRNA array
  misc_feature (148)..(157): n is a, c, g, or t
cttggctttatatatcttgtggaaaggacgaaacaccgtaatttctactaagtgtagatgagaaagtctccgaatcgtttaatttctactaagtgtagatatacccgtcgcgaacgtgagtaatttctactaagtgtagatttttttnnnnnnnnnnaagcttggcgtggatccgatatcaactagatcttgagacaaatggcagtattcatccacaattttaaaagaaaaggggggattggggggtacagtgcaggggaaagaatagtagacataatagcaacagacatacaaactaaag

SEQ ID NO: 15621 - DNA, 301 bp, Artificial Sequence
  Atm.1_NTC.40
  crRNA array
  misc_feature (148)..(157): n is a, c, g, or t
cttggctttatatatcttgtggaaaggacgaaacaccgtaatttctactaagtgtagatgagaaagtctccgaatcgtttaatttctactaagtgtagatattcgcgaacccggccggaataatttctactaagtgtagatttttttnnnnnnnnnnaagcttggcgtggatccgatatcaactagatcttgagacaaatggcagtattcatccacaattttaaaagaaaaggggggattggggggtacagtgcaggggaaagaatagtagacataatagcaacagacatacaaactaaag

SEQ ID NO: 15622 - DNA, 301 bp, Artificial Sequence
  Atm.1_NTC.41
  crRNA array
  misc_feature (148)..(157): n is a, c, g, or t
cttggctttatatatcttgtggaaaggacgaaacaccgtaatttctactaagtgtagatgagaaagtctccgaatcgtttaatttctactaagtgtagatttgatggcgcgacgcgttattaatttctactaagtgtagatttttttnnnnnnnnnnaagcttggcgtggatccgatatcaactagatcttgagacaaatggcagtattcatccacaattttaaaagaaaaggggggattggggggtacagtgcaggggaaagaatagtagacataatagcaacagacatacaaactaaag

SEQ ID NO: 15623 - DNA, 301 bp, Artificial Sequence
  Atm.1_NTC.42
  crRNA array
  misc_feature (148)..(157): n is a, c, g, or t
cttggctttatatatcttgtggaaaggacgaaacaccgtaatttctactaagtgtagatgagaaagtctccgaatcgtttaatttctactaagtgtagatggtcaaatcgcggcgataactaatttctactaagtgtagatttttttnnnnnnnnnnaagcttggcgtggatccgatatcaactagatcttgagacaaatggcagtattcatccacaattttaaaagaaaaggggggattggggggtacagtgcaggggaaagaatagtagacataatagcaacagacatacaaactaaag

SEQ ID NO: 15624 - DNA, 301 bp, Artificial Sequence
  Atm.1_NTC.43
  crRNA array
  misc_feature (148)..(157): n is a, c, g, or t
cttggctttatatatcttgtggaaaggacgaaacaccgtaatttctactaagtgtagatgagaaagtctccgaatcgtttaatttctactaagtgtagatcgactcgcgcattgaactggtaatttctactaagtgtagatttttttnnnnnnnnnnaagcttggcgtggatccgatatcaactagatcttgagacaaatggcagtattcatccacaattttaaaagaaaaggggggattggggggtacagtgcaggggaaagaatagtagacataatagcaacagacatacaaactaaag

SEQ ID NO: 15625 - DNA, 301 bp, Artificial Sequence
  Atm.1_NTC.44
  crRNA array
  misc_feature (148)..(157): n is a, c, g, or t
cttggctttatatatcttgtggaaaggacgaaacaccgtaatttctactaagtgtagatgagaaagtctccgaatcgtttaatttctactaagtgtagatagcgtcgtacgatttatcgttaatttctactaagtgtagatttttttnnnnnnnnnnaagcttggcgtggatccgatatcaactagatcttgagacaaatggcagtattcatccacaattttaaaagaaaaggggggattggggggtacagtgcaggggaaagaatagtagacataatagcaacagacatacaaactaaag

SEQ ID NO: 15626 - DNA, 301 bp, Artificial Sequence
  Atm.1_NTC.45
  crRNA array
  misc_feature (148)..(157): n is a, c, g, or t
cttggctttatatatcttgtggaaaggacgaaacaccgtaatttctactaagtgtagatgagaaagtctccgaatcgtttaatttctactaagtgtagatcggaacgcgtgatactagggtaatttctactaagtgtagatttttttnnnnnnnnnnaagcttggcgtggatccgatatcaactagatcttgagacaaatggcagtattcatccacaattttaaaagaaaaggggggattggggggtacagtgcaggggaaagaatagtagacataatagcaacagacatacaaactaaag

SEQ ID NO: 15627 - DNA, 301 bp, Artificial Sequence
  Atm.1_NTC.46
  crRNA array
  misc_feature (148)..(157): n is a, c, g, or t
cttggctttatatatcttgtggaaaggacgaaacaccgtaatttctactaagtgtagatgagaaagtctccgaatcgtttaatttctactaagtgtagatagcgggtcgtagacgcgcggtaatttctactaagtgtagatttttttnnnnnnnnnnaagcttggcgtggatccgatatcaactagatcttgagacaaatggcagtattcatccacaattttaaaagaaaaggggggattggggggtacagtgcaggggaaagaatagtagacataatagcaacagacatacaaactaaag

SEQ ID NO: 15628 - DNA, 301 bp, Artificial Sequence
  Atm.1_NTC.47
  crRNA array
  misc_feature (148)..(157): n is a, c, g, or t
cttggctttatatatcttgtggaaaggacgaaacaccgtaatttctactaagtgtagatgagaaagtctccgaatcgtttaatttctactaagtgtagattctcgtatcgcgattgttaataatttctactaagtgtagatttttttnnnnnnnnnnaagcttggcgtggatccgatatcaactagatcttgagacaaatggcagtattcatccacaattttaaaagaaaaggggggattggggggtacagtgcaggggaaagaatagtagacataatagcaacagacatacaaactaaag

SEQ ID NO: 15629 - DNA, 301 bp, Artificial Sequence
  Atm.1_NTC.48
  crRNA array
  misc_feature (148)..(157): n is a, c, g, or t
cttggctttatatatcttgtggaaaggacgaaacaccgtaatttctactaagtgtagatgagaaagtctccgaatcgtttaatttctactaagtgtagatcggtcgactacggctgttagtaatttctactaagtgtagatttttttnnnnnnnnnnaagcttggcgtggatccgatatcaactagatcttgagacaaatggcagtattcatccacaattttaaaagaaaaggggggattggggggtacagtgcaggggaaagaatagtagacataatagcaacagacatacaaactaaag

SEQ ID NO: 15630 - DNA, 301 bp, Artificial Sequence
  Atm.1_NTC.49
  crRNA array
  misc_feature (148)..(157): n is a, c, g, or t
cttggctttatatatcttgtggaaaggacgaaacaccgtaatttctactaagtgtagatgagaaagtctccgaatcgtttaatttctactaagtgtagattcggggcgcgtcaactgaattaatttctactaagtgtagatttttttnnnnnnnnnnaagcttggcgtggatccgatatcaactagatcttgagacaaatggcagtattcatccacaattttaaaagaaaaggggggattggggggtacagtgcaggggaaagaatagtagacataatagcaacagacatacaaactaaag

SEQ ID NO: 15631 - DNA, 301 bp, Artificial Sequence
  Atm.1_NTC.5
  crRNA array
  misc_feature (148)..(157): n is a, c, g, or t
cttggctttatatatcttgtggaaaggacgaaacaccgtaatttctactaagtgtagatgagaaagtctccgaatcgtttaatttctactaagtgtagatgcttacgcgtcgcgaatgtataatttctactaagtgtagatttttttnnnnnnnnnnaagcttggcgtggatccgatatcaactagatcttgagacaaatggcagtattcatccacaattttaaaagaaaaggggggattggggggtacagtgcaggggaaagaatagtagacataatagcaacagacatacaaactaaag

SEQ ID NO: 15632 - DNA, 301 bp, Artificial Sequence
  Atm.1_NTC.50
  crRNA array
  misc_feature (148)..(157): n is a, c, g, or t
cttggctttatatatcttgtggaaaggacgaaacaccgtaatttctactaagtgtagatgagaaagtctccgaatcgtttaatttctactaagtgtagatattgccgctcgcgcaaaatctaatttctactaagtgtagatttttttnnnnnnnnnnaagcttggcgtggatccgatatcaactagatcttgagacaaatggcagtattcatccacaattttaaaagaaaaggggggattggggggtacagtgcaggggaaagaatagtagacataatagcaacagacatacaaactaaag

SEQ ID NO: 15633 - DNA, 301 bp, Artificial Sequence
  Atm.1_NTC.51
  crRNA array
  misc_feature (148)..(157): n is a, c, g, or t
cttggctttatatatcttgtggaaaggacgaaacaccgtaatttctactaagtgtagatgagaaagtctccgaatcgtttaatttctactaagtgtagattaacgcgcaacacgccaatgtaatttctactaagtgtagatttttttnnnnnnnnnnaagcttggcgtggatccgatatcaactagatcttgagacaaatggcagtattcatccacaattttaaaagaaaaggggggattggggggtacagtgcaggggaaagaatagtagacataatagcaacagacatacaaactaaag

SEQ ID NO: 15634 - DNA, 301 bp, Artificial Sequence
  Atm.1_NTC.6
  crRNA array
  misc_feature (148)..(157): n is a, c, g, or t
cttggctttatatatcttgtggaaaggacgaaacaccgtaatttctactaagtgtagatgagaaagtctccgaatcgtttaatttctactaagtgtagatcgaatcgcgcctacgggaattaatttctactaagtgtagatttttttnnnnnnnnnnaagcttggcgtggatccgatatcaactagatcttgagacaaatggcagtattcatccacaattttaaaagaaaaggggggattggggggtacagtgcaggggaaagaatagtagacataatagcaacagacatacaaactaaag

SEQ ID NO: 15635 - DNA, 301 bp, Artificial Sequence
  Atm.1_NTC.7
  crRNA array
  misc_feature (148)..(157): n is a, c, g, or t
cttggctttatatatcttgtggaaaggacgaaacaccgtaatttctactaagtgtagatgagaaagtctccgaatcgtttaatttctactaagtgtagatcgccgaacggataagactattaatttctactaagtgtagatttttttnnnnnnnnnnaagcttggcgtggatccgatatcaactagatcttgagacaaatggcagtattcatccacaattttaaaagaaaaggggggattggggggtacagtgcaggggaaagaatagtagacataatagcaacagacatacaaactaaag

SEQ ID NO: 15636 - DNA, 301 bp, Artificial Sequence
  Atm.1_NTC.8
  crRNA array
  misc_feature (148)..(157): n is a, c, g, or t
cttggctttatatatcttgtggaaaggacgaaacaccgtaatttctactaagtgtagatgagaaagtctccgaatcgtttaatttctactaagtgtagatcgaccgaggttacgctgggataatttctactaagtgtagatttttttnnnnnnnnnnaagcttggcgtggatccgatatcaactagatcttgagacaaatggcagtattcatccacaattttaaaagaaaaggggggattggggggtacagtgcaggggaaagaatagtagacataatagcaacagacatacaaactaaag

SEQ ID NO: 15637 - DNA, 301 bp, Artificial Sequence
  Atm.1_NTC.9
  crRNA array
  misc_feature (148)..(157): n is a, c, g, or t
cttggctttatatatcttgtggaaaggacgaaacaccgtaatttctactaagtgtagatgagaaagtctccgaatcgtttaatttctactaagtgtagatatcgccgtacggctatggcataatttctactaagtgtagatttttttnnnnnnnnnnaagcttggcgtggatccgatatcaactagatcttgagacaaatggcagtattcatccacaattttaaaagaaaaggggggattggggggtacagtgcaggggaaagaatagtagacataatagcaacagacatacaaactaaag

SEQ ID NO: 15638 - DNA, 301 bp, Artificial Sequence
  Atm.2_NTC.0
  crRNA array
  misc_feature (148)..(157): n is a, c, g, or t
cttggctttatatatcttgtggaaaggacgaaacaccgtaatttctactaagtgtagatcctacgagggcacgagagactaatttctactaagtgtagattatagcgtcgcgcgctaatttaatttctactaagtgtagatttttttnnnnnnnnnnaagcttggcgtggatccgatatcaactagatcttgagacaaatggcagtattcatccacaattttaaaagaaaaggggggattggggggtacagtgcaggggaaagaatagtagacataatagcaacagacatacaaactaaag

SEQ ID NO: 15639 - DNA, 301 bp, Artificial Sequence
  Atm.2_NTC.1
  crRNA array
  misc_feature (148)..(157): n is a, c, g, or t
cttggctttatatatcttgtggaaaggacgaaacaccgtaatttctactaagtgtagatcctacgagggcacgagagactaatttctactaagtgtagatcgcgtaaccgttccggctcctaatttctactaagtgtagatttttttnnnnnnnnnnaagcttggcgtggatccgatatcaactagatcttgagacaaatggcagtattcatccacaattttaaaagaaaaggggggattggggggtacagtgcaggggaaagaatagtagacataatagcaacagacatacaaactaaag

SEQ ID NO: 15640 - DNA, 301 bp, Artificial Sequence
  Atm.2_NTC.10
  crRNA array
  misc_feature (148)..(157): n is a, c, g, or t
cttggctttatatatcttgtggaaaggacgaaacaccgtaatttctactaagtgtagatcctacgagggcacgagagactaatttctactaagtgtagatcgctaagttcgcgcgggccgtaatttctactaagtgtagatttttttnnnnnnnnnnaagcttggcgtggatccgatatcaactagatcttgagacaaatggcagtattcatccacaattttaaaagaaaaggggggattggggggtacagtgcaggggaaagaatagtagacataatagcaacagacatacaaactaaag

SEQ ID NO: 15641 - DNA, 301 bp, Artificial Sequence
  Atm.2_NTC.11
  crRNA array
  misc_feature (148)..(157): n is a, c, g, or t
cttggctttatatatcttgtggaaaggacgaaacaccgtaatttctactaagtgtagatcctacgagggcacgagagactaatttctactaagtgtagatcgttcgtcgacgaagcaatctaatttctactaagtgtagatttttttnnnnnnnnnnaagcttggcgtggatccgatatcaactagatcttgagacaaatggcagtattcatccacaattttaaaagaaaaggggggattggggggtacagtgcaggggaaagaatagtagacataatagcaacagacatacaaactaaag

SEQ ID NO: 15642 - DNA, 301 bp, Artificial Sequence
  Atm.2_NTC.12
  crRNA array
  misc_feature (148)..(157): n is a, c, g, or t
cttggctttatatatcttgtggaaaggacgaaacaccgtaatttctactaagtgtagatcctacgagggcacgagagactaatttctactaagtgtagatcgccgacgattaatcaatagtaatttctactaagtgtagatttttttnnnnnnnnnnaagcttggcgtggatccgatatcaactagatcttgagacaaatggcagtattcatccacaattttaaaagaaaaggggggattggggggtacagtgcaggggaaagaatagtagacataatagcaacagacatacaaactaaag

SEQ ID NO: 15643 - DNA, 301 bp, Artificial Sequence
  Atm.2_NTC.13
  crRNA array
  misc_feature (148)..(157): n is a, c, g, or t
cttggctttatatatcttgtggaaaggacgaaacaccgtaatttctactaagtgtagatcctacgagggcacgagagactaatttctactaagtgtagatgaccgttgtatcgcgatcaataatttctactaagtgtagatttttttnnnnnnnnnnaagcttggcgtggatccgatatcaactagatcttgagacaaatggcagtattcatccacaattttaaaagaaaaggggggattggggggtacagtgcaggggaaagaatagtagacataatagcaacagacatacaaactaaag

SEQ ID NO: 15644 - DNA, 301 bp, Artificial Sequence
  Atm.2_NTC.14
  crRNA array
  misc_feature (148)..(157): n is a, c, g, or t
cttggctttatatatcttgtggaaaggacgaaacaccgtaatttctactaagtgtagatcctacgagggcacgagagactaatttctactaagtgtagatccgttcgtgcgatagtgttttaatttctactaagtgtagatttttttnnnnnnnnnnaagcttggcgtggatccgatatcaactagatcttgagacaaatggcagtattcatccacaattttaaaagaaaaggggggattggggggtacagtgcaggggaaagaatagtagacataatagcaacagacatacaaactaaag

SEQ ID NO: 15645 - DNA, 301 bp, Artificial Sequence
  Atm.2_NTC.15
  crRNA array
  misc_feature (148)..(157): n is a, c, g, or t
cttggctttatatatcttgtggaaaggacgaaacaccgtaatttctactaagtgtagatcctacgagggcacgagagactaatttctactaagtgtagatgttgtcgtgccgcgaatttataatttctactaagtgtagatttttttnnnnnnnnnnaagcttggcgtggatccgatatcaactagatcttgagacaaatggcagtattcatccacaattttaaaagaaaaggggggattggggggtacagtgcaggggaaagaatagtagacataatagcaacagacatacaaactaaag

SEQ ID NO: 15646 - DNA, 301 bp, Artificial Sequence
  Atm.2_NTC.16
  crRNA array
  misc_feature (148)..(157): n is a, c, g, or t
cttggctttatatatcttgtggaaaggacgaaacaccgtaatttctactaagtgtagatcctacgagggcacgagagactaatttctactaagtgtagatcggtacgttagacgaaaatttaatttctactaagtgtagatttttttnnnnnnnnnnaagcttggcgtggatccgatatcaactagatcttgagacaaatggcagtattcatccacaattttaaaagaaaaggggggattggggggtacagtgcaggggaaagaatagtagacataatagcaacagacatacaaactaaag

SEQ ID NO: 15647 - DNA, 301 bp, Artificial Sequence
  Atm.2_NTC.17
  crRNA array
  misc_feature (148)..(157): n is a, c, g, or t
cttggctttatatatcttgtggaaaggacgaaacaccgtaatttctactaagtgtagatcctacgagggcacgagagactaatttctactaagtgtagattatcgaacgctatcgaacgttaatttctactaagtgtagatttttttnnnnnnnnnnaagcttggcgtggatccgatatcaactagatcttgagacaaatggcagtattcatccacaattttaaaagaaaaggggggattggggggtacagtgcaggggaaagaatagtagacataatagcaacagacatacaaactaaag

SEQ ID NO: 15648 - DNA, 301 bp, Artificial Sequence
  Atm.2_NTC.18
  crRNA array
  misc_feature (148)..(157): n is a, c, g, or t
cttggctttatatatcttgtggaaaggacgaaacaccgtaatttctactaagtgtagatcctacgagggcacgagagactaatttctactaagtgtagattccggttacgaccggcaaaataatttctactaagtgtagatttttttnnnnnnnnnnaagcttggcgtggatccgatatcaactagatcttgagacaaatggcagtattcatccacaattttaaaagaaaaggggggattggggggtacagtgcaggggaaagaatagtagacataatagcaacagacatacaaactaaag

SEQ ID NO: 15649 - DNA, 301 bp, Artificial Sequence
  Atm.2_NTC.19
  crRNA array
  misc_feature (148)..(157): n is a, c, g, or t
cttggctttatatatcttgtggaaaggacgaaacaccgtaatttctactaagtgtagatcctacgagggcacgagagactaatttctactaagtgtagatcgtcgtagaacgatacccgataatttctactaagtgtagatttttttnnnnnnnnnnaagcttggcgtggatccgatatcaactagatcttgagacaaatggcagtattcatccacaattttaaaagaaaaggggggattggggggtacagtgcaggggaaagaatagtagacataatagcaacagacatacaaactaaag

SEQ ID NO: 15650 - DNA, 301 bp, Artificial Sequence
  Atm.2_NTC.2
  crRNA array
  misc_feature (148)..(157): n is a, c, g, or t
cttggctttatatatcttgtggaaaggacgaaacaccgtaatttctactaagtgtagatcctacgagggcacgagagactaatttctactaagtgtagatttatgtcgcgccgcgacccgtaatttctactaagtgtagatttttttnnnnnnnnnnaagcttggcgtggatccgatatcaactagatcttgagacaaatggcagtattcatccacaattttaaaagaaaaggggggattggggggtacagtgcaggggaaagaatagtagacataatagcaacagacatacaaactaaag

SEQ ID NO: 15651 - DNA, 301 bp, Artificial Sequence
  Atm.2_NTC.20
  crRNA array
  misc_feature (148)..(157): n is a, c, g, or t
cttggctttatatatcttgtggaaaggacgaaacaccgtaatttctactaagtgtagatcctacgagggcacgagagactaatttctactaagtgtagatattccggcgcgaccagaagataatttctactaagtgtagatttttttnnnnnnnnnnaagcttggcgtggatccgatatcaactagatcttgagacaaatggcagtattcatccacaattttaaaagaaaaggggggattggggggtacagtgcaggggaaagaatagtagacataatagcaacagacatacaaactaaag

SEQ ID NO: 15652 - DNA, 301 bp, Artificial Sequence
  Atm.2_NTC.21
  crRNA array
  misc_feature (148)..(157): n is a, c, g, or t
cttggctttatatatcttgtggaaaggacgaaacaccgtaatttctactaagtgtagatcctacgagggcacgagagactaatttctactaagtgtagatgtataacttcgcgcggtccgtaatttctactaagtgtagatttttttnnnnnnnnnnaagcttggcgtggatccgatatcaactagatcttgagacaaatggcagtattcatccacaattttaaaagaaaaggggggattggggggtacagtgcaggggaaagaatagtagacataatagcaacagacatacaaactaaag

SEQ ID NO: 15653 - DNA, 301 bp, Artificial Sequence
  Atm.2_NTC.22
  crRNA array
  misc_feature (148)..(157): n is a, c, g, or t
cttggctttatatatcttgtggaaaggacgaaacaccgtaatttctactaagtgtagatcctacgagggcacgagagactaatttctactaagtgtagatgcgcgtcaacgtaatgtgcctaatttctactaagtgtagatttttttnnnnnnnnnnaagcttggcgtggatccgatatcaactagatcttgagacaaatggcagtattcatccacaattttaaaagaaaaggggggattggggggtacagtgcaggggaaagaatagtagacataatagcaacagacatacaaactaaag

SEQ ID NO: 15654 - DNA, 301 bp, Artificial Sequence
  Atm.2_NTC.23
  crRNA array
  misc_feature (148)..(157): n is a, c, g, or t
cttggctttatatatcttgtggaaaggacgaaacaccgtaatttctactaagtgtagatcctacgagggcacgagagactaatttctactaagtgtagatacgcgctattatcgtaggtgtaatttctactaagtgtagatttttttnnnnnnnnnnaagcttggcgtggatccgatatcaactagatcttgagacaaatggcagtattcatccacaattttaaaagaaaaggggggattggggggtacagtgcaggggaaagaatagtagacataatagcaacagacatacaaactaaag

SEQ ID NO: 15655 - DNA, 301 bp, Artificial Sequence
  Atm.2_NTC.24
  crRNA array
  misc_feature (148)..(157): n is a, c, g, or t
cttggctttatatatcttgtggaaaggacgaaacaccgtaatttctactaagtgtagatcctacgagggcacgagagactaatttctactaagtgtagatactatcgacgttcgtcccggtaatttctactaagtgtagatttttttnnnnnnnnnnaagcttggcgtggatccgatatcaactagatcttgagacaaatggcagtattcatccacaattttaaaagaaaaggggggattggggggtacagtgcaggggaaagaatagtagacataatagcaacagacatacaaactaaag

SEQ ID NO: 15656 - DNA, 301 bp, Artificial Sequence
  Atm.2_NTC.25
  crRNA array
  misc_feature (148)..(157): n is a, c, g, or t
cttggctttatatatcttgtggaaaggacgaaacaccgtaatttctactaagtgtagatcctacgagggcacgagagactaatttctactaagtgtagattcgcgttatcgtgccgtgcgtaatttctactaagtgtagatttttttnnnnnnnnnnaagcttggcgtggatccgatatcaactagatcttgagacaaatggcagtattcatccacaattttaaaagaaaaggggggattggggggtacagtgcaggggaaagaatagtagacataatagcaacagacatacaaactaaag

SEQ ID NO: 15657 - DNA, 301 bp, Artificial Sequence
  Atm.2_NTC.26
  crRNA array
  misc_feature (148)..(157): n is a, c, g, or t
cttggctttatatatcttgtggaaaggacgaaacaccgtaatttctactaagtgtagatcctacgagggcacgagagactaatttctactaagtgtagatcgcgacggcggttttaacactaatttctactaagtgtagatttttttnnnnnnnnnnaagcttggcgtggatccgatatcaactagatcttgagacaaatggcagtattcatccacaattttaaaagaaaaggggggattggggggtacagtgcaggggaaagaatagtagacataatagcaacagacatacaaactaaag

SEQ ID NO: 15658 - DNA, 301 bp, Artificial Sequence
  Atm.2_NTC.27
  crRNA array
  misc_feature (148)..(157): n is a, c, g, or t
cttggctttatatatcttgtggaaaggacgaaacaccgtaatttctactaagtgtagatcctacgagggcacgagagactaatttctactaagtgtagatgtcgcgttgcgaccggcgcttaatttctactaagtgtagatttttttnnnnnnnnnnaagcttggcgtggatccgatatcaactagatcttgagacaaatggcagtattcatccacaattttaaaagaaaaggggggattggggggtacagtgcaggggaaagaatagtagacataatagcaacagacatacaaactaaag

SEQ ID NO: 15659 - DNA, 301 bp, Artificial Sequence
  Atm.2_NTC.28
  crRNA array
  misc_feature (148)..(157): n is a, c, g, or t
cttggctttatatatcttgtggaaaggacgaaacaccgtaatttctactaagtgtagatcctacgagggcacgagagactaatttctactaagtgtagataccgctaatcggcgtaaacttaatttctactaagtgtagatttttttnnnnnnnnnnaagcttggcgtggatccgatatcaactagatcttgagacaaatggcagtattcatccacaattttaaaagaaaaggggggattggggggtacagtgcaggggaaagaatagtagacataatagcaacagacatacaaactaaag

SEQ ID NO: 15660 - DNA, 301 bp, Artificial Sequence
  Atm.2_NTC.29
  crRNA array
  misc_feature (148)..(157): n is a, c, g, or t
cttggctttatatatcttgtggaaaggacgaaacaccgtaatttctactaagtgtagatcctacgagggcacgagagactaatttctactaagtgtagatcgcgatctataccgtctatataatttctactaagtgtagatttttttnnnnnnnnnnaagcttggcgtggatccgatatcaactagatcttgagacaaatggcagtattcatccacaattttaaaagaaaaggggggattggggggtacagtgcaggggaaagaatagtagacataatagcaacagacatacaaactaaag

SEQ ID NO: 15661 - DNA, 301 bp, Artificial Sequence
  Atm.2_NTC.3
  crRNA array
  misc_feature (148)..(157): n is a, c, g, or t
cttggctttatatatcttgtggaaaggacgaaacaccgtaatttctactaagtgtagatcctacgagggcacgagagactaatttctactaagtgtagattcgacgcgagacgacgtacataatttctactaagtgtagatttttttnnnnnnnnnnaagcttggcgtggatccgatatcaactagatcttgagacaaatggcagtattcatccacaattttaaaagaaaaggggggattggggggtacagtgcaggggaaagaatagtagacataatagcaacagacatacaaactaaag

SEQ ID NO: 15662 - DNA, 301 bp, Artificial Sequence
  Atm.2_NTC.30
  crRNA array
  misc_feature (148)..(157): n is a, c, g, or t
cttggctttatatatcttgtggaaaggacgaaacaccgtaatttctactaagtgtagatcctacgagggcacgagagactaatttctactaagtgtagatcgatcgtacgggtgtcctaataatttctactaagtgtagatttttttnnnnnnnnnnaagcttggcgtggatccgatatcaactagatcttgagacaaatggcagtattcatccacaattttaaaagaaaaggggggattggggggtacagtgcaggggaaagaatagtagacataatagcaacagacatacaaactaaag

SEQ ID NO: 15663 - DNA, 301 bp, Artificial Sequence
  Atm.2_NTC.31
  crRNA array
  misc_feature (148)..(157): n is a, c, g, or t
cttggctttatatatcttgtggaaaggacgaaacaccgtaatttctactaagtgtagatcctacgagggcacgagagactaatttctactaagtgtagatgccgaccgcgtgattgtaggtaatttctactaagtgtagatttttttnnnnnnnnnnaagcttggcgtggatccgatatcaactagatcttgagacaaatggcagtattcatccacaattttaaaagaaaaggggggattggggggtacagtgcaggggaaagaatagtagacataatagcaacagacatacaaactaaag

SEQ ID NO: 15664 - DNA, 301 bp, Artificial Sequence
  Atm.2_NTC.32
  crRNA array
  misc_feature (148)..(157): n is a, c, g, or t
cttggctttatatatcttgtggaaaggacgaaacaccgtaatttctactaagtgtagatcctacgagggcacgagagactaatttctactaagtgtagatgcacgttacgcccgggtcactaatttctactaagtgtagatttttttnnnnnnnnnnaagcttggcgtggatccgatatcaactagatcttgagacaaatggcagtattcatccacaattttaaaagaaaaggggggattggggggtacagtgcaggggaaagaatagtagacataatagcaacagacatacaaactaaag

SEQ ID NO: 15665 - DNA, 301 bp, Artificial Sequence
  Atm.2_NTC.33
  crRNA array
  misc_feature (148)..(157): n is a, c, g, or t
cttggctttatatatcttgtggaaaggacgaaacaccgtaatttctactaagtgtagatcctacgagggcacgagagactaatttctactaagtgtagattaagcgaccgacgcattcgctaatttctactaagtgtagatttttttnnnnnnnnnnaagcttggcgtggatccgatatcaactagatcttgagacaaatggcagtattcatccacaattttaaaagaaaaggggggattggggggtacagtgcaggggaaagaatagtagacataatagcaacagacatacaaactaaag

SEQ ID NO: 15666 - DNA, 301 bp, Artificial Sequence
  Atm.2_NTC.34
  crRNA array
  misc_feature (148)..(157): n is a, c, g, or t
cttggctttatatatcttgtggaaaggacgaaacaccgtaatttctactaagtgtagatcctacgagggcacgagagactaatttctactaagtgtagattagcgttcgacacgtgaaactaatttctactaagtgtagatttttttnnnnnnnnnnaagcttggcgtggatccgatatcaactagatcttgagacaaatggcagtattcatccacaattttaaaagaaaaggggggattggggggtacagtgcaggggaaagaatagtagacataatagcaacagacatacaaactaaag

SEQ ID NO: 15667 - DNA, 301 bp, Artificial Sequence
  Atm.2_NTC.35
  crRNA array
  misc_feature (148)..(157): n is a, c, g, or t
cttggctttatatatcttgtggaaaggacgaaacaccgtaatttctactaagtgtagatcctacgagggcacgagagactaatttctactaagtgtagattggcgcgtaatcgctattcgtaatttctactaagtgtagatttttttnnnnnnnnnnaagcttggcgtggatccgatatcaactagatcttgagacaaatggcagtattcatccacaattttaaaagaaaaggggggattggggggtacagtgcaggggaaagaatagtagacataatagcaacagacatacaaactaaag

SEQ ID NO: 15668 - DNA, 301 bp, Artificial Sequence
  Atm.2_NTC.36
  crRNA array
  misc_feature (148)..(157): n is a, c, g, or t
cttggctttatatatcttgtggaaaggacgaaacaccgtaatttctactaagtgtagatcctacgagggcacgagagactaatttctactaagtgtagatcaacccgccgtagcgggccttaatttctactaagtgtagatttttttnnnnnnnnnnaagcttggcgtggatccgatatcaactagatcttgagacaaatggcagtattcatccacaattttaaaagaaaaggggggattggggggtacagtgcaggggaaagaatagtagacataatagcaacagacatacaaactaaag

SEQ ID NO: 15669 - DNA, 301 bp, Artificial Sequence
  Atm.2_NTC.37
  crRNA array
  misc_feature (148)..(157): n is a, c, g, or t
cttggctttatatatcttgtggaaaggacgaaacaccgtaatttctactaagtgtagatcctacgagggcacgagagactaatttctactaagtgtagattttgcgttgacgcgattacttaatttctactaagtgtagatttttttnnnnnnnnnnaagcttggcgtggatccgatatcaactagatcttgagacaaatggcagtattcatccacaattttaaaagaaaaggggggattggggggtacagtgcaggggaaagaatagtagacataatagcaacagacatacaaactaaag

SEQ ID NO: 15670 - DNA, 301 bp, Artificial Sequence
  Atm.2_NTC.38
  crRNA array
  misc_feature (148)..(157): n is a, c, g, or t
cttggctttatatatcttgtggaaaggacgaaacaccgtaatttctactaagtgtagatcctacgagggcacgagagactaatttctactaagtgtagataacggagcgcgatactaccataatttctactaagtgtagatttttttnnnnnnnnnnaagcttggcgtggatccgatatcaactagatcttgagacaaatggcagtattcatccacaattttaaaagaaaaggggggattggggggtacagtgcaggggaaagaatagtagacataatagcaacagacatacaaactaaag

SEQ ID NO: 15671 - DNA, 301 bp, Artificial Sequence
  Atm.2_NTC.39
  crRNA array
  misc_feature (148)..(157): n is a, c, g, or t
cttggctttatatatcttgtggaaaggacgaaacaccgtaatttctactaagtgtagatcctacgagggcacgagagactaatttctactaagtgtagatccggacgttataacgtttcttaatttctactaagtgtagatttttttnnnnnnnnnnaagcttggcgtggatccgatatcaactagatcttgagacaaatggcagtattcatccacaattttaaaagaaaaggggggattggggggtacagtgcaggggaaagaatagtagacataatagcaacagacatacaaactaaag

SEQ ID NO: 15672 - DNA, 301 bp, Artificial Sequence
  Atm.2_NTC.4
  crRNA array
  misc_feature (148)..(157): n is a, c, g, or t
cttggctttatatatcttgtggaaaggacgaaacaccgtaatttctactaagtgtagatcctacgagggcacgagagactaatttctactaagtgtagatatacccgtcgcgaacgtgagtaatttctactaagtgtagatttttttnnnnnnnnnnaagcttggcgtggatccgatatcaactagatcttgagacaaatggcagtattcatccacaattttaaaagaaaaggggggattggggggtacagtgcaggggaaagaatagtagacataatagcaacagacatacaaactaaag

SEQ ID NO: 15673 - DNA, 301 bp, Artificial Sequence
  Atm.2_NTC.40
  crRNA array
  misc_feature (148)..(157): n is a, c, g, or t
cttggctttatatatcttgtggaaaggacgaaacaccgtaatttctactaagtgtagatcctacgagggcacgagagactaatttctactaagtgtagatattcgcgaacccggccggaataatttctactaagtgtagatttttttnnnnnnnnnnaagcttggcgtggatccgatatcaactagatcttgagacaaatggcagtattcatccacaattttaaaagaaaaggggggattggggggtacagtgcaggggaaagaatagtagacataatagcaacagacatacaaactaaag

SEQ ID NO: 15674 - DNA, 301 bp, Artificial Sequence
  Atm.2_NTC.41
  crRNA array
  misc_feature (148)..(157): n is a, c, g, or t
cttggctttatatatcttgtggaaaggacgaaacaccgtaatttctactaagtgtagatcctacgagggcacgagagactaatttctactaagtgtagatttgatggcgcgacgcgttattaatttctactaagtgtagatttttttnnnnnnnnnnaagcttggcgtggatccgatatcaactagatcttgagacaaatggcagtattcatccacaattttaaaagaaaaggggggattggggggtacagtgcaggggaaagaatagtagacataatagcaacagacatacaaactaaag

SEQ ID NO: 15675 - DNA, 301 bp, Artificial Sequence
  Atm.2_NTC.42
  crRNA array
  misc_feature (148)..(157): n is a, c, g, or t
cttggctttatatatcttgtggaaaggacgaaacaccgtaatttctactaagtgtagatcctacgagggcacgagagactaatttctactaagtgtagatggtcaaatcgcggcgataactaatttctactaagtgtagatttttttnnnnnnnnnnaagcttggcgtggatccgatatcaactagatcttgagacaaatggcagtattcatccacaattttaaaagaaaaggggggattggggggtacagtgcaggggaaagaatagtagacataatagcaacagacatacaaactaaag

SEQ ID NO: 15676 - DNA, 301 bp, Artificial Sequence
  Atm.2_NTC.43
  crRNA array
  misc_feature (148)..(157): n is a, c, g, or t
cttggctttatatatcttgtggaaaggacgaaacaccgtaatttctactaagtgtagatcctacgagggcacgagagactaatttctactaagtgtagatcgactcgcgcattgaactggtaatttctactaagtgtagatttttttnnnnnnnnnnaagcttggcgtggatccgatatcaactagatcttgagacaaatggcagtattcatccacaattttaaaagaaaaggggggattggggggtacagtgcaggggaaagaatagtagacataatagcaacagacatacaaactaaag

SEQ ID NO: 15677 - DNA, 301 bp, Artificial Sequence
  Atm.2_NTC.44
  crRNA array
  misc_feature (148)..(157): n is a, c, g, or t
cttggctttatatatcttgtggaaaggacgaaacaccgtaatttctactaagtgtagatcctacgagggcacgagagactaatttctactaagtgtagatagcgtcgtacgatttatcgttaatttctactaagtgtagatttttttnnnnnnnnnnaagcttggcgtggatccgatatcaactagatcttgagacaaatggcagtattcatccacaattttaaaagaaaaggggggattggggggtacagtgcaggggaaagaatagtagacataatagcaacagacatacaaactaaag

SEQ ID NO: 15678 - DNA, 301 bp, Artificial Sequence
  Atm.2_NTC.45
  crRNA array
  misc_feature (148)..(157): n is a, c, g, or t
cttggctttatatatcttgtggaaaggacgaaacaccgtaatttctactaagtgtagatcctacgagggcacgagagactaatttctactaagtgtagatcggaacgcgtgatactagggtaatttctactaagtgtagatttttttnnnnnnnnnnaagcttggcgtggatccgatatcaactagatcttgagacaaatggcagtattcatccacaattttaaaagaaaaggggggattggggggtacagtgcaggggaaagaatagtagacataatagcaacagacatacaaactaaag

SEQ ID NO: 15679 - DNA, 301 bp, Artificial Sequence
  Atm.2_NTC.46
  crRNA array
  misc_feature (148)..(157): n is a, c, g, or t
cttggctttatatatcttgtggaaaggacgaaacaccgtaatttctactaagtgtagatcctacgagggcacgagagactaatttctactaagtgtagatagcgggtcgtagacgcgcggtaatttctactaagtgtagatttttttnnnnnnnnnnaagcttggcgtggatccgatatcaactagatcttgagacaaatggcagtattcatccacaattttaaaagaaaaggggggattggggggtacagtgcaggggaaagaatagtagacataatagcaacagacatacaaactaaag

SEQ ID NO: 15680 - DNA, 301 bp, Artificial Sequence
  Atm.2_NTC.47
  crRNA array
  misc_feature (148)..(157): n is a, c, g, or t
cttggctttatatatcttgtggaaaggacgaaacaccgtaatttctactaagtgtagatcctacgagggcacgagagactaatttctactaagtgtagattctcgtatcgcgattgttaataatttctactaagtgtagatttttttnnnnnnnnnnaagcttggcgtggatccgatatcaactagatcttgagacaaatggcagtattcatccacaattttaaaagaaaaggggggattggggggtacagtgcaggggaaagaatagtagacataatagcaacagacatacaaactaaag

SEQ ID NO: 15681 - DNA, 301 bp, Artificial Sequence
  Atm.2_NTC.48
  crRNA array
  misc_feature (148)..(157): n is a, c, g, or t
cttggctttatatatcttgtggaaaggacgaaacaccgtaatttctactaagtgtagatcctacgagggcacgagagactaatttctactaagtgtagatcggtcgactacggctgttagtaatttctactaagtgtagatttttttnnnnnnnnnnaagcttggcgtggatccgatatcaactagatcttgagacaaatggcagtattcatccacaattttaaaagaaaaggggggattggggggtacagtgcaggggaaagaatagtagacataatagcaacagacatacaaactaaag

SEQ ID NO: 15682 - DNA, 301 bp, Artificial Sequence
  Atm.2_NTC.49
  crRNA array
  misc_feature (148)..(157): n is a, c, g, or t
cttggctttatatatcttgtggaaaggacgaaacaccgtaatttctactaagtgtagatcctacgagggcacgagagactaatttctactaagtgtagattcggggcgcgtcaactgaattaatttctactaagtgtagatttttttnnnnnnnnnnaagcttggcgtggatccgatatcaactagatcttgagacaaatggcagtattcatccacaattttaaaagaaaaggggggattggggggtacagtgcaggggaaagaatagtagacataatagcaacagacatacaaactaaag

SEQ ID NO: 15683 - DNA, 301 bp, Artificial Sequence
  Atm.2_NTC.5
  crRNA array
  misc_feature (148)..(157): n is a, c, g, or t
cttggctttatatatcttgtggaaaggacgaaacaccgtaatttctactaagtgtagatcctacgagggcacgagagactaatttctactaagtgtagatgcttacgcgtcgcgaatgtataatttctactaagtgtagatttttttnnnnnnnnnnaagcttggcgtggatccgatatcaactagatcttgagacaaatggcagtattcatccacaattttaaaagaaaaggggggattggggggtacagtgcaggggaaagaatagtagacataatagcaacagacatacaaactaaag

SEQ ID NO: 15684 - DNA, 301 bp, Artificial Sequence
  Atm.2_NTC.50
  crRNA array
  misc_feature (148)..(157): n is a, c, g, or t
cttggctttatatatcttgtggaaaggacgaaacaccgtaatttctactaagtgtagatcctacgagggcacgagagactaatttctactaagtgtagatattgccgctcgcgcaaaatctaatttctactaagtgtagatttttttnnnnnnnnnnaagcttggcgtggatccgatatcaactagatcttgagacaaatggcagtattcatccacaattttaaaagaaaaggggggattggggggtacagtgcaggggaaagaatagtagacataatagcaacagacatacaaactaaag

SEQ ID NO: 15685 - DNA, 301 bp, Artificial Sequence
  Atm.2_NTC.51
  crRNA array
  misc_feature (148)..(157): n is a, c, g, or t
cttggctttatatatcttgtggaaaggacgaaacaccgtaatttctactaagtgtagatcctacgagggcacgagagactaatttctactaagtgtagattaacgcgcaacacgccaatgtaatttctactaagtgtagatttttttnnnnnnnnnnaagcttggcgtggatccgatatcaactagatcttgagacaaatggcagtattcatccacaattttaaaagaaaaggggggattggggggtacagtgcaggggaaagaatagtagacataatagcaacagacatacaaactaaag

SEQ ID NO: 15686 - DNA, 301 bp, Artificial Sequence
  Atm.2_NTC.6
  crRNA array
  misc_feature (148)..(157): n is a, c, g, or t
cttggctttatatatcttgtggaaaggacgaaacaccgtaatttctactaagtgtagatcctacgagggcacgagagactaatttctactaagtgtagatcgaatcgcgcctacgggaattaatttctactaagtgtagatttttttnnnnnnnnnnaagcttggcgtggatccgatatcaactagatcttgagacaaatggcagtattcatccacaattttaaaagaaaaggggggattggggggtacagtgcaggggaaagaatagtagacataatagcaacagacatacaaactaaag

SEQ ID NO: 15687 - DNA, 301 bp, Artificial Sequence
  Atm.2_NTC.7
  crRNA array
  misc_feature (148)..(157): n is a, c, g, or t
cttggctttatatatcttgtggaaaggacgaaacaccgtaatttctactaagtgtagatcctacgagggcacgagagactaatttctactaagtgtagatcgccgaacggataagactattaatttctactaagtgtagatttttttnnnnnnnnnnaagcttggcgtggatccgatatcaactagatcttgagacaaatggcagtattcatccacaattttaaaagaaaaggggggattggggggtacagtgcaggggaaagaatagtagacataatagcaacagacatacaaactaaag

SEQ ID NO: 15688 - DNA, 301 bp, Artificial Sequence
  Atm.2_NTC.8
  crRNA array
  misc_feature (148)..(157): n is a, c, g, or t
cttggctttatatatcttgtggaaaggacgaaacaccgtaatttctactaagtgtagatcctacgagggcacgagagactaatttctactaagtgtagatcgaccgaggttacgctgggataatttctactaagtgtagatttttttnnnnnnnnnnaagcttggcgtggatccgatatcaactagatcttgagacaaatggcagtattcatccacaattttaaaagaaaaggggggattggggggtacagtgcaggggaaagaatagtagacataatagcaacagacatacaaactaaag

SEQ ID NO: 15689 - DNA, 301 bp, Artificial Sequence
  Atm.2_NTC.9
  crRNA array
  misc_feature (148)..(157): n is a, c, g, or t
cttggctttatatatcttgtggaaaggacgaaacaccgtaatttctactaagtgtagatcctacgagggcacgagagactaatttctactaagtgtagatatcgccgtacggctatggcataatttctactaagtgtagatttttttnnnnnnnnnnaagcttggcgtggatccgatatcaactagatcttgagacaaatggcagtattcatccacaattttaaaagaaaaggggggattggggggtacagtgcaggggaaagaatagtagacataatagcaacagacatacaaactaaag

SEQ ID NO: 15690 - DNA, 301 bp, Artificial Sequence
  Atm.3_NTC.0
  crRNA array
  misc_feature (148)..(157): n is a, c, g, or t
cttggctttatatatcttgtggaaaggacgaaacaccgtaatttctactaagtgtagattgaaagtctccgatatgccataatttctactaagtgtagattatagcgtcgcgcgctaatttaatttctactaagtgtagatttttttnnnnnnnnnnaagcttggcgtggatccgatatcaactagatcttgagacaaatggcagtattcatccacaattttaaaagaaaaggggggattggggggtacagtgcaggggaaagaatagtagacataatagcaacagacatacaaactaaag

SEQ ID NO: 15691 - DNA, 301 bp, Artificial Sequence
  Atm.3_NTC.1
  crRNA array
  misc_feature (148)..(157): n is a, c, g, or t
cttggctttatatatcttgtggaaaggacgaaacaccgtaatttctactaagtgtagattgaaagtctccgatatgccataatttctactaagtgtagatcgcgtaaccgttccggctcctaatttctactaagtgtagatttttttnnnnnnnnnnaagcttggcgtggatccgatatcaactagatcttgagacaaatggcagtattcatccacaattttaaaagaaaaggggggattggggggtacagtgcaggggaaagaatagtagacataatagcaacagacatacaaactaaag

SEQ ID NO: 15692 - DNA, 301 bp, Artificial Sequence
  Atm.3_NTC.10
  crRNA array
  misc_feature (148)..(157): n is a, c, g, or t
cttggctttatatatcttgtggaaaggacgaaacaccgtaatttctactaagtgtagattgaaagtctccgatatgccataatttctactaagtgtagatcgctaagttcgcgcgggccgtaatttctactaagtgtagatttttttnnnnnnnnnnaagcttggcgtggatccgatatcaactagatcttgagacaaatggcagtattcatccacaattttaaaagaaaaggggggattggggggtacagtgcaggggaaagaatagtagacataatagcaacagacatacaaactaaag

SEQ ID NO: 15693 - DNA, 301 bp, Artificial Sequence
  Atm.3_NTC.11
  crRNA array
  misc_feature (148)..(157): n is a, c, g, or t
cttggctttatatatcttgtggaaaggacgaaacaccgtaatttctactaagtgtagattgaaagtctccgatatgccataatttctactaagtgtagatcgttcgtcgacgaagcaatctaatttctactaagtgtagatttttttnnnnnnnnnnaagcttggcgtggatccgatatcaactagatcttgagacaaatggcagtattcatccacaattttaaaagaaaaggggggattggggggtacagtgcaggggaaagaatagtagacataatagcaacagacatacaaactaaag

SEQ ID NO: 15694 - DNA, 301 bp, Artificial Sequence
  Atm.3_NTC.12
  crRNA array
  misc_feature (148)..(157): n is a, c, g, or t
cttggctttatatatcttgtggaaaggacgaaacaccgtaatttctactaagtgtagattgaaagtctccgatatgccataatttctactaagtgtagatcgccgacgattaatcaatagtaatttctactaagtgtagatttttttnnnnnnnnnnaagcttggcgtggatccgatatcaactagatcttgagacaaatggcagtattcatccacaattttaaaagaaaaggggggattggggggtacagtgcaggggaaagaatagtagacataatagcaacagacatacaaactaaag

SEQ ID NO: 15695 - DNA, 301 bp, Artificial Sequence
  Atm.3_NTC.13
  crRNA array
  misc_feature (148)..(157): n is a, c, g, or t
cttggctttatatatcttgtggaaaggacgaaacaccgtaatttctactaagtgtagattgaaagtctccgatatgccataatttctactaagtgtagatgaccgttgtatcgcgatcaataatttctactaagtgtagatttttttnnnnnnnnnnaagcttggcgtggatccgatatcaactagatcttgagacaaatggcagtattcatccacaattttaaaagaaaaggggggattggggggtacagtgcaggggaaagaatagtagacataatagcaacagacatacaaactaaag

SEQ ID NO: 15696 - DNA, 301 bp, Artificial Sequence
  Atm.3_NTC.14
  crRNA array
  misc_feature (148)..(157): n is a, c, g, or t
cttggctttatatatcttgtggaaaggacgaaacaccgtaatttctactaagtgtagattgaaagtctccgatatgccataatttctactaagtgtagatccgttcgtgcgatagtgttttaatttctactaagtgtagatttttttnnnnnnnnnnaagcttggcgtggatccgatatcaactagatcttgagacaaatggcagtattcatccacaattttaaaagaaaaggggggattggggggtacagtgcaggggaaagaatagtagacataatagcaacagacatacaaactaaag

SEQ ID NO: 15697 - DNA, 301 bp, Artificial Sequence
  Atm.3_NTC.15
  crRNA array
  misc_feature (148)..(157): n is a, c, g, or t
cttggctttatatatcttgtggaaaggacgaaacaccgtaatttctactaagtgtagattgaaagtctccgatatgccataatttctactaagtgtagatgttgtcgtgccgcgaatttataatttctactaagtgtagatttttttnnnnnnnnnnaagcttggcgtggatccgatatcaactagatcttgagacaaatggcagtattcatccacaattttaaaagaaaaggggggattggggggtacagtgcaggggaaagaatagtagacataatagcaacagacatacaaactaaag

SEQ ID NO: 15698 - DNA, 301 bp, Artificial Sequence
  Atm.3_NTC.16
  crRNA array
  misc_feature (148)..(157): n is a, c, g, or t
cttggctttatatatcttgtggaaaggacgaaacaccgtaatttctactaagtgtagattgaaagtctccgatatgccataatttctactaagtgtagatcggtacgttagacgaaaatttaatttctactaagtgtagatttttttnnnnnnnnnnaagcttggcgtggatccgatatcaactagatcttgagacaaatggcagtattcatccacaattttaaaagaaaaggggggattggggggtacagtgcaggggaaagaatagtagacataatagcaacagacatacaaactaaag

SEQ ID NO: 15699 - DNA, 301 bp, Artificial Sequence
  Atm.3_NTC.17
  crRNA array
  misc_feature (148)..(157): n is a, c, g, or t
cttggctttatatatcttgtggaaaggacgaaacaccgtaatttctactaagtgtagattgaaagtctccgatatgccataatttctactaagtgtagattatcgaacgctatcgaacgttaatttctactaagtgtagatttttttnnnnnnnnnnaagcttggcgtggatccgatatcaactagatcttgagacaaatggcagtattcatccacaattttaaaagaaaaggggggattggggggtacagtgcaggggaaagaatagtagacataatagcaacagacatacaaactaaag

SEQ ID NO: 15700 - DNA, 301 bp, Artificial Sequence
  Atm.3_NTC.18
  crRNA array
  misc_feature (148)..(157): n is a, c, g, or t
cttggctttatatatcttgtggaaaggacgaaacaccgtaatttctactaagtgtagattgaaagtctccgatatgccataatttctactaagtgtagattccggttacgaccggcaaaataatttctactaagtgtagatttttttnnnnnnnnnnaagcttggcgtggatccgatatcaactagatcttgagacaaatggcagtattcatccacaattttaaaagaaaaggggggattggggggtacagtgcaggggaaagaatagtagacataatagcaacagacatacaaactaaag

SEQ ID NO: 15701 - DNA, 301 bp, Artificial Sequence
  Atm.3_NTC.19
  crRNA array
  misc_feature (148)..(157): n is a, c, g, or t
cttggctttatatatcttgtggaaaggacgaaacaccgtaatttctactaagtgtagattgaaagtctccgatatgccataatttctactaagtgtagatcgtcgtagaacgatacccgataatttctactaagtgtagatttttttnnnnnnnnnnaagcttggcgtggatccgatatcaactagatcttgagacaaatggcagtattcatccacaattttaaaagaaaaggggggattggggggtacagtgcaggggaaagaatagtagacataatagcaacagacatacaaactaaag

SEQ ID NO: 15702 - DNA, 301 bp, Artificial Sequence
  Atm.3_NTC.2
  crRNA array
  misc_feature (148)..(157): n is a, c, g, or t
cttggctttatatatcttgtggaaaggacgaaacaccgtaatttctactaagtgtagattgaaagtctccgatatgccataatttctactaagtgtagatttatgtcgcgccgcgacccgtaatttctactaagtgtagatttttttnnnnnnnnnnaagcttggcgtggatccgatatcaactagatcttgagacaaatggcagtattcatccacaattttaaaagaaaaggggggattggggggtacagtgcaggggaaagaatagtagacataatagcaacagacatacaaactaaag

SEQ ID NO: 15703 - DNA, 301 bp, Artificial Sequence
  Atm.3_NTC.20
  crRNA array
  misc_feature (148)..(157): n is a, c, g, or t
cttggctttatatatcttgtggaaaggacgaaacaccgtaatttctactaagtgtagattgaaagtctccgatatgccataatttctactaagtgtagatattccggcgcgaccagaagataatttctactaagtgtagatttttttnnnnnnnnnnaagcttggcgtggatccgatatcaactagatcttgagacaaatggcagtattcatccacaattttaaaagaaaaggggggattggggggtacagtgcaggggaaagaatagtagacataatagcaacagacatacaaactaaag

SEQ ID NO: 15704 - DNA, 301 bp, Artificial Sequence
  Atm.3_NTC.21
  crRNA array
  misc_feature (148)..(157): n is a, c, g, or t
cttggctttatatatcttgtggaaaggacgaaacaccgtaatttctactaagtgtagattgaaagtctccgatatgccataatttctactaagtgtagatgtataacttcgcgcggtccgtaatttctactaagtgtagatttttttnnnnnnnnnnaagcttggcgtggatccgatatcaactagatcttgagacaaatggcagtattcatccacaattttaaaagaaaaggggggattggggggtacagtgcaggggaaagaatagtagacataatagcaacagacatacaaactaaag

SEQ ID NO: 15705 - DNA, 301 bp, Artificial Sequence
  Atm.3_NTC.22
  crRNA array
  misc_feature (148)..(157): n is a, c, g, or t
cttggctttatatatcttgtggaaaggacgaaacaccgtaatttctactaagtgtagattgaaagtctccgatatgccataatttctactaagtgtagatgcgcgtcaacgtaatgtgcctaatttctactaagtgtagatttttttnnnnnnnnnnaagcttggcgtggatccgatatcaactagatcttgagacaaatggcagtattcatccacaattttaaaagaaaaggggggattggggggtacagtgcaggggaaagaatagtagacataatagcaacagacatacaaactaaag

SEQ ID NO: 15706 - DNA, 301 bp, Artificial Sequence
  Atm.3_NTC.23
  crRNA array
  misc_feature (148)..(157): n is a, c, g, or t
cttggctttatatatcttgtggaaaggacgaaacaccgtaatttctactaagtgtagattgaaagtctccgatatgccataatttctactaagtgtagatacgcgctattatcgtaggtgtaatttctactaagtgtagatttttttnnnnnnnnnnaagcttggcgtggatccgatatcaactagatcttgagacaaatggcagtattcatccacaattttaaaagaaaaggggggattggggggtacagtgcaggggaaagaatagtagacataatagcaacagacatacaaactaaag

SEQ ID NO: 15707 - DNA, 301 bp, Artificial Sequence
  Atm.3_NTC.24
  crRNA array
  misc_feature (148)..(157): n is a, c, g, or t
cttggctttatatatcttgtggaaaggacgaaacaccgtaatttctactaagtgtagattgaaagtctccgatatgccataatttctactaagtgtagatactatcgacgttcgtcccggtaatttctactaagtgtagatttttttnnnnnnnnnnaagcttggcgtggatccgatatcaactagatcttgagacaaatggcagtattcatccacaattttaaaagaaaaggggggattggggggtacagtgcaggggaaagaatagtagacataatagcaacagacatacaaactaaag

SEQ ID NO: 15708 - DNA, 301 bp, Artificial Sequence
  Atm.3_NTC.25
  crRNA array
  misc_feature (148)..(157): n is a, c, g, or t
cttggctttatatatcttgtggaaaggacgaaacaccgtaatttctactaagtgtagattgaaagtctccgatatgccataatttctactaagtgtagattcgcgttatcgtgccgtgcgtaatttctactaagtgtagatttttttnnnnnnnnnnaagcttggcgtggatccgatatcaactagatcttgagacaaatggcagtattcatccacaattttaaaagaaaaggggggattggggggtacagtgcaggggaaagaatagtagacataatagcaacagacatacaaactaaag

SEQ ID NO: 15709 - DNA, 301 bp, Artificial Sequence
  Atm.3_NTC.26
  crRNA array
  misc_feature (148)..(157): n is a, c, g, or t
cttggctttatatatcttgtggaaaggacgaaacaccgtaatttctactaagtgtagattgaaagtctccgatatgccataatttctactaagtgtagatcgcgacggcggttttaacactaatttctactaagtgtagatttttttnnnnnnnnnnaagcttggcgtggatccgatatcaactagatcttgagacaaatggcagtattcatccacaattttaaaagaaaaggggggattggggggtacagtgcaggggaaagaatagtagacataatagcaacagacatacaaactaaag

SEQ ID NO: 15710 - DNA, 301 bp, Artificial Sequence
  Atm.3_NTC.27
  crRNA array
  misc_feature (148)..(157): n is a, c, g, or t
cttggctttatatatcttgtggaaaggacgaaacaccgtaatttctactaagtgtagattgaaagtctccgatatgccataatttctactaagtgtagatgtcgcgttgcgaccggcgcttaatttctactaagtgtagatttttttnnnnnnnnnnaagcttggcgtggatccgatatcaactagatcttgagacaaatggcagtattcatccacaattttaaaagaaaaggggggattggggggtacagtgcaggggaaagaatagtagacataatagcaacagacatacaaactaaag

SEQ ID NO: 15711 - DNA, 301 bp, Artificial Sequence
  Atm.3_NTC.28
  crRNA array
  misc_feature (148)..(157): n is a, c, g, or t
cttggctttatatatcttgtggaaaggacgaaacaccgtaatttctactaagtgtagattgaaagtctccgatatgccataatttctactaagtgtagataccgctaatcggcgtaaacttaatttctactaagtgtagatttttttnnnnnnnnnnaagcttggcgtggatccgatatcaactagatcttgagacaaatggcagtattcatccacaattttaaaagaaaaggggggattggggggtacagtgcaggggaaagaatagtagacataatagcaacagacatacaaactaaag

SEQ ID NO: 15712 - DNA, 301 bp, Artificial Sequence
  Atm.3_NTC.29
  crRNA array
  misc_feature (148)..(157): n is a, c, g, or t
cttggctttatatatcttgtggaaaggacgaaacaccgtaatttctactaagtgtagattgaaagtctccgatatgccataatttctactaagtgtagatcgcgatctataccgtctatataatttctactaagtgtagatttttttnnnnnnnnnnaagcttggcgtggatccgatatcaactagatcttgagacaaatggcagtattcatccacaattttaaaagaaaaggggggattggggggtacagtgcaggggaaagaatagtagacataatagcaacagacatacaaactaaag

SEQ ID NO: 15713 - DNA, 301 bp, Artificial Sequence
  Atm.3_NTC.3
  crRNA array
  misc_feature (148)..(157): n is a, c, g, or t
cttggctttatatatcttgtggaaaggacgaaacaccgtaatttctactaagtgtagattgaaagtctccgatatgccataatttctactaagtgtagattcgacgcgagacgacgtacataatttctactaagtgtagatttttttnnnnnnnnnnaagcttggcgtggatccgatatcaactagatcttgagacaaatggcagtattcatccacaattttaaaagaaaaggggggattggggggtacagtgcaggggaaagaatagtagacataatagcaacagacatacaaactaaag

SEQ ID NO: 15714 - DNA, 301 bp, Artificial Sequence
  Atm.3_NTC.30
  crRNA array
  misc_feature (148)..(157): n is a, c, g, or t
cttggctttatatatcttgtggaaaggacgaaacaccgtaatttctactaagtgtagattgaaagtctccgatatgccataatttctactaagtgtagatcgatcgtacgggtgtcctaataatttctactaagtgtagatttttttnnnnnnnnnnaagcttggcgtggatccgatatcaactagatcttgagacaaatggcagtattcatccacaattttaaaagaaaaggggggattggggggtacagtgcaggggaaagaatagtagacataatagcaacagacatacaaactaaag

SEQ ID NO: 15715 - DNA, 301 bp, Artificial Sequence
  Atm.3_NTC.31
  crRNA array
  misc_feature (148)..(157): n is a, c, g, or t
cttggctttatatatcttgtggaaaggacgaaacaccgtaatttctactaagtgtagattgaaagtctccgatatgccataatttctactaagtgtagatgccgaccgcgtgattgtaggtaatttctactaagtgtagatttttttnnnnnnnnnnaagcttggcgtggatccgatatcaactagatcttgagacaaatggcagtattcatccacaattttaaaagaaaaggggggattggggggtacagtgcaggggaaagaatagtagacataatagcaacagacatacaaactaaag

SEQ ID NO: 15716 - DNA, 301 bp, Artificial Sequence
  Atm.3_NTC.32
  crRNA array
  misc_feature (148)..(157): n is a, c, g, or t
cttggctttatatatcttgtggaaaggacgaaacaccgtaatttctactaagtgtagattgaaagtctccgatatgccataatttctactaagtgtagatgcacgttacgcccgggtcactaatttctactaagtgtagatttttttnnnnnnnnnnaagcttggcgtggatccgatatcaactagatcttgagacaaatggcagtattcatccacaattttaaaagaaaaggggggattggggggtacagtgcaggggaaagaatagtagacataatagcaacagacatacaaactaaag

SEQ ID NO: 15717 - DNA, 301 bp, Artificial Sequence
  Atm.3_NTC.33
  crRNA array
  misc_feature (148)..(157): n is a, c, g, or t
cttggctttatatatcttgtggaaaggacgaaacaccgtaatttctactaagtgtagattgaaagtctccgatatgccataatttctactaagtgtagattaagcgaccgacgcattcgctaatttctactaagtgtagatttttttnnnnnnnnnnaagcttggcgtggatccgatatcaactagatcttgagacaaatggcagtattcatccacaattttaaaagaaaaggggggattggggggtacagtgcaggggaaagaatagtagacataatagcaacagacatacaaactaaag

SEQ ID NO: 15718 - DNA, 301 bp, Artificial Sequence
  Atm.3_NTC.34
  crRNA array
  misc_feature (148)..(157): n is a, c, g, or t
cttggctttatatatcttgtggaaaggacgaaacaccgtaatttctactaagtgtagattgaaagtctccgatatgccataatttctactaagtgtagattagcgttcgacacgtgaaactaatttctactaagtgtagatttttttnnnnnnnnnnaagcttggcgtggatccgatatcaactagatcttgagacaaatggcagtattcatccacaattttaaaagaaaaggggggattggggggtacagtgcaggggaaagaatagtagacataatagcaacagacatacaaactaaag

SEQ ID NO: 15719 - DNA, 301 bp, Artificial Sequence
  Atm.3_NTC.35
  crRNA array
  misc_feature (148)..(157): n is a, c, g, or t
cttggctttatatatcttgtggaaaggacgaaacaccgtaatttctactaagtgtagattgaaagtctccgatatgccataatttctactaagtgtagattggcgcgtaatcgctattcgtaatttctactaagtgtagatttttttnnnnnnnnnnaagcttggcgtggatccgatatcaactagatcttgagacaaatggcagtattcatccacaattttaaaagaaaaggggggattggggggtacagtgcaggggaaagaatagtagacataatagcaacagacatacaaactaaag

SEQ ID NO: 15720 - DNA, 301 bp, Artificial Sequence
  Atm.3_NTC.36
  crRNA array
  misc_feature (148)..(157): n is a, c, g, or t
cttggctttatatatcttgtggaaaggacgaaacaccgtaatttctactaagtgtagattgaaagtctccgatatgccataatttctactaagtgtagatcaacccgccgtagcgggccttaatttctactaagtgtagatttttttnnnnnnnnnnaagcttggcgtggatccgatatcaactagatcttgagacaaatggcagtattcatccacaattttaaaagaaaaggggggattggggggtacagtgcaggggaaagaatagtagacataatagcaacagacatacaaactaaag

SEQ ID NO: 15721 - DNA, 301 bp, Artificial Sequence
  Atm.3_NTC.37
  crRNA array
  misc_feature (148)..(157): n is a, c, g, or t
cttggctttatatatcttgtggaaaggacgaaacaccgtaatttctactaagtgtagattgaaagtctccgatatgccataatttctactaagtgtagattttgcgttgacgcgattacttaatttctactaagtgtagatttttttnnnnnnnnnnaagcttggcgtggatccgatatcaactagatcttgagacaaatggcagtattcatccacaattttaaaagaaaaggggggattggggggtacagtgcaggggaaagaatagtagacataatagcaacagacatacaaactaaag

SEQ ID NO: 15722 - DNA, 301 bp, Artificial Sequence
  Atm.3_NTC.38
  crRNA array
  misc_feature (148)..(157): n is a, c, g, or t
cttggctttatatatcttgtggaaaggacgaaacaccgtaatttctactaagtgtagattgaaagtctccgatatgccataatttctactaagtgtagataacggagcgcgatactaccataatttctactaagtgtagatttttttnnnnnnnnnnaagcttggcgtggatccgatatcaactagatcttgagacaaatggcagtattcatccacaattttaaaagaaaaggggggattggggggtacagtgcaggggaaagaatagtagacataatagcaacagacatacaaactaaag

SEQ ID NO: 15723 - DNA, 301 bp, Artificial Sequence
  Atm.3_NTC.39
  crRNA array
  misc_feature (148)..(157): n is a, c, g, or t
cttggctttatatatcttgtggaaaggacgaaacaccgtaatttctactaagtgtagattgaaagtctccgatatgccataatttctactaagtgtagatccggacgttataacgtttcttaatttctactaagtgtagatttttttnnnnnnnnnnaagcttggcgtggatccgatatcaactagatcttgagacaaatggcagtattcatccacaattttaaaagaaaaggggggattggggggtacagtgcaggggaaagaatagtagacataatagcaacagacatacaaactaaag

SEQ ID NO: 15724 - DNA, 301 bp, Artificial Sequence
  Atm.3_NTC.4
  crRNA array
  misc_feature (148)..(157): n is a, c, g, or t
cttggctttatatatcttgtggaaaggacgaaacaccgtaatttctactaagtgtagattgaaagtctccgatatgccataatttctactaagtgtagatatacccgtcgcgaacgtgagtaatttctactaagtgtagatttttttnnnnnnnnnnaagcttggcgtggatccgatatcaactagatcttgagacaaatggcagtattcatccacaattttaaaagaaaaggggggattggggggtacagtgcaggggaaagaatagtagacataatagcaacagacatacaaactaaag

SEQ ID NO: 15725 - DNA, 301 bp, Artificial Sequence
  Atm.3_NTC.40
  crRNA array
  misc_feature (148)..(157): n is a, c, g, or t
cttggctttatatatcttgtggaaaggacgaaacaccgtaatttctactaagtgtagattgaaagtctccgatatgccataatttctactaagtgtagatattcgcgaacccggccggaataatttctactaagtgtagatttttttnnnnnnnnnnaagcttggcgtggatccgatatcaactagatcttgagacaaatggcagtattcatccacaattttaaaagaaaaggggggattggggggtacagtgcaggggaaagaatagtagacataatagcaacagacatacaaactaaag

SEQ ID NO: 15726 - DNA, 301 bp, Artificial Sequence
  Atm.3_NTC.41
  crRNA array
  misc_feature (148)..(157): n is a, c, g, or t
cttggctttatatatcttgtggaaaggacgaaacaccgtaatttctactaagtgtagattgaaagtctccgatatgccataatttctactaagtgtagatttgatggcgcgacgcgttattaatttctactaagtgtagatttttttnnnnnnnnnnaagcttggcgtggatccgatatcaactagatcttgagacaaatggcagtattcatccacaattttaaaagaaaaggggggattggggggtacagtgcaggggaaagaatagtagacataatagcaacagacatacaaactaaag

SEQ ID NO: 15727 - DNA, 301 bp, Artificial Sequence
  Atm.3_NTC.42
  crRNA array
  misc_feature (148)..(157): n is a, c, g, or t
cttggctttatatatcttgtggaaaggacgaaacaccgtaatttctactaagtgtagattgaaagtctccgatatgccataatttctactaagtgtagatggtcaaatcgcggcgataactaatttctactaagtgtagatttttttnnnnnnnnnnaagcttggcgtggatccgatatcaactagatcttgagacaaatggcagtattcatccacaattttaaaagaaaaggggggattggggggtacagtgcaggggaaagaatagtagacataatagcaacagacatacaaactaaag

SEQ ID NO: 15728 - DNA, 301 bp, Artificial Sequence
  Atm.3_NTC.43
  crRNA array
  misc_feature (148)..(157): n is a, c, g, or t
cttggctttatatatcttgtggaaaggacgaaacaccgtaatttctactaagtgtagattgaaagtctccgatatgccataatttctactaagtgtagatcgactcgcgcattgaactggtaatttctactaagtgtagatttttttnnnnnnnnnnaagcttggcgtggatccgatatcaactagatcttgagacaaatggcagtattcatccacaattttaaaagaaaaggggggattggggggtacagtgcaggggaaagaatagtagacataatagcaacagacatacaaactaaag

SEQ ID NO: 15729 - DNA, 301 bp, Artificial Sequence
  Atm.3_NTC.44
  crRNA array
  misc_feature (148)..(157): n is a, c, g, or t
cttggctttatatatcttgtggaaaggacgaaacaccgtaatttctactaagtgtagattgaaagtctccgatatgccataatttctactaagtgtagatagcgtcgtacgatttatcgttaatttctactaagtgtagatttttttnnnnnnnnnnaagcttggcgtggatccgatatcaactagatcttgagacaaatggcagtattcatccacaattttaaaagaaaaggggggattggggggtacagtgcaggggaaagaatagtagacataatagcaacagacatacaaactaaag

SEQ ID NO: 15730 - DNA, 301 bp, Artificial Sequence
  Atm.3_NTC.45
  crRNA array
  misc_feature (148)..(157): n is a, c, g, or t
cttggctttatatatcttgtggaaaggacgaaacaccgtaatttctactaagtgtagattgaaagtctccgatatgccataatttctactaagtgtagatcggaacgcgtgatactagggtaatttctactaagtgtagatttttttnnnnnnnnnnaagcttggcgtggatccgatatcaactagatcttgagacaaatggcagtattcatccacaattttaaaagaaaaggggggattggggggtacagtgcaggggaaagaatagtagacataatagcaacagacatacaaactaaag

SEQ ID NO: 15731 - DNA, 301 bp, Artificial Sequence
  Atm.3_NTC.46
  crRNA array
  misc_feature (148)..(157): n is a, c, g, or t
cttggctttatatatcttgtggaaaggacgaaacaccgtaatttctactaagtgtagattgaaagtctccgatatgccataatttctactaagtgtagatagcgggtcgtagacgcgcggtaatttctactaagtgtagatttttttnnnnnnnnnnaagcttggcgtggatccgatatcaactagatcttgagacaaatggcagtattcatccacaattttaaaagaaaaggggggattggggggtacagtgcaggggaaagaatagtagacataatagcaacagacatacaaactaaag

SEQ ID NO: 15732 - DNA, 301 bp, Artificial Sequence
  Atm.3_NTC.47
  crRNA array
  misc_feature (148)..(157): n is a, c, g, or t
cttggctttatatatcttgtggaaaggacgaaacaccgtaatttctactaagtgtagattgaaagtctccgatatgccataatttctactaagtgtagattctcgtatcgcgattgttaataatttctactaagtgtagatttttttnnnnnnnnnnaagcttggcgtggatccgatatcaactagatcttgagacaaatggcagtattcatccacaattttaaaagaaaaggggggattggggggtacagtgcaggggaaagaatagtagacataatagcaacagacatacaaactaaag

SEQ ID NO: 15733 - DNA, 301 bp, Artificial Sequence
  Atm.3_NTC.48
  crRNA array
  misc_feature (148)..(157): n is a, c, g, or t
cttggctttatatatcttgtggaaaggacgaaacaccgtaatttctactaagtgtagattgaaagtctccgatatgccataatttctactaagtgtagatcggtcgactacggctgttagtaatttctactaagtgtagatttttttnnnnnnnnnnaagcttggcgtggatccgatatcaactagatcttgagacaaatggcagtattcatccacaattttaaaagaaaaggggggattggggggtacagtgcaggggaaagaatagtagacataatagcaacagacatacaaactaaag

SEQ ID NO: 15734 - DNA, 301 bp, Artificial Sequence
  Atm.3_NTC.49
  crRNA array
  misc_feature (148)..(157): n is a, c, g, or t
cttggctttatatatcttgtggaaaggacgaaacaccgtaatttctactaagtgtagattgaaagtctccgatatgccataatttctactaagtgtagattcggggcgcgtcaactgaattaatttctactaagtgtagatttttttnnnnnnnnnnaagcttggcgtggatccgatatcaactagatcttgagacaaatggcagtattcatccacaattttaaaagaaaaggggggattggggggtacagtgcaggggaaagaatagtagacataatagcaacagacatacaaactaaag

SEQ ID NO: 15735 - DNA, 301 bp, Artificial Sequence
  Atm.3_NTC.5
  crRNA array
  misc_feature (148)..(157): n is a, c, g, or t
cttggctttatatatcttgtggaaaggacgaaacaccgtaatttctactaagtgtagattgaaagtctccgatatgccataatttctactaagtgtagatgcttacgcgtcgcgaatgtataatttctactaagtgtagatttttttnnnnnnnnnnaagcttggcgtggatccgatatcaactagatcttgagacaaatggcagtattcatccacaattttaaaagaaaaggggggattggggggtacagtgcaggggaaagaatagtagacataatagcaacagacatacaaactaaag

SEQ ID NO: 15736 - DNA, 301 bp, Artificial Sequence
  Atm.3_NTC.50
  crRNA array
  misc_feature (148)..(157): n is a, c, g, or t
cttggctttatatatcttgtggaaaggacgaaacaccgtaatttctactaagtgtagattgaaagtctccgatatgccataatttctactaagtgtagatattgccgctcgcgcaaaatctaatttctactaagtgtagatttttttnnnnnnnnnnaagcttggcgtggatccgatatcaactagatcttgagacaaatggcagtattcatccacaattttaaaagaaaaggggggattggggggtacagtgcaggggaaagaatagtagacataatagcaacagacatacaaactaaag

SEQ ID NO: 15737 - DNA, 301 bp, Artificial Sequence
  Atm.3_NTC.51
  crRNA array
  misc_feature (148)..(157): n is a, c, g, or t
cttggctttatatatcttgtggaaaggacgaaacaccgtaatttctactaagtgtagattgaaagtctccgatatgccataatttctactaagtgtagattaacgcgcaacacgccaatgtaatttctactaagtgtagatttttttnnnnnnnnnnaagcttggcgtggatccgatatcaactagatcttgagacaaatggcagtattcatccacaattttaaaagaaaaggggggattggggggtacagtgcaggggaaagaatagtagacataatagcaacagacatacaaactaaag

SEQ ID NO: 15738 - DNA, 301 bp, Artificial Sequence
  Atm.3_NTC.6
  crRNA array
  misc_feature (148)..(157): n is a, c, g, or t
cttggctttatatatcttgtggaaaggacgaaacaccgtaatttctactaagtgtagattgaaagtctccgatatgccataatttctactaagtgtagatcgaatcgcgcctacgggaattaatttctactaagtgtagatttttttnnnnnnnnnnaagcttggcgtggatccgatatcaactagatcttgagacaaatggcagtattcatccacaattttaaaagaaaaggggggattggggggtacagtgcaggggaaagaatagtagacataatagcaacagacatacaaactaaag

SEQ ID NO: 15739 - DNA, 301 bp, Artificial Sequence
  Atm.3_NTC.7
  crRNA array
  misc_feature (148)..(157): n is a, c, g, or t
cttggctttatatatcttgtggaaaggacgaaacaccgtaatttctactaagtgtagattgaaagtctccgatatgccataatttctactaagtgtagatcgccgaacggataagactattaatttctactaagtgtagatttttttnnnnnnnnnnaagcttggcgtggatccgatatcaactagatcttgagacaaatggcagtattcatccacaattttaaaagaaaaggggggattggggggtacagtgcaggggaaagaatagtagacataatagcaacagacatacaaactaaag

SEQ ID NO: 15740 - DNA, 301 bp, Artificial Sequence
  Atm.3_NTC.8
  crRNA array
  misc_feature (148)..(157): n is a, c, g, or t
cttggctttatatatcttgtggaaaggacgaaacaccgtaatttctactaagtgtagattgaaagtctccgatatgccataatttctactaagtgtagatcgaccgaggttacgctgggataatttctactaagtgtagatttttttnnnnnnnnnnaagcttggcgtggatccgatatcaactagatcttgagacaaatggcagtattcatccacaattttaaaagaaaaggggggattggggggtacagtgcaggggaaagaatagtagacataatagcaacagacatacaaactaaag

SEQ ID NO: 15741 - DNA, 301 bp, Artificial Sequence
  Atm.3_NTC.9
  crRNA array
  misc_feature (148)..(157): n is a, c, g, or t
cttggctttatatatcttgtggaaaggacgaaacaccgtaatttctactaagtgtagattgaaagtctccgatatgccataatttctactaagtgtagatatcgccgtacggctatggcataatttctactaagtgtagatttttttnnnnnnnnnnaagcttggcgtggatccgatatcaactagatcttgagacaaatggcagtattcatccacaattttaaaagaaaaggggggattggggggtacagtgcaggggaaagaatagtagacataatagcaacagacatacaaactaaag

SEQ ID NO: 15742 - DNA, 301 bp, Artificial Sequence
  Atm.4_NTC.0
  crRNA array
  misc_feature (148)..(157): n is a, c, g, or t
cttggctttatatatcttgtggaaaggacgaaacaccgtaatttctactaagtgtagatggtggtgatcagtcaagtagtaatttctactaagtgtagattatagcgtcgcgcgctaatttaatttctactaagtgtagatttttttnnnnnnnnnnaagcttggcgtggatccgatatcaactagatcttgagacaaatggcagtattcatccacaattttaaaagaaaaggggggattggggggtacagtgcaggggaaagaatagtagacataatagcaacagacatacaaactaaag

SEQ ID NO: 15743 - DNA, 301 bp, Artificial Sequence
  Atm.4_NTC.1
  crRNA array
  misc_feature (148)..(157): n is a, c, g, or t
cttggctttatatatcttgtggaaaggacgaaacaccgtaatttctactaagtgtagatggtggtgatcagtcaagtagtaatttctactaagtgtagatcgcgtaaccgttccggctcctaatttctactaagtgtagatttttttnnnnnnnnnnaagcttggcgtggatccgatatcaactagatcttgagacaaatggcagtattcatccacaattttaaaagaaaaggggggattggggggtacagtgcaggggaaagaatagtagacataatagcaacagacatacaaactaaag

SEQ ID NO: 15744 - DNA, 301 bp, Artificial Sequence
  Atm.4_NTC.10
  crRNA array
  misc_feature (148)..(157): n is a, c, g, or t
cttggctttatatatcttgtggaaaggacgaaacaccgtaatttctactaagtgtagatggtggtgatcagtcaagtagtaatttctactaagtgtagatcgctaagttcgcgcgggccgtaatttctactaagtgtagatttttttnnnnnnnnnnaagcttggcgtggatccgatatcaactagatcttgagacaaatggcagtattcatccacaattttaaaagaaaaggggggattggggggtacagtgcaggggaaagaatagtagacataatagcaacagacatacaaactaaag

SEQ ID NO: 15745 - DNA, 301 bp, Artificial Sequence
  Atm.4_NTC.11
  crRNA array
  misc_feature (148)..(157): n is a, c, g, or t
cttggctttatatatcttgtggaaaggacgaaacaccgtaatttctactaagtgtagatggtggtgatcagtcaagtagtaatttctactaagtgtagatcgttcgtcgacgaagcaatctaatttctactaagtgtagatttttttnnnnnnnnnnaagcttggcgtggatccgatatcaactagatcttgagacaaatggcagtattcatccacaattttaaaagaaaaggggggattggggggtacagtgcaggggaaagaatagtagacataatagcaacagacatacaaactaaag

SEQ ID NO: 15746 - DNA, 301 bp, Artificial Sequence
  Atm.4_NTC.12
  crRNA array
  misc_feature (148)..(157): n is a, c, g, or t
cttggctttatatatcttgtggaaaggacgaaacaccgtaatttctactaagtgtagatggtggtgatcagtcaagtagtaatttctactaagtgtagatcgccgacgattaatcaatagtaatttctactaagtgtagatttttttnnnnnnnnnnaagcttggcgtggatccgatatcaactagatcttgagacaaatggcagtattcatccacaattttaaaagaaaaggggggattggggggtacagtgcaggggaaagaatagtagacataatagcaacagacatacaaactaaag

SEQ ID NO: 15747 - DNA, 301 bp, Artificial Sequence
  Atm.4_NTC.13
  crRNA array
  misc_feature (148)..(157): n is a, c, g, or t
cttggctttatatatcttgtggaaaggacgaaacaccgtaatttctactaagtgtagatggtggtgatcagtcaagtagtaatttctactaagtgtagatgaccgttgtatcgcgatcaataatttctactaagtgtagatttttttnnnnnnnnnnaagcttggcgtggatccgatatcaactagatcttgagacaaatggcagtattcatccacaattttaaaagaaaaggggggattggggggtacagtgcaggggaaagaatagtagacataatagcaacagacatacaaactaaag

SEQ ID NO: 15748 - DNA, 301 bp, Artificial Sequence
  Atm.4_NTC.14
  crRNA array
  misc_feature (148)..(157): n is a, c, g, or t
cttggctttatatatcttgtggaaaggacgaaacaccgtaatttctactaagtgtagatggtggtgatcagtcaagtagtaatttctactaagtgtagatccgttcgtgcgatagtgttttaatttctactaagtgtagatttttttnnnnnnnnnnaagcttggcgtggatccgatatcaactagatcttgagacaaatggcagtattcatccacaattttaaaagaaaaggggggattggggggtacagtgcaggggaaagaatagtagacataatagcaacagacatacaaactaaag

SEQ ID NO: 15749 - DNA, 301 bp, Artificial Sequence
  Atm.4_NTC.15
  crRNA array
  misc_feature (148)..(157): n is a, c, g, or t
cttggctttatatatcttgtggaaaggacgaaacaccgtaatttctactaagtgtagatggtggtgatcagtcaagtagtaatttctactaagtgtagatgttgtcgtgccgcgaatttataatttctactaagtgtagatttttttnnnnnnnnnnaagcttggcgtggatccgatatcaactagatcttgagacaaatggcagtattcatccacaattttaaaagaaaaggggggattggggggtacagtgcaggggaaagaatagtagacataatagcaacagacatacaaactaaag

SEQ ID NO: 15750 - DNA, 301 bp, Artificial Sequence
  Atm.4_NTC.16
  crRNA array
  misc_feature (148)..(157): n is a, c, g, or t
cttggctttatatatcttgtggaaaggacgaaacaccgtaatttctactaagtgtagatggtggtgatcagtcaagtagtaatttctactaagtgtagatcggtacgttagacgaaaatttaatttctactaagtgtagatttttttnnnnnnnnnnaagcttggcgtggatccgatatcaactagatcttgagacaaatggcagtattcatccacaattttaaaagaaaaggggggattggggggtacagtgcaggggaaagaatagtagacataatagcaacagacatacaaactaaag

SEQ ID NO: 15751 - DNA, 301 bp, Artificial Sequence
  Atm.4_NTC.17
  crRNA array
  misc_feature (148)..(157): n is a, c, g, or t
cttggctttatatatcttgtggaaaggacgaaacaccgtaatttctactaagtgtagatggtggtgatcagtcaagtagtaatttctactaagtgtagattatcgaacgctatcgaacgttaatttctactaagtgtagatttttttnnnnnnnnnnaagcttggcgtggatccgatatcaactagatcttgagacaaatggcagtattcatccacaattttaaaagaaaaggggggattggggggtacagtgcaggggaaagaatagtagacataatagcaacagacatacaaactaaag

SEQ ID NO: 15752 - DNA, 301 bp, Artificial Sequence
  Atm.4_NTC.18
  crRNA array
  misc_feature (148)..(157): n is a, c, g, or t
cttggctttatatatcttgtggaaaggacgaaacaccgtaatttctactaagtgtagatggtggtgatcagtcaagtagtaatttctactaagtgtagattccggttacgaccggcaaaataatttctactaagtgtagatttttttnnnnnnnnnnaagcttggcgtggatccgatatcaactagatcttgagacaaatggcagtattcatccacaattttaaaagaaaaggggggattggggggtacagtgcaggggaaagaatagtagacataatagcaacagacatacaaactaaag

SEQ ID NO: 15753 - DNA, 301 bp, Artificial Sequence
  Atm.4_NTC.19
  crRNA array
  misc_feature (148)..(157): n is a, c, g, or t
cttggctttatatatcttgtggaaaggacgaaacaccgtaatttctactaagtgtagatggtggtgatcagtcaagtagtaatttctactaagtgtagatcgtcgtagaacgatacccgataatttctactaagtgtagatttttttnnnnnnnnnnaagcttggcgtggatccgatatcaactagatcttgagacaaatggcagtattcatccacaattttaaaagaaaaggggggattggggggtacagtgcaggggaaagaatagtagacataatagcaacagacatacaaactaaag

SEQ ID NO: 15754 - DNA, 301 bp, Artificial Sequence
  Atm.4_NTC.2
  crRNA array
  misc_feature (148)..(157): n is a, c, g, or t
cttggctttatatatcttgtggaaaggacgaaacaccgtaatttctactaagtgtagatggtggtgatcagtcaagtagtaatttctactaagtgtagatttatgtcgcgccgcgacccgtaatttctactaagtgtagatttttttnnnnnnnnnnaagcttggcgtggatccgatatcaactagatcttgagacaaatggcagtattcatccacaattttaaaagaaaaggggggattggggggtacagtgcaggggaaagaatagtagacataatagcaacagacatacaaactaaag

SEQ ID NO: 15755 - DNA, 301 bp, Artificial Sequence
  Atm.4_NTC.20
  crRNA array
  misc_feature (148)..(157): n is a, c, g, or t
cttggctttatatatcttgtggaaaggacgaaacaccgtaatttctactaagtgtagatggtggtgatcagtcaagtagtaatttctactaagtgtagatattccggcgcgaccagaagataatttctactaagtgtagatttttttnnnnnnnnnnaagcttggcgtggatccgatatcaactagatcttgagacaaatggcagtattcatccacaattttaaaagaaaaggggggattggggggtacagtgcaggggaaagaatagtagacataatagcaacagacatacaaactaaag

SEQ ID NO: 15756 - DNA, 301 bp, Artificial Sequence
  Atm.4_NTC.21
  crRNA array
  misc_feature (148)..(157): n is a, c, g, or t
cttggctttatatatcttgtggaaaggacgaaacaccgtaatttctactaagtgtagatggtggtgatcagtcaagtagtaatttctactaagtgtagatgtataacttcgcgcggtccgtaatttctactaagtgtagatttttttnnnnnnnnnnaagcttggcgtggatccgatatcaactagatcttgagacaaatggcagtattcatccacaattttaaaagaaaaggggggattggggggtacagtgcaggggaaagaatagtagacataatagcaacagacatacaaactaaag

SEQ ID NO: 15757 - DNA, 301 bp, Artificial Sequence
  Atm.4_NTC.22
  crRNA array
  misc_feature (148)..(157): n is a, c, g, or t
cttggctttatatatcttgtggaaaggacgaaacaccgtaatttctactaagtgtagatggtggtgatcagtcaagtagtaatttctactaagtgtagatgcgcgtcaacgtaatgtgcctaatttctactaagtgtagatttttttnnnnnnnnnnaagcttggcgtggatccgatatcaactagatcttgagacaaatggcagtattcatccacaattttaaaagaaaaggggggattggggggtacagtgcaggggaaagaatagtagacataatagcaacagacatacaaactaaag

SEQ ID NO: 15758 - DNA, 301 bp, Artificial Sequence
  Atm.4_NTC.23
  crRNA array
  misc_feature (148)..(157): n is a, c, g, or t
cttggctttatatatcttgtggaaaggacgaaacaccgtaatttctactaagtgtagatggtggtgatcagtcaagtagtaatttctactaagtgtagatacgcgctattatcgtaggtgtaatttctactaagtgtagatttttttnnnnnnnnnnaagcttggcgtggatccgatatcaactagatcttgagacaaatggcagtattcatccacaattttaaaagaaaaggggggattggggggtacagtgcaggggaaagaatagtagacataatagcaacagacatacaaactaaag

SEQ ID NO: 15759 - DNA, 301 bp, Artificial Sequence
  Atm.4_NTC.24
  crRNA array
  misc_feature (148)..(157): n is a, c, g, or t
cttggctttatatatcttgtggaaaggacgaaacaccgtaatttctactaagtgtagatggtggtgatcagtcaagtagtaatttctactaagtgtagatactatcgacgttcgtcccggtaatttctactaagtgtagatttttttnnnnnnnnnnaagcttggcgtggatccgatatcaactagatcttgagacaaatggcagtattcatccacaattttaaaagaaaaggggggattggggggtacagtgcaggggaaagaatagtagacataatagcaacagacatacaaactaaag

SEQ ID NO: 15760 - DNA, 301 bp, Artificial Sequence
  Atm.4_NTC.25
  crRNA array
  misc_feature (148)..(157): n is a, c, g, or t
cttggctttatatatcttgtggaaaggacgaaacaccgtaatttctactaagtgtagatggtggtgatcagtcaagtagtaatttctactaagtgtagattcgcgttatcgtgccgtgcgtaatttctactaagtgtagatttttttnnnnnnnnnnaagcttggcgtggatccgatatcaactagatcttgagacaaatggcagtattcatccacaattttaaaagaaaaggggggattggggggtacagtgcaggggaaagaatagtagacataatagcaacagacatacaaactaaag

SEQ ID NO: 15761 - DNA, 301 bp, Artificial Sequence
  Atm.4_NTC.26
  crRNA array
  misc_feature (148)..(157): n is a, c, g, or t
cttggctttatatatcttgtggaaaggacgaaacaccgtaatttctactaagtgtagatggtggtgatcagtcaagtagtaatttctactaagtgtagatcgcgacggcggttttaacactaatttctactaagtgtagatttttttnnnnnnnnnnaagcttggcgtggatccgatatcaactagatcttgagacaaatggcagtattcatccacaattttaaaagaaaaggggggattggggggtacagtgcaggggaaagaatagtagacataatagcaacagacatacaaactaaag

SEQ ID NO: 15762 - DNA, 301 bp, Artificial Sequence
  Atm.4_NTC.27
  crRNA array
  misc_feature (148)..(157): n is a, c, g, or t
cttggctttatatatcttgtggaaaggacgaaacaccgtaatttctactaagtgtagatggtggtgatcagtcaagtagtaatttctactaagtgtagatgtcgcgttgcgaccggcgcttaatttctactaagtgtagatttttttnnnnnnnnnnaagcttggcgtggatccgatatcaactagatcttgagacaaatggcagtattcatccacaattttaaaagaaaaggggggattggggggtacagtgcaggggaaagaatagtagacataatagcaacagacatacaaactaaag

SEQ ID NO: 15763 - DNA, 301 bp, Artificial Sequence
  Atm.4_NTC.28
  crRNA array
  misc_feature (148)..(157): n is a, c, g, or t
cttggctttatatatcttgtggaaaggacgaaacaccgtaatttctactaagtgtagatggtggtgatcagtcaagtagtaatttctactaagtgtagataccgctaatcggcgtaaacttaatttctactaagtgtagatttttttnnnnnnnnnnaagcttggcgtggatccgatatcaactagatcttgagacaaatggcagtattcatccacaattttaaaagaaaaggggggattggggggtacagtgcaggggaaagaatagtagacataatagcaacagacatacaaactaaag

SEQ ID NO: 15764 - DNA, 301 bp, Artificial Sequence
  Atm.4_NTC.29
  crRNA array
  misc_feature (148)..(157): n is a, c, g, or t
cttggctttatatatcttgtggaaaggacgaaacaccgtaatttctactaagtgtagatggtggtgatcagtcaagtagtaatttctactaagtgtagatcgcgatctataccgtctatataatttctactaagtgtagatttttttnnnnnnnnnnaagcttggcgtggatccgatatcaactagatcttgagacaaatggcagtattcatccacaattttaaaagaaaaggggggattggggggtacagtgcaggggaaagaatagtagacataatagcaacagacatacaaactaaag

SEQ ID NO: 15765 - DNA, 301 bp, Artificial Sequence
  Atm.4_NTC.3
  crRNA array
  misc_feature (148)..(157): n is a, c, g, or t
cttggctttatatatcttgtggaaaggacgaaacaccgtaatttctactaagtgtagatggtggtgatcagtcaagtagtaatttctactaagtgtagattcgacgcgagacgacgtacataatttctactaagtgtagatttttttnnnnnnnnnnaagcttggcgtggatccgatatcaactagatcttgagacaaatggcagtattcatccacaattttaaaagaaaaggggggattggggggtacagtgcaggggaaagaatagtagacataatagcaacagacatacaaactaaag

SEQ ID NO: 15766 - DNA, 301 bp, Artificial Sequence
  Atm.4_NTC.30
  crRNA array
  misc_feature (148)..(157): n is a, c, g, or t
cttggctttatatatcttgtggaaaggacgaaacaccgtaatttctactaagtgtagatggtggtgatcagtcaagtagtaatttctactaagtgtagatcgatcgtacgggtgtcctaataatttctactaagtgtagatttttttnnnnnnnnnnaagcttggcgtggatccgatatcaactagatcttgagacaaatggcagtattcatccacaattttaaaagaaaaggggggattggggggtacagtgcaggggaaagaatagtagacataatagcaacagacatacaaactaaag

SEQ ID NO: 15767 - DNA, 301 bp, Artificial Sequence
  Atm.4_NTC.31
  crRNA array
  misc_feature (148)..(157): n is a, c, g, or t
cttggctttatatatcttgtggaaaggacgaaacaccgtaatttctactaagtgtagatggtggtgatcagtcaagtagtaatttctactaagtgtagatgccgaccgcgtgattgtaggtaatttctactaagtgtagatttttttnnnnnnnnnnaagcttggcgtggatccgatatcaactagatcttgagacaaatggcagtattcatccacaattttaaaagaaaaggggggattggggggtacagtgcaggggaaagaatagtagacataatagcaacagacatacaaactaaag

SEQ ID NO: 15768 - DNA, 301 bp, Artificial Sequence
  Atm.4_NTC.32
  crRNA array
  misc_feature (148)..(157): n is a, c, g, or t
cttggctttatatatcttgtggaaaggacgaaacaccgtaatttctactaagtgtagatggtggtgatcagtcaagtagtaatttctactaagtgtagatgcacgttacgcccgggtcactaatttctactaagtgtagatttttttnnnnnnnnnnaagcttggcgtggatccgatatcaactagatcttgagacaaatggcagtattcatccacaattttaaaagaaaaggggggattggggggtacagtgcaggggaaagaatagtagacataatagcaacagacatacaaactaaag

SEQ ID NO: 15769 - DNA, 301 bp, Artificial Sequence
  Atm.4_NTC.33
  crRNA array
  misc_feature (148)..(157): n is a, c, g, or t
cttggctttatatatcttgtggaaaggacgaaacaccgtaatttctactaagtgtagatggtggtgatcagtcaagtagtaatttctactaagtgtagattaagcgaccgacgcattcgctaatttctactaagtgtagatttttttnnnnnnnnnnaagcttggcgtggatccgatatcaactagatcttgagacaaatggcagtattcatccacaattttaaaagaaaaggggggattggggggtacagtgcaggggaaagaatagtagacataatagcaacagacatacaaactaaag

SEQ ID NO: 15770 - DNA, 301 bp, Artificial Sequence
  Atm.4_NTC.34
  crRNA array
  misc_feature (148)..(157): n is a, c, g, or t
cttggctttatatatcttgtggaaaggacgaaacaccgtaatttctactaagtgtagatggtggtgatcagtcaagtagtaatttctactaagtgtagattagcgttcgacacgtgaaactaatttctactaagtgtagatttttttnnnnnnnnnnaagcttggcgtggatccgatatcaactagatcttgagacaaatggcagtattcatccacaattttaaaagaaaaggggggattggggggtacagtgcaggggaaagaatagtagacataatagcaacagacatacaaactaaag

SEQ ID NO: 15771 - DNA, 301 bp, Artificial Sequence
  Atm.4_NTC.35
  crRNA array
  misc_feature (148)..(157): n is a, c, g, or t
cttggctttatatatcttgtggaaaggacgaaacaccgtaatttctactaagtgtagatggtggtgatcagtcaagtagtaatttctactaagtgtagattggcgcgtaatcgctattcgtaatttctactaagtgtagatttttttnnnnnnnnnnaagcttggcgtggatccgatatcaactagatcttgagacaaatggcagtattcatccacaattttaaaagaaaaggggggattggggggtacagtgcaggggaaagaatagtagacataatagcaacagacatacaaactaaag

SEQ ID NO: 15772 - DNA, 301 bp, Artificial Sequence
  Atm.4_NTC.36
  crRNA array
  misc_feature (148)..(157): n is a, c, g, or t
cttggctttatatatcttgtggaaaggacgaaacaccgtaatttctactaagtgtagatggtggtgatcagtcaagtagtaatttctactaagtgtagatcaacccgccgtagcgggccttaatttctactaagtgtagatttttttnnnnnnnnnnaagcttggcgtggatccgatatcaactagatcttgagacaaatggcagtattcatccacaattttaaaagaaaaggggggattggggggtacagtgcaggggaaagaatagtagacataatagcaacagacatacaaactaaag

SEQ ID NO: 15773 - DNA, 301 bp, Artificial Sequence
  Atm.4_NTC.37
  crRNA array
  misc_feature (148)..(157): n is a, c, g, or t
cttggctttatatatcttgtggaaaggacgaaacaccgtaatttctactaagtgtagatggtggtgatcagtcaagtagtaatttctactaagtgtagattttgcgttgacgcgattacttaatttctactaagtgtagatttttttnnnnnnnnnnaagcttggcgtggatccgatatcaactagatcttgagacaaatggcagtattcatccacaattttaaaagaaaaggggggattggggggtacagtgcaggggaaagaatagtagacataatagcaacagacatacaaactaaag

SEQ ID NO: 15774 - DNA, 301 bp, Artificial Sequence
  Atm.4_NTC.38
  crRNA array
  misc_feature (148)..(157): n is a, c, g, or t
cttggctttatatatcttgtggaaaggacgaaacaccgtaatttctactaagtgtagatggtggtgatcagtcaagtagtaatttctactaagtgtagataacggagcgcgatactaccataatttctactaagtgtagatttttttnnnnnnnnnnaagcttggcgtggatccgatatcaactagatcttgagacaaatggcagtattcatccacaattttaaaagaaaaggggggattggggggtacagtgcaggggaaagaatagtagacataatagcaacagacatacaaactaaag

SEQ ID NO: 15775 - DNA, 301 bp, Artificial Sequence
  Atm.4_NTC.39
  crRNA array
  misc_feature (148)..(157): n is a, c, g, or t
cttggctttatatatcttgtggaaaggacgaaacaccgtaatttctactaagtgtagatggtggtgatcagtcaagtagtaatttctactaagtgtagatccggacgttataacgtttcttaatttctactaagtgtagatttttttnnnnnnnnnnaagcttggcgtggatccgatatcaactagatcttgagacaaatggcagtattcatccacaattttaaaagaaaaggggggattggggggtacagtgcaggggaaagaatagtagacataatagcaacagacatacaaactaaag

SEQ ID NO: 15776 - DNA, 301 bp, Artificial Sequence
  Atm.4_NTC.4
  crRNA array
  misc_feature (148)..(157): n is a, c, g, or t
cttggctttatatatcttgtggaaaggacgaaacaccgtaatttctactaagtgtagatggtggtgatcagtcaagtagtaatttctactaagtgtagatatacccgtcgcgaacgtgagtaatttctactaagtgtagatttttttnnnnnnnnnnaagcttggcgtggatccgatatcaactagatcttgagacaaatggcagtattcatccacaattttaaaagaaaaggggggattggggggtacagtgcaggggaaagaatagtagacataatagcaacagacatacaaactaaag

SEQ ID NO: 15777 - DNA, 301 bp, Artificial Sequence
  Atm.4_NTC.40
  crRNA array
  misc_feature (148)..(157): n is a, c, g, or t
cttggctttatatatcttgtggaaaggacgaaacaccgtaatttctactaagtgtagatggtggtgatcagtcaagtagtaatttctactaagtgtagatattcgcgaacccggccggaataatttctactaagtgtagatttttttnnnnnnnnnnaagcttggcgtggatccgatatcaactagatcttgagacaaatggcagtattcatccacaattttaaaagaaaaggggggattggggggtacagtgcaggggaaagaatagtagacataatagcaacagacatacaaactaaag

SEQ ID NO: 15778 - DNA, 301 bp, Artificial Sequence
  Atm.4_NTC.41
  crRNA array
  misc_feature (148)..(157): n is a, c, g, or t
cttggctttatatatcttgtggaaaggacgaaacaccgtaatttctactaagtgtagatggtggtgatcagtcaagtagtaatttctactaagtgtagatttgatggcgcgacgcgttattaatttctactaagtgtagatttttttnnnnnnnnnnaagcttggcgtggatccgatatcaactagatcttgagacaaatggcagtattcatccacaattttaaaagaaaaggggggattggggggtacagtgcaggggaaagaatagtagacataatagcaacagacatacaaactaaag

SEQ ID NO: 15779 - DNA, 301 bp, Artificial Sequence
  Atm.4_NTC.42
  crRNA array
  misc_feature (148)..(157): n is a, c, g, or t
cttggctttatatatcttgtggaaaggacgaaacaccgtaatttctactaagtgtagatggtggtgatcagtcaagtagtaatttctactaagtgtagatggtcaaatcgcggcgataactaatttctactaagtgtagatttttttnnnnnnnnnnaagcttggcgtggatccgatatcaactagatcttgagacaaatggcagtattcatccacaattttaaaagaaaaggggggattggggggtacagtgcaggggaaagaatagtagacataatagcaacagacatacaaactaaag

SEQ ID NO: 15780 - DNA, 301 bp, Artificial Sequence
  Atm.4_NTC.43
  crRNA array
  misc_feature (148)..(157): n is a, c, g, or t
cttggctttatatatcttgtggaaaggacgaaacaccgtaatttctactaagtgtagatggtggtgatcagtcaagtagtaatttctactaagtgtagatcgactcgcgcattgaactggtaatttctactaagtgtagatttttttnnnnnnnnnnaagcttggcgtggatccgatatcaactagatcttgagacaaatggcagtattcatccacaattttaaaagaaaaggggggattggggggtacagtgcaggggaaagaatagtagacataatagcaacagacatacaaactaaag

SEQ ID NO: 15781 - DNA, 301 bp, Artificial Sequence
  Atm.4_NTC.44
  crRNA array
  misc_feature (148)..(157): n is a, c, g, or t
cttggctttatatatcttgtggaaaggacgaaacaccgtaatttctactaagtgtagatggtggtgatcagtcaagtagtaatttctactaagtgtagatagcgtcgtacgatttatcgttaatttctactaagtgtagatttttttnnnnnnnnnnaagcttggcgtggatccgatatcaactagatcttgagacaaatggcagtattcatccacaattttaaaagaaaaggggggattggggggtacagtgcaggggaaagaatagtagacataatagcaacagacatacaaactaaag

SEQ ID NO: 15782 - DNA, 301 bp, Artificial Sequence
  Atm.4_NTC.45
  crRNA array
  misc_feature (148)..(157): n is a, c, g, or t
cttggctttatatatcttgtggaaaggacgaaacaccgtaatttctactaagtgtagatggtggtgatcagtcaagtagtaatttctactaagtgtagatcggaacgcgtgatactagggtaatttctactaagtgtagatttttttnnnnnnnnnnaagcttggcgtggatccgatatcaactagatcttgagacaaatggcagtattcatccacaattttaaaagaaaaggggggattggggggtacagtgcaggggaaagaatagtagacataatagcaacagacatacaaactaaag

SEQ ID NO: 15783 - DNA, 301 bp, Artificial Sequence
  Atm.4_NTC.46
  crRNA array
  misc_feature (148)..(157): n is a, c, g, or t
cttggctttatatatcttgtggaaaggacgaaacaccgtaatttctactaagtgtagatggtggtgatcagtcaagtagtaatttctactaagtgtagatagcgggtcgtagacgcgcggtaatttctactaagtgtagatttttttnnnnnnnnnnaagcttggcgtggatccgatatcaactagatcttgagacaaatggcagtattcatccacaattttaaaagaaaaggggggattggggggtacagtgcaggggaaagaatagtagacataatagcaacagacatacaaactaaag

SEQ ID NO: 15784 - DNA, 301 bp, Artificial Sequence
  Atm.4_NTC.47
  crRNA array
  misc_feature (148)..(157): n is a, c, g, or t
cttggctttatatatcttgtggaaaggacgaaacaccgtaatttctactaagtgtagatggtggtgatcagtcaagtagtaatttctactaagtgtagattctcgtatcgcgattgttaataatttctactaagtgtagatttttttnnnnnnnnnnaagcttggcgtggatccgatatcaactagatcttgagacaaatggcagtattcatccacaattttaaaagaaaaggggggattggggggtacagtgcaggggaaagaatagtagacataatagcaacagacatacaaactaaag

SEQ ID NO: 15785 - DNA, 301 bp, Artificial Sequence
  Atm.4_NTC.48
  crRNA array
  misc_feature (148)..(157): n is a, c, g, or t
cttggctttatatatcttgtggaaaggacgaaacaccgtaatttctactaagtgtagatggtggtgatcagtcaagtagtaatttctactaagtgtagatcggtcgactacggctgttagtaatttctactaagtgtagatttttttnnnnnnnnnnaagcttggcgtggatccgatatcaactagatcttgagacaaatggcagtattcatccacaattttaaaagaaaaggggggattggggggtacagtgcaggggaaagaatagtagacataatagcaacagacatacaaactaaag

SEQ ID NO: 15786 - DNA, 301 bp, Artificial Sequence
  Atm.4_NTC.49
  crRNA array
  misc_feature (148)..(157): n is a, c, g, or t
cttggctttatatatcttgtggaaaggacgaaacaccgtaatttctactaagtgtagatggtggtgatcagtcaagtagtaatttctactaagtgtagattcggggcgcgtcaactgaattaatttctactaagtgtagatttttttnnnnnnnnnnaagcttggcgtggatccgatatcaactagatcttgagacaaatggcagtattcatccacaattttaaaagaaaaggggggattggggggtacagtgcaggggaaagaatagtagacataatagcaacagacatacaaactaaag

SEQ ID NO: 15787 - DNA, 301 bp, Artificial Sequence
  Atm.4_NTC.5
  crRNA array
  misc_feature (148)..(157): n is a, c, g, or t
cttggctttatatatcttgtggaaaggacgaaacaccgtaatttctactaagtgtagatggtggtgatcagtcaagtagtaatttctactaagtgtagatgcttacgcgtcgcgaatgtataatttctactaagtgtagatttttttnnnnnnnnnnaagcttggcgtggatccgatatcaactagatcttgagacaaatggcagtattcatccacaattttaaaagaaaaggggggattggggggtacagtgcaggggaaagaatagtagacataatagcaacagacatacaaactaaag

SEQ ID NO: 15788 - DNA, 301 bp, Artificial Sequence
  Atm.4_NTC.50
  crRNA array
  misc_feature (148)..(157): n is a, c, g, or t
cttggctttatatatcttgtggaaaggacgaaacaccgtaatttctactaagtgtagatggtggtgatcagtcaagtagtaatttctactaagtgtagatattgccgctcgcgcaaaatctaatttctactaagtgtagatttttttnnnnnnnnnnaagcttggcgtggatccgatatcaactagatcttgagacaaatggcagtattcatccacaattttaaaagaaaaggggggattggggggtacagtgcaggggaaagaatagtagacataatagcaacagacatacaaactaaag

SEQ ID NO: 15789 - DNA, 301 bp, Artificial Sequence
  Atm.4_NTC.51
  crRNA array
  misc_feature (148)..(157): n is a, c, g, or t
cttggctttatatatcttgtggaaaggacgaaacaccgtaatttctactaagtgtagatggtggtgatcagtcaagtagtaatttctactaagtgtagattaacgcgcaacacgccaatgtaatttctactaagtgtagatttttttnnnnnnnnnnaagcttggcgtggatccgatatcaactagatcttgagacaaatggcagtattcatccacaattttaaaagaaaaggggggattggggggtacagtgcaggggaaagaatagtagacataatagcaacagacatacaaactaaag

SEQ ID NO: 15790 - DNA, 301 bp, Artificial Sequence
  Atm.4_NTC.6
  crRNA array
  misc_feature (148)..(157): n is a, c, g, or t
cttggctttatatatcttgtggaaaggacgaaacaccgtaatttctactaagtgtagatggtggtgatcagtcaagtagtaatttctactaagtgtagatcgaatcgcgcctacgggaattaatttctactaagtgtagatttttttnnnnnnnnnnaagcttggcgtggatccgatatcaactagatcttgagacaaatggcagtattcatccacaattttaaaagaaaaggggggattggggggtacagtgcaggggaaagaatagtagacataatagcaacagacatacaaactaaag

SEQ ID NO: 15791 - DNA, 301 bp, Artificial Sequence
  Atm.4_NTC.7
  crRNA array
  misc_feature (148)..(157): n is a, c, g, or t
cttggctttatatatcttgtggaaaggacgaaacaccgtaatttctactaagtgtagatggtggtgatcagtcaagtagtaatttctactaagtgtagatcgccgaacggataagactattaatttctactaagtgtagatttttttnnnnnnnnnnaagcttggcgtggatccgatatcaactagatcttgagacaaatggcagtattcatccacaattttaaaagaaaaggggggattggggggtacagtgcaggggaaagaatagtagacataatagcaacagacatacaaactaaag

SEQ ID NO: 15792 - DNA, 301 bp, Artificial Sequence
  Atm.4_NTC.8
  crRNA array
  misc_feature (148)..(157): n is a, c, g, or t
cttggctttatatatcttgtggaaaggacgaaacaccgtaatttctactaagtgtagatggtggtgatcagtcaagtagtaatttctactaagtgtagatcgaccgaggttacgctgggataatttctactaagtgtagatttttttnnnnnnnnnnaagcttggcgtggatccgatatcaactagatcttgagacaaatggcagtattcatccacaattttaaaagaaaaggggggattggggggtacagtgcaggggaaagaatagtagacataatagcaacagacatacaaactaaag

SEQ ID NO: 15793 - DNA, 301 bp, Artificial Sequence
  Atm.4_NTC.9
  crRNA array
  misc_feature (148)..(157): n is a, c, g, or t
cttggctttatatatcttgtggaaaggacgaaacaccgtaatttctactaagtgtagatggtggtgatcagtcaagtagtaatttctactaagtgtagatatcgccgtacggctatggcataatttctactaagtgtagatttttttnnnnnnnnnnaagcttggcgtggatccgatatcaactagatcttgagacaaatggcagtattcatccacaattttaaaagaaaaggggggattggggggtacagtgcaggggaaagaatagtagacataatagcaacagacatacaaactaaag

SEQ ID NO: 15794 - DNA, 301 bp, Artificial Sequence
  Atrx.1_NTC.0
  crRNA array
  misc_feature (148)..(157): n is a, c, g, or t
cttggctttatatatcttgtggaaaggacgaaacaccgtaatttctactaagtgtagatgccagtcgctcatatctctgtaatttctactaagtgtagattatagcgtcgcgcgctaatttaatttctactaagtgtagatttttttnnnnnnnnnnaagcttggcgtggatccgatatcaactagatcttgagacaaatggcagtattcatccacaattttaaaagaaaaggggggattggggggtacagtgcaggggaaagaatagtagacataatagcaacagacatacaaactaaag

SEQ ID NO: 15795 - DNA, 301 bp, Artificial Sequence
  Atrx.1_NTC.1
  crRNA array
  misc_feature (148)..(157): n is a, c, g, or t
cttggctttatatatcttgtggaaaggacgaaacaccgtaatttctactaagtgtagatgccagtcgctcatatctctgtaatttctactaagtgtagatcgcgtaaccgttccggctcctaatttctactaagtgtagatttttttnnnnnnnnnnaagcttggcgtggatccgatatcaactagatcttgagacaaatggcagtattcatccacaattttaaaagaaaaggggggattggggggtacagtgcaggggaaagaatagtagacataatagcaacagacatacaaactaaag

SEQ ID NO: 15796 - DNA, 301 bp, Artificial Sequence
  Atrx.1_NTC.10
  crRNA array
  misc_feature (148)..(157): n is a, c, g, or t
cttggctttatatatcttgtggaaaggacgaaacaccgtaatttctactaagtgtagatgccagtcgctcatatctctgtaatttctactaagtgtagatcgctaagttcgcgcgggccgtaatttctactaagtgtagatttttttnnnnnnnnnnaagcttggcgtggatccgatatcaactagatcttgagacaaatggcagtattcatccacaattttaaaagaaaaggggggattggggggtacagtgcaggggaaagaatagtagacataatagcaacagacatacaaactaaag

SEQ ID NO: 15797 - DNA, 301 bp, Artificial Sequence
  Atrx.1_NTC.11
  crRNA array
  misc_feature (148)..(157): n is a, c, g, or t
cttggctttatatatcttgtggaaaggacgaaacaccgtaatttctactaagtgtagatgccagtcgctcatatctctgtaatttctactaagtgtagatcgttcgtcgacgaagcaatctaatttctactaagtgtagatttttttnnnnnnnnnnaagcttggcgtggatccgatatcaactagatcttgagacaaatggcagtattcatccacaattttaaaagaaaaggggggattggggggtacagtgcaggggaaagaatagtagacataatagcaacagacatacaaactaaag

SEQ ID NO: 15798 - DNA, 301 bp, Artificial Sequence
  Atrx.1_NTC.12
  crRNA array
  misc_feature (148)..(157): n is a, c, g, or t
cttggctttatatatcttgtggaaaggacgaaacaccgtaatttctactaagtgtagatgccagtcgctcatatctctgtaatttctactaagtgtagatcgccgacgattaatcaatagtaatttctactaagtgtagatttttttnnnnnnnnnnaagcttggcgtggatccgatatcaactagatcttgagacaaatggcagtattcatccacaattttaaaagaaaaggggggattggggggtacagtgcaggggaaagaatagtagacataatagcaacagacatacaaactaaag

SEQ ID NO: 15799 - DNA, 301 bp, Artificial Sequence
  Atrx.1_NTC.13
  crRNA array
  misc_feature (148)..(157): n is a, c, g, or t
cttggctttatatatcttgtggaaaggacgaaacaccgtaatttctactaagtgtagatgccagtcgctcatatctctgtaatttctactaagtgtagatgaccgttgtatcgcgatcaataatttctactaagtgtagatttttttnnnnnnnnnnaagcttggcgtggatccgatatcaactagatcttgagacaaatggcagtattcatccacaattttaaaagaaaaggggggattggggggtacagtgcaggggaaagaatagtagacataatagcaacagacatacaaactaaag

SEQ ID NO: 15800 - DNA, 301 bp, Artificial Sequence
  Atrx.1_NTC.14
  crRNA array
  misc_feature (148)..(157): n is a, c, g, or t
cttggctttatatatcttgtggaaaggacgaaacaccgtaatttctactaagtgtagatgccagtcgctcatatctctgtaatttctactaagtgtagatccgttcgtgcgatagtgttttaatttctactaagtgtagatttttttnnnnnnnnnnaagcttggcgtggatccgatatcaactagatcttgagacaaatggcagtattcatccacaattttaaaagaaaaggggggattggggggtacagtgcaggggaaagaatagtagacataatagcaacagacatacaaactaaag

SEQ ID NO: 15801 - DNA, 301 bp, Artificial Sequence
  Atrx.1_NTC.15
  crRNA array
  misc_feature (148)..(157): n is a, c, g, or t
cttggctttatatatcttgtggaaaggacgaaacaccgtaatttctactaagtgtagatgccagtcgctcatatctctgtaatttctactaagtgtagatgttgtcgtgccgcgaatttataatttctactaagtgtagatttttttnnnnnnnnnnaagcttggcgtggatccgatatcaactagatcttgagacaaatggcagtattcatccacaattttaaaagaaaaggggggattggggggtacagtgcaggggaaagaatagtagacataatagcaacagacatacaaactaaag

SEQ ID NO: 15802 - DNA, 301 bp, Artificial Sequence
  Atrx.1_NTC.16
  crRNA array
  misc_feature (148)..(157): n is a, c, g, or t
cttggctttatatatcttgtggaaaggacgaaacaccgtaatttctactaagtgtagatgccagtcgctcatatctctgtaatttctactaagtgtagatcggtacgttagacgaaaatttaatttctactaagtgtagatttttttnnnnnnnnnnaagcttggcgtggatccgatatcaactagatcttgagacaaatggcagtattcatccacaattttaaaagaaaaggggggattggggggtacagtgcaggggaaagaatagtagacataatagcaacagacatacaaactaaag

SEQ ID NO: 15803 - DNA, 301 bp, Artificial Sequence
  Atrx.1_NTC.17
  crRNA array
  misc_feature (148)..(157): n is a, c, g, or t
cttggctttatatatcttgtggaaaggacgaaacaccgtaatttctactaagtgtagatgccagtcgctcatatctctgtaatttctactaagtgtagattatcgaacgctatcgaacgttaatttctactaagtgtagatttttttnnnnnnnnnnaagcttggcgtggatccgatatcaactagatcttgagacaaatggcagtattcatccacaattttaaaagaaaaggggggattggggggtacagtgcaggggaaagaatagtagacataatagcaacagacatacaaactaaag

SEQ ID NO: 15804 - DNA, 301 bp, Artificial Sequence
  Atrx.1_NTC.18
  crRNA array
  misc_feature (148)..(157): n is a, c, g, or t
cttggctttatatatcttgtggaaaggacgaaacaccgtaatttctactaagtgtagatgccagtcgctcatatctctgtaatttctactaagtgtagattccggttacgaccggcaaaataatttctactaagtgtagatttttttnnnnnnnnnnaagcttggcgtggatccgatatcaactagatcttgagacaaatggcagtattcatccacaattttaaaagaaaaggggggattggggggtacagtgcaggggaaagaatagtagacataatagcaacagacatacaaactaaag

SEQ ID NO: 15805 - DNA, 301 bp, Artificial Sequence
  Atrx.1_NTC.19
  crRNA array
  misc_feature (148)..(157): n is a, c, g, or t
cttggctttatatatcttgtggaaaggacgaaacaccgtaatttctactaagtgtagatgccagtcgctcatatctctgtaatttctactaagtgtagatcgtcgtagaacgatacccgataatttctactaagtgtagatttttttnnnnnnnnnnaagcttggcgtggatccgatatcaactagatcttgagacaaatggcagtattcatccacaattttaaaagaaaaggggggattggggggtacagtgcaggggaaagaatagtagacataatagcaacagacatacaaactaaag

SEQ ID NO: 15806 - DNA, 301 bp, Artificial Sequence
  Atrx.1_NTC.2
  crRNA array
  misc_feature (148)..(157): n is a, c, g, or t
cttggctttatatatcttgtggaaaggacgaaacaccgtaatttctactaagtgtagatgccagtcgctcatatctctgtaatttctactaagtgtagatttatgtcgcgccgcgacccgtaatttctactaagtgtagatttttttnnnnnnnnnnaagcttggcgtggatccgatatcaactagatcttgagacaaatggcagtattcatccacaattttaaaagaaaaggggggattggggggtacagtgcaggggaaagaatagtagacataatagcaacagacatacaaactaaag

SEQ ID NO: 15807 - DNA, 301 bp, Artificial Sequence
  Atrx.1_NTC.20
  crRNA array
  misc_feature (148)..(157): n is a, c, g, or t
cttggctttatatatcttgtggaaaggacgaaacaccgtaatttctactaagtgtagatgccagtcgctcatatctctgtaatttctactaagtgtagatattccggcgcgaccagaagataatttctactaagtgtagatttttttnnnnnnnnnnaagcttggcgtggatccgatatcaactagatcttgagacaaatggcagtattcatccacaattttaaaagaaaaggggggattggggggtacagtgcaggggaaagaatagtagacataatagcaacagacatacaaactaaag

SEQ ID NO: 15808 - DNA, 301 bp, Artificial Sequence
  Atrx.1_NTC.21
  crRNA array
  misc_feature (148)..(157): n is a, c, g, or t
cttggctttatatatcttgtggaaaggacgaaacaccgtaatttctactaagtgtagatgccagtcgctcatatctctgtaatttctactaagtgtagatgtataacttcgcgcggtccgtaatttctactaagtgtagatttttttnnnnnnnnnnaagcttggcgtggatccgatatcaactagatcttgagacaaatggcagtattcatccacaattttaaaagaaaaggggggattggggggtacagtgcaggggaaagaatagtagacataatagcaacagacatacaaactaaag

SEQ ID NO: 15809 - DNA, 301 bp, Artificial Sequence
  Atrx.1_NTC.22
  crRNA array
  misc_feature (148)..(157): n is a, c, g, or t
cttggctttatatatcttgtggaaaggacgaaacaccgtaatttctactaagtgtagatgccagtcgctcatatctctgtaatttctactaagtgtagatgcgcgtcaacgtaatgtgcctaatttctactaagtgtagatttttttnnnnnnnnnnaagcttggcgtggatccgatatcaactagatcttgagacaaatggcagtattcatccacaattttaaaagaaaaggggggattggggggtacagtgcaggggaaagaatagtagacataatagcaacagacatacaaactaaag

SEQ ID NO: 15810 - DNA, 301 bp, Artificial Sequence
  Atrx.1_NTC.23
  crRNA array
  misc_feature (148)..(157): n is a, c, g, or t
cttggctttatatatcttgtggaaaggacgaaacaccgtaatttctactaagtgtagatgccagtcgctcatatctctgtaatttctactaagtgtagatacgcgctattatcgtaggtgtaatttctactaagtgtagatttttttnnnnnnnnnnaagcttggcgtggatccgatatcaactagatcttgagacaaatggcagtattcatccacaattttaaaagaaaaggggggattggggggtacagtgcaggggaaagaatagtagacataatagcaacagacatacaaactaaag

SEQ ID NO: 15811 - DNA, 301 bp, Artificial Sequence
  Atrx.1_NTC.24
  crRNA array
  misc_feature (148)..(157): n is a, c, g, or t
cttggctttatatatcttgtggaaaggacgaaacaccgtaatttctactaagtgtagatgccagtcgctcatatctctgtaatttctactaagtgtagatactatcgacgttcgtcccggtaatttctactaagtgtagatttttttnnnnnnnnnnaagcttggcgtggatccgatatcaactagatcttgagacaaatggcagtattcatccacaattttaaaagaaaaggggggattggggggtacagtgcaggggaaagaatagtagacataatagcaacagacatacaaactaaag

SEQ ID NO: 15812 - DNA, 301 bp, Artificial Sequence
  Atrx.1_NTC.25
  crRNA array
  misc_feature (148)..(157): n is a, c, g, or t
cttggctttatatatcttgtggaaaggacgaaacaccgtaatttctactaagtgtagatgccagtcgctcatatctctgtaatttctactaagtgtagattcgcgttatcgtgccgtgcgtaatttctactaagtgtagatttttttnnnnnnnnnnaagcttggcgtggatccgatatcaactagatcttgagacaaatggcagtattcatccacaattttaaaagaaaaggggggattggggggtacagtgcaggggaaagaatagtagacataatagcaacagacatacaaactaaag

SEQ ID NO: 15813 - DNA, 301 bp, Artificial Sequence
  Atrx.1_NTC.26
  crRNA array
  misc_feature (148)..(157): n is a, c, g, or t
cttggctttatatatcttgtggaaaggacgaaacaccgtaatttctactaagtgtagatgccagtcgctcatatctctgtaatttctactaagtgtagatcgcgacggcggttttaacactaatttctactaagtgtagatttttttnnnnnnnnnnaagcttggcgtggatccgatatcaactagatcttgagacaaatggcagtattcatccacaattttaaaagaaaaggggggattggggggtacagtgcaggggaaagaatagtagacataatagcaacagacatacaaactaaag

SEQ ID NO: 15814 - DNA, 301 bp, Artificial Sequence
  Atrx.1_NTC.27
  crRNA array
  misc_feature (148)..(157): n is a, c, g, or t
cttggctttatatatcttgtggaaaggacgaaacaccgtaatttctactaagtgtagatgccagtcgctcatatctctgtaatttctactaagtgtagatgtcgcgttgcgaccggcgcttaatttctactaagtgtagatttttttnnnnnnnnnnaagcttggcgtggatccgatatcaactagatcttgagacaaatggcagtattcatccacaattttaaaagaaaaggggggattggggggtacagtgcaggggaaagaatagtagacataatagcaacagacatacaaactaaag

SEQ ID NO: 15815 - DNA, 301 bp, Artificial Sequence
  Atrx.1_NTC.28
  crRNA array
  misc_feature (148)..(157): n is a, c, g, or t
cttggctttatatatcttgtggaaaggacgaaacaccgtaatttctactaagtgtagatgccagtcgctcatatctctgtaatttctactaagtgtagataccgctaatcggcgtaaacttaatttctactaagtgtagatttttttnnnnnnnnnnaagcttggcgtggatccgatatcaactagatcttgagacaaatggcagtattcatccacaattttaaaagaaaaggggggattggggggtacagtgcaggggaaagaatagtagacataatagcaacagacatacaaactaaag

SEQ ID NO: 15816 - DNA, 301 bp, Artificial Sequence
  Atrx.1_NTC.29
  crRNA array
  misc_feature (148)..(157): n is a, c, g, or t
cttggctttatatatcttgtggaaaggacgaaacaccgtaatttctactaagtgtagatgccagtcgctcatatctctgtaatttctactaagtgtagatcgcgatctataccgtctatataatttctactaagtgtagatttttttnnnnnnnnnnaagcttggcgtggatccgatatcaactagatcttgagacaaatggcagtattcatccacaattttaaaagaaaaggggggattggggggtacagtgcaggggaaagaatagtagacataatagcaacagacatacaaactaaag

SEQ ID NO: 15817 - DNA, 301 bp, Artificial Sequence
  Atrx.1_NTC.3
  crRNA array
  misc_feature (148)..(157): n is a, c, g, or t
cttggctttatatatcttgtggaaaggacgaaacaccgtaatttctactaagtgtagatgccagtcgctcatatctctgtaatttctactaagtgtagattcgacgcgagacgacgtacataatttctactaagtgtagatttttttnnnnnnnnnnaagcttggcgtggatccgatatcaactagatcttgagacaaatggcagtattcatccacaattttaaaagaaaaggggggattggggggtacagtgcaggggaaagaatagtagacataatagcaacagacatacaaactaaag

SEQ ID NO: 15818 - DNA, 301 bp, Artificial Sequence
  Atrx.1_NTC.30
  crRNA array
  misc_feature (148)..(157): n is a, c, g, or t
cttggctttatatatcttgtggaaaggacgaaacaccgtaatttctactaagtgtagatgccagtcgctcatatctctgtaatttctactaagtgtagatcgatcgtacgggtgtcctaataatttctactaagtgtagatttttttnnnnnnnnnnaagcttggcgtggatccgatatcaactagatcttgagacaaatggcagtattcatccacaattttaaaagaaaaggggggattggggggtacagtgcaggggaaagaatagtagacataatagcaacagacatacaaactaaag

SEQ ID NO: 15819 - DNA, 301 bp, Artificial Sequence
  Atrx.1_NTC.31
  crRNA array
  misc_feature (148)..(157): n is a, c, g, or t
cttggctttatatatcttgtggaaaggacgaaacaccgtaatttctactaagtgtagatgccagtcgctcatatctctgtaatttctactaagtgtagatgccgaccgcgtgattgtaggtaatttctactaagtgtagatttttttnnnnnnnnnnaagcttggcgtggatccgatatcaactagatcttgagacaaatggcagtattcatccacaattttaaaagaaaaggggggattggggggtacagtgcaggggaaagaatagtagacataatagcaacagacatacaaactaaag

SEQ ID NO: 15820 - DNA, 301 bp, Artificial Sequence
  Atrx.1_NTC.32
  crRNA array
  misc_feature (148)..(157): n is a, c, g, or t
cttggctttatatatcttgtggaaaggacgaaacaccgtaatttctactaagtgtagatgccagtcgctcatatctctgtaatttctactaagtgtagatgcacgttacgcccgggtcactaatttctactaagtgtagatttttttnnnnnnnnnnaagcttggcgtggatccgatatcaactagatcttgagacaaatggcagtattcatccacaattttaaaagaaaaggggggattggggggtacagtgcaggggaaagaatagtagacataatagcaacagacatacaaactaaag

SEQ ID NO: 15821 - DNA, 301 bp, Artificial Sequence
  Atrx.1_NTC.33
  crRNA array
  misc_feature (148)..(157): n is a, c, g, or t
cttggctttatatatcttgtggaaaggacgaaacaccgtaatttctactaagtgtagatgccagtcgctcatatctctgtaatttctactaagtgtagattaagcgaccgacgcattcgctaatttctactaagtgtagatttttttnnnnnnnnnnaagcttggcgtggatccgatatcaactagatcttgagacaaatggcagtattcatccacaattttaaaagaaaaggggggattggggggtacagtgcaggggaaagaatagtagacataatagcaacagacatacaaactaaag

SEQ ID NO: 15822 - DNA, 301 bp, Artificial Sequence
  Atrx.1_NTC.34
  crRNA array
  misc_feature (148)..(157): n is a, c, g, or t
cttggctttatatatcttgtggaaaggacgaaacaccgtaatttctactaagtgtagatgccagtcgctcatatctctgtaatttctactaagtgtagattagcgttcgacacgtgaaactaatttctactaagtgtagatttttttnnnnnnnnnnaagcttggcgtggatccgatatcaactagatcttgagacaaatggcagtattcatccacaattttaaaagaaaaggggggattggggggtacagtgcaggggaaagaatagtagacataatagcaacagacatacaaactaaag

SEQ ID NO: 15823 - DNA, 301 bp, Artificial Sequence
  Atrx.1_NTC.35
  crRNA array
  misc_feature (148)..(157): n is a, c, g, or t
cttggctttatatatcttgtggaaaggacgaaacaccgtaatttctactaagtgtagatgccagtcgctcatatctctgtaatttctactaagtgtagattggcgcgtaatcgctattcgtaatttctactaagtgtagatttttttnnnnnnnnnnaagcttggcgtggatccgatatcaactagatcttgagacaaatggcagtattcatccacaattttaaaagaaaaggggggattggggggtacagtgcaggggaaagaatagtagacataatagcaacagacatacaaactaaag

SEQ ID NO: 15824 - DNA, 301 bp, Artificial Sequence
  Atrx.1_NTC.36
  crRNA array
  misc_feature (148)..(157): n is a, c, g, or t
cttggctttatatatcttgtggaaaggacgaaacaccgtaatttctactaagtgtagatgccagtcgctcatatctctgtaatttctactaagtgtagatcaacccgccgtagcgggccttaatttctactaagtgtagatttttttnnnnnnnnnnaagcttggcgtggatccgatatcaactagatcttgagacaaatggcagtattcatccacaattttaaaagaaaaggggggattggggggtacagtgcaggggaaagaatagtagacataatagcaacagacatacaaactaaag

SEQ ID NO: 15825 - DNA, 301 bp, Artificial Sequence
  Atrx.1_NTC.37
  crRNA array
  misc_feature (148)..(157): n is a, c, g, or t
cttggctttatatatcttgtggaaaggacgaaacaccgtaatttctactaagtgtagatgccagtcgctcatatctctgtaatttctactaagtgtagattttgcgttgacgcgattacttaatttctactaagtgtagatttttttnnnnnnnnnnaagcttggcgtggatccgatatcaactagatcttgagacaaatggcagtattcatccacaattttaaaagaaaaggggggattggggggtacagtgcaggggaaagaatagtagacataatagcaacagacatacaaactaaag

SEQ ID NO: 15826 - DNA, 301 bp, Artificial Sequence
  Atrx.1_NTC.38
  crRNA array
  misc_feature (148)..(157): n is a, c, g, or t
cttggctttatatatcttgtggaaaggacgaaacaccgtaatttctactaagtgtagatgccagtcgctcatatctctgtaatttctactaagtgtagataacggagcgcgatactaccataatttctactaagtgtagatttttttnnnnnnnnnnaagcttggcgtggatccgatatcaactagatcttgagacaaatggcagtattcatccacaattttaaaagaaaaggggggattggggggtacagtgcaggggaaagaatagtagacataatagcaacagacatacaaactaaag

SEQ ID NO: 15827 - DNA, 301 bp, Artificial Sequence
  Atrx.1_NTC.39
  crRNA array
  misc_feature (148)..(157): n is a, c, g, or t
cttggctttatatatcttgtggaaaggacgaaacaccgtaatttctactaagtgtagatgccagtcgctcatatctctgtaatttctactaagtgtagatccggacgttataacgtttcttaatttctactaagtgtagatttttttnnnnnnnnnnaagcttggcgtggatccgatatcaactagatcttgagacaaatggcagtattcatccacaattttaaaagaaaaggggggattggggggtacagtgcaggggaaagaatagtagacataatagcaacagacatacaaactaaag

SEQ ID NO: 15828 - DNA, 301 bp, Artificial Sequence
  Atrx.1_NTC.4
  crRNA array
  misc_feature (148)..(157): n is a, c, g, or t
cttggctttatatatcttgtggaaaggacgaaacaccgtaatttctactaagtgtagatgccagtcgctcatatctctgtaatttctactaagtgtagatatacccgtcgcgaacgtgagtaatttctactaagtgtagatttttttnnnnnnnnnnaagcttggcgtggatccgatatcaactagatcttgagacaaatggcagtattcatccacaattttaaaagaaaaggggggattggggggtacagtgcaggggaaagaatagtagacataatagcaacagacatacaaactaaag

SEQ ID NO: 15829 - DNA, 301 bp, Artificial Sequence
  Atrx.1_NTC.40
  crRNA array
  misc_feature (148)..(157): n is a, c, g, or t
cttggctttatatatcttgtggaaaggacgaaacaccgtaatttctactaagtgtagatgccagtcgctcatatctctgtaatttctactaagtgtagatattcgcgaacccggccggaataatttctactaagtgtagatttttttnnnnnnnnnnaagcttggcgtggatccgatatcaactagatcttgagacaaatggcagtattcatccacaattttaaaagaaaaggggggattggggggtacagtgcaggggaaagaatagtagacataatagcaacagacatacaaactaaag

SEQ ID NO: 15830 - DNA, 301 bp, Artificial Sequence
  Atrx.1_NTC.41
  crRNA array
  misc_feature (148)..(157): n is a, c, g, or t
cttggctttatatatcttgtggaaaggacgaaacaccgtaatttctactaagtgtagatgccagtcgctcatatctctgtaatttctactaagtgtagatttgatggcgcgacgcgttattaatttctactaagtgtagatttttttnnnnnnnnnnaagcttggcgtggatccgatatcaactagatcttgagacaaatggcagtattcatccacaattttaaaagaaaaggggggattggggggtacagtgcaggggaaagaatagtagacataatagcaacagacatacaaactaaag

SEQ ID NO: 15831 - DNA, 301 bp, Artificial Sequence
  Atrx.1_NTC.42
  crRNA array
  misc_feature (148)..(157): n is a, c, g, or t
cttggctttatatatcttgtggaaaggacgaaacaccgtaatttctactaagtgtagatgccagtcgctcatatctctgtaatttctactaagtgtagatggtcaaatcgcggcgataactaatttctactaagtgtagatttttttnnnnnnnnnnaagcttggcgtggatccgatatcaactagatcttgagacaaatggcagtattcatccacaattttaaaagaaaaggggggattggggggtacagtgcaggggaaagaatagtagacataatagcaacagacatacaaactaaag

SEQ ID NO: 15832 - DNA, 301 bp, Artificial Sequence
  Atrx.1_NTC.43
  crRNA array
  misc_feature (148)..(157): n is a, c, g, or t
cttggctttatatatcttgtggaaaggacgaaacaccgtaatttctactaagtgtagatgccagtcgctcatatctctgtaatttctactaagtgtagatcgactcgcgcattgaactggtaatttctactaagtgtagatttttttnnnnnnnnnnaagcttggcgtggatccgatatcaactagatcttgagacaaatggcagtattcatccacaattttaaaagaaaaggggggattggggggtacagtgcaggggaaagaatagtagacataatagcaacagacatacaaactaaag

SEQ ID NO: 15833 - DNA, 301 bp, Artificial Sequence
  Atrx.1_NTC.44
  crRNA array
  misc_feature (148)..(157): n is a, c, g, or t
cttggctttatatatcttgtggaaaggacgaaacaccgtaatttctactaagtgtagatgccagtcgctcatatctctgtaatttctactaagtgtagatagcgtcgtacgatttatcgttaatttctactaagtgtagatttttttnnnnnnnnnnaagcttggcgtggatccgatatcaactagatcttgagacaaatggcagtattcatccacaattttaaaagaaaaggggggattggggggtacagtgcaggggaaagaatagtagacataatagcaacagacatacaaactaaag

SEQ ID NO: 15834 - DNA, 301 bp, Artificial Sequence
  Atrx.1_NTC.45
  crRNA array
  misc_feature (148)..(157): n is a, c, g, or t
cttggctttatatatcttgtggaaaggacgaaacaccgtaatttctactaagtgtagatgccagtcgctcatatctctgtaatttctactaagtgtagatcggaacgcgtgatactagggtaatttctactaagtgtagatttttttnnnnnnnnnnaagcttggcgtggatccgatatcaactagatcttgagacaaatggcagtattcatccacaattttaaaagaaaaggggggattggggggtacagtgcaggggaaagaatagtagacataatagcaacagacatacaaactaaag

SEQ ID NO: 15835 - DNA, 301 bp, Artificial Sequence
  Atrx.1_NTC.46
  crRNA array
  misc_feature (148)..(157): n is a, c, g, or t
cttggctttatatatcttgtggaaaggacgaaacaccgtaatttctactaagtgtagatgccagtcgctcatatctctgtaatttctactaagtgtagatagcgggtcgtagacgcgcggtaatttctactaagtgtagatttttttnnnnnnnnnnaagcttggcgtggatccgatatcaactagatcttgagacaaatggcagtattcatccacaattttaaaagaaaaggggggattggggggtacagtgcaggggaaagaatagtagacataatagcaacagacatacaaactaaag

SEQ ID NO: 15836 - DNA, 301 bp, Artificial Sequence
  Atrx.1_NTC.47
  crRNA array
  misc_feature (148)..(157): n is a, c, g, or t
cttggctttatatatcttgtggaaaggacgaaacaccgtaatttctactaagtgtagatgccagtcgctcatatctctgtaatttctactaagtgtagattctcgtatcgcgattgttaataatttctactaagtgtagatttttttnnnnnnnnnnaagcttggcgtggatccgatatcaactagatcttgagacaaatggcagtattcatccacaattttaaaagaaaaggggggattggggggtacagtgcaggggaaagaatagtagacataatagcaacagacatacaaactaaag

SEQ ID NO: 15837 - DNA, 301 bp, Artificial Sequence
  Atrx.1_NTC.48
  crRNA array
  misc_feature (148)..(157): n is a, c, g, or t
cttggctttatatatcttgtggaaaggacgaaacaccgtaatttctactaagtgtagatgccagtcgctcatatctctgtaatttctactaagtgtagatcggtcgactacggctgttagtaatttctactaagtgtagatttttttnnnnnnnnnnaagcttggcgtggatccgatatcaactagatcttgagacaaatggcagtattcatccacaattttaaaagaaaaggggggattggggggtacagtgcaggggaaagaatagtagacataatagcaacagacatacaaactaaag

SEQ ID NO: 15838 - DNA, 301 bp, Artificial Sequence
  Atrx.1_NTC.49
  crRNA array
  misc_feature (148)..(157): n is a, c, g, or t
cttggctttatatatcttgtggaaaggacgaaacaccgtaatttctactaagtgtagatgccagtcgctcatatctctgtaatttctactaagtgtagattcggggcgcgtcaactgaattaatttctactaagtgtagatttttttnnnnnnnnnnaagcttggcgtggatccgatatcaactagatcttgagacaaatggcagtattcatccacaattttaaaagaaaaggggggattggggggtacagtgcaggggaaagaatagtagacataatagcaacagacatacaaactaaag

SEQ ID NO: 15839 - DNA, 301 bp, Artificial Sequence
  Atrx.1_NTC.5
  crRNA array
  misc_feature (148)..(157): n is a, c, g, or t
cttggctttatatatcttgtggaaaggacgaaacaccgtaatttctactaagtgtagatgccagtcgctcatatctctgtaatttctactaagtgtagatgcttacgcgtcgcgaatgtataatttctactaagtgtagatttttttnnnnnnnnnnaagcttggcgtggatccgatatcaactagatcttgagacaaatggcagtattcatccacaattttaaaagaaaaggggggattggggggtacagtgcaggggaaagaatagtagacataatagcaacagacatacaaactaaag

SEQ ID NO: 15840 - DNA, 301 bp, Artificial Sequence
  Atrx.1_NTC.50
  crRNA array
  misc_feature (148)..(157): n is a, c, g, or t
cttggctttatatatcttgtggaaaggacgaaacaccgtaatttctactaagtgtagatgccagtcgctcatatctctgtaatttctactaagtgtagatattgccgctcgcgcaaaatctaatttctactaagtgtagatttttttnnnnnnnnnnaagcttggcgtggatccgatatcaactagatcttgagacaaatggcagtattcatccacaattttaaaagaaaaggggggattggggggtacagtgcaggggaaagaatagtagacataatagcaacagacatacaaactaaag

SEQ ID NO: 15841 - DNA, 301 bp, Artificial Sequence
  Atrx.1_NTC.51
  crRNA array
  misc_feature (148)..(157): n is a, c, g, or t
cttggctttatatatcttgtggaaaggacgaaacaccgtaatttctactaagtgtagatgccagtcgctcatatctctgtaatttctactaagtgtagattaacgcgcaacacgccaatgtaatttctactaagtgtagatttttttnnnnnnnnnnaagcttggcgtggatccgatatcaactagatcttgagacaaatggcagtattcatccacaattttaaaagaaaaggggggattggggggtacagtgcaggggaaagaatagtagacataatagcaacagacatacaaactaaag

SEQ ID NO: 15842 - DNA, 301 bp, Artificial Sequence
  Atrx.1_NTC.6
  crRNA array
  misc_feature (148)..(157): n is a, c, g, or t
cttggctttatatatcttgtggaaaggacgaaacaccgtaatttctactaagtgtagatgccagtcgctcatatctctgtaatttctactaagtgtagatcgaatcgcgcctacgggaattaatttctactaagtgtagatttttttnnnnnnnnnnaagcttggcgtggatccgatatcaactagatcttgagacaaatggcagtattcatccacaattttaaaagaaaaggggggattggggggtacagtgcaggggaaagaatagtagacataatagcaacagacatacaaactaaag

SEQ ID NO: 15843 - DNA, 301 bp, Artificial Sequence
  Atrx.1_NTC.7
  crRNA array
  misc_feature (148)..(157): n is a, c, g, or t
cttggctttatatatcttgtggaaaggacgaaacaccgtaatttctactaagtgtagatgccagtcgctcatatctctgtaatttctactaagtgtagatcgccgaacggataagactattaatttctactaagtgtagatttttttnnnnnnnnnnaagcttggcgtggatccgatatcaactagatcttgagacaaatggcagtattcatccacaattttaaaagaaaaggggggattggggggtacagtgcaggggaaagaatagtagacataatagcaacagacatacaaactaaag

SEQ ID NO: 15844 - DNA, 301 bp, Artificial Sequence
  Atrx.1_NTC.8
  crRNA array
  misc_feature (148)..(157): n is a, c, g, or t
cttggctttatatatcttgtggaaaggacgaaacaccgtaatttctactaagtgtagatgccagtcgctcatatctctgtaatttctactaagtgtagatcgaccgaggttacgctgggataatttctactaagtgtagatttttttnnnnnnnnnnaagcttggcgtggatccgatatcaactagatcttgagacaaatggcagtattcatccacaattttaaaagaaaaggggggattggggggtacagtgcaggggaaagaatagtagacataatagcaacagacatacaaactaaag

SEQ ID NO: 15845 - DNA, 301 bp, Artificial Sequence
  Atrx.1_NTC.9
  crRNA array
  misc_feature (148)..(157): n is a, c, g, or t
cttggctttatatatcttgtggaaaggacgaaacaccgtaatttctactaagtgtagatgccagtcgctcatatctctgtaatttctactaagtgtagatatcgccgtacggctatggcataatttctactaagtgtagatttttttnnnnnnnnnnaagcttggcgtggatccgatatcaactagatcttgagacaaatggcagtattcatccacaattttaaaagaaaaggggggattggggggtacagtgcaggggaaagaatagtagacataatagcaacagacatacaaactaaag

SEQ ID NO: 15846 - DNA, 301 bp, Artificial Sequence
  Atrx.2_NTC.0
  crRNA array
  misc_feature (148)..(157): n is a, c, g, or t
cttggctttatatatcttgtggaaaggacgaaacaccgtaatttctactaagtgtagatgcagcatgggggtatccctttaatttctactaagtgtagattatagcgtcgcgcgctaatttaatttctactaagtgtagatttttttnnnnnnnnnnaagcttggcgtggatccgatatcaactagatcttgagacaaatggcagtattcatccacaattttaaaagaaaaggggggattggggggtacagtgcaggggaaagaatagtagacataatagcaacagacatacaaactaaag

SEQ ID NO: 15847 - DNA, 301 bp, Artificial Sequence
  Atrx.2_NTC.1
  crRNA array
  misc_feature (148)..(157): n is a, c, g, or t
cttggctttatatatcttgtggaaaggacgaaacaccgtaatttctactaagtgtagatgcagcatgggggtatccctttaatttctactaagtgtagatcgcgtaaccgttccggctcctaatttctactaagtgtagatttttttnnnnnnnnnnaagcttggcgtggatccgatatcaactagatcttgagacaaatggcagtattcatccacaattttaaaagaaaaggggggattggggggtacagtgcaggggaaagaatagtagacataatagcaacagacatacaaactaaag

SEQ ID NO: 15848 - DNA, 301 bp, Artificial Sequence
  Atrx.2_NTC.10
  crRNA array
  misc_feature (148)..(157): n is a, c, g, or t
cttggctttatatatcttgtggaaaggacgaaacaccgtaatttctactaagtgtagatgcagcatgggggtatccctttaatttctactaagtgtagatcgctaagttcgcgcgggccgtaatttctactaagtgtagatttttttnnnnnnnnnnaagcttggcgtggatccgatatcaactagatcttgagacaaatggcagtattcatccacaattttaaaagaaaaggggggattggggggtacagtgcaggggaaagaatagtagacataatagcaacagacatacaaactaaag

SEQ ID NO: 15849 - DNA, 301 bp, Artificial Sequence
  Atrx.2_NTC.11
  crRNA array
  misc_feature (148)..(157): n is a, c, g, or t
cttggctttatatatcttgtggaaaggacgaaacaccgtaatttctactaagtgtagatgcagcatgggggtatccctttaatttctactaagtgtagatcgttcgtcgacgaagcaatctaatttctactaagtgtagatttttttnnnnnnnnnnaagcttggcgtggatccgatatcaactagatcttgagacaaatggcagtattcatccacaattttaaaagaaaaggggggattggggggtacagtgcaggggaaagaatagtagacataatagcaacagacatacaaactaaag

SEQ ID NO: 15850 - DNA, 301 bp, Artificial Sequence
  Atrx.2_NTC.12
  crRNA array
  misc_feature (148)..(157): n is a, c, g, or t
cttggctttatatatcttgtggaaaggacgaaacaccgtaatttctactaagtgtagatgcagcatgggggtatccctttaatttctactaagtgtagatcgccgacgattaatcaatagtaatttctactaagtgtagatttttttnnnnnnnnnnaagcttggcgtggatccgatatcaactagatcttgagacaaatggcagtattcatccacaattttaaaagaaaaggggggattggggggtacagtgcaggggaaagaatagtagacataatagcaacagacatacaaactaaag

SEQ ID NO: 15851 - DNA, 301 bp, Artificial Sequence
  Atrx.2_NTC.13
  crRNA array
  misc_feature (148)..(157): n is a, c, g, or t
cttggctttatatatcttgtggaaaggacgaaacaccgtaatttctactaagtgtagatgcagcatgggggtatccctttaatttctactaagtgtagatgaccgttgtatcgcgatcaataatttctactaagtgtagatttttttnnnnnnnnnnaagcttggcgtggatccgatatcaactagatcttgagacaaatggcagtattcatccacaattttaaaagaaaaggggggattggggggtacagtgcaggggaaagaatagtagacataatagcaacagacatacaaactaaag

SEQ ID NO: 15852 - DNA, 301 bp, Artificial Sequence
  Atrx.2_NTC.14
  crRNA array
  misc_feature (148)..(157): n is a, c, g, or t
cttggctttatatatcttgtggaaaggacgaaacaccgtaatttctactaagtgtagatgcagcatgggggtatccctttaatttctactaagtgtagatccgttcgtgcgatagtgttttaatttctactaagtgtagatttttttnnnnnnnnnnaagcttggcgtggatccgatatcaactagatcttgagacaaatggcagtattcatccacaattttaaaagaaaaggggggattggggggtacagtgcaggggaaagaatagtagacataatagcaacagacatacaaactaaag

SEQ ID NO: 15853 - DNA, 301 bp, Artificial Sequence
  Atrx.2_NTC.15
  crRNA array
  misc_feature (148)..(157): n is a, c, g, or t
cttggctttatatatcttgtggaaaggacgaaacaccgtaatttctactaagtgtagatgcagcatgggggtatccctttaatttctactaagtgtagatgttgtcgtgccgcgaatttataatttctactaagtgtagatttttttnnnnnnnnnnaagcttggcgtggatccgatatcaactagatcttgagacaaatggcagtattcatccacaattttaaaagaaaaggggggattggggggtacagtgcaggggaaagaatagtagacataatagcaacagacatacaaactaaag

SEQ ID NO: 15854 - DNA, 301 bp, Artificial Sequence
  Atrx.2_NTC.16
  crRNA array
  misc_feature (148)..(157): n is a, c, g, or t
cttggctttatatatcttgtggaaaggacgaaacaccgtaatttctactaagtgtagatgcagcatgggggtatccctttaatttctactaagtgtagatcggtacgttagacgaaaatttaatttctactaagtgtagatttttttnnnnnnnnnnaagcttggcgtggatccgatatcaactagatcttgagacaaatggcagtattcatccacaattttaaaagaaaaggggggattggggggtacagtgcaggggaaagaatagtagacataatagcaacagacatacaaactaaag

SEQ ID NO: 15855 - DNA, 301 bp, Artificial Sequence
  Atrx.2_NTC.17
  crRNA array
  misc_feature (148)..(157): n is a, c, g, or t
cttggctttatatatcttgtggaaaggacgaaacaccgtaatttctactaagtgtagatgcagcatgggggtatccctttaatttctactaagtgtagattatcgaacgctatcgaacgttaatttctactaagtgtagatttttttnnnnnnnnnnaagcttggcgtggatccgatatcaactagatcttgagacaaatggcagtattcatccacaattttaaaagaaaaggggggattggggggtacagtgcaggggaaagaatagtagacataatagcaacagacatacaaactaaag

SEQ ID NO: 15856 - DNA, 301 bp, Artificial Sequence
  Atrx.2_NTC.18
  crRNA array
  misc_feature (148)..(157): n is a, c, g, or t
cttggctttatatatcttgtggaaaggacgaaacaccgtaatttctactaagtgtagatgcagcatgggggtatccctttaatttctactaagtgtagattccggttacgaccggcaaaataatttctactaagtgtagatttttttnnnnnnnnnnaagcttggcgtggatccgatatcaactagatcttgagacaaatggcagtattcatccacaattttaaaagaaaaggggggattggggggtacagtgcaggggaaagaatagtagacataatagcaacagacatacaaactaaag

SEQ ID NO: 15857 - DNA, 301 bp, Artificial Sequence
  Atrx.2_NTC.19
  crRNA array
  misc_feature (148)..(157): n is a, c, g, or t
cttggctttatatatcttgtggaaaggacgaaacaccgtaatttctactaagtgtagatgcagcatgggggtatccctttaatttctactaagtgtagatcgtcgtagaacgatacccgataatttctactaagtgtagatttttttnnnnnnnnnnaagcttggcgtggatccgatatcaactagatcttgagacaaatggcagtattcatccacaattttaaaagaaaaggggggattggggggtacagtgcaggggaaagaatagtagacataatagcaacagacatacaaactaaag

SEQ ID NO: 15858 - DNA, 301 bp, Artificial Sequence
  Atrx.2_NTC.2
  crRNA array
  misc_feature (148)..(157): n is a, c, g, or t
cttggctttatatatcttgtggaaaggacgaaacaccgtaatttctactaagtgtagatgcagcatgggggtatccctttaatttctactaagtgtagatttatgtcgcgccgcgacccgtaatttctactaagtgtagatttttttnnnnnnnnnnaagcttggcgtggatccgatatcaactagatcttgagacaaatggcagtattcatccacaattttaaaagaaaaggggggattggggggtacagtgcaggggaaagaatagtagacataatagcaacagacatacaaactaaag

SEQ ID NO: 15859 - DNA, 301 bp, Artificial Sequence
  Atrx.2_NTC.20
  crRNA array
  misc_feature (148)..(157): n is a, c, g, or t
cttggctttatatatcttgtggaaaggacgaaacaccgtaatttctactaagtgtagatgcagcatgggggtatccctttaatttctactaagtgtagatattccggcgcgaccagaagataatttctactaagtgtagatttttttnnnnnnnnnnaagcttggcgtggatccgatatcaactagatcttgagacaaatggcagtattcatccacaattttaaaagaaaaggggggattggggggtacagtgcaggggaaagaatagtagacataatagcaacagacatacaaactaaag

SEQ ID NO: 15860 - DNA, 301 bp, Artificial Sequence
  Atrx.2_NTC.21
  crRNA array
  misc_feature (148)..(157): n is a, c, g, or t
cttggctttatatatcttgtggaaaggacgaaacaccgtaatttctactaagtgtagatgcagcatgggggtatccctttaatttctactaagtgtagatgtataacttcgcgcggtccgtaatttctactaagtgtagatttttttnnnnnnnnnnaagcttggcgtggatccgatatcaactagatcttgagacaaatggcagtattcatccacaattttaaaagaaaaggggggattggggggtacagtgcaggggaaagaatagtagacataatagcaacagacatacaaactaaag

SEQ ID NO: 15861 - DNA, 301 bp, Artificial Sequence
  Atrx.2_NTC.22
  crRNA array
  misc_feature (148)..(157): n is a, c, g, or t
cttggctttatatatcttgtggaaaggacgaaacaccgtaatttctactaagtgtagatgcagcatgggggtatccctttaatttctactaagtgtagatgcgcgtcaacgtaatgtgcctaatttctactaagtgtagatttttttnnnnnnnnnnaagcttggcgtggatccgatatcaactagatcttgagacaaatggcagtattcatccacaattttaaaagaaaaggggggattggggggtacagtgcaggggaaagaatagtagacataatagcaacagacatacaaactaaag

SEQ ID NO: 15862 - DNA, 301 bp, Artificial Sequence
  Atrx.2_NTC.23
  crRNA array
  misc_feature (148)..(157): n is a, c, g, or t
cttggctttatatatcttgtggaaaggacgaaacaccgtaatttctactaagtgtagatgcagcatgggggtatccctttaatttctactaagtgtagatacgcgctattatcgtaggtgtaatttctactaagtgtagatttttttnnnnnnnnnnaagcttggcgtggatccgatatcaactagatcttgagacaaatggcagtattcatccacaattttaaaagaaaaggggggattggggggtacagtgcaggggaaagaatagtagacataatagcaacagacatacaaactaaag

SEQ ID NO: 15863 - DNA, 301 bp, Artificial Sequence
  Atrx.2_NTC.24
  crRNA array
  misc_feature (148)..(157): n is a, c, g, or t
cttggctttatatatcttgtggaaaggacgaaacaccgtaatttctactaagtgtagatgcagcatgggggtatccctttaatttctactaagtgtagatactatcgacgttcgtcccggtaatttctactaagtgtagatttttttnnnnnnnnnnaagcttggcgtggatccgatatcaactagatcttgagacaaatggcagtattcatccacaattttaaaagaaaaggggggattggggggtacagtgcaggggaaagaatagtagacataatagcaacagacatacaaactaaag

SEQ ID NO: 15864 - DNA, 301 bp, Artificial Sequence
  Atrx.2_NTC.25
  crRNA array
  misc_feature (148)..(157): n is a, c, g, or t
cttggctttatatatcttgtggaaaggacgaaacaccgtaatttctactaagtgtagatgcagcatgggggtatccctttaatttctactaagtgtagattcgcgttatcgtgccgtgcgtaatttctactaagtgtagatttttttnnnnnnnnnnaagcttggcgtggatccgatatcaactagatcttgagacaaatggcagtattcatccacaattttaaaagaaaaggggggattggggggtacagtgcaggggaaagaatagtagacataatagcaacagacatacaaactaaag

SEQ ID NO: 15865 - DNA, 301 bp, Artificial Sequence
  Atrx.2_NTC.26
  crRNA array
  misc_feature (148)..(157): n is a, c, g, or t
cttggctttatatatcttgtggaaaggacgaaacaccgtaatttctactaagtgtagatgcagcatgggggtatccctttaatttctactaagtgtagatcgcgacggcggttttaacactaatttctactaagtgtagatttttttnnnnnnnnnnaagcttggcgtggatccgatatcaactagatcttgagacaaatggcagtattcatccacaattttaaaagaaaaggggggattggggggtacagtgcaggggaaagaatagtagacataatagcaacagacatacaaactaaag

SEQ ID NO: 15866 - DNA, 301 bp, Artificial Sequence
  Atrx.2_NTC.27
  crRNA array
  misc_feature (148)..(157): n is a, c, g, or t
cttggctttatatatcttgtggaaaggacgaaacaccgtaatttctactaagtgtagatgcagcatgggggtatccctttaatttctactaagtgtagatgtcgcgttgcgaccggcgcttaatttctactaagtgtagatttttttnnnnnnnnnnaagcttggcgtggatccgatatcaactagatcttgagacaaatggcagtattcatccacaattttaaaagaaaaggggggattggggggtacagtgcaggggaaagaatagtagacataatagcaacagacatacaaactaaag

SEQ ID NO: 15867 - DNA, 301 bp, Artificial Sequence
  Atrx.2_NTC.28
  crRNA array
  misc_feature (148)..(157): n is a, c, g, or t
cttggctttatatatcttgtggaaaggacgaaacaccgtaatttctactaagtgtagatgcagcatgggggtatccctttaatttctactaagtgtagataccgctaatcggcgtaaacttaatttctactaagtgtagatttttttnnnnnnnnnnaagcttggcgtggatccgatatcaactagatcttgagacaaatggcagtattcatccacaattttaaaagaaaaggggggattggggggtacagtgcaggggaaagaatagtagacataatagcaacagacatacaaactaaag

SEQ ID NO: 15868 - DNA, 301 bp, Artificial Sequence
  Atrx.2_NTC.29
  crRNA array
  misc_feature (148)..(157): n is a, c, g, or t
cttggctttatatatcttgtggaaaggacgaaacaccgtaatttctactaagtgtagatgcagcatgggggtatccctttaatttctactaagtgtagatcgcgatctataccgtctatataatttctactaagtgtagatttttttnnnnnnnnnnaagcttggcgtggatccgatatcaactagatcttgagacaaatggcagtattcatccacaattttaaaagaaaaggggggattggggggtacagtgcaggggaaagaatagtagacataatagcaacagacatacaaactaaag

SEQ ID NO: 15869 - DNA, 301 bp, Artificial Sequence
  Atrx.2_NTC.3
  crRNA array
  misc_feature (148)..(157): n is a, c, g, or t
cttggctttatatatcttgtggaaaggacgaaacaccgtaatttctactaagtgtagatgcagcatgggggtatccctttaatttctactaagtgtagattcgacgcgagacgacgtacataatttctactaagtgtagatttttttnnnnnnnnnnaagcttggcgtggatccgatatcaactagatcttgagacaaatggcagtattcatccacaattttaaaagaaaaggggggattggggggtacagtgcaggggaaagaatagtagacataatagcaacagacatacaaactaaag

SEQ ID NO: 15870 - DNA, 301 bp, Artificial Sequence
  Atrx.2_NTC.30
  crRNA array
  misc_feature (148)..(157): n is a, c, g, or t
cttggctttatatatcttgtggaaaggacgaaacaccgtaatttctactaagtgtagatgcagcatgggggtatccctttaatttctactaagtgtagatcgatcgtacgggtgtcctaataatttctactaagtgtagatttttttnnnnnnnnnnaagcttggcgtggatccgatatcaactagatcttgagacaaatggcagtattcatccacaattttaaaagaaaaggggggattggggggtacagtgcaggggaaagaatagtagacataatagcaacagacatacaaactaaag

SEQ ID NO: 15871 - DNA, 301 bp, Artificial Sequence
  Atrx.2_NTC.31
  crRNA array
  misc_feature (148)..(157): n is a, c, g, or t
cttggctttatatatcttgtggaaaggacgaaacaccgtaatttctactaagtgtagatgcagcatgggggtatccctttaatttctactaagtgtagatgccgaccgcgtgattgtaggtaatttctactaagtgtagatttttttnnnnnnnnnnaagcttggcgtggatccgatatcaactagatcttgagacaaatggcagtattcatccacaattttaaaagaaaaggggggattggggggtacagtgcaggggaaagaatagtagacataatagcaacagacatacaaactaaag

SEQ ID NO: 15872 - DNA, 301 bp, Artificial Sequence
  Atrx.2_NTC.32
  crRNA array
  misc_feature (148)..(157): n is a, c, g, or t
cttggctttatatatcttgtggaaaggacgaaacaccgtaatttctactaagtgtagatgcagcatgggggtatccctttaatttctactaagtgtagatgcacgttacgcccgggtcactaatttctactaagtgtagatttttttnnnnnnnnnnaagcttggcgtggatccgatatcaactagatcttgagacaaatggcagtattcatccacaattttaaaagaaaaggggggattggggggtacagtgcaggggaaagaatagtagacataatagcaacagacatacaaactaaag

SEQ ID NO: 15873 - DNA, 301 bp, Artificial Sequence
  Atrx.2_NTC.33
  crRNA array
  misc_feature (148)..(157): n is a, c, g, or t
cttggctttatatatcttgtggaaaggacgaaacaccgtaatttctactaagtgtagatgcagcatgggggtatccctttaatttctactaagtgtagattaagcgaccgacgcattcgctaatttctactaagtgtagatttttttnnnnnnnnnnaagcttggcgtggatccgatatcaactagatcttgagacaaatggcagtattcatccacaattttaaaagaaaaggggggattggggggtacagtgcaggggaaagaatagtagacataatagcaacagacatacaaactaaag

SEQ ID NO: 15874 - DNA, 301 bp, Artificial Sequence
  Atrx.2_NTC.34
  crRNA array
  misc_feature (148)..(157): n is a, c, g, or t
cttggctttatatatcttgtggaaaggacgaaacaccgtaatttctactaagtgtagatgcagcatgggggtatccctttaatttctactaagtgtagattagcgttcgacacgtgaaactaatttctactaagtgtagatttttttnnnnnnnnnnaagcttggcgtggatccgatatcaactagatcttgagacaaatggcagtattcatccacaattttaaaagaaaaggggggattggggggtacagtgcaggggaaagaatagtagacataatagcaacagacatacaaactaaag

SEQ ID NO: 15875 - DNA, 301 bp, Artificial Sequence
  Atrx.2_NTC.35
  crRNA array
  misc_feature (148)..(157): n is a, c, g, or t
cttggctttatatatcttgtggaaaggacgaaacaccgtaatttctactaagtgtagatgcagcatgggggtatccctttaatttctactaagtgtagattggcgcgtaatcgctattcgtaatttctactaagtgtagatttttttnnnnnnnnnnaagcttggcgtggatccgatatcaactagatcttgagacaaatggcagtattcatccacaattttaaaagaaaaggggggattggggggtacagtgcaggggaaagaatagtagacataatagcaacagacatacaaactaaag

SEQ ID NO: 15876 - DNA, 301 bp, Artificial Sequence
  Atrx.2_NTC.36
  crRNA array
  misc_feature (148)..(157): n is a, c, g, or t
cttggctttatatatcttgtggaaaggacgaaacaccgtaatttctactaagtgtagatgcagcatgggggtatccctttaatttctactaagtgtagatcaacccgccgtagcgggccttaatttctactaagtgtagatttttttnnnnnnnnnnaagcttggcgtggatccgatatcaactagatcttgagacaaatggcagtattcatccacaattttaaaagaaaaggggggattggggggtacagtgcaggggaaagaatagtagacataatagcaacagacatacaaactaaag

SEQ ID NO: 15877 - DNA, 301 bp, Artificial Sequence
  Atrx.2_NTC.37
  crRNA array
  misc_feature (148)..(157): n is a, c, g, or t
cttggctttatatatcttgtggaaaggacgaaacaccgtaatttctactaagtgtagatgcagcatgggggtatccctttaatttctactaagtgtagattttgcgttgacgcgattacttaatttctactaagtgtagatttttttnnnnnnnnnnaagcttggcgtggatccgatatcaactagatcttgagacaaatggcagtattcatccacaattttaaaagaaaaggggggattggggggtacagtgcaggggaaagaatagtagacataatagcaacagacatacaaactaaag

SEQ ID NO: 15878 - DNA, 301 bp, Artificial Sequence
  Atrx.2_NTC.38
  crRNA array
  misc_feature (148)..(157): n is a, c, g, or t
cttggctttatatatcttgtggaaaggacgaaacaccgtaatttctactaagtgtagatgcagcatgggggtatccctttaatttctactaagtgtagataacggagcgcgatactaccataatttctactaagtgtagatttttttnnnnnnnnnnaagcttggcgtggatccgatatcaactagatcttgagacaaatggcagtattcatccacaattttaaaagaaaaggggggattggggggtacagtgcaggggaaagaatagtagacataatagcaacagacatacaaactaaag

SEQ ID NO: 15879 - DNA, 301 bp, Artificial Sequence
  Atrx.2_NTC.39
  crRNA array
  misc_feature (148)..(157): n is a, c, g, or t
cttggctttatatatcttgtggaaaggacgaaacaccgtaatttctactaagtgtagatgcagcatgggggtatccctttaatttctactaagtgtagatccggacgttataacgtttcttaatttctactaagtgtagatttttttnnnnnnnnnnaagcttggcgtggatccgatatcaactagatcttgagacaaatggcagtattcatccacaattttaaaagaaaaggggggattggggggtacagtgcaggggaaagaatagtagacataatagcaacagacatacaaactaaag

SEQ ID NO: 15880 - DNA, 301 bp, Artificial Sequence
  Atrx.2_NTC.4
  crRNA array
  misc_feature (148)..(157): n is a, c, g, or t
cttggctttatatatcttgtggaaaggacgaaacaccgtaatttctactaagtgtagatgcagcatgggggtatccctttaatttctactaagtgtagatatacccgtcgcgaacgtgagtaatttctactaagtgtagatttttttnnnnnnnnnnaagcttggcgtggatccgatatcaactagatcttgagacaaatggcagtattcatccacaattttaaaagaaaaggggggattggggggtacagtgcaggggaaagaatagtagacataatagcaacagacatacaaactaaag

SEQ ID NO: 15881 - DNA, 301 bp, Artificial Sequence
  Atrx.2_NTC.40
  crRNA array
  misc_feature (148)..(157): n is a, c, g, or t
cttggctttatatatcttgtggaaaggacgaaacaccgtaatttctactaagtgtagatgcagcatgggggtatccctttaatttctactaagtgtagatattcgcgaacccggccggaataatttctactaagtgtagatttttttnnnnnnnnnnaagcttggcgtggatccgatatcaactagatcttgagacaaatggcagtattcatccacaattttaaaagaaaaggggggattggggggtacagtgcaggggaaagaatagtagacataatagcaacagacatacaaactaaag

SEQ ID NO: 15882 - DNA, 301 bp, Artificial Sequence
  Atrx.2_NTC.41
  crRNA array
  misc_feature (148)..(157): n is a, c, g, or t
cttggctttatatatcttgtggaaaggacgaaacaccgtaatttctactaagtgtagatgcagcatgggggtatccctttaatttctactaagtgtagatttgatggcgcgacgcgttattaatttctactaagtgtagatttttttnnnnnnnnnnaagcttggcgtggatccgatatcaactagatcttgagacaaatggcagtattcatccacaattttaaaagaaaaggggggattggggggtacagtgcaggggaaagaatagtagacataatagcaacagacatacaaactaaag

SEQ ID NO: 15883 - DNA, 301 bp, Artificial Sequence
  Atrx.2_NTC.42
  crRNA array
  misc_feature (148)..(157): n is a, c, g, or t
cttggctttatatatcttgtggaaaggacgaaacaccgtaatttctactaagtgtagatgcagcatgggggtatccctttaatttctactaagtgtagatggtcaaatcgcggcgataactaatttctactaagtgtagatttttttnnnnnnnnnnaagcttggcgtggatccgatatcaactagatcttgagacaaatggcagtattcatccacaattttaaaagaaaaggggggattggggggtacagtgcaggggaaagaatagtagacataatagcaacagacatacaaactaaag

SEQ ID NO: 15884 - DNA, 301 bp, Artificial Sequence
  Atrx.2_NTC.43
  crRNA array
  misc_feature (148)..(157): n is a, c, g, or t
cttggctttatatatcttgtggaaaggacgaaacaccgtaatttctactaagtgtagatgcagcatgggggtatccctttaatttctactaagtgtagatcgactcgcgcattgaactggtaatttctactaagtgtagatttttttnnnnnnnnnnaagcttggcgtggatccgatatcaactagatcttgagacaaatggcagtattcatccacaattttaaaagaaaaggggggattggggggtacagtgcaggggaaagaatagtagacataatagcaacagacatacaaactaaag

SEQ ID NO: 15885 - DNA, 301 bp, Artificial Sequence
  Atrx.2_NTC.44
  crRNA array
  misc_feature (148)..(157): n is a, c, g, or t
cttggctttatatatcttgtggaaaggacgaaacaccgtaatttctactaagtgtagatgcagcatgggggtatccctttaatttctactaagtgtagatagcgtcgtacgatttatcgttaatttctactaagtgtagatttttttnnnnnnnnnnaagcttggcgtggatccgatatcaactagatcttgagacaaatggcagtattcatccacaattttaaaagaaaaggggggattggggggtacagtgcaggggaaagaatagtagacataatagcaacagacatacaaactaaag

SEQ ID NO: 15886 - DNA, 301 bp, Artificial Sequence
  Atrx.2_NTC.45
  crRNA array
  misc_feature (148)..(157): n is a, c, g, or t
cttggctttatatatcttgtggaaaggacgaaacaccgtaatttctactaagtgtagatgcagcatgggggtatccctttaatttctactaagtgtagatcggaacgcgtgatactagggtaatttctactaagtgtagatttttttnnnnnnnnnnaagcttggcgtggatccgatatcaactagatcttgagacaaatggcagtattcatccacaattttaaaagaaaaggggggattggggggtacagtgcaggggaaagaatagtagacataatagcaacagacatacaaactaaag

SEQ ID NO: 15887 - DNA, 301 bp, Artificial Sequence
  Atrx.2_NTC.46
  crRNA array
  misc_feature (148)..(157): n is a, c, g, or t
cttggctttatatatcttgtggaaaggacgaaacaccgtaatttctactaagtgtagatgcagcatgggggtatccctttaatttctactaagtgtagatagcgggtcgtagacgcgcggtaatttctactaagtgtagatttttttnnnnnnnnnnaagcttggcgtggatccgatatcaactagatcttgagacaaatggcagtattcatccacaattttaaaagaaaaggggggattggggggtacagtgcaggggaaagaatagtagacataatagcaacagacatacaaactaaag

SEQ ID NO: 15888 - DNA, 301 bp, Artificial Sequence
  Atrx.2_NTC.47
  crRNA array
  misc_feature (148)..(157): n is a, c, g, or t
cttggctttatatatcttgtggaaaggacgaaacaccgtaatttctactaagtgtagatgcagcatgggggtatccctttaatttctactaagtgtagattctcgtatcgcgattgttaataatttctactaagtgtagatttttttnnnnnnnnnnaagcttggcgtggatccgatatcaactagatcttgagacaaatggcagtattcatccacaattttaaaagaaaaggggggattggggggtacagtgcaggggaaagaatagtagacataatagcaacagacatacaaactaaag

SEQ ID NO: 15889 - DNA, 301 bp, Artificial Sequence
  Atrx.2_NTC.48
  crRNA array
  misc_feature (148)..(157): n is a, c, g, or t
cttggctttatatatcttgtggaaaggacgaaacaccgtaatttctactaagtgtagatgcagcatgggggtatccctttaatttctactaagtgtagatcggtcgactacggctgttagtaatttctactaagtgtagatttttttnnnnnnnnnnaagcttggcgtggatccgatatcaactagatcttgagacaaatggcagtattcatccacaattttaaaagaaaaggggggattggggggtacagtgcaggggaaagaatagtagacataatagcaacagacatacaaactaaag

SEQ ID NO: 15890 - DNA, 301 bp, Artificial Sequence
  Atrx.2_NTC.49
  crRNA array
  misc_feature (148)..(157): n is a, c, g, or t
cttggctttatatatcttgtggaaaggacgaaacaccgtaatttctactaagtgtagatgcagcatgggggtatccctttaatttctactaagtgtagattcggggcgcgtcaactgaattaatttctactaagtgtagatttttttnnnnnnnnnnaagcttggcgtggatccgatatcaactagatcttgagacaaatggcagtattcatccacaattttaaaagaaaaggggggattggggggtacagtgcaggggaaagaatagtagacataatagcaacagacatacaaactaaag

SEQ ID NO: 15891 - DNA, 301 bp, Artificial Sequence
  Atrx.2_NTC.5
  crRNA array
  misc_feature (148)..(157): n is a, c, g, or t
cttggctttatatatcttgtggaaaggacgaaacaccgtaatttctactaagtgtagatgcagcatgggggtatccctttaatttctactaagtgtagatgcttacgcgtcgcgaatgtataatttctactaagtgtagatttttttnnnnnnnnnnaagcttggcgtggatccgatatcaactagatcttgagacaaatggcagtattcatccacaattttaaaagaaaaggggggattggggggtacagtgcaggggaaagaatagtagacataatagcaacagacatacaaactaaag

SEQ ID NO: 15892 - DNA, 301 bp, Artificial Sequence
  Atrx.2_NTC.50
  crRNA array
  misc_feature (148)..(157): n is a, c, g, or t
cttggctttatatatcttgtggaaaggacgaaacaccgtaatttctactaagtgtagatgcagcatgggggtatccctttaatttctactaagtgtagatattgccgctcgcgcaaaatctaatttctactaagtgtagatttttttnnnnnnnnnnaagcttggcgtggatccgatatcaactagatcttgagacaaatggcagtattcatccacaattttaaaagaaaaggggggattggggggtacagtgcaggggaaagaatagtagacataatagcaacagacatacaaactaaag

SEQ ID NO: 15893 - DNA, 301 bp, Artificial Sequence
  Atrx.2_NTC.51
  crRNA array
  misc_feature (148)..(157): n is a, c, g, or t
cttggctttatatatcttgtggaaaggacgaaacaccgtaatttctactaagtgtagatgcagcatgggggtatccctttaatttctactaagtgtagattaacgcgcaacacgccaatgtaatttctactaagtgtagatttttttnnnnnnnnnnaagcttggcgtggatccgatatcaactagatcttgagacaaatggcagtattcatccacaattttaaaagaaaaggggggattggggggtacagtgcaggggaaagaatagtagacataatagcaacagacatacaaactaaag

SEQ ID NO: 15894 - DNA, 301 bp, Artificial Sequence
  Atrx.2_NTC.6
  crRNA array
  misc_feature (148)..(157): n is a, c, g, or t
cttggctttatatatcttgtggaaaggacgaaacaccgtaatttctactaagtgtagatgcagcatgggggtatccctttaatttctactaagtgtagatcgaatcgcgcctacgggaattaatttctactaagtgtagatttttttnnnnnnnnnnaagcttggcgtggatccgatatcaactagatcttgagacaaatggcagtattcatccacaattttaaaagaaaaggggggattggggggtacagtgcaggggaaagaatagtagacataatagcaacagacatacaaactaaag

SEQ ID NO: 15895 - DNA, 301 bp, Artificial Sequence
  Atrx.2_NTC.7
  crRNA array
  misc_feature (148)..(157): n is a, c, g, or t
cttggctttatatatcttgtggaaaggacgaaacaccgtaatttctactaagtgtagatgcagcatgggggtatccctttaatttctactaagtgtagatcgccgaacggataagactattaatttctactaagtgtagatttttttnnnnnnnnnnaagcttggcgtggatccgatatcaactagatcttgagacaaatggcagtattcatccacaattttaaaagaaaaggggggattggggggtacagtgcaggggaaagaatagtagacataatagcaacagacatacaaactaaag

SEQ ID NO: 15896 - DNA, 301 bp, Artificial Sequence
  Atrx.2_NTC.8
  crRNA array
  misc_feature (148)..(157): n is a, c, g, or t
cttggctttatatatcttgtggaaaggacgaaacaccgtaatttctactaagtgtagatgcagcatgggggtatccctttaatttctactaagtgtagatcgaccgaggttacgctgggataatttctactaagtgtagatttttttnnnnnnnnnnaagcttggcgtggatccgatatcaactagatcttgagacaaatggcagtattcatccacaattttaaaagaaaaggggggattggggggtacagtgcaggggaaagaatagtagacataatagcaacagacatacaaactaaag

SEQ ID NO: 15897 - DNA, 301 bp, Artificial Sequence
  Atrx.2_NTC.9
  crRNA array
  misc_feature (148)..(157): n is a, c, g, or t
cttggctttatatatcttgtggaaaggacgaaacaccgtaatttctactaagtgtagatgcagcatgggggtatccctttaatttctactaagtgtagatatcgccgtacggctatggcataatttctactaagtgtagatttttttnnnnnnnnnnaagcttggcgtggatccgatatcaactagatcttgagacaaatggcagtattcatccacaattttaaaagaaaaggggggattggggggtacagtgcaggggaaagaatagtagacataatagcaacagacatacaaactaaag

SEQ ID NO: 15898 - DNA, 301 bp, Artificial Sequence
  Atrx.3_NTC.0
  crRNA array
  misc_feature (148)..(157): n is a, c, g, or t
cttggctttatatatcttgtggaaaggacgaaacaccgtaatttctactaagtgtagatggagccctgtccgcaatgagtaatttctactaagtgtagattatagcgtcgcgcgctaatttaatttctactaagtgtagatttttttnnnnnnnnnnaagcttggcgtggatccgatatcaactagatcttgagacaaatggcagtattcatccacaattttaaaagaaaaggggggattggggggtacagtgcaggggaaagaatagtagacataatagcaacagacatacaaactaaag

SEQ ID NO: 15899 - DNA, 301 bp, Artificial Sequence
  Atrx.3_NTC.1
  crRNA array
  misc_feature (148)..(157): n is a, c, g, or t
cttggctttatatatcttgtggaaaggacgaaacaccgtaatttctactaagtgtagatggagccctgtccgcaatgagtaatttctactaagtgtagatcgcgtaaccgttccggctcctaatttctactaagtgtagatttttttnnnnnnnnnnaagcttggcgtggatccgatatcaactagatcttgagacaaatggcagtattcatccacaattttaaaagaaaaggggggattggggggtacagtgcaggggaaagaatagtagacataatagcaacagacatacaaactaaag

SEQ ID NO: 15900 - DNA, 301 bp, Artificial Sequence
  Atrx.3_NTC.10
  crRNA array
  misc_feature (148)..(157): n is a, c, g, or t
cttggctttatatatcttgtggaaaggacgaaacaccgtaatttctactaagtgtagatggagccctgtccgcaatgagtaatttctactaagtgtagatcgctaagttcgcgcgggccgtaatttctactaagtgtagatttttttnnnnnnnnnnaagcttggcgtggatccgatatcaactagatcttgagacaaatggcagtattcatccacaattttaaaagaaaaggggggattggggggtacagtgcaggggaaagaatagtagacataatagcaacagacatacaaactaaag

SEQ ID NO: 15901 - DNA, 301 bp, Artificial Sequence
  Atrx.3_NTC.11
  crRNA array
  misc_feature (148)..(157): n is a, c, g, or t
cttggctttatatatcttgtggaaaggacgaaacaccgtaatttctactaagtgtagatggagccctgtccgcaatgagtaatttctactaagtgtagatcgttcgtcgacgaagcaatctaatttctactaagtgtagatttttttnnnnnnnnnnaagcttggcgtggatccgatatcaactagatcttgagacaaatggcagtattcatccacaattttaaaagaaaaggggggattggggggtacagtgcaggggaaagaatagtagacataatagcaacagacatacaaactaaag

SEQ ID NO: 15902 - DNA, 301 bp, Artificial Sequence
  Atrx.3_NTC.12
  crRNA array
  misc_feature (148)..(157): n is a, c, g, or t
cttggctttatatatcttgtggaaaggacgaaacaccgtaatttctactaagtgtagatggagccctgtccgcaatgagtaatttctactaagtgtagatcgccgacgattaatcaatagtaatttctactaagtgtagatttttttnnnnnnnnnnaagcttggcgtggatccgatatcaactagatcttgagacaaatggcagtattcatccacaattttaaaagaaaaggggggattggggggtacagtgcaggggaaagaatagtagacataatagcaacagacatacaaactaaag

SEQ ID NO: 15903 - DNA, 301 bp, Artificial Sequence
  Atrx.3_NTC.13
  crRNA array
  misc_feature (148)..(157): n is a, c, g, or t
cttggctttatatatcttgtggaaaggacgaaacaccgtaatttctactaagtgtagatggagccctgtccgcaatgagtaatttctactaagtgtagatgaccgttgtatcgcgatcaataatttctactaagtgtagatttttttnnnnnnnnnnaagcttggcgtggatccgatatcaactagatcttgagacaaatggcagtattcatccacaattttaaaagaaaaggggggattggggggtacagtgcaggggaaagaatagtagacataatagcaacagacatacaaactaaag

SEQ ID NO: 15904 - DNA, 301 bp, Artificial Sequence
  Atrx.3_NTC.14
  crRNA array
  misc_feature (148)..(157): n is a, c, g, or t
cttggctttatatatcttgtggaaaggacgaaacaccgtaatttctactaagtgtagatggagccctgtccgcaatgagtaatttctactaagtgtagatccgttcgtgcgatagtgttttaatttctactaagtgtagatttttttnnnnnnnnnnaagcttggcgtggatccgatatcaactagatcttgagacaaatggcagtattcatccacaattttaaaagaaaaggggggattggggggtacagtgcaggggaaagaatagtagacataatagcaacagacatacaaactaaag

SEQ ID NO: 15905 - DNA, 301 bp, Artificial Sequence
  Atrx.3_NTC.15
  crRNA array
  misc_feature (148)..(157): n is a, c, g, or t
cttggctttatatatcttgtggaaaggacgaaacaccgtaatttctactaagtgtagatggagccctgtccgcaatgagtaatttctactaagtgtagatgttgtcgtgccgcgaatttataatttctactaagtgtagatttttttnnnnnnnnnnaagcttggcgtggatccgatatcaactagatcttgagacaaatggcagtattcatccacaattttaaaagaaaaggggggattggggggtacagtgcaggggaaagaatagtagacataatagcaacagacatacaaactaaag

SEQ ID NO: 15906 - DNA, 301 bp, Artificial Sequence
  Atrx.3_NTC.16
  crRNA array
  misc_feature (148)..(157): n is a, c, g, or t
cttggctttatatatcttgtggaaaggacgaaacaccgtaatttctactaagtgtagatggagccctgtccgcaatgagtaatttctactaagtgtagatcggtacgttagacgaaaatttaatttctactaagtgtagatttttttnnnnnnnnnnaagcttggcgtggatccgatatcaactagatcttgagacaaatggcagtattcatccacaattttaaaagaaaaggggggattggggggtacagtgcaggggaaagaatagtagacataatagcaacagacatacaaactaaag

SEQ ID NO: 15907 - DNA, 301 bp, Artificial Sequence
  Atrx.3_NTC.17
  crRNA array
  misc_feature (148)..(157): n is a, c, g, or t
cttggctttatatatcttgtggaaaggacgaaacaccgtaatttctactaagtgtagatggagccctgtccgcaatgagtaatttctactaagtgtagattatcgaacgctatcgaacgttaatttctactaagtgtagatttttttnnnnnnnnnnaagcttggcgtggatccgatatcaactagatcttgagacaaatggcagtattcatccacaattttaaaagaaaaggggggattggggggtacagtgcaggggaaagaatagtagacataatagcaacagacatacaaactaaag

SEQ ID NO: 15908 - DNA, 301 bp, Artificial Sequence
  Atrx.3_NTC.18
  crRNA array
  misc_feature (148)..(157): n is a, c, g, or t
cttggctttatatatcttgtggaaaggacgaaacaccgtaatttctactaagtgtagatggagccctgtccgcaatgagtaatttctactaagtgtagattccggttacgaccggcaaaataatttctactaagtgtagatttttttnnnnnnnnnnaagcttggcgtggatccgatatcaactagatcttgagacaaatggcagtattcatccacaattttaaaagaaaaggggggattggggggtacagtgcaggggaaagaatagtagacataatagcaacagacatacaaactaaag

SEQ ID NO: 15909 - DNA, 301 bp, Artificial Sequence
  Atrx.3_NTC.19
  crRNA array
  misc_feature (148)..(157): n is a, c, g, or t
cttggctttatatatcttgtggaaaggacgaaacaccgtaatttctactaagtgtagatggagccctgtccgcaatgagtaatttctactaagtgtagatcgtcgtagaacgatacccgataatttctactaagtgtagatttttttnnnnnnnnnnaagcttggcgtggatccgatatcaactagatcttgagacaaatggcagtattcatccacaattttaaaagaaaaggggggattggggggtacagtgcaggggaaagaatagtagacataatagcaacagacatacaaactaaag

SEQ ID NO: 15910 - DNA, 301 bp, Artificial Sequence
  Atrx.3_NTC.2
  crRNA array
  misc_feature (148)..(157): n is a, c, g, or t
cttggctttatatatcttgtggaaaggacgaaacaccgtaatttctactaagtgtagatggagccctgtccgcaatgagtaatttctactaagtgtagatttatgtcgcgccgcgacccgtaatttctactaagtgtagatttttttnnnnnnnnnnaagcttggcgtggatccgatatcaactagatcttgagacaaatggcagtattcatccacaattttaaaagaaaaggggggattggggggtacagtgcaggggaaagaatagtagacataatagcaacagacatacaaactaaag

SEQ ID NO: 15911 - DNA, 301 bp, Artificial Sequence
  Atrx.3_NTC.20
  crRNA array
  misc_feature (148)..(157): n is a, c, g, or t
cttggctttatatatcttgtggaaaggacgaaacaccgtaatttctactaagtgtagatggagccctgtccgcaatgagtaatttctactaagtgtagatattccggcgcgaccagaagataatttctactaagtgtagatttttttnnnnnnnnnnaagcttggcgtggatccgatatcaactagatcttgagacaaatggcagtattcatccacaattttaaaagaaaaggggggattggggggtacagtgcaggggaaagaatagtagacataatagcaacagacatacaaactaaag

SEQ ID NO: 15912 - DNA, 301 bp, Artificial Sequence
  Atrx.3_NTC.21
  crRNA array
  misc_feature (148)..(157): n is a, c, g, or t
cttggctttatatatcttgtggaaaggacgaaacaccgtaatttctactaagtgtagatggagccctgtccgcaatgagtaatttctactaagtgtagatgtataacttcgcgcggtccgtaatttctactaagtgtagatttttttnnnnnnnnnnaagcttggcgtggatccgatatcaactagatcttgagacaaatggcagtattcatccacaattttaaaagaaaaggggggattggggggtacagtgcaggggaaagaatagtagacataatagcaacagacatacaaactaaag

SEQ ID NO: 15913 - DNA, 301 bp, Artificial Sequence
  Atrx.3_NTC.22
  crRNA array
  misc_feature (148)..(157): n is a, c, g, or t
cttggctttatatatcttgtggaaaggacgaaacaccgtaatttctactaagtgtagatggagccctgtccgcaatgagtaatttctactaagtgtagatgcgcgtcaacgtaatgtgcctaatttctactaagtgtagatttttttnnnnnnnnnnaagcttggcgtggatccgatatcaactagatcttgagacaaatggcagtattcatccacaattttaaaagaaaaggggggattggggggtacagtgcaggggaaagaatagtagacataatagcaacagacatacaaactaaag

SEQ ID NO: 15914 - DNA, 301 bp, Artificial Sequence
  Atrx.3_NTC.23
  crRNA array
  misc_feature (148)..(157): n is a, c, g, or t
cttggctttatatatcttgtggaaaggacgaaacaccgtaatttctactaagtgtagatggagccctgtccgcaatgagtaatttctactaagtgtagatacgcgctattatcgtaggtgtaatttctactaagtgtagatttttttnnnnnnnnnnaagcttggcgtggatccgatatcaactagatcttgagacaaatggcagtattcatccacaattttaaaagaaaaggggggattggggggtacagtgcaggggaaagaatagtagacataatagcaacagacatacaaactaaag

SEQ ID NO: 15915 - DNA, 301 bp, Artificial Sequence
  Atrx.3_NTC.24
  crRNA array
  misc_feature (148)..(157): n is a, c, g, or t
cttggctttatatatcttgtggaaaggacgaaacaccgtaatttctactaagtgtagatggagccctgtccgcaatgagtaatttctactaagtgtagatactatcgacgttcgtcccggtaatttctactaagtgtagatttttttnnnnnnnnnnaagcttggcgtggatccgatatcaactagatcttgagacaaatggcagtattcatccacaattttaaaagaaaaggggggattggggggtacagtgcaggggaaagaatagtagacataatagcaacagacatacaaactaaag

SEQ ID NO: 15916 - DNA, 301 bp, Artificial Sequence
  Atrx.3_NTC.25
  crRNA array
  misc_feature (148)..(157): n is a, c, g, or t
cttggctttatatatcttgtggaaaggacgaaacaccgtaatttctactaagtgtagatggagccctgtccgcaatgagtaatttctactaagtgtagattcgcgttatcgtgccgtgcgtaatttctactaagtgtagatttttttnnnnnnnnnnaagcttggcgtggatccgatatcaactagatcttgagacaaatggcagtattcatccacaattttaaaagaaaaggggggattggggggtacagtgcaggggaaagaatagtagacataatagcaacagacatacaaactaaag

SEQ ID NO: 15917 - DNA, 301 bp, Artificial Sequence
  Atrx.3_NTC.26
  crRNA array
  misc_feature (148)..(157): n is a, c, g, or t
cttggctttatatatcttgtggaaaggacgaaacaccgtaatttctactaagtgtagatggagccctgtccgcaatgagtaatttctactaagtgtagatcgcgacggcggttttaacactaatttctactaagtgtagatttttttnnnnnnnnnnaagcttggcgtggatccgatatcaactagatcttgagacaaatggcagtattcatccacaattttaaaagaaaaggggggattggggggtacagtgcaggggaaagaatagtagacataatagcaacagacatacaaactaaag

SEQ ID NO: 15918 - DNA, 301 bp, Artificial Sequence
  Atrx.3_NTC.27
  crRNA array
  misc_feature (148)..(157): n is a, c, g, or t
cttggctttatatatcttgtggaaaggacgaaacaccgtaatttctactaagtgtagatggagccctgtccgcaatgagtaatttctactaagtgtagatgtcgcgttgcgaccggcgcttaatttctactaagtgtagatttttttnnnnnnnnnnaagcttggcgtggatccgatatcaactagatcttgagacaaatggcagtattcatccacaattttaaaagaaaaggggggattggggggtacagtgcaggggaaagaatagtagacataatagcaacagacatacaaactaaag

SEQ ID NO: 15919 - DNA, 301 bp, Artificial Sequence
  Atrx.3_NTC.28
  crRNA array
  misc_feature (148)..(157): n is a, c, g, or t
cttggctttatatatcttgtggaaaggacgaaacaccgtaatttctactaagtgtagatggagccctgtccgcaatgagtaatttctactaagtgtagataccgctaatcggcgtaaacttaatttctactaagtgtagatttttttnnnnnnnnnnaagcttggcgtggatccgatatcaactagatcttgagacaaatggcagtattcatccacaattttaaaagaaaaggggggattggggggtacagtgcaggggaaagaatagtagacataatagcaacagacatacaaactaaag

SEQ ID NO: 15920 - DNA, 301 bp, Artificial Sequence
  Atrx.3_NTC.29
  crRNA array
  misc_feature (148)..(157): n is a, c, g, or t
cttggctttatatatcttgtggaaaggacgaaacaccgtaatttctactaagtgtagatggagccctgtccgcaatgagtaatttctactaagtgtagatcgcgatctataccgtctatataatttctactaagtgtagatttttttnnnnnnnnnnaagcttggcgtggatccgatatcaactagatcttgagacaaatggcagtattcatccacaattttaaaagaaaaggggggattggggggtacagtgcaggggaaagaatagtagacataatagcaacagacatacaaactaaag

SEQ ID NO: 15921 - DNA, 301 bp, Artificial Sequence
  Atrx.3_NTC.3
  crRNA array
  misc_feature (148)..(157): n is a, c, g, or t
cttggctttatatatcttgtggaaaggacgaaacaccgtaatttctactaagtgtagatggagccctgtccgcaatgagtaatttctactaagtgtagattcgacgcgagacgacgtacataatttctactaagtgtagatttttttnnnnnnnnnnaagcttggcgtggatccgatatcaactagatcttgagacaaatggcagtattcatccacaattttaaaagaaaaggggggattggggggtacagtgcaggggaaagaatagtagacataatagcaacagacatacaaactaaag

SEQ ID NO: 15922 - DNA, 301 bp, Artificial Sequence
  Atrx.3_NTC.30
  crRNA array
  misc_feature (148)..(157): n is a, c, g, or t
cttggctttatatatcttgtggaaaggacgaaacaccgtaatttctactaagtgtagatggagccctgtccgcaatgagtaatttctactaagtgtagatcgatcgtacgggtgtcctaataatttctactaagtgtagatttttttnnnnnnnnnnaagcttggcgtggatccgatatcaactagatcttgagacaaatggcagtattcatccacaattttaaaagaaaaggggggattggggggtacagtgcaggggaaagaatagtagacataatagcaacagacatacaaactaaag

SEQ ID NO: 15923 - DNA, 301 bp, Artificial Sequence
  Atrx.3_NTC.31
  crRNA array
  misc_feature (148)..(157): n is a, c, g, or t
cttggctttatatatcttgtggaaaggacgaaacaccgtaatttctactaagtgtagatggagccctgtccgcaatgagtaatttctactaagtgtagatgccgaccgcgtgattgtaggtaatttctactaagtgtagatttttttnnnnnnnnnnaagcttggcgtggatccgatatcaactagatcttgagacaaatggcagtattcatccacaattttaaaagaaaaggggggattggggggtacagtgcaggggaaagaatagtagacataatagcaacagacatacaaactaaag

SEQ ID NO: 15924 - DNA, 301 bp, Artificial Sequence
  Atrx.3_NTC.32
  crRNA array
  misc_feature (148)..(157): n is a, c, g, or t
cttggctttatatatcttgtggaaaggacgaaacaccgtaatttctactaagtgtagatggagccctgtccgcaatgagtaatttctactaagtgtagatgcacgttacgcccgggtcactaatttctactaagtgtagatttttttnnnnnnnnnnaagcttggcgtggatccgatatcaactagatcttgagacaaatggcagtattcatccacaattttaaaagaaaaggggggattggggggtacagtgcaggggaaagaatagtagacataatagcaacagacatacaaactaaag

SEQ ID NO: 15925 - DNA, 301 bp, Artificial Sequence
  Atrx.3_NTC.33
  crRNA array
  misc_feature (148)..(157): n is a, c, g, or t
cttggctttatatatcttgtggaaaggacgaaacaccgtaatttctactaagtgtagatggagccctgtccgcaatgagtaatttctactaagtgtagattaagcgaccgacgcattcgctaatttctactaagtgtagatttttttnnnnnnnnnnaagcttggcgtggatccgatatcaactagatcttgagacaaatggcagtattcatccacaattttaaaagaaaaggggggattggggggtacagtgcaggggaaagaatagtagacataatagcaacagacatacaaactaaag

SEQ ID NO: 15926 - DNA, 301 bp, Artificial Sequence
  Atrx.3_NTC.34
  crRNA array
  misc_feature (148)..(157): n is a, c, g, or t
cttggctttatatatcttgtggaaaggacgaaacaccgtaatttctactaagtgtagatggagccctgtccgcaatgagtaatttctactaagtgtagattagcgttcgacacgtgaaactaatttctactaagtgtagatttttttnnnnnnnnnnaagcttggcgtggatccgatatcaactagatcttgagacaaatggcagtattcatccacaattttaaaagaaaaggggggattggggggtacagtgcaggggaaagaatagtagacataatagcaacagacatacaaactaaag

SEQ ID NO: 15927 - DNA, 301 bp, Artificial Sequence
  Atrx.3_NTC.35
  crRNA array
  misc_feature (148)..(157): n is a, c, g, or t
cttggctttatatatcttgtggaaaggacgaaacaccgtaatttctactaagtgtagatggagccctgtccgcaatgagtaatttctactaagtgtagattggcgcgtaatcgctattcgtaatttctactaagtgtagatttttttnnnnnnnnnnaagcttggcgtggatccgatatcaactagatcttgagacaaatggcagtattcatccacaattttaaaagaaaaggggggattggggggtacagtgcaggggaaagaatagtagacataatagcaacagacatacaaactaaag

SEQ ID NO: 15928 - DNA, 301 bp, Artificial Sequence
  Atrx.3_NTC.36
  crRNA array
  misc_feature (148)..(157): n is a, c, g, or t
cttggctttatatatcttgtggaaaggacgaaacaccgtaatttctactaagtgtagatggagccctgtccgcaatgagtaatttctactaagtgtagatcaacccgccgtagcgggccttaatttctactaagtgtagatttttttnnnnnnnnnnaagcttggcgtggatccgatatcaactagatcttgagacaaatggcagtattcatccacaattttaaaagaaaaggggggattggggggtacagtgcaggggaaagaatagtagacataatagcaacagacatacaaactaaag

SEQ ID NO: 15929 - DNA, 301 bp, Artificial Sequence
  Atrx.3_NTC.37
  crRNA array
  misc_feature (148)..(157): n is a, c, g, or t
cttggctttatatatcttgtggaaaggacgaaacaccgtaatttctactaagtgtagatggagccctgtccgcaatgagtaatttctactaagtgtagattttgcgttgacgcgattacttaatttctactaagtgtagatttttttnnnnnnnnnnaagcttggcgtggatccgatatcaactagatcttgagacaaatggcagtattcatccacaattttaaaagaaaaggggggattggggggtacagtgcaggggaaagaatagtagacataatagcaacagacatacaaactaaag

SEQ ID NO: 15930 - DNA, 301 bp, Artificial Sequence
  Atrx.3_NTC.38
  crRNA array
  misc_feature (148)..(157): n is a, c, g, or t
cttggctttatatatcttgtggaaaggacgaaacaccgtaatttctactaagtgtagatggagccctgtccgcaatgagtaatttctactaagtgtagataacggagcgcgatactaccataatttctactaagtgtagatttttttnnnnnnnnnnaagcttggcgtggatccgatatcaactagatcttgagacaaatggcagtattcatccacaattttaaaagaaaaggggggattggggggtacagtgcaggggaaagaatagtagacataatagcaacagacatacaaactaaag

SEQ ID NO: 15931 - DNA, 301 bp, Artificial Sequence
  Atrx.3_NTC.39
  crRNA array
  misc_feature (148)..(157): n is a, c, g, or t
cttggctttatatatcttgtggaaaggacgaaacaccgtaatttctactaagtgtagatggagccctgtccgcaatgagtaatttctactaagtgtagatccggacgttataacgtttcttaatttctactaagtgtagatttttttnnnnnnnnnnaagcttggcgtggatccgatatcaactagatcttgagacaaatggcagtattcatccacaattttaaaagaaaaggggggattggggggtacagtgcaggggaaagaatagtagacataatagcaacagacatacaaactaaag

SEQ ID NO: 15932 - DNA, 301 bp, Artificial Sequence
  Atrx.3_NTC.4
  crRNA array
  misc_feature (148)..(157): n is a, c, g, or t
cttggctttatatatcttgtggaaaggacgaaacaccgtaatttctactaagtgtagatggagccctgtccgcaatgagtaatttctactaagtgtagatatacccgtcgcgaacgtgagtaatttctactaagtgtagatttttttnnnnnnnnnnaagcttggcgtggatccgatatcaactagatcttgagacaaatggcagtattcatccacaattttaaaagaaaaggggggattggggggtacagtgcaggggaaagaatagtagacataatagcaacagacatacaaactaaag

SEQ ID NO: 15933 - DNA, 301 bp, Artificial Sequence
  Atrx.3_NTC.40
  crRNA array
  misc_feature (148)..(157): n is a, c, g, or t
cttggctttatatatcttgtggaaaggacgaaacaccgtaatttctactaagtgtagatggagccctgtccgcaatgagtaatttctactaagtgtagatattcgcgaacccggccggaataatttctactaagtgtagatttttttnnnnnnnnnnaagcttggcgtggatccgatatcaactagatcttgagacaaatggcagtattcatccacaattttaaaagaaaaggggggattggggggtacagtgcaggggaaagaatagtagacataatagcaacagacatacaaactaaag

SEQ ID NO: 15934 - DNA, 301 bp, Artificial Sequence
  Atrx.3_NTC.41
  crRNA array
  misc_feature (148)..(157): n is a, c, g, or t
cttggctttatatatcttgtggaaaggacgaaacaccgtaatttctactaagtgtagatggagccctgtccgcaatgagtaatttctactaagtgtagatttgatggcgcgacgcgttattaatttctactaagtgtagatttttttnnnnnnnnnnaagcttggcgtggatccgatatcaactagatcttgagacaaatggcagtattcatccacaattttaaaagaaaaggggggattggggggtacagtgcaggggaaagaatagtagacataatagcaacagacatacaaactaaag

SEQ ID NO: 15935 - DNA, 301 bp, Artificial Sequence
  Atrx.3_NTC.42
  crRNA array
  misc_feature (148)..(157): n is a, c, g, or t
cttggctttatatatcttgtggaaaggacgaaacaccgtaatttctactaagtgtagatggagccctgtccgcaatgagtaatttctactaagtgtagatggtcaaatcgcggcgataactaatttctactaagtgtagatttttttnnnnnnnnnnaagcttggcgtggatccgatatcaactagatcttgagacaaatggcagtattcatccacaattttaaaagaaaaggggggattggggggtacagtgcaggggaaagaatagtagacataatagcaacagacatacaaactaaag

SEQ ID NO: 15936 - DNA, 301 bp, Artificial Sequence
  Atrx.3_NTC.43
  crRNA array
  misc_feature (148)..(157): n is a, c, g, or t
cttggctttatatatcttgtggaaaggacgaaacaccgtaatttctactaagtgtagatggagccctgtccgcaatgagtaatttctactaagtgtagatcgactcgcgcattgaactggtaatttctactaagtgtagatttttttnnnnnnnnnnaagcttggcgtggatccgatatcaactagatcttgagacaaatggcagtattcatccacaattttaaaagaaaaggggggattggggggtacagtgcaggggaaagaatagtagacataatagcaacagacatacaaactaaag

SEQ ID NO: 15937 - DNA, 301 bp, Artificial Sequence
  Atrx.3_NTC.44
  crRNA array
  misc_feature (148)..(157): n is a, c, g, or t
cttggctttatatatcttgtggaaaggacgaaacaccgtaatttctactaagtgtagatggagccctgtccgcaatgagtaatttctactaagtgtagatagcgtcgtacgatttatcgttaatttctactaagtgtagatttttttnnnnnnnnnnaagcttggcgtggatccgatatcaactagatcttgagacaaatggcagtattcatccacaattttaaaagaaaaggggggattggggggtacagtgcaggggaaagaatagtagacataatagcaacagacatacaaactaaag

SEQ ID NO: 15938 - DNA, 301 bp, Artificial Sequence
  Atrx.3_NTC.45
  crRNA array
  misc_feature (148)..(157): n is a, c, g, or t
cttggctttatatatcttgtggaaaggacgaaacaccgtaatttctactaagtgtagatggagccctgtccgcaatgagtaatttctactaagtgtagatcggaacgcgtgatactagggtaatttctactaagtgtagatttttttnnnnnnnnnnaagcttggcgtggatccgatatcaactagatcttgagacaaatggcagtattcatccacaattttaaaagaaaaggggggattggggggtacagtgcaggggaaagaatagtagacataatagcaacagacatacaaactaaag

SEQ ID NO: 15939 - DNA, 301 bp, Artificial Sequence
  Atrx.3_NTC.46
  crRNA array
  misc_feature (148)..(157): n is a, c, g, or t
cttggctttatatatcttgtggaaaggacgaaacaccgtaatttctactaagtgtagatggagccctgtccgcaatgagtaatttctactaagtgtagatagcgggtcgtagacgcgcggtaatttctactaagtgtagatttttttnnnnnnnnnnaagcttggcgtggatccgatatcaactagatcttgagacaaatggcagtattcatccacaattttaaaagaaaaggggggattggggggtacagtgcaggggaaagaatagtagacataatagcaacagacatacaaactaaag

SEQ ID NO: 15940 - DNA, 301 bp, Artificial Sequence
  Atrx.3_NTC.47
  crRNA array
  misc_feature (148)..(157): n is a, c, g, or t
cttggctttatatatcttgtggaaaggacgaaacaccgtaatttctactaagtgtagatggagccctgtccgcaatgagtaatttctactaagtgtagattctcgtatcgcgattgttaataatttctactaagtgtagatttttttnnnnnnnnnnaagcttggcgtggatccgatatcaactagatcttgagacaaatggcagtattcatccacaattttaaaagaaaaggggggattggggggtacagtgcaggggaaagaatagtagacataatagcaacagacatacaaactaaag

SEQ ID NO: 15941 - DNA, 301 bp, Artificial Sequence
  Atrx.3_NTC.48
  crRNA array
  misc_feature (148)..(157): n is a, c, g, or t
cttggctttatatatcttgtggaaaggacgaaacaccgtaatttctactaagtgtagatggagccctgtccgcaatgagtaatttctactaagtgtagatcggtcgactacggctgttagtaatttctactaagtgtagatttttttnnnnnnnnnnaagcttggcgtggatccgatatcaactagatcttgagacaaatggcagtattcatccacaattttaaaagaaaaggggggattggggggtacagtgcaggggaaagaatagtagacataatagcaacagacatacaaactaaag

SEQ ID NO: 15942 - DNA, 301 bp, Artificial Sequence
  Atrx.3_NTC.49
  crRNA array
  misc_feature (148)..(157): n is a, c, g, or t
cttggctttatatatcttgtggaaaggacgaaacaccgtaatttctactaagtgtagatggagccctgtccgcaatgagtaatttctactaagtgtagattcggggcgcgtcaactgaattaatttctactaagtgtagatttttttnnnnnnnnnnaagcttggcgtggatccgatatcaactagatcttgagacaaatggcagtattcatccacaattttaaaagaaaaggggggattggggggtacagtgcaggggaaagaatagtagacataatagcaacagacatacaaactaaag

SEQ ID NO: 15943 - DNA, 301 bp, Artificial Sequence
  Atrx.3_NTC.5
  crRNA array
  misc_feature (148)..(157): n is a, c, g, or t
cttggctttatatatcttgtggaaaggacgaaacaccgtaatttctactaagtgtagatggagccctgtccgcaatgagtaatttctactaagtgtagatgcttacgcgtcgcgaatgtataatttctactaagtgtagatttttttnnnnnnnnnnaagcttggcgtggatccgatatcaactagatcttgagacaaatggcagtattcatccacaattttaaaagaaaaggggggattggggggtacagtgcaggggaaagaatagtagacataatagcaacagacatacaaactaaag

SEQ ID NO: 15944 - DNA, 301 bp, Artificial Sequence
  Atrx.3_NTC.50
  crRNA array
  misc_feature (148)..(157): n is a, c, g, or t
cttggctttatatatcttgtggaaaggacgaaacaccgtaatttctactaagtgtagatggagccctgtccgcaatgagtaatttctactaagtgtagatattgccgctcgcgcaaaatctaatttctactaagtgtagatttttttnnnnnnnnnnaagcttggcgtggatccgatatcaactagatcttgagacaaatggcagtattcatccacaattttaaaagaaaaggggggattggggggtacagtgcaggggaaagaatagtagacataatagcaacagacatacaaactaaag

SEQ ID NO: 15945 - DNA, 301 bp, Artificial Sequence
  Atrx.3_NTC.51
  crRNA array
  misc_feature (148)..(157): n is a, c, g, or t
cttggctttatatatcttgtggaaaggacgaaacaccgtaatttctactaagtgtagatggagccctgtccgcaatgagtaatttctactaagtgtagattaacgcgcaacacgccaatgtaatttctactaagtgtagatttttttnnnnnnnnnnaagcttggcgtggatccgatatcaactagatcttgagacaaatggcagtattcatccacaattttaaaagaaaaggggggattggggggtacagtgcaggggaaagaatagtagacataatagcaacagacatacaaactaaag

SEQ ID NO: 15946 - DNA, 301 bp, Artificial Sequence
  Atrx.3_NTC.6
  crRNA array
  misc_feature (148)..(157): n is a, c, g, or t
cttggctttatatatcttgtggaaaggacgaaacaccgtaatttctactaagtgtagatggagccctgtccgcaatgagtaatttctactaagtgtagatcgaatcgcgcctacgggaattaatttctactaagtgtagatttttttnnnnnnnnnnaagcttggcgtggatccgatatcaactagatcttgagacaaatggcagtattcatccacaattttaaaagaaaaggggggattggggggtacagtgcaggggaaagaatagtagacataatagcaacagacatacaaactaaag

SEQ ID NO: 15947 - DNA, 301 bp, Artificial Sequence
  Atrx.3_NTC.7
  crRNA array
  misc_feature (148)..(157): n is a, c, g, or t
cttggctttatatatcttgtggaaaggacgaaacaccgtaatttctactaagtgtagatggagccctgtccgcaatgagtaatttctactaagtgtagatcgccgaacggataagactattaatttctactaagtgtagatttttttnnnnnnnnnnaagcttggcgtggatccgatatcaactagatcttgagacaaatggcagtattcatccacaattttaaaagaaaaggggggattggggggtacagtgcaggggaaagaatagtagacataatagcaacagacatacaaactaaag

SEQ ID NO: 15948 - DNA, 301 bp, Artificial Sequence
  Atrx.3_NTC.8
  crRNA array
  misc_feature (148)..(157): n is a, c, g, or t
cttggctttatatatcttgtggaaaggacgaaacaccgtaatttctactaagtgtagatggagccctgtccgcaatgagtaatttctactaagtgtagatcgaccgaggttacgctgggataatttctactaagtgtagatttttttnnnnnnnnnnaagcttggcgtggatccgatatcaactagatcttgagacaaatggcagtattcatccacaattttaaaagaaaaggggggattggggggtacagtgcaggggaaagaatagtagacataatagcaacagacatacaaactaaag

SEQ ID NO: 15949 - DNA, 301 bp, Artificial Sequence
  Atrx.3_NTC.9
  crRNA array
  misc_feature (148)..(157): n is a, c, g, or t
cttggctttatatatcttgtggaaaggacgaaacaccgtaatttctactaagtgtagatggagccctgtccgcaatgagtaatttctactaagtgtagatatcgccgtacggctatggcataatttctactaagtgtagatttttttnnnnnnnnnnaagcttggcgtggatccgatatcaactagatcttgagacaaatggcagtattcatccacaattttaaaagaaaaggggggattggggggtacagtgcaggggaaagaatagtagacataatagcaacagacatacaaactaaag

SEQ ID NO: 15950 - DNA, 301 bp, Artificial Sequence
  Atrx.4_NTC.0
  crRNA array
  misc_feature (148)..(157): n is a, c, g, or t
cttggctttatatatcttgtggaaaggacgaaacaccgtaatttctactaagtgtagataaactgggctcctactaaattaatttctactaagtgtagattatagcgtcgcgcgctaatttaatttctactaagtgtagatttttttnnnnnnnnnnaagcttggcgtggatccgatatcaactagatcttgagacaaatggcagtattcatccacaattttaaaagaaaaggggggattggggggtacagtgcaggggaaagaatagtagacataatagcaacagacatacaaactaaag

SEQ ID NO: 15951 - DNA, 301 bp, Artificial Sequence
  Atrx.4_NTC.1
  crRNA array
  misc_feature (148)..(157): n is a, c, g, or t
cttggctttatatatcttgtggaaaggacgaaacaccgtaatttctactaagtgtagataaactgggctcctactaaattaatttctactaagtgtagatcgcgtaaccgttccggctcctaatttctactaagtgtagatttttttnnnnnnnnnnaagcttggcgtggatccgatatcaactagatcttgagacaaatggcagtattcatccacaattttaaaagaaaaggggggattggggggtacagtgcaggggaaagaatagtagacataatagcaacagacatacaaactaaag

SEQ ID NO: 15952 - DNA, 301 bp, Artificial Sequence
  Atrx.4_NTC.10
  crRNA array
  misc_feature (148)..(157): n is a, c, g, or t
cttggctttatatatcttgtggaaaggacgaaacaccgtaatttctactaagtgtagataaactgggctcctactaaattaatttctactaagtgtagatcgctaagttcgcgcgggccgtaatttctactaagtgtagatttttttnnnnnnnnnnaagcttggcgtggatccgatatcaactagatcttgagacaaatggcagtattcatccacaattttaaaagaaaaggggggattggggggtacagtgcaggggaaagaatagtagacataatagcaacagacatacaaactaaag

SEQ ID NO: 15953 - DNA, 301 bp, Artificial Sequence
  Atrx.4_NTC.11
  crRNA array
  misc_feature (148)..(157): n is a, c, g, or t
cttggctttatatatcttgtggaaaggacgaaacaccgtaatttctactaagtgtagataaactgggctcctactaaattaatttctactaagtgtagatcgttcgtcgacgaagcaatctaatttctactaagtgtagatttttttnnnnnnnnnnaagcttggcgtggatccgatatcaactagatcttgagacaaatggcagtattcatccacaattttaaaagaaaaggggggattggggggtacagtgcaggggaaagaatagtagacataatagcaacagacatacaaactaaag

SEQ ID NO: 15954 - DNA, 301 bp, Artificial Sequence
  Atrx.4_NTC.12
  crRNA array
  misc_feature (148)..(157): n is a, c, g, or t
cttggctttatatatcttgtggaaaggacgaaacaccgtaatttctactaagtgtagataaactgggctcctactaaattaatttctactaagtgtagatcgccgacgattaatcaatagtaatttctactaagtgtagatttttttnnnnnnnnnnaagcttggcgtggatccgatatcaactagatcttgagacaaatggcagtattcatccacaattttaaaagaaaaggggggattggggggtacagtgcaggggaaagaatagtagacataatagcaacagacatacaaactaaag

SEQ ID NO: 15955 - DNA, 301 bp, Artificial Sequence
  Atrx.4_NTC.13
  crRNA array
  misc_feature (148)..(157): n is a, c, g, or t
cttggctttatatatcttgtggaaaggacgaaacaccgtaatttctactaagtgtagataaactgggctcctactaaattaatttctactaagtgtagatgaccgttgtatcgcgatcaataatttctactaagtgtagatttttttnnnnnnnnnnaagcttggcgtggatccgatatcaactagatcttgagacaaatggcagtattcatccacaattttaaaagaaaaggggggattggggggtacagtgcaggggaaagaatagtagacataatagcaacagacatacaaactaaag

SEQ ID NO: 15956 - DNA, 301 bp, Artificial Sequence
  Atrx.4_NTC.14
  crRNA array
  misc_feature (148)..(157): n is a, c, g, or t
cttggctttatatatcttgtggaaaggacgaaacaccgtaatttctactaagtgtagataaactgggctcctactaaattaatttctactaagtgtagatccgttcgtgcgatagtgttttaatttctactaagtgtagatttttttnnnnnnnnnnaagcttggcgtggatccgatatcaactagatcttgagacaaatggcagtattcatccacaattttaaaagaaaaggggggattggggggtacagtgcaggggaaagaatagtagacataatagcaacagacatacaaactaaag

SEQ ID NO: 15957 - DNA, 301 bp, Artificial Sequence
  Atrx.4_NTC.15
  crRNA array
  misc_feature (148)..(157): n is a, c, g, or t
cttggctttatatatcttgtggaaaggacgaaacaccgtaatttctactaagtgtagataaactgggctcctactaaattaatttctactaagtgtagatgttgtcgtgccgcgaatttataatttctactaagtgtagatttttttnnnnnnnnnnaagcttggcgtggatccgatatcaactagatcttgagacaaatggcagtattcatccacaattttaaaagaaaaggggggattggggggtacagtgcaggggaaagaatagtagacataatagcaacagacatacaaactaaag

SEQ ID NO: 15958 - DNA, 301 bp, Artificial Sequence
  Atrx.4_NTC.16
  crRNA array
  misc_feature (148)..(157): n is a, c, g, or t
cttggctttatatatcttgtggaaaggacgaaacaccgtaatttctactaagtgtagataaactgggctcctactaaattaatttctactaagtgtagatcggtacgttagacgaaaatttaatttctactaagtgtagatttttttnnnnnnnnnnaagcttggcgtggatccgatatcaactagatcttgagacaaatggcagtattcatccacaattttaaaagaaaaggggggattggggggtacagtgcaggggaaagaatagtagacataatagcaacagacatacaaactaaag

SEQ ID NO: 15959 - DNA, 301 bp, Artificial Sequence
  Atrx.4_NTC.17
  crRNA array
  misc_feature (148)..(157): n is a, c, g, or t
cttggctttatatatcttgtggaaaggacgaaacaccgtaatttctactaagtgtagataaactgggctcctactaaattaatttctactaagtgtagattatcgaacgctatcgaacgttaatttctactaagtgtagatttttttnnnnnnnnnnaagcttggcgtggatccgatatcaactagatcttgagacaaatggcagtattcatccacaattttaaaagaaaaggggggattggggggtacagtgcaggggaaagaatagtagacataatagcaacagacatacaaactaaag

SEQ ID NO: 15960 - DNA, 301 bp, Artificial Sequence
  Atrx.4_NTC.18
  crRNA array
  misc_feature (148)..(157): n is a, c, g, or t
cttggctttatatatcttgtggaaaggacgaaacaccgtaatttctactaagtgtagataaactgggctcctactaaattaatttctactaagtgtagattccggttacgaccggcaaaataatttctactaagtgtagatttttttnnnnnnnnnnaagcttggcgtggatccgatatcaactagatcttgagacaaatggcagtattcatccacaattttaaaagaaaaggggggattggggggtacagtgcaggggaaagaatagtagacataatagcaacagacatacaaactaaag

SEQ ID NO: 15961 - DNA, 301 bp, Artificial Sequence
  Atrx.4_NTC.19
  crRNA array
  misc_feature (148)..(157): n is a, c, g, or t
cttggctttatatatcttgtggaaaggacgaaacaccgtaatttctactaagtgtagataaactgggctcctactaaattaatttctactaagtgtagatcgtcgtagaacgatacccgataatttctactaagtgtagatttttttnnnnnnnnnnaagcttggcgtggatccgatatcaactagatcttgagacaaatggcagtattcatccacaattttaaaagaaaaggggggattggggggtacagtgcaggggaaagaatagtagacataatagcaacagacatacaaactaaag

SEQ ID NO: 15962 - DNA, 301 bp, Artificial Sequence
  Atrx.4_NTC.2
  crRNA array
  misc_feature (148)..(157): n is a, c, g, or t
cttggctttatatatcttgtggaaaggacgaaacaccgtaatttctactaagtgtagataaactgggctcctactaaattaatttctactaagtgtagatttatgtcgcgccgcgacccgtaatttctactaagtgtagatttttttnnnnnnnnnnaagcttggcgtggatccgatatcaactagatcttgagacaaatggcagtattcatccacaattttaaaagaaaaggggggattggggggtacagtgcaggggaaagaatagtagacataatagcaacagacatacaaactaaag

SEQ ID NO: 15963 - DNA, 301 bp, Artificial Sequence
  Atrx.4_NTC.20
  crRNA array
  misc_feature (148)..(157): n is a, c, g, or t
cttggctttatatatcttgtggaaaggacgaaacaccgtaatttctactaagtgtagataaactgggctcctactaaattaatttctactaagtgtagatattccggcgcgaccagaagataatttctactaagtgtagatttttttnnnnnnnnnnaagcttggcgtggatccgatatcaactagatcttgagacaaatggcagtattcatccacaattttaaaagaaaaggggggattggggggtacagtgcaggggaaagaatagtagacataatagcaacagacatacaaactaaag

SEQ ID NO: 15964 - DNA, 301 bp, Artificial Sequence
  Atrx.4_NTC.21
  crRNA array
  misc_feature (148)..(157): n is a, c, g, or t
cttggctttatatatcttgtggaaaggacgaaacaccgtaatttctactaagtgtagataaactgggctcctactaaattaatttctactaagtgtagatgtataacttcgcgcggtccgtaatttctactaagtgtagatttttttnnnnnnnnnnaagcttggcgtggatccgatatcaactagatcttgagacaaatggcagtattcatccacaattttaaaagaaaaggggggattggggggtacagtgcaggggaaagaatagtagacataatagcaacagacatacaaactaaag

SEQ ID NO: 15965 - DNA, 301 bp, Artificial Sequence
  Atrx.4_NTC.22
  crRNA array
  misc_feature (148)..(157): n is a, c, g, or t
cttggctttatatatcttgtggaaaggacgaaacaccgtaatttctactaagtgtagataaactgggctcctactaaattaatttctactaagtgtagatgcgcgtcaacgtaatgtgcctaatttctactaagtgtagatttttttnnnnnnnnnnaagcttggcgtggatccgatatcaactagatcttgagacaaatggcagtattcatccacaattttaaaagaaaaggggggattggggggtacagtgcaggggaaagaatagtagacataatagcaacagacatacaaactaaag

SEQ ID NO: 15966 - DNA, 301 bp, Artificial Sequence
  Atrx.4_NTC.23
  crRNA array
  misc_feature (148)..(157): n is a, c, g, or t
cttggctttatatatcttgtggaaaggacgaaacaccgtaatttctactaagtgtagataaactgggctcctactaaattaatttctactaagtgtagatacgcgctattatcgtaggtgtaatttctactaagtgtagatttttttnnnnnnnnnnaagcttggcgtggatccgatatcaactagatcttgagacaaatggcagtattcatccacaattttaaaagaaaaggggggattggggggtacagtgcaggggaaagaatagtagacataatagcaacagacatacaaactaaag

SEQ ID NO: 15967 - DNA, 301 bp, Artificial Sequence
  Atrx.4_NTC.24
  crRNA array
  misc_feature (148)..(157): n is a, c, g, or t
cttggctttatatatcttgtggaaaggacgaaacaccgtaatttctactaagtgtagataaactgggctcctactaaattaatttctactaagtgtagatactatcgacgttcgtcccggtaatttctactaagtgtagatttttttnnnnnnnnnnaagcttggcgtggatccgatatcaactagatcttgagacaaatggcagtattcatccacaattttaaaagaaaaggggggattggggggtacagtgcaggggaaagaatagtagacataatagcaacagacatacaaactaaag

SEQ ID NO: 15968 - DNA, 301 bp, Artificial Sequence
  Atrx.4_NTC.25
  crRNA array
  misc_feature (148)..(157): n is a, c, g, or t
cttggctttatatatcttgtggaaaggacgaaacaccgtaatttctactaagtgtagataaactgggctcctactaaattaatttctactaagtgtagattcgcgttatcgtgccgtgcgtaatttctactaagtgtagatttttttnnnnnnnnnnaagcttggcgtggatccgatatcaactagatcttgagacaaatggcagtattcatccacaattttaaaagaaaaggggggattggggggtacagtgcaggggaaagaatagtagacataatagcaacagacatacaaactaaag

SEQ ID NO: 15969 - DNA, 301 bp, Artificial Sequence
  Atrx.4_NTC.26
  crRNA array
  misc_feature (148)..(157): n is a, c, g, or t
cttggctttatatatcttgtggaaaggacgaaacaccgtaatttctactaagtgtagataaactgggctcctactaaattaatttctactaagtgtagatcgcgacggcggttttaacactaatttctactaagtgtagatttttttnnnnnnnnnnaagcttggcgtggatccgatatcaactagatcttgagacaaatggcagtattcatccacaattttaaaagaaaaggggggattggggggtacagtgcaggggaaagaatagtagacataatagcaacagacatacaaactaaag

SEQ ID NO: 15970 - DNA, 301 bp, Artificial Sequence
  Atrx.4_NTC.27
  crRNA array
  misc_feature (148)..(157): n is a, c, g, or t
cttggctttatatatcttgtggaaaggacgaaacaccgtaatttctactaagtgtagataaactgggctcctactaaattaatttctactaagtgtagatgtcgcgttgcgaccggcgcttaatttctactaagtgtagatttttttnnnnnnnnnnaagcttggcgtggatccgatatcaactagatcttgagacaaatggcagtattcatccacaattttaaaagaaaaggggggattggggggtacagtgcaggggaaagaatagtagacataatagcaacagacatacaaactaaag

SEQ ID NO: 15971 - DNA, 301 bp, Artificial Sequence
  Atrx.4_NTC.28
  crRNA array
  misc_feature (148)..(157): n is a, c, g, or t
cttggctttatatatcttgtggaaaggacgaaacaccgtaatttctactaagtgtagataaactgggctcctactaaattaatttctactaagtgtagataccgctaatcggcgtaaacttaatttctactaagtgtagatttttttnnnnnnnnnnaagcttggcgtggatccgatatcaactagatcttgagacaaatggcagtattcatccacaattttaaaagaaaaggggggattggggggtacagtgcaggggaaagaatagtagacataatagcaacagacatacaaactaaag

SEQ ID NO: 15972 - DNA, 301 bp, Artificial Sequence
  Atrx.4_NTC.29
  crRNA array
  misc_feature (148)..(157): n is a, c, g, or t
cttggctttatatatcttgtggaaaggacgaaacaccgtaatttctactaagtgtagataaactgggctcctactaaattaatttctactaagtgtagatcgcgatctataccgtctatataatttctactaagtgtagatttttttnnnnnnnnnnaagcttggcgtggatccgatatcaactagatcttgagacaaatggcagtattcatccacaattttaaaagaaaaggggggattggggggtacagtgcaggggaaagaatagtagacataatagcaacagacatacaaactaaag

SEQ ID NO: 15973 - DNA, 301 bp, Artificial Sequence
  Atrx.4_NTC.3
  crRNA array
  misc_feature (148)..(157): n is a, c, g, or t
cttggctttatatatcttgtggaaaggacgaaacaccgtaatttctactaagtgtagataaactgggctcctactaaattaatttctactaagtgtagattcgacgcgagacgacgtacataatttctactaagtgtagatttttttnnnnnnnnnnaagcttggcgtggatccgatatcaactagatcttgagacaaatggcagtattcatccacaattttaaaagaaaaggggggattggggggtacagtgcaggggaaagaatagtagacataatagcaacagacatacaaactaaag

SEQ ID NO: 15974 - DNA, 301 bp, Artificial Sequence
  Atrx.4_NTC.30
  crRNA array
  misc_feature (148)..(157): n is a, c, g, or t
cttggctttatatatcttgtggaaaggacgaaacaccgtaatttctactaagtgtagataaactgggctcctactaaattaatttctactaagtgtagatcgatcgtacgggtgtcctaataatttctactaagtgtagatttttttnnnnnnnnnnaagcttggcgtggatccgatatcaactagatcttgagacaaatggcagtattcatccacaattttaaaagaaaaggggggattggggggtacagtgcaggggaaagaatagtagacataatagcaacagacatacaaactaaag

SEQ ID NO: 15975 - DNA, 301 bp, Artificial Sequence
  Atrx.4_NTC.31
  crRNA array
  misc_feature (148)..(157): n is a, c, g, or t
cttggctttatatatcttgtggaaaggacgaaacaccgtaatttctactaagtgtagataaactgggctcctactaaattaatttctactaagtgtagatgccgaccgcgtgattgtaggtaatttctactaagtgtagatttttttnnnnnnnnnnaagcttggcgtggatccgatatcaactagatcttgagacaaatggcagtattcatccacaattttaaaagaaaaggggggattggggggtacagtgcaggggaaagaatagtagacataatagcaacagacatacaaactaaag

SEQ ID NO: 15976 - DNA, 301 bp, Artificial Sequence
  Atrx.4_NTC.32
  crRNA array
  misc_feature (148)..(157): n is a, c, g, or t
cttggctttatatatcttgtggaaaggacgaaacaccgtaatttctactaagtgtagataaactgggctcctactaaattaatttctactaagtgtagatgcacgttacgcccgggtcactaatttctactaagtgtagatttttttnnnnnnnnnnaagcttggcgtggatccgatatcaactagatcttgagacaaatggcagtattcatccacaattttaaaagaaaaggggggattggggggtacagtgcaggggaaagaatagtagacataatagcaacagacatacaaactaaag

SEQ ID NO: 15977 - DNA, 301 bp, Artificial Sequence
  Atrx.4_NTC.33
  crRNA array
  misc_feature (148)..(157): n is a, c, g, or t
cttggctttatatatcttgtggaaaggacgaaacaccgtaatttctactaagtgtagataaactgggctcctactaaattaatttctactaagtgtagattaagcgaccgacgcattcgctaatttctactaagtgtagatttttttnnnnnnnnnnaagcttggcgtggatccgatatcaactagatcttgagacaaatggcagtattcatccacaattttaaaagaaaaggggggattggggggtacagtgcaggggaaagaatagtagacataatagcaacagacatacaaactaaag

SEQ ID NO: 15978 - DNA, 301 bp, Artificial Sequence
  Atrx.4_NTC.34
  crRNA array
  misc_feature (148)..(157): n is a, c, g, or t
cttggctttatatatcttgtggaaaggacgaaacaccgtaatttctactaagtgtagataaactgggctcctactaaattaatttctactaagtgtagattagcgttcgacacgtgaaactaatttctactaagtgtagatttttttnnnnnnnnnnaagcttggcgtggatccgatatcaactagatcttgagacaaatggcagtattcatccacaattttaaaagaaaaggggggattggggggtacagtgcaggggaaagaatagtagacataatagcaacagacatacaaactaaag

SEQ ID NO: 15979 - DNA, 301 bp, Artificial Sequence
  Atrx.4_NTC.35
  crRNA array
  misc_feature (148)..(157): n is a, c, g, or t
cttggctttatatatcttgtggaaaggacgaaacaccgtaatttctactaagtgtagataaactgggctcctactaaattaatttctactaagtgtagattggcgcgtaatcgctattcgtaatttctactaagtgtagatttttttnnnnnnnnnnaagcttggcgtggatccgatatcaactagatcttgagacaaatggcagtattcatccacaattttaaaagaaaaggggggattggggggtacagtgcaggggaaagaatagtagacataatagcaacagacatacaaactaaag

SEQ ID NO: 15980 - DNA, 301 bp, Artificial Sequence
  Atrx.4_NTC.36
  crRNA array
  misc_feature (148)..(157): n is a, c, g, or t
cttggctttatatatcttgtggaaaggacgaaacaccgtaatttctactaagtgtagataaactgggctcctactaaattaatttctactaagtgtagatcaacccgccgtagcgggccttaatttctactaagtgtagatttttttnnnnnnnnnnaagcttggcgtggatccgatatcaactagatcttgagacaaatggcagtattcatccacaattttaaaagaaaaggggggattggggggtacagtgcaggggaaagaatagtagacataatagcaacagacatacaaactaaag

SEQ ID NO: 15981 - DNA, 301 bp, Artificial Sequence
  Atrx.4_NTC.37
  crRNA array
  misc_feature (148)..(157): n is a, c, g, or t
cttggctttatatatcttgtggaaaggacgaaacaccgtaatttctactaagtgtagataaactgggctcctactaaattaatttctactaagtgtagattttgcgttgacgcgattacttaatttctactaagtgtagatttttttnnnnnnnnnnaagcttggcgtggatccgatatcaactagatcttgagacaaatggcagtattcatccacaattttaaaagaaaaggggggattggggggtacagtgcaggggaaagaatagtagacataatagcaacagacatacaaactaaag

SEQ ID NO: 15982 - DNA, 301 bp, Artificial Sequence
  Atrx.4_NTC.38
  crRNA array
  misc_feature (148)..(157): n is a, c, g, or t
cttggctttatatatcttgtggaaaggacgaaacaccgtaatttctactaagtgtagataaactgggctcctactaaattaatttctactaagtgtagataacggagcgcgatactaccataatttctactaagtgtagatttttttnnnnnnnnnnaagcttggcgtggatccgatatcaactagatcttgagacaaatggcagtattcatccacaattttaaaagaaaaggggggattggggggtacagtgcaggggaaagaatagtagacataatagcaacagacatacaaactaaag

SEQ ID NO: 15983 - DNA, 301 bp, Artificial Sequence
  Atrx.4_NTC.39
  crRNA array
  misc_feature (148)..(157): n is a, c, g, or t
cttggctttatatatcttgtggaaaggacgaaacaccgtaatttctactaagtgtagataaactgggctcctactaaattaatttctactaagtgtagatccggacgttataacgtttcttaatttctactaagtgtagatttttttnnnnnnnnnnaagcttggcgtggatccgatatcaactagatcttgagacaaatggcagtattcatccacaattttaaaagaaaaggggggattggggggtacagtgcaggggaaagaatagtagacataatagcaacagacatacaaactaaag

SEQ ID NO: 15984 - DNA, 301 bp, Artificial Sequence
  Atrx.4_NTC.4
  crRNA array
  misc_feature (148)..(157): n is a, c, g, or t
cttggctttatatatcttgtggaaaggacgaaacaccgtaatttctactaagtgtagataaactgggctcctactaaattaatttctactaagtgtagatatacccgtcgcgaacgtgagtaatttctactaagtgtagatttttttnnnnnnnnnnaagcttggcgtggatccgatatcaactagatcttgagacaaatggcagtattcatccacaattttaaaagaaaaggggggattggggggtacagtgcaggggaaagaatagtagacataatagcaacagacatacaaactaaag

SEQ ID NO: 15985 - DNA, 301 bp, Artificial Sequence
  Atrx.4_NTC.40
  crRNA array
  misc_feature (148)..(157): n is a, c, g, or t
cttggctttatatatcttgtggaaaggacgaaacaccgtaatttctactaagtgtagataaactgggctcctactaaattaatttctactaagtgtagatattcgcgaacccggccggaataatttctactaagtgtagatttttttnnnnnnnnnnaagcttggcgtggatccgatatcaactagatcttgagacaaatggcagtattcatccacaattttaaaagaaaaggggggattggggggtacagtgcaggggaaagaatagtagacataatagcaacagacatacaaactaaag

SEQ ID NO: 15986 - DNA, 301 bp, Artificial Sequence
  Atrx.4_NTC.41
  crRNA array
  misc_feature (148)..(157): n is a, c, g, or t
cttggctttatatatcttgtggaaaggacgaaacaccgtaatttctactaagtgtagataaactgggctcctactaaattaatttctactaagtgtagatttgatggcgcgacgcgttattaatttctactaagtgtagatttttttnnnnnnnnnnaagcttggcgtggatccgatatcaactagatcttgagacaaatggcagtattcatccacaattttaaaagaaaaggggggattggggggtacagtgcaggggaaagaatagtagacataatagcaacagacatacaaactaaag

SEQ ID NO: 15987 - DNA, 301 bp, Artificial Sequence
  Atrx.4_NTC.42
  crRNA array
  misc_feature (148)..(157): n is a, c, g, or t
cttggctttatatatcttgtggaaaggacgaaacaccgtaatttctactaagtgtagataaactgggctcctactaaattaatttctactaagtgtagatggtcaaatcgcggcgataactaatttctactaagtgtagatttttttnnnnnnnnnnaagcttggcgtggatccgatatcaactagatcttgagacaaatggcagtattcatccacaattttaaaagaaaaggggggattggggggtacagtgcaggggaaagaatagtagacataatagcaacagacatacaaactaaag

SEQ ID NO: 15988 - DNA, 301 bp, Artificial Sequence
  Atrx.4_NTC.43
  crRNA array
  misc_feature (148)..(157): n is a, c, g, or t
cttggctttatatatcttgtggaaaggacgaaacaccgtaatttctactaagtgtagataaactgggctcctactaaattaatttctactaagtgtagatcgactcgcgcattgaactggtaatttctactaagtgtagatttttttnnnnnnnnnnaagcttggcgtggatccgatatcaactagatcttgagacaaatggcagtattcatccacaattttaaaagaaaaggggggattggggggtacagtgcaggggaaagaatagtagacataatagcaacagacatacaaactaaag

SEQ ID NO: 15989 - DNA, 301 bp, Artificial Sequence
  Atrx.4_NTC.44
  crRNA array
  misc_feature (148)..(157): n is a, c, g, or t
cttggctttatatatcttgtggaaaggacgaaacaccgtaatttctactaagtgtagataaactgggctcctactaaattaatttctactaagtgtagatagcgtcgtacgatttatcgttaatttctactaagtgtagatttttttnnnnnnnnnnaagcttggcgtggatccgatatcaactagatcttgagacaaatggcagtattcatccacaattttaaaagaaaaggggggattggggggtacagtgcaggggaaagaatagtagacataatagcaacagacatacaaactaaag

SEQ ID NO: 15990 - DNA, 301 bp, Artificial Sequence
  Atrx.4_NTC.45
  crRNA array
  misc_feature (148)..(157): n is a, c, g, or t
cttggctttatatatcttgtggaaaggacgaaacaccgtaatttctactaagtgtagataaactgggctcctactaaattaatttctactaagtgtagatcggaacgcgtgatactagggtaatttctactaagtgtagatttttttnnnnnnnnnnaagcttggcgtggatccgatatcaactagatcttgagacaaatggcagtattcatccacaattttaaaagaaaaggggggattggggggtacagtgcaggggaaagaatagtagacataatagcaacagacatacaaactaaag

SEQ ID NO: 15991 - DNA, 301 bp, Artificial Sequence
  Atrx.4_NTC.46
  crRNA array
  misc_feature (148)..(157): n is a, c, g, or t
cttggctttatatatcttgtggaaaggacgaaacaccgtaatttctactaagtgtagataaactgggctcctactaaattaatttctactaagtgtagatagcgggtcgtagacgcgcggtaatttctactaagtgtagatttttttnnnnnnnnnnaagcttggcgtggatccgatatcaactagatcttgagacaaatggcagtattcatccacaattttaaaagaaaaggggggattggggggtacagtgcaggggaaagaatagtagacataatagcaacagacatacaaactaaag

SEQ ID NO: 15992 - DNA, 301 bp, Artificial Sequence
  Atrx.4_NTC.47
  crRNA array
  misc_feature (148)..(157): n is a, c, g, or t
cttggctttatatatcttgtggaaaggacgaaacaccgtaatttctactaagtgtagataaactgggctcctactaaattaatttctactaagtgtagattctcgtatcgcgattgttaataatttctactaagtgtagatttttttnnnnnnnnnnaagcttggcgtggatccgatatcaactagatcttgagacaaatggcagtattcatccacaattttaaaagaaaaggggggattggggggtacagtgcaggggaaagaatagtagacataatagcaacagacatacaaactaaag

SEQ ID NO: 15993 - DNA, 301 bp, Artificial Sequence
  Atrx.4_NTC.48
  crRNA array
  misc_feature (148)..(157): n is a, c, g, or t
cttggctttatatatcttgtggaaaggacgaaacaccgtaatttctactaagtgtagataaactgggctcctactaaattaatttctactaagtgtagatcggtcgactacggctgttagtaatttctactaagtgtagatttttttnnnnnnnnnnaagcttggcgtggatccgatatcaactagatcttgagacaaatggcagtattcatccacaattttaaaagaaaaggggggattggggggtacagtgcaggggaaagaatagtagacataatagcaacagacatacaaactaaag

SEQ ID NO: 15994 - DNA, 301 bp, Artificial Sequence
  Atrx.4_NTC.49
  crRNA array
  misc_feature (148)..(157): n is a, c, g, or t
cttggctttatatatcttgtggaaaggacgaaacaccgtaatttctactaagtgtagataaactgggctcctactaaattaatttctactaagtgtagattcggggcgcgtcaactgaattaatttctactaagtgtagatttttttnnnnnnnnnnaagcttggcgtggatccgatatcaactagatcttgagacaaatggcagtattcatccacaattttaaaagaaaaggggggattggggggtacagtgcaggggaaagaatagtagacataatagcaacagacatacaaactaaag

SEQ ID NO: 15995 - DNA, 301 bp, Artificial Sequence
  Atrx.4_NTC.5
  crRNA array
  misc_feature (148)..(157): n is a, c, g, or t
cttggctttatatatcttgtggaaaggacgaaacaccgtaatttctactaagtgtagataaactgggctcctactaaattaatttctactaagtgtagatgcttacgcgtcgcgaatgtataatttctactaagtgtagatttttttnnnnnnnnnnaagcttggcgtggatccgatatcaactagatcttgagacaaatggcagtattcatccacaattttaaaagaaaaggggggattggggggtacagtgcaggggaaagaatagtagacataatagcaacagacatacaaactaaag

SEQ ID NO: 15996 - DNA, 301 bp, Artificial Sequence
  Atrx.4_NTC.50
  crRNA array
  misc_feature (148)..(157): n is a, c, g, or t
cttggctttatatatcttgtggaaaggacgaaacaccgtaatttctactaagtgtagataaactgggctcctactaaattaatttctactaagtgtagatattgccgctcgcgcaaaatctaatttctactaagtgtagatttttttnnnnnnnnnnaagcttggcgtggatccgatatcaactagatcttgagacaaatggcagtattcatccacaattttaaaagaaaaggggggattggggggtacagtgcaggggaaagaatagtagacataatagcaacagacatacaaactaaag

SEQ ID NO: 15997 - DNA, 301 bp, Artificial Sequence
  Atrx.4_NTC.51
  crRNA array
  misc_feature (148)..(157): n is a, c, g, or t
cttggctttatatatcttgtggaaaggacgaaacaccgtaatttctactaagtgtagataaactgggctcctactaaattaatttctactaagtgtagattaacgcgcaacacgccaatgtaatttctactaagtgtagatttttttnnnnnnnnnnaagcttggcgtggatccgatatcaactagatcttgagacaaatggcagtattcatccacaattttaaaagaaaaggggggattggggggtacagtgcaggggaaagaatagtagacataatagcaacagacatacaaactaaag

SEQ ID NO: 15998 - DNA, 301 bp, Artificial Sequence
  Atrx.4_NTC.6
  crRNA array
  misc_feature (148)..(157): n is a, c, g, or t
cttggctttatatatcttgtggaaaggacgaaacaccgtaatttctactaagtgtagataaactgggctcctactaaattaatttctactaagtgtagatcgaatcgcgcctacgggaattaatttctactaagtgtagatttttttnnnnnnnnnnaagcttggcgtggatccgatatcaactagatcttgagacaaatggcagtattcatccacaattttaaaagaaaaggggggattggggggtacagtgcaggggaaagaatagtagacataatagcaacagacatacaaactaaag

SEQ ID NO: 15999 - DNA, 301 bp, Artificial Sequence
  Atrx.4_NTC.7
  crRNA array
  misc_feature (148)..(157): n is a, c, g, or t
cttggctttatatatcttgtggaaaggacgaaacaccgtaatttctactaagtgtagataaactgggctcctactaaattaatttctactaagtgtagatcgccgaacggataagactattaatttctactaagtgtagatttttttnnnnnnnnnnaagcttggcgtggatccgatatcaactagatcttgagacaaatggcagtattcatccacaattttaaaagaaaaggggggattggggggtacagtgcaggggaaagaatagtagacataatagcaacagacatacaaactaaag

SEQ ID NO: 16000 - DNA, 301 bp, Artificial Sequence
  Atrx.4_NTC.8
  crRNA array
  misc_feature (148)..(157): n is a, c, g, or t
cttggctttatatatcttgtggaaaggacgaaacaccgtaatttctactaagtgtagataaactgggctcctactaaattaatttctactaagtgtagatcgaccgaggttacgctgggataatttctactaagtgtagatttttttnnnnnnnnnnaagcttggcgtggatccgatatcaactagatcttgagacaaatggcagtattcatccacaattttaaaagaaaaggggggattggggggtacagtgcaggggaaagaatagtagacataatagcaacagacatacaaactaaag

SEQ ID NO: 16001 - DNA, 301 bp, Artificial Sequence
  Atrx.4_NTC.9
  crRNA array
  misc_feature (148)..(157): n is a, c, g, or t
cttggctttatatatcttgtggaaaggacgaaacaccgtaatttctactaagtgtagataaactgggctcctactaaattaatttctactaagtgtagatatcgccgtacggctatggcataatttctactaagtgtagatttttttnnnnnnnnnnaagcttggcgtggatccgatatcaactagatcttgagacaaatggcagtattcatccacaattttaaaagaaaaggggggattggggggtacagtgcaggggaaagaatagtagacataatagcaacagacatacaaactaaag

SEQ ID NO: 16002 - DNA, 301 bp, Artificial Sequence
  Brca2.1_NTC.0
  crRNA array
  misc_feature (148)..(157): n is a, c, g, or t
cttggctttatatatcttgtggaaaggacgaaacaccgtaatttctactaagtgtagatctaagcgtagaaccagaaattaatttctactaagtgtagattatagcgtcgcgcgctaatttaatttctactaagtgtagatttttttnnnnnnnnnnaagcttggcgtggatccgatatcaactagatcttgagacaaatggcagtattcatccacaattttaaaagaaaaggggggattggggggtacagtgcaggggaaagaatagtagacataatagcaacagacatacaaactaaag

SEQ ID NO: 16003 - DNA, 301 bp, Artificial Sequence
  Brca2.1_NTC.1
  crRNA array
  misc_feature (148)..(157): n is a, c, g, or t
cttggctttatatatcttgtggaaaggacgaaacaccgtaatttctactaagtgtagatctaagcgtagaaccagaaattaatttctactaagtgtagatcgcgtaaccgttccggctcctaatttctactaagtgtagatttttttnnnnnnnnnnaagcttggcgtggatccgatatcaactagatcttgagacaaatggcagtattcatccacaattttaaaagaaaaggggggattggggggtacagtgcaggggaaagaatagtagacataatagcaacagacatacaaactaaag

SEQ ID NO: 16004 - DNA, 301 bp, Artificial Sequence
  Brca2.1_NTC.10
  crRNA array
  misc_feature (148)..(157): n is a, c, g, or t
cttggctttatatatcttgtggaaaggacgaaacaccgtaatttctactaagtgtagatctaagcgtagaaccagaaattaatttctactaagtgtagatcgctaagttcgcgcgggccgtaatttctactaagtgtagatttttttnnnnnnnnnnaagcttggcgtggatccgatatcaactagatcttgagacaaatggcagtattcatccacaattttaaaagaaaaggggggattggggggtacagtgcaggggaaagaatagtagacataatagcaacagacatacaaactaaag

SEQ ID NO: 16005 - DNA, 301 bp, Artificial Sequence
  Brca2.1_NTC.11
  crRNA array
  misc_feature (148)..(157): n is a, c, g, or t
cttggctttatatatcttgtggaaaggacgaaacaccgtaatttctactaagtgtagatctaagcgtagaaccagaaattaatttctactaagtgtagatcgttcgtcgacgaagcaatctaatttctactaagtgtagatttttttnnnnnnnnnnaagcttggcgtggatccgatatcaactagatcttgagacaaatggcagtattcatccacaattttaaaagaaaaggggggattggggggtacagtgcaggggaaagaatagtagacataatagcaacagacatacaaactaaag

SEQ ID NO: 16006 - DNA, 301 bp, Artificial Sequence
  Brca2.1_NTC.12
  crRNA array
  misc_feature (148)..(157): n is a, c, g, or t
cttggctttatatatcttgtggaaaggacgaaacaccgtaatttctactaagtgtagatctaagcgtagaaccagaaattaatttctactaagtgtagatcgccgacgattaatcaatagtaatttctactaagtgtagatttttttnnnnnnnnnnaagcttggcgtggatccgatatcaactagatcttgagacaaatggcagtattcatccacaattttaaaagaaaaggggggattggggggtacagtgcaggggaaagaatagtagacataatagcaacagacatacaaactaaag

SEQ ID NO: 16007 - DNA, 301 bp, Artificial Sequence
  Brca2.1_NTC.13
  crRNA array
  misc_feature (148)..(157): n is a, c, g, or t
cttggctttatatatcttgtggaaaggacgaaacaccgtaatttctactaagtgtagatctaagcgtagaaccagaaattaatttctactaagtgtagatgaccgttgtatcgcgatcaataatttctactaagtgtagatttttttnnnnnnnnnnaagcttggcgtggatccgatatcaactagatcttgagacaaatggcagtattcatccacaattttaaaagaaaaggggggattggggggtacagtgcaggggaaagaatagtagacataatagcaacagacatacaaactaaag

SEQ ID NO: 16008 - DNA, 301 bp, Artificial Sequence
  Brca2.1_NTC.14
  crRNA array
  misc_feature (148)..(157): n is a, c, g, or t
cttggctttatatatcttgtggaaaggacgaaacaccgtaatttctactaagtgtagatctaagcgtagaaccagaaattaatttctactaagtgtagatccgttcgtgcgatagtgttttaatttctactaagtgtagatttttttnnnnnnnnnnaagcttggcgtggatccgatatcaactagatcttgagacaaatggcagtattcatccacaattttaaaagaaaaggggggattggggggtacagtgcaggggaaagaatagtagacataatagcaacagacatacaaactaaag

SEQ ID NO: 16009 - DNA, 301 bp, Artificial Sequence
  Brca2.1_NTC.15
  crRNA array
  misc_feature (148)..(157): n is a, c, g, or t
cttggctttatatatcttgtggaaaggacgaaacaccgtaatttctactaagtgtagatctaagcgtagaaccagaaattaatttctactaagtgtagatgttgtcgtgccgcgaatttataatttctactaagtgtagatttttttnnnnnnnnnnaagcttggcgtggatccgatatcaactagatcttgagacaaatggcagtattcatccacaattttaaaagaaaaggggggattggggggtacagtgcaggggaaagaatagtagacataatagcaacagacatacaaactaaag

SEQ ID NO: 16010 - DNA, 301 bp, Artificial Sequence
  Brca2.1_NTC.16
  crRNA array
  misc_feature (148)..(157): n is a, c, g, or t
cttggctttatatatcttgtggaaaggacgaaacaccgtaatttctactaagtgtagatctaagcgtagaaccagaaattaatttctactaagtgtagatcggtacgttagacgaaaatttaatttctactaagtgtagatttttttnnnnnnnnnnaagcttggcgtggatccgatatcaactagatcttgagacaaatggcagtattcatccacaattttaaaagaaaaggggggattggggggtacagtgcaggggaaagaatagtagacataatagcaacagacatacaaactaaag

SEQ ID NO: 16011 - DNA, 301 bp, Artificial Sequence
  Brca2.1_NTC.17
  crRNA array
  misc_feature (148)..(157): n is a, c, g, or t
cttggctttatatatcttgtggaaaggacgaaacaccgtaatttctactaagtgtagatctaagcgtagaaccagaaattaatttctactaagtgtagattatcgaacgctatcgaacgttaatttctactaagtgtagatttttttnnnnnnnnnnaagcttggcgtggatccgatatcaactagatcttgagacaaatggcagtattcatccacaattttaaaagaaaaggggggattggggggtacagtgcaggggaaagaatagtagacataatagcaacagacatacaaactaaag

SEQ ID NO: 16012 - DNA, 301 bp, Artificial Sequence
  Brca2.1_NTC.18
  crRNA array
  misc_feature (148)..(157): n is a, c, g, or t
cttggctttatatatcttgtggaaaggacgaaacaccgtaatttctactaagtgtagatctaagcgtagaaccagaaattaatttctactaagtgtagattccggttacgaccggcaaaataatttctactaagtgtagatttttttnnnnnnnnnnaagcttggcgtggatccgatatcaactagatcttgagacaaatggcagtattcatccacaattttaaaagaaaaggggggattggggggtacagtgcaggggaaagaatagtagacataatagcaacagacatacaaactaaag

SEQ ID NO: 16013 - DNA, 301 bp, Artificial Sequence
  Brca2.1_NTC.19
  crRNA array
  misc_feature (148)..(157): n is a, c, g, or t
cttggctttatatatcttgtggaaaggacgaaacaccgtaatttctactaagtgtagatctaagcgtagaaccagaaattaatttctactaagtgtagatcgtcgtagaacgatacccgataatttctactaagtgtagatttttttnnnnnnnnnnaagcttggcgtggatccgatatcaactagatcttgagacaaatggcagtattcatccacaattttaaaagaaaaggggggattggggggtacagtgcaggggaaagaatagtagacataatagcaacagacatacaaactaaag

SEQ ID NO: 16014 - DNA, 301 bp, Artificial Sequence
  Brca2.1_NTC.2
  crRNA array
  misc_feature (148)..(157): n is a, c, g, or t
cttggctttatatatcttgtggaaaggacgaaacaccgtaatttctactaagtgtagatctaagcgtagaaccagaaattaatttctactaagtgtagatttatgtcgcgccgcgacccgtaatttctactaagtgtagatttttttnnnnnnnnnnaagcttggcgtggatccgatatcaactagatcttgagacaaatggcagtattcatccacaattttaaaagaaaaggggggattggggggtacagtgcaggggaaagaatagtagacataatagcaacagacatacaaactaaag

SEQ ID NO: 16015 - DNA, 301 bp, Artificial Sequence
  Brca2.1_NTC.20
  crRNA array
  misc_feature (148)..(157): n is a, c, g, or t
cttggctttatatatcttgtggaaaggacgaaacaccgtaatttctactaagtgtagatctaagcgtagaaccagaaattaatttctactaagtgtagatattccggcgcgaccagaagataatttctactaagtgtagatttttttnnnnnnnnnnaagcttggcgtggatccgatatcaactagatcttgagacaaatggcagtattcatccacaattttaaaagaaaaggggggattggggggtacagtgcaggggaaagaatagtagacataatagcaacagacatacaaactaaag

SEQ ID NO: 16016 - DNA, 301 bp, Artificial Sequence
  Brca2.1_NTC.21
  crRNA array
  misc_feature (148)..(157): n is a, c, g, or t
cttggctttatatatcttgtggaaaggacgaaacaccgtaatttctactaagtgtagatctaagcgtagaaccagaaattaatttctactaagtgtagatgtataacttcgcgcggtccgtaatttctactaagtgtagatttttttnnnnnnnnnnaagcttggcgtggatccgatatcaactagatcttgagacaaatggcagtattcatccacaattttaaaagaaaaggggggattggggggtacagtgcaggggaaagaatagtagacataatagcaacagacatacaaactaaag

SEQ ID NO: 16017 - DNA, 301 bp, Artificial Sequence
  Brca2.1_NTC.22
  crRNA array
  misc_feature (148)..(157): n is a, c, g, or t
cttggctttatatatcttgtggaaaggacgaaacaccgtaatttctactaagtgtagatctaagcgtagaaccagaaattaatttctactaagtgtagatgcgcgtcaacgtaatgtgcctaatttctactaagtgtagatttttttnnnnnnnnnnaagcttggcgtggatccgatatcaactagatcttgagacaaatggcagtattcatccacaattttaaaagaaaaggggggattggggggtacagtgcaggggaaagaatagtagacataatagcaacagacatacaaactaaag

SEQ ID NO: 16018 - DNA, 301 bp, Artificial Sequence
  Brca2.1_NTC.23
  crRNA array
  misc_feature (148)..(157): n is a, c, g, or t
cttggctttatatatcttgtggaaaggacgaaacaccgtaatttctactaagtgtagatctaagcgtagaaccagaaattaatttctactaagtgtagatacgcgctattatcgtaggtgtaatttctactaagtgtagatttttttnnnnnnnnnnaagcttggcgtggatccgatatcaactagatcttgagacaaatggcagtattcatccacaattttaaaagaaaaggggggattggggggtacagtgcaggggaaagaatagtagacataatagcaacagacatacaaactaaag

SEQ ID NO: 16019 - DNA, 301 bp, Artificial Sequence
  Brca2.1_NTC.24
  crRNA array
  misc_feature (148)..(157): n is a, c, g, or t
cttggctttatatatcttgtggaaaggacgaaacaccgtaatttctactaagtgtagatctaagcgtagaaccagaaattaatttctactaagtgtagatactatcgacgttcgtcccggtaatttctactaagtgtagatttttttnnnnnnnnnnaagcttggcgtggatccgatatcaactagatcttgagacaaatggcagtattcatccacaattttaaaagaaaaggggggattggggggtacagtgcaggggaaagaatagtagacataatagcaacagacatacaaactaaag

SEQ ID NO: 16020 - DNA, 301 bp, Artificial Sequence
  Brca2.1_NTC.25
  crRNA array
  misc_feature (148)..(157): n is a, c, g, or t
cttggctttatatatcttgtggaaaggacgaaacaccgtaatttctactaagtgtagatctaagcgtagaaccagaaattaatttctactaagtgtagattcgcgttatcgtgccgtgcgtaatttctactaagtgtagatttttttnnnnnnnnnnaagcttggcgtggatccgatatcaactagatcttgagacaaatggcagtattcatccacaattttaaaagaaaaggggggattggggggtacagtgcaggggaaagaatagtagacataatagcaacagacatacaaactaaag

SEQ ID NO: 16021 - DNA, 301 bp, Artificial Sequence
  Brca2.1_NTC.26
  crRNA array
  misc_feature (148)..(157): n is a, c, g, or t
cttggctttatatatcttgtggaaaggacgaaacaccgtaatttctactaagtgtagatctaagcgtagaaccagaaattaatttctactaagtgtagatcgcgacggcggttttaacactaatttctactaagtgtagatttttttnnnnnnnnnnaagcttggcgtggatccgatatcaactagatcttgagacaaatggcagtattcatccacaattttaaaagaaaaggggggattggggggtacagtgcaggggaaagaatagtagacataatagcaacagacatacaaactaaag

SEQ ID NO: 16022 - DNA, 301 bp, Artificial Sequence
  Brca2.1_NTC.27
  crRNA array
  misc_feature (148)..(157): n is a, c, g, or t
cttggctttatatatcttgtggaaaggacgaaacaccgtaatttctactaagtgtagatctaagcgtagaaccagaaattaatttctactaagtgtagatgtcgcgttgcgaccggcgcttaatttctactaagtgtagatttttttnnnnnnnnnnaagcttggcgtggatccgatatcaactagatcttgagacaaatggcagtattcatccacaattttaaaagaaaaggggggattggggggtacagtgcaggggaaagaatagtagacataatagcaacagacatacaaactaaag

SEQ ID NO: 16023 - DNA, 301 bp, Artificial Sequence
  Brca2.1_NTC.28
  crRNA array
  misc_feature (148)..(157): n is a, c, g, or t
cttggctttatatatcttgtggaaaggacgaaacaccgtaatttctactaagtgtagatctaagcgtagaaccagaaattaatttctactaagtgtagataccgctaatcggcgtaaacttaatttctactaagtgtagatttttttnnnnnnnnnnaagcttggcgtggatccgatatcaactagatcttgagacaaatggcagtattcatccacaattttaaaagaaaaggggggattggggggtacagtgcaggggaaagaatagtagacataatagcaacagacatacaaactaaag

SEQ ID NO: 16024 - DNA, 301 bp, Artificial Sequence
  Brca2.1_NTC.29
  crRNA array
  misc_feature (148)..(157): n is a, c, g, or t
cttggctttatatatcttgtggaaaggacgaaacaccgtaatttctactaagtgtagatctaagcgtagaaccagaaattaatttctactaagtgtagatcgcgatctataccgtctatataatttctactaagtgtagatttttttnnnnnnnnnnaagcttggcgtggatccgatatcaactagatcttgagacaaatggcagtattcatccacaattttaaaagaaaaggggggattggggggtacagtgcaggggaaagaatagtagacataatagcaacagacatacaaactaaag

SEQ ID NO: 16025 - DNA, 301 bp, Artificial Sequence
  Brca2.1_NTC.3
  crRNA array
  misc_feature (148)..(157): n is a, c, g, or t
cttggctttatatatcttgtggaaaggacgaaacaccgtaatttctactaagtgtagatctaagcgtagaaccagaaattaatttctactaagtgtagattcgacgcgagacgacgtacataatttctactaagtgtagatttttttnnnnnnnnnnaagcttggcgtggatccgatatcaactagatcttgagacaaatggcagtattcatccacaattttaaaagaaaaggggggattggggggtacagtgcaggggaaagaatagtagacataatagcaacagacatacaaactaaag

SEQ ID NO: 16026 - DNA, 301 bp, Artificial Sequence
  Brca2.1_NTC.30
  crRNA array
  misc_feature (148)..(157): n is a, c, g, or t
cttggctttatatatcttgtggaaaggacgaaacaccgtaatttctactaagtgtagatctaagcgtagaaccagaaattaatttctactaagtgtagatcgatcgtacgggtgtcctaataatttctactaagtgtagatttttttnnnnnnnnnnaagcttggcgtggatccgatatcaactagatcttgagacaaatggcagtattcatccacaattttaaaagaaaaggggggattggggggtacagtgcaggggaaagaatagtagacataatagcaacagacatacaaactaaag

SEQ ID NO: 16027 - DNA, 301 bp, Artificial Sequence
  Brca2.1_NTC.31
  crRNA array
  misc_feature (148)..(157): n is a, c, g, or t
cttggctttatatatcttgtggaaaggacgaaacaccgtaatttctactaagtgtagatctaagcgtagaaccagaaattaatttctactaagtgtagatgccgaccgcgtgattgtaggtaatttctactaagtgtagatttttttnnnnnnnnnnaagcttggcgtggatccgatatcaactagatcttgagacaaatggcagtattcatccacaattttaaaagaaaaggggggattggggggtacagtgcaggggaaagaatagtagacataatagcaacagacatacaaactaaag

SEQ ID NO: 16028 - DNA, 301 bp, Artificial Sequence
  Brca2.1_NTC.32
  crRNA array
  misc_feature (148)..(157): n is a, c, g, or t
cttggctttatatatcttgtggaaaggacgaaacaccgtaatttctactaagtgtagatctaagcgtagaaccagaaattaatttctactaagtgtagatgcacgttacgcccgggtcactaatttctactaagtgtagatttttttnnnnnnnnnnaagcttggcgtggatccgatatcaactagatcttgagacaaatggcagtattcatccacaattttaaaagaaaaggggggattggggggtacagtgcaggggaaagaatagtagacataatagcaacagacatacaaactaaag

SEQ ID NO: 16029 - DNA, 301 bp, Artificial Sequence
  Brca2.1_NTC.33
  crRNA array
  misc_feature (148)..(157): n is a, c, g, or t
cttggctttatatatcttgtggaaaggacgaaacaccgtaatttctactaagtgtagatctaagcgtagaaccagaaattaatttctactaagtgtagattaagcgaccgacgcattcgctaatttctactaagtgtagatttttttnnnnnnnnnnaagcttggcgtggatccgatatcaactagatcttgagacaaatggcagtattcatccacaattttaaaagaaaaggggggattggggggtacagtgcaggggaaagaatagtagacataatagcaacagacatacaaactaaag

SEQ ID NO: 16030 - DNA, 301 bp, Artificial Sequence
  Brca2.1_NTC.34
  crRNA array
  misc_feature (148)..(157): n is a, c, g, or t
cttggctttatatatcttgtggaaaggacgaaacaccgtaatttctactaagtgtagatctaagcgtagaaccagaaattaatttctactaagtgtagattagcgttcgacacgtgaaactaatttctactaagtgtagatttttttnnnnnnnnnnaagcttggcgtggatccgatatcaactagatcttgagacaaatggcagtattcatccacaattttaaaagaaaaggggggattggggggtacagtgcaggggaaagaatagtagacataatagcaacagacatacaaactaaag

SEQ ID NO: 16031 - DNA, 301 bp, Artificial Sequence
  Brca2.1_NTC.35
  crRNA array
  misc_feature (148)..(157): n is a, c, g, or t
cttggctttatatatcttgtggaaaggacgaaacaccgtaatttctactaagtgtagatctaagcgtagaaccagaaattaatttctactaagtgtagattggcgcgtaatcgctattcgtaatttctactaagtgtagatttttttnnnnnnnnnnaagcttggcgtggatccgatatcaactagatcttgagacaaatggcagtattcatccacaattttaaaagaaaaggggggattggggggtacagtgcaggggaaagaatagtagacataatagcaacagacatacaaactaaag

SEQ ID NO: 16032 - DNA, 301 bp, Artificial Sequence
  Brca2.1_NTC.36
  crRNA array
  misc_feature (148)..(157): n is a, c, g, or t
cttggctttatatatcttgtggaaaggacgaaacaccgtaatttctactaagtgtagatctaagcgtagaaccagaaattaatttctactaagtgtagatcaacccgccgtagcgggccttaatttctactaagtgtagatttttttnnnnnnnnnnaagcttggcgtggatccgatatcaactagatcttgagacaaatggcagtattcatccacaattttaaaagaaaaggggggattggggggtacagtgcaggggaaagaatagtagacataatagcaacagacatacaaactaaag

SEQ ID NO: 16033 - DNA, 301 bp, Artificial Sequence
  Brca2.1_NTC.37
  crRNA array
  misc_feature (148)..(157): n is a, c, g, or t
cttggctttatatatcttgtggaaaggacgaaacaccgtaatttctactaagtgtagatctaagcgtagaaccagaaattaatttctactaagtgtagattttgcgttgacgcgattacttaatttctactaagtgtagatttttttnnnnnnnnnnaagcttggcgtggatccgatatcaactagatcttgagacaaatggcagtattcatccacaattttaaaagaaaaggggggattggggggtacagtgcaggggaaagaatagtagacataatagcaacagacatacaaactaaag

SEQ ID NO: 16034 - DNA, 301 bp, Artificial Sequence
  Brca2.1_NTC.38
  crRNA array
  misc_feature (148)..(157): n is a, c, g, or t
cttggctttatatatcttgtggaaaggacgaaacaccgtaatttctactaagtgtagatctaagcgtagaaccagaaattaatttctactaagtgtagataacggagcgcgatactaccataatttctactaagtgtagatttttttnnnnnnnnnnaagcttggcgtggatccgatatcaactagatcttgagacaaatggcagtattcatccacaattttaaaagaaaaggggggattggggggtacagtgcaggggaaagaatagtagacataatagcaacagacatacaaactaaag

SEQ ID NO: 16035 - DNA, 301 bp, Artificial Sequence
  Brca2.1_NTC.39
  crRNA array
  misc_feature (148)..(157): n is a, c, g, or t
cttggctttatatatcttgtggaaaggacgaaacaccgtaatttctactaagtgtagatctaagcgtagaaccagaaattaatttctactaagtgtagatccggacgttataacgtttcttaatttctactaagtgtagatttttttnnnnnnnnnnaagcttggcgtggatccgatatcaactagatcttgagacaaatggcagtattcatccacaattttaaaagaaaaggggggattggggggtacagtgcaggggaaagaatagtagacataatagcaacagacatacaaactaaag

SEQ ID NO: 16036 - DNA, 301 bp, Artificial Sequence
  Brca2.1_NTC.4
  crRNA array
  misc_feature (148)..(157): n is a, c, g, or t
cttggctttatatatcttgtggaaaggacgaaacaccgtaatttctactaagtgtagatctaagcgtagaaccagaaattaatttctactaagtgtagatatacccgtcgcgaacgtgagtaatttctactaagtgtagatttttttnnnnnnnnnnaagcttggcgtggatccgatatcaactagatcttgagacaaatggcagtattcatccacaattttaaaagaaaaggggggattggggggtacagtgcaggggaaagaatagtagacataatagcaacagacatacaaactaaag

SEQ ID NO: 16037 - DNA, 301 bp, Artificial Sequence
  Brca2.1_NTC.40
  crRNA array
  misc_feature (148)..(157): n is a, c, g, or t
cttggctttatatatcttgtggaaaggacgaaacaccgtaatttctactaagtgtagatctaagcgtagaaccagaaattaatttctactaagtgtagatattcgcgaacccggccggaataatttctactaagtgtagatttttttnnnnnnnnnnaagcttggcgtggatccgatatcaactagatcttgagacaaatggcagtattcatccacaattttaaaagaaaaggggggattggggggtacagtgcaggggaaagaatagtagacataatagcaacagacatacaaactaaag

SEQ ID NO: 16038 - DNA, 301 bp, Artificial Sequence
  Brca2.1_NTC.41
  crRNA array
  misc_feature (148)..(157): n is a, c, g, or t
cttggctttatatatcttgtggaaaggacgaaacaccgtaatttctactaagtgtagatctaagcgtagaaccagaaattaatttctactaagtgtagatttgatggcgcgacgcgttattaatttctactaagtgtagatttttttnnnnnnnnnnaagcttggcgtggatccgatatcaactagatcttgagacaaatggcagtattcatccacaattttaaaagaaaaggggggattggggggtacagtgcaggggaaagaatagtagacataatagcaacagacatacaaactaaag

SEQ ID NO: 16039 - DNA, 301 bp, Artificial Sequence
  Brca2.1_NTC.42
  crRNA array
  misc_feature (148)..(157): n is a, c, g, or t
cttggctttatatatcttgtggaaaggacgaaacaccgtaatttctactaagtgtagatctaagcgtagaaccagaaattaatttctactaagtgtagatggtcaaatcgcggcgataactaatttctactaagtgtagatttttttnnnnnnnnnnaagcttggcgtggatccgatatcaactagatcttgagacaaatggcagtattcatccacaattttaaaagaaaaggggggattggggggtacagtgcaggggaaagaatagtagacataatagcaacagacatacaaactaaag

SEQ ID NO: 16040 - DNA, 301 bp, Artificial Sequence
  Brca2.1_NTC.43
  crRNA array
  misc_feature (148)..(157): n is a, c, g, or t
cttggctttatatatcttgtggaaaggacgaaacaccgtaatttctactaagtgtagatctaagcgtagaaccagaaattaatttctactaagtgtagatcgactcgcgcattgaactggtaatttctactaagtgtagatttttttnnnnnnnnnnaagcttggcgtggatccgatatcaactagatcttgagacaaatggcagtattcatccacaattttaaaagaaaaggggggattggggggtacagtgcaggggaaagaatagtagacataatagcaacagacatacaaactaaag

SEQ ID NO: 16041 - DNA, 301 bp, Artificial Sequence
  Brca2.1_NTC.44
  crRNA array
  misc_feature (148)..(157): n is a, c, g, or t
cttggctttatatatcttgtggaaaggacgaaacaccgtaatttctactaagtgtagatctaagcgtagaaccagaaattaatttctactaagtgtagatagcgtcgtacgatttatcgttaatttctactaagtgtagatttttttnnnnnnnnnnaagcttggcgtggatccgatatcaactagatcttgagacaaatggcagtattcatccacaattttaaaagaaaaggggggattggggggtacagtgcaggggaaagaatagtagacataatagcaacagacatacaaactaaag

SEQ ID NO: 16042 - DNA, 301 bp, Artificial Sequence
  Brca2.1_NTC.45
  crRNA array
  misc_feature (148)..(157): n is a, c, g, or t
cttggctttatatatcttgtggaaaggacgaaacaccgtaatttctactaagtgtagatctaagcgtagaaccagaaattaatttctactaagtgtagatcggaacgcgtgatactagggtaatttctactaagtgtagatttttttnnnnnnnnnnaagcttggcgtggatccgatatcaactagatcttgagacaaatggcagtattcatccacaattttaaaagaaaaggggggattggggggtacagtgcaggggaaagaatagtagacataatagcaacagacatacaaactaaag

SEQ ID NO: 16043 - DNA, 301 bp, Artificial Sequence
  Brca2.1_NTC.46
  crRNA array
  misc_feature (148)..(157): n is a, c, g, or t
cttggctttatatatcttgtggaaaggacgaaacaccgtaatttctactaagtgtagatctaagcgtagaaccagaaattaatttctactaagtgtagatagcgggtcgtagacgcgcggtaatttctactaagtgtagatttttttnnnnnnnnnnaagcttggcgtggatccgatatcaactagatcttgagacaaatggcagtattcatccacaattttaaaagaaaaggggggattggggggtacagtgcaggggaaagaatagtagacataatagcaacagacatacaaactaaag

SEQ ID NO: 16044 - DNA, 301 bp, Artificial Sequence
  Brca2.1_NTC.47
  crRNA array
  misc_feature (148)..(157): n is a, c, g, or t
cttggctttatatatcttgtggaaaggacgaaacaccgtaatttctactaagtgtagatctaagcgtagaaccagaaattaatttctactaagtgtagattctcgtatcgcgattgttaataatttctactaagtgtagatttttttnnnnnnnnnnaagcttggcgtggatccgatatcaactagatcttgagacaaatggcagtattcatccacaattttaaaagaaaaggggggattggggggtacagtgcaggggaaagaatagtagacataatagcaacagacatacaaactaaag

SEQ ID NO: 16045 - DNA, 301 bp, Artificial Sequence
  Brca2.1_NTC.48
  crRNA array
  misc_feature (148)..(157): n is a, c, g, or t
cttggctttatatatcttgtggaaaggacgaaacaccgtaatttctactaagtgtagatctaagcgtagaaccagaaattaatttctactaagtgtagatcggtcgactacggctgttagtaatttctactaagtgtagatttttttnnnnnnnnnnaagcttggcgtggatccgatatcaactagatcttgagacaaatggcagtattcatccacaattttaaaagaaaaggggggattggggggtacagtgcaggggaaagaatagtagacataatagcaacagacatacaaactaaag

SEQ ID NO: 16046 - DNA, 301 bp, Artificial Sequence
  Brca2.1_NTC.49
  crRNA array
  misc_feature (148)..(157): n is a, c, g, or t
cttggctttatatatcttgtggaaaggacgaaacaccgtaatttctactaagtgtagatctaagcgtagaaccagaaattaatttctactaagtgtagattcggggcgcgtcaactgaattaatttctactaagtgtagatttttttnnnnnnnnnnaagcttggcgtggatccgatatcaactagatcttgagacaaatggcagtattcatccacaattttaaaagaaaaggggggattggggggtacagtgcaggggaaagaatagtagacataatagcaacagacatacaaactaaag

SEQ ID NO: 16047 - DNA, 301 bp, Artificial Sequence
  Brca2.1_NTC.5
  crRNA array
  misc_feature (148)..(157): n is a, c, g, or t
cttggctttatatatcttgtggaaaggacgaaacaccgtaatttctactaagtgtagatctaagcgtagaaccagaaattaatttctactaagtgtagatgcttacgcgtcgcgaatgtataatttctactaagtgtagatttttttnnnnnnnnnnaagcttggcgtggatccgatatcaactagatcttgagacaaatggcagtattcatccacaattttaaaagaaaaggggggattggggggtacagtgcaggggaaagaatagtagacataatagcaacagacatacaaactaaag

SEQ ID NO: 16048 - DNA, 301 bp, Artificial Sequence
  Brca2.1_NTC.50
  crRNA array
  misc_feature (148)..(157): n is a, c, g, or t
cttggctttatatatcttgtggaaaggacgaaacaccgtaatttctactaagtgtagatctaagcgtagaaccagaaattaatttctactaagtgtagatattgccgctcgcgcaaaatctaatttctactaagtgtagatttttttnnnnnnnnnnaagcttggcgtggatccgatatcaactagatcttgagacaaatggcagtattcatccacaattttaaaagaaaaggggggattggggggtacagtgcaggggaaagaatagtagacataatagcaacagacatacaaactaaag

SEQ ID NO: 16049 - DNA, 301 bp, Artificial Sequence
  Brca2.1_NTC.51
  crRNA array
  misc_feature (148)..(157): n is a, c, g, or t
cttggctttatatatcttgtggaaaggacgaaacaccgtaatttctactaagtgtagatctaagcgtagaaccagaaattaatttctactaagtgtagattaacgcgcaacacgccaatgtaatttctactaagtgtagatttttttnnnnnnnnnnaagcttggcgtggatccgatatcaactagatcttgagacaaatggcagtattcatccacaattttaaaagaaaaggggggattggggggtacagtgcaggggaaagaatagtagacataatagcaacagacatacaaactaaag

SEQ ID NO: 16050 - DNA, 301 bp, Artificial Sequence
  Brca2.1_NTC.6
  crRNA array
  misc_feature (148)..(157): n is a, c, g, or t
cttggctttatatatcttgtggaaaggacgaaacaccgtaatttctactaagtgtagatctaagcgtagaaccagaaattaatttctactaagtgtagatcgaatcgcgcctacgggaattaatttctactaagtgtagatttttttnnnnnnnnnnaagcttggcgtggatccgatatcaactagatcttgagacaaatggcagtattcatccacaattttaaaagaaaaggggggattggggggtacagtgcaggggaaagaatagtagacataatagcaacagacatacaaactaaag

SEQ ID NO: 16051 - DNA, 301 bp, Artificial Sequence
  Brca2.1_NTC.7
  crRNA array
  misc_feature (148)..(157): n is a, c, g, or t
cttggctttatatatcttgtggaaaggacgaaacaccgtaatttctactaagtgtagatctaagcgtagaaccagaaattaatttctactaagtgtagatcgccgaacggataagactattaatttctactaagtgtagatttttttnnnnnnnnnnaagcttggcgtggatccgatatcaactagatcttgagacaaatggcagtattcatccacaattttaaaagaaaaggggggattggggggtacagtgcaggggaaagaatagtagacataatagcaacagacatacaaactaaag

SEQ ID NO: 16052 - DNA, 301 bp, Artificial Sequence
  Brca2.1_NTC.8
  crRNA array
  misc_feature (148)..(157): n is a, c, g, or t
cttggctttatatatcttgtggaaaggacgaaacaccgtaatttctactaagtgtagatctaagcgtagaaccagaaattaatttctactaagtgtagatcgaccgaggttacgctgggataatttctactaagtgtagatttttttnnnnnnnnnnaagcttggcgtggatccgatatcaactagatcttgagacaaatggcagtattcatccacaattttaaaagaaaaggggggattggggggtacagtgcaggggaaagaatagtagacataatagcaacagacatacaaactaaag

SEQ ID NO: 16053 - DNA, 301 bp, Artificial Sequence
  Brca2.1_NTC.9
  crRNA array
  misc_feature (148)..(157): n is a, c, g, or t
cttggctttatatatcttgtggaaaggacgaaacaccgtaatttctactaagtgtagatctaagcgtagaaccagaaattaatttctactaagtgtagatatcgccgtacggctatggcataatttctactaagtgtagatttttttnnnnnnnnnnaagcttggcgtggatccgatatcaactagatcttgagacaaatggcagtattcatccacaattttaaaagaaaaggggggattggggggtacagtgcaggggaaagaatagtagacataatagcaacagacatacaaactaaag

SEQ ID NO: 16054 - DNA, 301 bp, Artificial Sequence
  Brca2.2_NTC.0
  crRNA array
  misc_feature (148)..(157): n is a, c, g, or t
cttggctttatatatcttgtggaaaggacgaaacaccgtaatttctactaagtgtagatgatccaggtgtaacaagccataatttctactaagtgtagattatagcgtcgcgcgctaatttaatttctactaagtgtagatttttttnnnnnnnnnnaagcttggcgtggatccgatatcaactagatcttgagacaaatggcagtattcatccacaattttaaaagaaaaggggggattggggggtacagtgcaggggaaagaatagtagacataatagcaacagacatacaaactaaag

SEQ ID NO: 16055 - DNA, 301 bp, Artificial Sequence
  Brca2.2_NTC.1
  crRNA array
  misc_feature (148)..(157): n is a, c, g, or t
cttggctttatatatcttgtggaaaggacgaaacaccgtaatttctactaagtgtagatgatccaggtgtaacaagccataatttctactaagtgtagatcgcgtaaccgttccggctcctaatttctactaagtgtagatttttttnnnnnnnnnnaagcttggcgtggatccgatatcaactagatcttgagacaaatggcagtattcatccacaattttaaaagaaaaggggggattggggggtacagtgcaggggaaagaatagtagacataatagcaacagacatacaaactaaag

SEQ ID NO: 16056 - DNA, 301 bp, Artificial Sequence
  Brca2.2_NTC.10
  crRNA array
  misc_feature (148)..(157): n is a, c, g, or t
cttggctttatatatcttgtggaaaggacgaaacaccgtaatttctactaagtgtagatgatccaggtgtaacaagccataatttctactaagtgtagatcgctaagttcgcgcgggccgtaatttctactaagtgtagatttttttnnnnnnnnnnaagcttggcgtggatccgatatcaactagatcttgagacaaatggcagtattcatccacaattttaaaagaaaaggggggattggggggtacagtgcaggggaaagaatagtagacataatagcaacagacatacaaactaaag

SEQ ID NO: 16057 - DNA, 301 bp, Artificial Sequence
  Brca2.2_NTC.11
  crRNA array
  misc_feature (148)..(157): n is a, c, g, or t
cttggctttatatatcttgtggaaaggacgaaacaccgtaatttctactaagtgtagatgatccaggtgtaacaagccataatttctactaagtgtagatcgttcgtcgacgaagcaatctaatttctactaagtgtagatttttttnnnnnnnnnnaagcttggcgtggatccgatatcaactagatcttgagacaaatggcagtattcatccacaattttaaaagaaaaggggggattggggggtacagtgcaggggaaagaatagtagacataatagcaacagacatacaaactaaag

SEQ ID NO: 16058 - DNA, 301 bp, Artificial Sequence
  Brca2.2_NTC.12
  crRNA array
  misc_feature (148)..(157): n is a, c, g, or t
cttggctttatatatcttgtggaaaggacgaaacaccgtaatttctactaagtgtagatgatccaggtgtaacaagccataatttctactaagtgtagatcgccgacgattaatcaatagtaatttctactaagtgtagatttttttnnnnnnnnnnaagcttggcgtggatccgatatcaactagatcttgagacaaatggcagtattcatccacaattttaaaagaaaaggggggattggggggtacagtgcaggggaaagaatagtagacataatagcaacagacatacaaactaaag

SEQ ID NO: 16059 - DNA, 301 bp, Artificial Sequence
  Brca2.2_NTC.13
  crRNA array
  misc_feature (148)..(157): n is a, c, g, or t
cttggctttatatatcttgtggaaaggacgaaacaccgtaatttctactaagtgtagatgatccaggtgtaacaagccataatttctactaagtgtagatgaccgttgtatcgcgatcaataatttctactaagtgtagatttttttnnnnnnnnnnaagcttggcgtggatccgatatcaactagatcttgagacaaatggcagtattcatccacaattttaaaagaaaaggggggattggggggtacagtgcaggggaaagaatagtagacataatagcaacagacatacaaactaaag

SEQ ID NO: 16060 - DNA, 301 bp, Artificial Sequence
  Brca2.2_NTC.14
  crRNA array
  misc_feature (148)..(157): n is a, c, g, or t
cttggctttatatatcttgtggaaaggacgaaacaccgtaatttctactaagtgtagatgatccaggtgtaacaagccataatttctactaagtgtagatccgttcgtgcgatagtgttttaatttctactaagtgtagatttttttnnnnnnnnnnaagcttggcgtggatccgatatcaactagatcttgagacaaatggcagtattcatccacaattttaaaagaaaaggggggattggggggtacagtgcaggggaaagaatagtagacataatagcaacagacatacaaactaaag

SEQ ID NO: 16061 - DNA, 301 bp, Artificial Sequence
  Brca2.2_NTC.15
  crRNA array
  misc_feature (148)..(157): n is a, c, g, or t
cttggctttatatatcttgtggaaaggacgaaacaccgtaatttctactaagtgtagatgatccaggtgtaacaagccataatttctactaagtgtagatgttgtcgtgccgcgaatttataatttctactaagtgtagatttttttnnnnnnnnnnaagcttggcgtggatccgatatcaactagatcttgagacaaatggcagtattcatccacaattttaaaagaaaaggggggattggggggtacagtgcaggggaaagaatagtagacataatagcaacagacatacaaactaaag

SEQ ID NO: 16062 - DNA, 301 bp, Artificial Sequence
  Brca2.2_NTC.16
  crRNA array
  misc_feature (148)..(157): n is a, c, g, or t
cttggctttatatatcttgtggaaaggacgaaacaccgtaatttctactaagtgtagatgatccaggtgtaacaagccataatttctactaagtgtagatcggtacgttagacgaaaatttaatttctactaagtgtagatttttttnnnnnnnnnnaagcttggcgtggatccgatatcaactagatcttgagacaaatggcagtattcatccacaattttaaaagaaaaggggggattggggggtacagtgcaggggaaagaatagtagacataatagcaacagacatacaaactaaag

SEQ ID NO: 16063 - DNA, 301 bp, Artificial Sequence
  Brca2.2_NTC.17
  crRNA array
  misc_feature (148)..(157): n is a, c, g, or t
cttggctttatatatcttgtggaaaggacgaaacaccgtaatttctactaagtgtagatgatccaggtgtaacaagccataatttctactaagtgtagattatcgaacgctatcgaacgttaatttctactaagtgtagatttttttnnnnnnnnnnaagcttggcgtggatccgatatcaactagatcttgagacaaatggcagtattcatccacaattttaaaagaaaaggggggattggggggtacagtgcaggggaaagaatagtagacataatagcaacagacatacaaactaaag

SEQ ID NO: 16064 - DNA, 301 bp, Artificial Sequence
  Brca2.2_NTC.18
  crRNA array
  misc_feature (148)..(157): n is a, c, g, or t
cttggctttatatatcttgtggaaaggacgaaacaccgtaatttctactaagtgtagatgatccaggtgtaacaagccataatttctactaagtgtagattccggttacgaccggcaaaataatttctactaagtgtagatttttttnnnnnnnnnnaagcttggcgtggatccgatatcaactagatcttgagacaaatggcagtattcatccacaattttaaaagaaaaggggggattggggggtacagtgcaggggaaagaatagtagacataatagcaacagacatacaaactaaag

SEQ ID NO: 16065 - DNA, 301 bp, Artificial Sequence
  Brca2.2_NTC.19
  crRNA array
  misc_feature (148)..(157): n is a, c, g, or t
cttggctttatatatcttgtggaaaggacgaaacaccgtaatttctactaagtgtagatgatccaggtgtaacaagccataatttctactaagtgtagatcgtcgtagaacgatacccgataatttctactaagtgtagatttttttnnnnnnnnnnaagcttggcgtggatccgatatcaactagatcttgagacaaatggcagtattcatccacaattttaaaagaaaaggggggattggggggtacagtgcaggggaaagaatagtagacataatagcaacagacatacaaactaaag

SEQ ID NO: 16066 - DNA, 301 bp, Artificial Sequence
  Brca2.2_NTC.2
  crRNA array
  misc_feature (148)..(157): n is a, c, g, or t
cttggctttatatatcttgtggaaaggacgaaacaccgtaatttctactaagtgtagatgatccaggtgtaacaagccataatttctactaagtgtagatttatgtcgcgccgcgacccgtaatttctactaagtgtagatttttttnnnnnnnnnnaagcttggcgtggatccgatatcaactagatcttgagacaaatggcagtattcatccacaattttaaaagaaaaggggggattggggggtacagtgcaggggaaagaatagtagacataatagcaacagacatacaaactaaag

SEQ ID NO: 16067 - DNA, 301 bp, Artificial Sequence
  Brca2.2_NTC.20
  crRNA array
  misc_feature (148)..(157): n is a, c, g, or t
cttggctttatatatcttgtggaaaggacgaaacaccgtaatttctactaagtgtagatgatccaggtgtaacaagccataatttctactaagtgtagatattccggcgcgaccagaagataatttctactaagtgtagatttttttnnnnnnnnnnaagcttggcgtggatccgatatcaactagatcttgagacaaatggcagtattcatccacaattttaaaagaaaaggggggattggggggtacagtgcaggggaaagaatagtagacataatagcaacagacatacaaactaaag

SEQ ID NO: 16068 - DNA, 301 bp, Artificial Sequence
  Brca2.2_NTC.21
  crRNA array
  misc_feature (148)..(157): n is a, c, g, or t
cttggctttatatatcttgtggaaaggacgaaacaccgtaatttctactaagtgtagatgatccaggtgtaacaagccataatttctactaagtgtagatgtataacttcgcgcggtccgtaatttctactaagtgtagatttttttnnnnnnnnnnaagcttggcgtggatccgatatcaactagatcttgagacaaatggcagtattcatccacaattttaaaagaaaaggggggattggggggtacagtgcaggggaaagaatagtagacataatagcaacagacatacaaactaaag

SEQ ID NO: 16069 - DNA, 301 bp, Artificial Sequence
  Brca2.2_NTC.22
  crRNA array
  misc_feature (148)..(157): n is a, c, g, or t
cttggctttatatatcttgtggaaaggacgaaacaccgtaatttctactaagtgtagatgatccaggtgtaacaagccataatttctactaagtgtagatgcgcgtcaacgtaatgtgcctaatttctactaagtgtagatttttttnnnnnnnnnnaagcttggcgtggatccgatatcaactagatcttgagacaaatggcagtattcatccacaattttaaaagaaaaggggggattggggggtacagtgcaggggaaagaatagtagacataatagcaacagacatacaaactaaag

SEQ ID NO: 16070 - DNA, 301 bp, Artificial Sequence
  Brca2.2_NTC.23
  crRNA array
  misc_feature (148)..(157): n is a, c, g, or t
cttggctttatatatcttgtggaaaggacgaaacaccgtaatttctactaagtgtagatgatccaggtgtaacaagccataatttctactaagtgtagatacgcgctattatcgtaggtgtaatttctactaagtgtagatttttttnnnnnnnnnnaagcttggcgtggatccgatatcaactagatcttgagacaaatggcagtattcatccacaattttaaaagaaaaggggggattggggggtacagtgcaggggaaagaatagtagacataatagcaacagacatacaaactaaag

SEQ ID NO: 16071 - DNA, 301 bp, Artificial Sequence
  Brca2.2_NTC.24
  crRNA array
  misc_feature (148)..(157): n is a, c, g, or t
cttggctttatatatcttgtggaaaggacgaaacaccgtaatttctactaagtgtagatgatccaggtgtaacaagccataatttctactaagtgtagatactatcgacgttcgtcccggtaatttctactaagtgtagatttttttnnnnnnnnnnaagcttggcgtggatccgatatcaactagatcttgagacaaatggcagtattcatccacaattttaaaagaaaaggggggattggggggtacagtgcaggggaaagaatagtagacataatagcaacagacatacaaactaaag

SEQ ID NO: 16072 - DNA, 301 bp, Artificial Sequence
  Brca2.2_NTC.25
  crRNA array
  misc_feature (148)..(157): n is a, c, g, or t
cttggctttatatatcttgtggaaaggacgaaacaccgtaatttctactaagtgtagatgatccaggtgtaacaagccataatttctactaagtgtagattcgcgttatcgtgccgtgcgtaatttctactaagtgtagatttttttnnnnnnnnnnaagcttggcgtggatccgatatcaactagatcttgagacaaatggcagtattcatccacaattttaaaagaaaaggggggattggggggtacagtgcaggggaaagaatagtagacataatagcaacagacatacaaactaaag

SEQ ID NO: 16073 - DNA, 301 bp, Artificial Sequence
  Brca2.2_NTC.26
  crRNA array
  misc_feature (148)..(157): n is a, c, g, or t
cttggctttatatatcttgtggaaaggacgaaacaccgtaatttctactaagtgtagatgatccaggtgtaacaagccataatttctactaagtgtagatcgcgacggcggttttaacactaatttctactaagtgtagatttttttnnnnnnnnnnaagcttggcgtggatccgatatcaactagatcttgagacaaatggcagtattcatccacaattttaaaagaaaaggggggattggggggtacagtgcaggggaaagaatagtagacataatagcaacagacatacaaactaaag

SEQ ID NO: 16074 - DNA, 301 bp, Artificial Sequence
  Brca2.2_NTC.27
  crRNA array
  misc_feature (148)..(157): n is a, c, g, or t
cttggctttatatatcttgtggaaaggacgaaacaccgtaatttctactaagtgtagatgatccaggtgtaacaagccataatttctactaagtgtagatgtcgcgttgcgaccggcgcttaatttctactaagtgtagatttttttnnnnnnnnnnaagcttggcgtggatccgatatcaactagatcttgagacaaatggcagtattcatccacaattttaaaagaaaaggggggattggggggtacagtgcaggggaaagaatagtagacataatagcaacagacatacaaactaaag

SEQ ID NO: 16075 - DNA, 301 bp, Artificial Sequence
  Brca2.2_NTC.28
  crRNA array
  misc_feature (148)..(157): n is a, c, g, or t
cttggctttatatatcttgtggaaaggacgaaacaccgtaatttctactaagtgtagatgatccaggtgtaacaagccataatttctactaagtgtagataccgctaatcggcgtaaacttaatttctactaagtgtagatttttttnnnnnnnnnnaagcttggcgtggatccgatatcaactagatcttgagacaaatggcagtattcatccacaattttaaaagaaaaggggggattggggggtacagtgcaggggaaagaatagtagacataatagcaacagacatacaaactaaag

SEQ ID NO: 16076 - DNA, 301 bp, Artificial Sequence
  Brca2.2_NTC.29
  crRNA array
  misc_feature (148)..(157): n is a, c, g, or t
cttggctttatatatcttgtggaaaggacgaaacaccgtaatttctactaagtgtagatgatccaggtgtaacaagccataatttctactaagtgtagatcgcgatctataccgtctatataatttctactaagtgtagatttttttnnnnnnnnnnaagcttggcgtggatccgatatcaactagatcttgagacaaatggcagtattcatccacaattttaaaagaaaaggggggattggggggtacagtgcaggggaaagaatagtagacataatagcaacagacatacaaactaaag

SEQ ID NO: 16077 - DNA, 301 bp, Artificial Sequence
  Brca2.2_NTC.3
  crRNA array
  misc_feature (148)..(157): n is a, c, g, or t
cttggctttatatatcttgtggaaaggacgaaacaccgtaatttctactaagtgtagatgatccaggtgtaacaagccataatttctactaagtgtagattcgacgcgagacgacgtacataatttctactaagtgtagatttttttnnnnnnnnnnaagcttggcgtggatccgatatcaactagatcttgagacaaatggcagtattcatccacaattttaaaagaaaaggggggattggggggtacagtgcaggggaaagaatagtagacataatagcaacagacatacaaactaaag

SEQ ID NO: 16078 - DNA, 301 bp, Artificial Sequence
  Brca2.2_NTC.30
  crRNA array
  misc_feature (148)..(157): n is a, c, g, or t
cttggctttatatatcttgtggaaaggacgaaacaccgtaatttctactaagtgtagatgatccaggtgtaacaagccataatttctactaagtgtagatcgatcgtacgggtgtcctaataatttctactaagtgtagatttttttnnnnnnnnnnaagcttggcgtggatccgatatcaactagatcttgagacaaatggcagtattcatccacaattttaaaagaaaaggggggattggggggtacagtgcaggggaaagaatagtagacataatagcaacagacatacaaactaaag

SEQ ID NO: 16079 - DNA, 301 bp, Artificial Sequence
  Brca2.2_NTC.31
  crRNA array
  misc_feature (148)..(157): n is a, c, g, or t
cttggctttatatatcttgtggaaaggacgaaacaccgtaatttctactaagtgtagatgatccaggtgtaacaagccataatttctactaagtgtagatgccgaccgcgtgattgtaggtaatttctactaagtgtagatttttttnnnnnnnnnnaagcttggcgtggatccgatatcaactagatcttgagacaaatggcagtattcatccacaattttaaaagaaaaggggggattggggggtacagtgcaggggaaagaatagtagacataatagcaacagacatacaaactaaag

SEQ ID NO: 16080 - DNA, 301 bp, Artificial Sequence
  Brca2.2_NTC.32
  crRNA array
  misc_feature (148)..(157): n is a, c, g, or t
cttggctttatatatcttgtggaaaggacgaaacaccgtaatttctactaagtgtagatgatccaggtgtaacaagccataatttctactaagtgtagatgcacgttacgcccgggtcactaatttctactaagtgtagatttttttnnnnnnnnnnaagcttggcgtggatccgatatcaactagatcttgagacaaatggcagtattcatccacaattttaaaagaaaaggggggattggggggtacagtgcaggggaaagaatagtagacataatagcaacagacatacaaactaaag

SEQ ID NO: 16081 - DNA, 301 bp, Artificial Sequence
  Brca2.2_NTC.33
  crRNA array
  misc_feature (148)..(157): n is a, c, g, or t
cttggctttatatatcttgtggaaaggacgaaacaccgtaatttctactaagtgtagatgatccaggtgtaacaagccataatttctactaagtgtagattaagcgaccgacgcattcgctaatttctactaagtgtagatttttttnnnnnnnnnnaagcttggcgtggatccgatatcaactagatcttgagacaaatggcagtattcatccacaattttaaaagaaaaggggggattggggggtacagtgcaggggaaagaatagtagacataatagcaacagacatacaaactaaag

SEQ ID NO: 16082 - DNA, 301 bp, Artificial Sequence
  Brca2.2_NTC.34
  crRNA array
  misc_feature (148)..(157): n is a, c, g, or t
cttggctttatatatcttgtggaaaggacgaaacaccgtaatttctactaagtgtagatgatccaggtgtaacaagccataatttctactaagtgtagattagcgttcgacacgtgaaactaatttctactaagtgtagatttttttnnnnnnnnnnaagcttggcgtggatccgatatcaactagatcttgagacaaatggcagtattcatccacaattttaaaagaaaaggggggattggggggtacagtgcaggggaaagaatagtagacataatagcaacagacatacaaactaaag

SEQ ID NO: 16083 - DNA, 301 bp, Artificial Sequence
  Brca2.2_NTC.35
  crRNA array
  misc_feature (148)..(157): n is a, c, g, or t
cttggctttatatatcttgtggaaaggacgaaacaccgtaatttctactaagtgtagatgatccaggtgtaacaagccataatttctactaagtgtagattggcgcgtaatcgctattcgtaatttctactaagtgtagatttttttnnnnnnnnnnaagcttggcgtggatccgatatcaactagatcttgagacaaatggcagtattcatccacaattttaaaagaaaaggggggattggggggtacagtgcaggggaaagaatagtagacataatagcaacagacatacaaactaaag

SEQ ID NO: 16084 - DNA, 301 bp, Artificial Sequence
  Brca2.2_NTC.36
  crRNA array
  misc_feature (148)..(157): n is a, c, g, or t
cttggctttatatatcttgtggaaaggacgaaacaccgtaatttctactaagtgtagatgatccaggtgtaacaagccataatttctactaagtgtagatcaacccgccgtagcgggccttaatttctactaagtgtagatttttttnnnnnnnnnnaagcttggcgtggatccgatatcaactagatcttgagacaaatggcagtattcatccacaattttaaaagaaaaggggggattggggggtacagtgcaggggaaagaatagtagacataatagcaacagacatacaaactaaag

SEQ ID NO: 16085 - DNA, 301 bp, Artificial Sequence
  Brca2.2_NTC.37
  crRNA array
  misc_feature (148)..(157): n is a, c, g, or t
cttggctttatatatcttgtggaaaggacgaaacaccgtaatttctactaagtgtagatgatccaggtgtaacaagccataatttctactaagtgtagattttgcgttgacgcgattacttaatttctactaagtgtagatttttttnnnnnnnnnnaagcttggcgtggatccgatatcaactagatcttgagacaaatggcagtattcatccacaattttaaaagaaaaggggggattggggggtacagtgcaggggaaagaatagtagacataatagcaacagacatacaaactaaag

SEQ ID NO: 16086 - DNA, 301 bp, Artificial Sequence
  Brca2.2_NTC.38
  crRNA array
  misc_feature (148)..(157): n is a, c, g, or t
cttggctttatatatcttgtggaaaggacgaaacaccgtaatttctactaagtgtagatgatccaggtgtaacaagccataatttctactaagtgtagataacggagcgcgatactaccataatttctactaagtgtagatttttttnnnnnnnnnnaagcttggcgtggatccgatatcaactagatcttgagacaaatggcagtattcatccacaattttaaaagaaaaggggggattggggggtacagtgcaggggaaagaatagtagacataatagcaacagacatacaaactaaag

SEQ ID NO: 16087 - DNA, 301 bp, Artificial Sequence
  Brca2.2_NTC.39
  crRNA array
  misc_feature (148)..(157): n is a, c, g, or t
cttggctttatatatcttgtggaaaggacgaaacaccgtaatttctactaagtgtagatgatccaggtgtaacaagccataatttctactaagtgtagatccggacgttataacgtttcttaatttctactaagtgtagatttttttnnnnnnnnnnaagcttggcgtggatccgatatcaactagatcttgagacaaatggcagtattcatccacaattttaaaagaaaaggggggattggggggtacagtgcaggggaaagaatagtagacataatagcaacagacatacaaactaaag

SEQ ID NO: 16088 - DNA, 301 bp, Artificial Sequence
  Brca2.2_NTC.4
  crRNA array
  misc_feature (148)..(157): n is a, c, g, or t
cttggctttatatatcttgtggaaaggacgaaacaccgtaatttctactaagtgtagatgatccaggtgtaacaagccataatttctactaagtgtagatatacccgtcgcgaacgtgagtaatttctactaagtgtagatttttttnnnnnnnnnnaagcttggcgtggatccgatatcaactagatcttgagacaaatggcagtattcatccacaattttaaaagaaaaggggggattggggggtacagtgcaggggaaagaatagtagacataatagcaacagacatacaaactaaag

SEQ ID NO: 16089 - DNA, 301 bp, Artificial Sequence
  Brca2.2_NTC.40
  crRNA array
  misc_feature (148)..(157): n is a, c, g, or t
cttggctttatatatcttgtggaaaggacgaaacaccgtaatttctactaagtgtagatgatccaggtgtaacaagccataatttctactaagtgtagatattcgcgaacccggccggaataatttctactaagtgtagatttttttnnnnnnnnnnaagcttggcgtggatccgatatcaactagatcttgagacaaatggcagtattcatccacaattttaaaagaaaaggggggattggggggtacagtgcaggggaaagaatagtagacataatagcaacagacatacaaactaaag

SEQ ID NO: 16090 - DNA, 301 bp, Artificial Sequence
  Brca2.2_NTC.41
  crRNA array
  misc_feature (148)..(157): n is a, c, g, or t
cttggctttatatatcttgtggaaaggacgaaacaccgtaatttctactaagtgtagatgatccaggtgtaacaagccataatttctactaagtgtagatttgatggcgcgacgcgttattaatttctactaagtgtagatttttttnnnnnnnnnnaagcttggcgtggatccgatatcaactagatcttgagacaaatggcagtattcatccacaattttaaaagaaaaggggggattggggggtacagtgcaggggaaagaatagtagacataatagcaacagacatacaaactaaag

SEQ ID NO: 16091 - DNA, 301 bp, Artificial Sequence
  Brca2.2_NTC.42
  crRNA array
  misc_feature (148)..(157): n is a, c, g, or t
cttggctttatatatcttgtggaaaggacgaaacaccgtaatttctactaagtgtagatgatccaggtgtaacaagccataatttctactaagtgtagatggtcaaatcgcggcgataactaatttctactaagtgtagatttttttnnnnnnnnnnaagcttggcgtggatccgatatcaactagatcttgagacaaatggcagtattcatccacaattttaaaagaaaaggggggattggggggtacagtgcaggggaaagaatagtagacataatagcaacagacatacaaactaaag

SEQ ID NO: 16092 - DNA, 301 bp, Artificial Sequence
  Brca2.2_NTC.43
  crRNA array
  misc_feature (148)..(157): n is a, c, g, or t
cttggctttatatatcttgtggaaaggacgaaacaccgtaatttctactaagtgtagatgatccaggtgtaacaagccataatttctactaagtgtagatcgactcgcgcattgaactggtaatttctactaagtgtagatttttttnnnnnnnnnnaagcttggcgtggatccgatatcaactagatcttgagacaaatggcagtattcatccacaattttaaaagaaaaggggggattggggggtacagtgcaggggaaagaatagtagacataatagcaacagacatacaaactaaag

SEQ ID NO: 16093 - DNA, 301 bp, Artificial Sequence
  Brca2.2_NTC.44
  crRNA array
  misc_feature (148)..(157): n is a, c, g, or t
cttggctttatatatcttgtggaaaggacgaaacaccgtaatttctactaagtgtagatgatccaggtgtaacaagccataatttctactaagtgtagatagcgtcgtacgatttatcgttaatttctactaagtgtagatttttttnnnnnnnnnnaagcttggcgtggatccgatatcaactagatcttgagacaaatggcagtattcatccacaattttaaaagaaaaggggggattggggggtacagtgcaggggaaagaatagtagacataatagcaacagacatacaaactaaag

SEQ ID NO: 16094 - DNA, 301 bp, Artificial Sequence
  Brca2.2_NTC.45
  crRNA array
  misc_feature (148)..(157): n is a, c, g, or t
cttggctttatatatcttgtggaaaggacgaaacaccgtaatttctactaagtgtagatgatccaggtgtaacaagccataatttctactaagtgtagatcggaacgcgtgatactagggtaatttctactaagtgtagatttttttnnnnnnnnnnaagcttggcgtggatccgatatcaactagatcttgagacaaatggcagtattcatccacaattttaaaagaaaaggggggattggggggtacagtgcaggggaaagaatagtagacataatagcaacagacatacaaactaaag

SEQ ID NO: 16095 - DNA, 301 bp, Artificial Sequence
  Brca2.2_NTC.46
  crRNA array
  misc_feature (148)..(157): n is a, c, g, or t
cttggctttatatatcttgtggaaaggacgaaacaccgtaatttctactaagtgtagatgatccaggtgtaacaagccataatttctactaagtgtagatagcgggtcgtagacgcgcggtaatttctactaagtgtagatttttttnnnnnnnnnnaagcttggcgtggatccgatatcaactagatcttgagacaaatggcagtattcatccacaattttaaaagaaaaggggggattggggggtacagtgcaggggaaagaatagtagacataatagcaacagacatacaaactaaag

SEQ ID NO: 16096 - DNA, 301 bp, Artificial Sequence
  Brca2.2_NTC.47
  crRNA array
  misc_feature (148)..(157): n is a, c, g, or t
cttggctttatatatcttgtggaaaggacgaaacaccgtaatttctactaagtgtagatgatccaggtgtaacaagccataatttctactaagtgtagattctcgtatcgcgattgttaataatttctactaagtgtagatttttttnnnnnnnnnnaagcttggcgtggatccgatatcaactagatcttgagacaaatggcagtattcatccacaattttaaaagaaaaggggggattggggggtacagtgcaggggaaagaatagtagacataatagcaacagacatacaaactaaag

SEQ ID NO: 16097 - DNA, 301 bp, Artificial Sequence
  Brca2.2_NTC.48
  crRNA array
  misc_feature (148)..(157): n is a, c, g, or t
cttggctttatatatcttgtggaaaggacgaaacaccgtaatttctactaagtgtagatgatccaggtgtaacaagccataatttctactaagtgtagatcggtcgactacggctgttagtaatttctactaagtgtagatttttttnnnnnnnnnnaagcttggcgtggatccgatatcaactagatcttgagacaaatggcagtattcatccacaattttaaaagaaaaggggggattggggggtacagtgcaggggaaagaatagtagacataatagcaacagacatacaaactaaag

SEQ ID NO: 16098 - DNA, 301 bp, Artificial Sequence
  Brca2.2_NTC.49
  crRNA array
  misc_feature (148)..(157): n is a, c, g, or t
cttggctttatatatcttgtggaaaggacgaaacaccgtaatttctactaagtgtagatgatccaggtgtaacaagccataatttctactaagtgtagattcggggcgcgtcaactgaattaatttctactaagtgtagatttttttnnnnnnnnnnaagcttggcgtggatccgatatcaactagatcttgagacaaatggcagtattcatccacaattttaaaagaaaaggggggattggggggtacagtgcaggggaaagaatagtagacataatagcaacagacatacaaactaaag

SEQ ID NO: 16099 - DNA, 301 bp, Artificial Sequence
  Brca2.2_NTC.5
  crRNA array
  misc_feature (148)..(157): n is a, c, g, or t
cttggctttatatatcttgtggaaaggacgaaacaccgtaatttctactaagtgtagatgatccaggtgtaacaagccataatttctactaagtgtagatgcttacgcgtcgcgaatgtataatttctactaagtgtagatttttttnnnnnnnnnnaagcttggcgtggatccgatatcaactagatcttgagacaaatggcagtattcatccacaattttaaaagaaaaggggggattggggggtacagtgcaggggaaagaatagtagacataatagcaacagacatacaaactaaag

SEQ ID NO: 16100 - DNA, 301 bp, Artificial Sequence
  Brca2.2_NTC.50
  crRNA array
  misc_feature (148)..(157): n is a, c, g, or t
cttggctttatatatcttgtggaaaggacgaaacaccgtaatttctactaagtgtagatgatccaggtgtaacaagccataatttctactaagtgtagatattgccgctcgcgcaaaatctaatttctactaagtgtagatttttttnnnnnnnnnnaagcttggcgtggatccgatatcaactagatcttgagacaaatggcagtattcatccacaattttaaaagaaaaggggggattggggggtacagtgcaggggaaagaatagtagacataatagcaacagacatacaaactaaag

SEQ ID NO: 16101 - DNA, 301 bp, Artificial Sequence
  Brca2.2_NTC.51
  crRNA array
  misc_feature (148)..(157): n is a, c, g, or t
cttggctttatatatcttgtggaaaggacgaaacaccgtaatttctactaagtgtagatgatccaggtgtaacaagccataatttctactaagtgtagattaacgcgcaacacgccaatgtaatttctactaagtgtagatttttttnnnnnnnnnnaagcttggcgtggatccgatatcaactagatcttgagacaaatggcagtattcatccacaattttaaaagaaaaggggggattggggggtacagtgcaggggaaagaatagtagacataatagcaacagacatacaaactaaag

SEQ ID NO: 16102 - DNA, 301 bp, Artificial Sequence
  Brca2.2_NTC.6
  crRNA array
  misc_feature (148)..(157): n is a, c, g, or t
cttggctttatatatcttgtggaaaggacgaaacaccgtaatttctactaagtgtagatgatccaggtgtaacaagccataatttctactaagtgtagatcgaatcgcgcctacgggaattaatttctactaagtgtagatttttttnnnnnnnnnnaagcttggcgtggatccgatatcaactagatcttgagacaaatggcagtattcatccacaattttaaaagaaaaggggggattggggggtacagtgcaggggaaagaatagtagacataatagcaacagacatacaaactaaag

SEQ ID NO: 16103 - DNA, 301 bp, Artificial Sequence
  Brca2.2_NTC.7
  crRNA array
  misc_feature (148)..(157): n is a, c, g, or t
cttggctttatatatcttgtggaaaggacgaaacaccgtaatttctactaagtgtagatgatccaggtgtaacaagccataatttctactaagtgtagatcgccgaacggataagactattaatttctactaagtgtagatttttttnnnnnnnnnnaagcttggcgtggatccgatatcaactagatcttgagacaaatggcagtattcatccacaattttaaaagaaaaggggggattggggggtacagtgcaggggaaagaatagtagacataatagcaacagacatacaaactaaag

SEQ ID NO: 16104 - DNA, 301 bp, Artificial Sequence
  Brca2.2_NTC.8
  crRNA array
  misc_feature (148)..(157): n is a, c, g, or t
cttggctttatatatcttgtggaaaggacgaaacaccgtaatttctactaagtgtagatgatccaggtgtaacaagccataatttctactaagtgtagatcgaccgaggttacgctgggataatttctactaagtgtagatttttttnnnnnnnnnnaagcttggcgtggatccgatatcaactagatcttgagacaaatggcagtattcatccacaattttaaaagaaaaggggggattggggggtacagtgcaggggaaagaatagtagacataatagcaacagacatacaaactaaag

SEQ ID NO: 16105 - DNA, 301 bp, Artificial Sequence
  Brca2.2_NTC.9
  crRNA array
  misc_feature (148)..(157): n is a, c, g, or t
cttggctttatatatcttgtggaaaggacgaaacaccgtaatttctactaagtgtagatgatccaggtgtaacaagccataatttctactaagtgtagatatcgccgtacggctatggcataatttctactaagtgtagatttttttnnnnnnnnnnaagcttggcgtggatccgatatcaactagatcttgagacaaatggcagtattcatccacaattttaaaagaaaaggggggattggggggtacagtgcaggggaaagaatagtagacataatagcaacagacatacaaactaaag

SEQ ID NO: 16106 - DNA, 301 bp, Artificial Sequence
  Brca2.3_NTC.0
  crRNA array
  misc_feature (148)..(157): n is a, c, g, or t
cttggctttatatatcttgtggaaaggacgaaacaccgtaatttctactaagtgtagattgaatataaactgggccacttaatttctactaagtgtagattatagcgtcgcgcgctaatttaatttctactaagtgtagatttttttnnnnnnnnnnaagcttggcgtggatccgatatcaactagatcttgagacaaatggcagtattcatccacaattttaaaagaaaaggggggattggggggtacagtgcaggggaaagaatagtagacataatagcaacagacatacaaactaaag

SEQ ID NO: 16107 - DNA, 301 bp, Artificial Sequence
  Brca2.3_NTC.1
  crRNA array
  misc_feature (148)..(157): n is a, c, g, or t
cttggctttatatatcttgtggaaaggacgaaacaccgtaatttctactaagtgtagattgaatataaactgggccacttaatttctactaagtgtagatcgcgtaaccgttccggctcctaatttctactaagtgtagatttttttnnnnnnnnnnaagcttggcgtggatccgatatcaactagatcttgagacaaatggcagtattcatccacaattttaaaagaaaaggggggattggggggtacagtgcaggggaaagaatagtagacataatagcaacagacatacaaactaaag

SEQ ID NO: 16108 - DNA, 301 bp, Artificial Sequence
  Brca2.3_NTC.10
  crRNA array
  misc_feature (148)..(157): n is a, c, g, or t
cttggctttatatatcttgtggaaaggacgaaacaccgtaatttctactaagtgtagattgaatataaactgggccacttaatttctactaagtgtagatcgctaagttcgcgcgggccgtaatttctactaagtgtagatttttttnnnnnnnnnnaagcttggcgtggatccgatatcaactagatcttgagacaaatggcagtattcatccacaattttaaaagaaaaggggggattggggggtacagtgcaggggaaagaatagtagacataatagcaacagacatacaaactaaag

SEQ ID NO: 16109 - DNA, 301 bp, Artificial Sequence
  Brca2.3_NTC.11
  crRNA array
  misc_feature (148)..(157): n is a, c, g, or t
cttggctttatatatcttgtggaaaggacgaaacaccgtaatttctactaagtgtagattgaatataaactgggccacttaatttctactaagtgtagatcgttcgtcgacgaagcaatctaatttctactaagtgtagatttttttnnnnnnnnnnaagcttggcgtggatccgatatcaactagatcttgagacaaatggcagtattcatccacaattttaaaagaaaaggggggattggggggtacagtgcaggggaaagaatagtagacataatagcaacagacatacaaactaaag

SEQ ID NO: 16110 - DNA, 301 bp, Artificial Sequence
  Brca2.3_NTC.12
  crRNA array
  misc_feature (148)..(157): n is a, c, g, or t
cttggctttatatatcttgtggaaaggacgaaacaccgtaatttctactaagtgtagattgaatataaactgggccacttaatttctactaagtgtagatcgccgacgattaatcaatagtaatttctactaagtgtagatttttttnnnnnnnnnnaagcttggcgtggatccgatatcaactagatcttgagacaaatggcagtattcatccacaattttaaaagaaaaggggggattggggggtacagtgcaggggaaagaatagtagacataatagcaacagacatacaaactaaag

SEQ ID NO: 16111 - DNA, 301 bp, Artificial Sequence
  Brca2.3_NTC.13
  crRNA array
  misc_feature (148)..(157): n is a, c, g, or t
cttggctttatatatcttgtggaaaggacgaaacaccgtaatttctactaagtgtagattgaatataaactgggccacttaatttctactaagtgtagatgaccgttgtatcgcgatcaataatttctactaagtgtagatttttttnnnnnnnnnnaagcttggcgtggatccgatatcaactagatcttgagacaaatggcagtattcatccacaattttaaaagaaaaggggggattggggggtacagtgcaggggaaagaatagtagacataatagcaacagacatacaaactaaag

SEQ ID NO: 16112 - DNA, 301 bp, Artificial Sequence
  Brca2.3_NTC.14
  crRNA array
  misc_feature (148)..(157): n is a, c, g, or t
cttggctttatatatcttgtggaaaggacgaaacaccgtaatttctactaagtgtagattgaatataaactgggccacttaatttctactaagtgtagatccgttcgtgcgatagtgttttaatttctactaagtgtagatttttttnnnnnnnnnnaagcttggcgtggatccgatatcaactagatcttgagacaaatggcagtattcatccacaattttaaaagaaaaggggggattggggggtacagtgcaggggaaagaatagtagacataatagcaacagacatacaaactaaag

SEQ ID NO: 16113 - DNA, 301 bp, Artificial Sequence
  Brca2.3_NTC.15
  crRNA array
  misc_feature (148)..(157): n is a, c, g, or t
cttggctttatatatcttgtggaaaggacgaaacaccgtaatttctactaagtgtagattgaatataaactgggccacttaatttctactaagtgtagatgttgtcgtgccgcgaatttataatttctactaagtgtagatttttttnnnnnnnnnnaagcttggcgtggatccgatatcaactagatcttgagacaaatggcagtattcatccacaattttaaaagaaaaggggggattggggggtacagtgcaggggaaagaatagtagacataatagcaacagacatacaaactaaag

SEQ ID NO: 16114 - DNA, 301 bp, Artificial Sequence
  Brca2.3_NTC.16
  crRNA array
  misc_feature (148)..(157): n is a, c, g, or t
cttggctttatatatcttgtggaaaggacgaaacaccgtaatttctactaagtgtagattgaatataaactgggccacttaatttctactaagtgtagatcggtacgttagacgaaaatttaatttctactaagtgtagatttttttnnnnnnnnnnaagcttggcgtggatccgatatcaactagatcttgagacaaatggcagtattcatccacaattttaaaagaaaaggggggattggggggtacagtgcaggggaaagaatagtagacataatagcaacagacatacaaactaaag

SEQ ID NO: 16115 - DNA, 301 bp, Artificial Sequence
  Brca2.3_NTC.17
  crRNA array
  misc_feature (148)..(157): n is a, c, g, or t
cttggctttatatatcttgtggaaaggacgaaacaccgtaatttctactaagtgtagattgaatataaactgggccacttaatttctactaagtgtagattatcgaacgctatcgaacgttaatttctactaagtgtagatttttttnnnnnnnnnnaagcttggcgtggatccgatatcaactagatcttgagacaaatggcagtattcatccacaattttaaaagaaaaggggggattggggggtacagtgcaggggaaagaatagtagacataatagcaacagacatacaaactaaag

SEQ ID NO: 16116 - DNA, 301 bp, Artificial Sequence
  Brca2.3_NTC.18
  crRNA array
  misc_feature (148)..(157): n is a, c, g, or t
cttggctttatatatcttgtggaaaggacgaaacaccgtaatttctactaagtgtagattgaatataaactgggccacttaatttctactaagtgtagattccggttacgaccggcaaaataatttctactaagtgtagatttttttnnnnnnnnnnaagcttggcgtggatccgatatcaactagatcttgagacaaatggcagtattcatccacaattttaaaagaaaaggggggattggggggtacagtgcaggggaaagaatagtagacataatagcaacagacatacaaactaaag

SEQ ID NO: 16117 - DNA, 301 bp, Artificial Sequence
  Brca2.3_NTC.19
  crRNA array
  misc_feature (148)..(157): n is a, c, g, or t
cttggctttatatatcttgtggaaaggacgaaacaccgtaatttctactaagtgtagattgaatataaactgggccacttaatttctactaagtgtagatcgtcgtagaacgatacccgataatttctactaagtgtagatttttttnnnnnnnnnnaagcttggcgtggatccgatatcaactagatcttgagacaaatggcagtattcatccacaattttaaaagaaaaggggggattggggggtacagtgcaggggaaagaatagtagacataatagcaacagacatacaaactaaag

SEQ ID NO: 16118 - DNA, 301 bp, Artificial Sequence
  Brca2.3_NTC.2
  crRNA array
  misc_feature (148)..(157): n is a, c, g, or t
cttggctttatatatcttgtggaaaggacgaaacaccgtaatttctactaagtgtagattgaatataaactgggccacttaatttctactaagtgtagatttatgtcgcgccgcgacccgtaatttctactaagtgtagatttttttnnnnnnnnnnaagcttggcgtggatccgatatcaactagatcttgagacaaatggcagtattcatccacaattttaaaagaaaaggggggattggggggtacagtgcaggggaaagaatagtagacataatagcaacagacatacaaactaaag

SEQ ID NO: 16119 - DNA, 301 bp, Artificial Sequence
  Brca2.3_NTC.20
  crRNA array
  misc_feature (148)..(157): n is a, c, g, or t
cttggctttatatatcttgtggaaaggacgaaacaccgtaatttctactaagtgtagattgaatataaactgggccacttaatttctactaagtgtagatattccggcgcgaccagaagataatttctactaagtgtagatttttttnnnnnnnnnnaagcttggcgtggatccgatatcaactagatcttgagacaaatggcagtattcatccacaattttaaaagaaaaggggggattggggggtacagtgcaggggaaagaatagtagacataatagcaacagacatacaaactaaag

SEQ ID NO: 16120 - DNA, 301 bp, Artificial Sequence
  Brca2.3_NTC.21
  crRNA array
  misc_feature (148)..(157): n is a, c, g, or t
cttggctttatatatcttgtggaaaggacgaaacaccgtaatttctactaagtgtagattgaatataaactgggccacttaatttctactaagtgtagatgtataacttcgcgcggtccgtaatttctactaagtgtagatttttttnnnnnnnnnnaagcttggcgtggatccgatatcaactagatcttgagacaaatggcagtattcatccacaattttaaaagaaaaggggggattggggggtacagtgcaggggaaagaatagtagacataatagcaacagacatacaaactaaag

SEQ ID NO: 16121 - DNA, 301 bp, Artificial Sequence
  Brca2.3_NTC.22
  crRNA array
  misc_feature (148)..(157): n is a, c, g, or t
cttggctttatatatcttgtggaaaggacgaaacaccgtaatttctactaagtgtagattgaatataaactgggccacttaatttctactaagtgtagatgcgcgtcaacgtaatgtgcctaatttctactaagtgtagatttttttnnnnnnnnnnaagcttggcgtggatccgatatcaactagatcttgagacaaatggcagtattcatccacaattttaaaagaaaaggggggattggggggtacagtgcaggggaaagaatagtagacataatagcaacagacatacaaactaaag

SEQ ID NO: 16122 - DNA, 301 bp, Artificial Sequence
  Brca2.3_NTC.23
  crRNA array
  misc_feature (148)..(157): n is a, c, g, or t
cttggctttatatatcttgtggaaaggacgaaacaccgtaatttctactaagtgtagattgaatataaactgggccacttaatttctactaagtgtagatacgcgctattatcgtaggtgtaatttctactaagtgtagatttttttnnnnnnnnnnaagcttggcgtggatccgatatcaactagatcttgagacaaatggcagtattcatccacaattttaaaagaaaaggggggattggggggtacagtgcaggggaaagaatagtagacataatagcaacagacatacaaactaaag

SEQ ID NO: 16123 - DNA, 301 bp, Artificial Sequence
  Brca2.3_NTC.24
  crRNA array
  misc_feature (148)..(157): n is a, c, g, or t
cttggctttatatatcttgtggaaaggacgaaacaccgtaatttctactaagtgtagattgaatataaactgggccacttaatttctactaagtgtagatactatcgacgttcgtcccggtaatttctactaagtgtagatttttttnnnnnnnnnnaagcttggcgtggatccgatatcaactagatcttgagacaaatggcagtattcatccacaattttaaaagaaaaggggggattggggggtacagtgcaggggaaagaatagtagacataatagcaacagacatacaaactaaag

SEQ ID NO: 16124 - DNA, 301 bp, Artificial Sequence
  Brca2.3_NTC.25
  crRNA array
  misc_feature (148)..(157): n is a, c, g, or t
cttggctttatatatcttgtggaaaggacgaaacaccgtaatttctactaagtgtagattgaatataaactgggccacttaatttctactaagtgtagattcgcgttatcgtgccgtgcgtaatttctactaagtgtagatttttttnnnnnnnnnnaagcttggcgtggatccgatatcaactagatcttgagacaaatggcagtattcatccacaattttaaaagaaaaggggggattggggggtacagtgcaggggaaagaatagtagacataatagcaacagacatacaaactaaag

SEQ ID NO: 16125 - DNA, 301 bp, Artificial Sequence
  Brca2.3_NTC.26
  crRNA array
  misc_feature (148)..(157): n is a, c, g, or t
cttggctttatatatcttgtggaaaggacgaaacaccgtaatttctactaagtgtagattgaatataaactgggccacttaatttctactaagtgtagatcgcgacggcggttttaacactaatttctactaagtgtagatttttttnnnnnnnnnnaagcttggcgtggatccgatatcaactagatcttgagacaaatggcagtattcatccacaattttaaaagaaaaggggggattggggggtacagtgcaggggaaagaatagtagacataatagcaacagacatacaaactaaag

SEQ ID NO: 16126 - DNA, 301 bp, Artificial Sequence
  Brca2.3_NTC.27
  crRNA array
  misc_feature (148)..(157): n is a, c, g, or t
cttggctttatatatcttgtggaaaggacgaaacaccgtaatttctactaagtgtagattgaatataaactgggccacttaatttctactaagtgtagatgtcgcgttgcgaccggcgcttaatttctactaagtgtagatttttttnnnnnnnnnnaagcttggcgtggatccgatatcaactagatcttgagacaaatggcagtattcatccacaattttaaaagaaaaggggggattggggggtacagtgcaggggaaagaatagtagacataatagcaacagacatacaaactaaag

SEQ ID NO: 16127 - DNA, 301 bp, Artificial Sequence
  Brca2.3_NTC.28
  crRNA array
  misc_feature (148)..(157): n is a, c, g, or t
cttggctttatatatcttgtggaaaggacgaaacaccgtaatttctactaagtgtagattgaatataaactgggccacttaatttctactaagtgtagataccgctaatcggcgtaaacttaatttctactaagtgtagatttttttnnnnnnnnnnaagcttggcgtggatccgatatcaactagatcttgagacaaatggcagtattcatccacaattttaaaagaaaaggggggattggggggtacagtgcaggggaaagaatagtagacataatagcaacagacatacaaactaaag

SEQ ID NO: 16128 - DNA, 301 bp, Artificial Sequence
  Brca2.3_NTC.29
  crRNA array
  misc_feature (148)..(157): n is a, c, g, or t
cttggctttatatatcttgtggaaaggacgaaacaccgtaatttctactaagtgtagattgaatataaactgggccacttaatttctactaagtgtagatcgcgatctataccgtctatataatttctactaagtgtagatttttttnnnnnnnnnnaagcttggcgtggatccgatatcaactagatcttgagacaaatggcagtattcatccacaattttaaaagaaaaggggggattggggggtacagtgcaggggaaagaatagtagacataatagcaacagacatacaaactaaag

SEQ ID NO: 16129 - DNA, 301 bp, Artificial Sequence
  Brca2.3_NTC.3
  crRNA array
  misc_feature (148)..(157): n is a, c, g, or t
cttggctttatatatcttgtggaaaggacgaaacaccgtaatttctactaagtgtagattgaatataaactgggccacttaatttctactaagtgtagattcgacgcgagacgacgtacataatttctactaagtgtagatttttttnnnnnnnnnnaagcttggcgtggatccgatatcaactagatcttgagacaaatggcagtattcatccacaattttaaaagaaaaggggggattggggggtacagtgcaggggaaagaatagtagacataatagcaacagacatacaaactaaag

SEQ ID NO: 16130 - DNA, 301 bp, Artificial Sequence
  Brca2.3_NTC.30
  crRNA array
  misc_feature (148)..(157): n is a, c, g, or t
cttggctttatatatcttgtggaaaggacgaaacaccgtaatttctactaagtgtagattgaatataaactgggccacttaatttctactaagtgtagatcgatcgtacgggtgtcctaataatttctactaagtgtagatttttttnnnnnnnnnnaagcttggcgtggatccgatatcaactagatcttgagacaaatggcagtattcatccacaattttaaaagaaaaggggggattggggggtacagtgcaggggaaagaatagtagacataatagcaacagacatacaaactaaag

SEQ ID NO: 16131 - DNA, 301 bp, Artificial Sequence
  Brca2.3_NTC.31
  crRNA array
  misc_feature (148)..(157): n is a, c, g, or t
cttggctttatatatcttgtggaaaggacgaaacaccgtaatttctactaagtgtagattgaatataaactgggccacttaatttctactaagtgtagatgccgaccgcgtgattgtaggtaatttctactaagtgtagatttttttnnnnnnnnnnaagcttggcgtggatccgatatcaactagatcttgagacaaatggcagtattcatccacaattttaaaagaaaaggggggattggggggtacagtgcaggggaaagaatagtagacataatagcaacagacatacaaactaaag

SEQ ID NO: 16132 - DNA, 301 bp, Artificial Sequence
  Brca2.3_NTC.32
  crRNA array
  misc_feature (148)..(157): n is a, c, g, or t
cttggctttatatatcttgtggaaaggacgaaacaccgtaatttctactaagtgtagattgaatataaactgggccacttaatttctactaagtgtagatgcacgttacgcccgggtcactaatttctactaagtgtagatttttttnnnnnnnnnnaagcttggcgtggatccgatatcaactagatcttgagacaaatggcagtattcatccacaattttaaaagaaaaggggggattggggggtacagtgcaggggaaagaatagtagacataatagcaacagacatacaaactaaag

SEQ ID NO: 16133 - DNA, 301 bp, Artificial Sequence
  Brca2.3_NTC.33
  crRNA array
  misc_feature (148)..(157): n is a, c, g, or t
cttggctttatatatcttgtggaaaggacgaaacaccgtaatttctactaagtgtagattgaatataaactgggccacttaatttctactaagtgtagattaagcgaccgacgcattcgctaatttctactaagtgtagatttttttnnnnnnnnnnaagcttggcgtggatccgatatcaactagatcttgagacaaatggcagtattcatccacaattttaaaagaaaaggggggattggggggtacagtgcaggggaaagaatagtagacataatagcaacagacatacaaactaaag

SEQ ID NO: 16134 - DNA, 301 bp, Artificial Sequence
  Brca2.3_NTC.34
  crRNA array
  misc_feature (148)..(157): n is a, c, g, or t
cttggctttatatatcttgtggaaaggacgaaacaccgtaatttctactaagtgtagattgaatataaactgggccacttaatttctactaagtgtagattagcgttcgacacgtgaaactaatttctactaagtgtagatttttttnnnnnnnnnnaagcttggcgtggatccgatatcaactagatcttgagacaaatggcagtattcatccacaattttaaaagaaaaggggggattggggggtacagtgcaggggaaagaatagtagacataatagcaacagacatacaaactaaag

SEQ ID NO: 16135 - DNA, 301 bp, Artificial Sequence
  Brca2.3_NTC.35
  crRNA array
  misc_feature (148)..(157): n is a, c, g, or t
cttggctttatatatcttgtggaaaggacgaaacaccgtaatttctactaagtgtagattgaatataaactgggccacttaatttctactaagtgtagattggcgcgtaatcgctattcgtaatttctactaagtgtagatttttttnnnnnnnnnnaagcttggcgtggatccgatatcaactagatcttgagacaaatggcagtattcatccacaattttaaaagaaaaggggggattggggggtacagtgcaggggaaagaatagtagacataatagcaacagacatacaaactaaag

SEQ ID NO: 16136 - DNA, 301 bp, Artificial Sequence
  Brca2.3_NTC.36
  crRNA array
  misc_feature (148)..(157): n is a, c, g, or t
cttggctttatatatcttgtggaaaggacgaaacaccgtaatttctactaagtgtagattgaatataaactgggccacttaatttctactaagtgtagatcaacccgccgtagcgggccttaatttctactaagtgtagatttttttnnnnnnnnnnaagcttggcgtggatccgatatcaactagatcttgagacaaatggcagtattcatccacaattttaaaagaaaaggggggattggggggtacagtgcaggggaaagaatagtagacataatagcaacagacatacaaactaaag

SEQ ID NO: 16137 - DNA, 301 bp, Artificial Sequence
  Brca2.3_NTC.37
  crRNA array
  misc_feature (148)..(157): n is a, c, g, or t
cttggctttatatatcttgtggaaaggacgaaacaccgtaatttctactaagtgtagattgaatataaactgggccacttaatttctactaagtgtagattttgcgttgacgcgattacttaatttctactaagtgtagatttttttnnnnnnnnnnaagcttggcgtggatccgatatcaactagatcttgagacaaatggcagtattcatccacaattttaaaagaaaaggggggattggggggtacagtgcaggggaaagaatagtagacataatagcaacagacatacaaactaaag

SEQ ID NO: 16138 - DNA, 301 bp, Artificial Sequence
  Brca2.3_NTC.38
  crRNA array
  misc_feature (148)..(157): n is a, c, g, or t
cttggctttatatatcttgtggaaaggacgaaacaccgtaatttctactaagtgtagattgaatataaactgggccacttaatttctactaagtgtagataacggagcgcgatactaccataatttctactaagtgtagatttttttnnnnnnnnnnaagcttggcgtggatccgatatcaactagatcttgagacaaatggcagtattcatccacaattttaaaagaaaaggggggattggggggtacagtgcaggggaaagaatagtagacataatagcaacagacatacaaactaaag

SEQ ID NO: 16139 - DNA, 301 bp, Artificial Sequence
  Brca2.3_NTC.39
  crRNA array
  misc_feature (148)..(157): n is a, c, g, or t
cttggctttatatatcttgtggaaaggacgaaacaccgtaatttctactaagtgtagattgaatataaactgggccacttaatttctactaagtgtagatccggacgttataacgtttcttaatttctactaagtgtagatttttttnnnnnnnnnnaagcttggcgtggatccgatatcaactagatcttgagacaaatggcagtattcatccacaattttaaaagaaaaggggggattggggggtacagtgcaggggaaagaatagtagacataatagcaacagacatacaaactaaag

SEQ ID NO: 16140 - DNA, 301 bp, Artificial Sequence
  Brca2.3_NTC.4
  crRNA array
  misc_feature (148)..(157): n is a, c, g, or t
cttggctttatatatcttgtggaaaggacgaaacaccgtaatttctactaagtgtagattgaatataaactgggccacttaatttctactaagtgtagatatacccgtcgcgaacgtgagtaatttctactaagtgtagatttttttnnnnnnnnnnaagcttggcgtggatccgatatcaactagatcttgagacaaatggcagtattcatccacaattttaaaagaaaaggggggattggggggtacagtgcaggggaaagaatagtagacataatagcaacagacatacaaactaaag

SEQ ID NO: 16141 - DNA, 301 bp, Artificial Sequence
  Brca2.3_NTC.40
  crRNA array
  misc_feature (148)..(157): n is a, c, g, or t
cttggctttatatatcttgtggaaaggacgaaacaccgtaatttctactaagtgtagattgaatataaactgggccacttaatttctactaagtgtagatattcgcgaacccggccggaataatttctactaagtgtagatttttttnnnnnnnnnnaagcttggcgtggatccgatatcaactagatcttgagacaaatggcagtattcatccacaattttaaaagaaaaggggggattggggggtacagtgcaggggaaagaatagtagacataatagcaacagacatacaaactaaag

SEQ ID NO: 16142 - DNA, 301 bp, Artificial Sequence
  Brca2.3_NTC.41
  crRNA array
  misc_feature (148)..(157): n is a, c, g, or t
cttggctttatatatcttgtggaaaggacgaaacaccgtaatttctactaagtgtagattgaatataaactgggccacttaatttctactaagtgtagatttgatggcgcgacgcgttattaatttctactaagtgtagatttttttnnnnnnnnnnaagcttggcgtggatccgatatcaactagatcttgagacaaatggcagtattcatccacaattttaaaagaaaaggggggattggggggtacagtgcaggggaaagaatagtagacataatagcaacagacatacaaactaaag

SEQ ID NO: 16143 - DNA, 301 bp, Artificial Sequence
  Brca2.3_NTC.42
  crRNA array
  misc_feature (148)..(157): n is a, c, g, or t
cttggctttatatatcttgtggaaaggacgaaacaccgtaatttctactaagtgtagattgaatataaactgggccacttaatttctactaagtgtagatggtcaaatcgcggcgataactaatttctactaagtgtagatttttttnnnnnnnnnnaagcttggcgtggatccgatatcaactagatcttgagacaaatggcagtattcatccacaattttaaaagaaaaggggggattggggggtacagtgcaggggaaagaatagtagacataatagcaacagacatacaaactaaag

SEQ ID NO: 16144 - DNA, 301 bp, Artificial Sequence
  Brca2.3_NTC.43
  crRNA array
  misc_feature (148)..(157): n is a, c, g, or t
cttggctttatatatcttgtggaaaggacgaaacaccgtaatttctactaagtgtagattgaatataaactgggccacttaatttctactaagtgtagatcgactcgcgcattgaactggtaatttctactaagtgtagatttttttnnnnnnnnnnaagcttggcgtggatccgatatcaactagatcttgagacaaatggcagtattcatccacaattttaaaagaaaaggggggattggggggtacagtgcaggggaaagaatagtagacataatagcaacagacatacaaactaaag

SEQ ID NO: 16145 - DNA, 301 bp, Artificial Sequence
  Brca2.3_NTC.44
  crRNA array
  misc_feature (148)..(157): n is a, c, g, or t
cttggctttatatatcttgtggaaaggacgaaacaccgtaatttctactaagtgtagattgaatataaactgggccacttaatttctactaagtgtagatagcgtcgtacgatttatcgttaatttctactaagtgtagatttttttnnnnnnnnnnaagcttggcgtggatccgatatcaactagatcttgagacaaatggcagtattcatccacaattttaaaagaaaaggggggattggggggtacagtgcaggggaaagaatagtagacataatagcaacagacatacaaactaaag

SEQ ID NO: 16146 - DNA, 301 bp, Artificial Sequence
  Brca2.3_NTC.45
  crRNA array
  misc_feature (148)..(157): n is a, c, g, or t
cttggctttatatatcttgtggaaaggacgaaacaccgtaatttctactaagtgtagattgaatataaactgggccacttaatttctactaagtgtagatcggaacgcgtgatactagggtaatttctactaagtgtagatttttttnnnnnnnnnnaagcttggcgtggatccgatatcaactagatcttgagacaaatggcagtattcatccacaattttaaaagaaaaggggggattggggggtacagtgcaggggaaagaatagtagacataatagcaacagacatacaaactaaag

SEQ ID NO: 16147 - DNA, 301 bp, Artificial Sequence
  Brca2.3_NTC.46
  crRNA array
  misc_feature (148)..(157): n is a, c, g, or t
cttggctttatatatcttgtggaaaggacgaaacaccgtaatttctactaagtgtagattgaatataaactgggccacttaatttctactaagtgtagatagcgggtcgtagacgcgcggtaatttctactaagtgtagatttttttnnnnnnnnnnaagcttggcgtggatccgatatcaactagatcttgagacaaatggcagtattcatccacaattttaaaagaaaaggggggattggggggtacagtgcaggggaaagaatagtagacataatagcaacagacatacaaactaaag

SEQ ID NO: 16148 - DNA, 301 bp, Artificial Sequence
  Brca2.3_NTC.47
  crRNA array
  misc_feature (148)..(157): n is a, c, g, or t
cttggctttatatatcttgtggaaaggacgaaacaccgtaatttctactaagtgtagattgaatataaactgggccacttaatttctactaagtgtagattctcgtatcgcgattgttaataatttctactaagtgtagatttttttnnnnnnnnnnaagcttggcgtggatccgatatcaactagatcttgagacaaatggcagtattcatccacaattttaaaagaaaaggggggattggggggtacagtgcaggggaaagaatagtagacataatagcaacagacatacaaactaaag

SEQ ID NO: 16149 - DNA, 301 bp, Artificial Sequence
  Brca2.3_NTC.48
  crRNA array
  misc_feature (148)..(157): n is a, c, g, or t
cttggctttatatatcttgtggaaaggacgaaacaccgtaatttctactaagtgtagattgaatataaactgggccacttaatttctactaagtgtagatcggtcgactacggctgttagtaatttctactaagtgtagatttttttnnnnnnnnnnaagcttggcgtggatccgatatcaactagatcttgagacaaatggcagtattcatccacaattttaaaagaaaaggggggattggggggtacagtgcaggggaaagaatagtagacataatagcaacagacatacaaactaaag

SEQ ID NO: 16150 - DNA, 301 bp, Artificial Sequence
  Brca2.3_NTC.49
  crRNA array
  misc_feature (148)..(157): n is a, c, g, or t
cttggctttatatatcttgtggaaaggacgaaacaccgtaatttctactaagtgtagattgaatataaactgggccacttaatttctactaagtgtagattcggggcgcgtcaactgaattaatttctactaagtgtagatttttttnnnnnnnnnnaagcttggcgtggatccgatatcaactagatcttgagacaaatggcagtattcatccacaattttaaaagaaaaggggggattggggggtacagtgcaggggaaagaatagtagacataatagcaacagacatacaaactaaag

SEQ ID NO: 16151 - DNA, 301 bp, Artificial Sequence
  Brca2.3_NTC.5
  crRNA array
  misc_feature (148)..(157): n is a, c, g, or t
cttggctttatatatcttgtggaaaggacgaaacaccgtaatttctactaagtgtagattgaatataaactgggccacttaatttctactaagtgtagatgcttacgcgtcgcgaatgtataatttctactaagtgtagatttttttnnnnnnnnnnaagcttggcgtggatccgatatcaactagatcttgagacaaatggcagtattcatccacaattttaaaagaaaaggggggattggggggtacagtgcaggggaaagaatagtagacataatagcaacagacatacaaactaaag

SEQ ID NO: 16152 - DNA, 301 bp, Artificial Sequence
  Brca2.3_NTC.50
  crRNA array
  misc_feature (148)..(157): n is a, c, g, or t
cttggctttatatatcttgtggaaaggacgaaacaccgtaatttctactaagtgtagattgaatataaactgggccacttaatttctactaagtgtagatattgccgctcgcgcaaaatctaatttctactaagtgtagatttttttnnnnnnnnnnaagcttggcgtggatccgatatcaactagatcttgagacaaatggcagtattcatccacaattttaaaagaaaaggggggattggggggtacagtgcaggggaaagaatagtagacataatagcaacagacatacaaactaaag

SEQ ID NO: 16153 - DNA, 301 bp, Artificial Sequence
  Brca2.3_NTC.51
  crRNA array
  misc_feature (148)..(157): n is a, c, g, or t
cttggctttatatatcttgtggaaaggacgaaacaccgtaatttctactaagtgtagattgaatataaactgggccacttaatttctactaagtgtagattaacgcgcaacacgccaatgtaatttctactaagtgtagatttttttnnnnnnnnnnaagcttggcgtggatccgatatcaactagatcttgagacaaatggcagtattcatccacaattttaaaagaaaaggggggattggggggtacagtgcaggggaaagaatagtagacataatagcaacagacatacaaactaaag

SEQ ID NO: 16154 - DNA, 301 bp, Artificial Sequence
  Brca2.3_NTC.6
  crRNA array
  misc_feature (148)..(157): n is a, c, g, or t
cttggctttatatatcttgtggaaaggacgaaacaccgtaatttctactaagtgtagattgaatataaactgggccacttaatttctactaagtgtagatcgaatcgcgcctacgggaattaatttctactaagtgtagatttttttnnnnnnnnnnaagcttggcgtggatccgatatcaactagatcttgagacaaatggcagtattcatccacaattttaaaagaaaaggggggattggggggtacagtgcaggggaaagaatagtagacataatagcaacagacatacaaactaaag

SEQ ID NO: 16155 - DNA, 301 bp, Artificial Sequence
  Brca2.3_NTC.7
  crRNA array
  misc_feature (148)..(157): n is a, c, g, or t
cttggctttatatatcttgtggaaaggacgaaacaccgtaatttctactaagtgtagattgaatataaactgggccacttaatttctactaagtgtagatcgccgaacggataagactattaatttctactaagtgtagatttttttnnnnnnnnnnaagcttggcgtggatccgatatcaactagatcttgagacaaatggcagtattcatccacaattttaaaagaaaaggggggattggggggtacagtgcaggggaaagaatagtagacataatagcaacagacatacaaactaaag

SEQ ID NO: 16156 - DNA, 301 bp, Artificial Sequence
  Brca2.3_NTC.8
  crRNA array
  misc_feature (148)..(157): n is a, c, g, or t
cttggctttatatatcttgtggaaaggacgaaacaccgtaatttctactaagtgtagattgaatataaactgggccacttaatttctactaagtgtagatcgaccgaggttacgctgggataatttctactaagtgtagatttttttnnnnnnnnnnaagcttggcgtggatccgatatcaactagatcttgagacaaatggcagtattcatccacaattttaaaagaaaaggggggattggggggtacagtgcaggggaaagaatagtagacataatagcaacagacatacaaactaaag

SEQ ID NO: 16157 - DNA, 301 bp, Artificial Sequence
  Brca2.3_NTC.9
  crRNA array
  misc_feature (148)..(157): n is a, c, g, or t
cttggctttatatatcttgtggaaaggacgaaacaccgtaatttctactaagtgtagattgaatataaactgggccacttaatttctactaagtgtagatatcgccgtacggctatggcataatttctactaagtgtagatttttttnnnnnnnnnnaagcttggcgtggatccgatatcaactagatcttgagacaaatggcagtattcatccacaattttaaaagaaaaggggggattggggggtacagtgcaggggaaagaatagtagacataatagcaacagacatacaaactaaag

SEQ ID NO: 16158 - DNA, 301 bp, Artificial Sequence
  Brca2.4_NTC.0
  crRNA array
  misc_feature (148)..(157): n is a, c, g, or t
cttggctttatatatcttgtggaaaggacgaaacaccgtaatttctactaagtgtagatgaaacgccgtatatatagagtaatttctactaagtgtagattatagcgtcgcgcgctaatttaatttctactaagtgtagatttttttnnnnnnnnnnaagcttggcgtggatccgatatcaactagatcttgagacaaatggcagtattcatccacaattttaaaagaaaaggggggattggggggtacagtgcaggggaaagaatagtagacataatagcaacagacatacaaactaaag

SEQ ID NO: 16159 - DNA, 301 bp, Artificial Sequence
  Brca2.4_NTC.1
  crRNA array
  misc_feature (148)..(157): n is a, c, g, or t
cttggctttatatatcttgtggaaaggacgaaacaccgtaatttctactaagtgtagatgaaacgccgtatatatagagtaatttctactaagtgtagatcgcgtaaccgttccggctcctaatttctactaagtgtagatttttttnnnnnnnnnnaagcttggcgtggatccgatatcaactagatcttgagacaaatggcagtattcatccacaattttaaaagaaaaggggggattggggggtacagtgcaggggaaagaatagtagacataatagcaacagacatacaaactaaag

SEQ ID NO: 16160 - DNA, 301 bp, Artificial Sequence
  Brca2.4_NTC.10
  crRNA array
  misc_feature (148)..(157): n is a, c, g, or t
cttggctttatatatcttgtggaaaggacgaaacaccgtaatttctactaagtgtagatgaaacgccgtatatatagagtaatttctactaagtgtagatcgctaagttcgcgcgggccgtaatttctactaagtgtagatttttttnnnnnnnnnnaagcttggcgtggatccgatatcaactagatcttgagacaaatggcagtattcatccacaattttaaaagaaaaggggggattggggggtacagtgcaggggaaagaatagtagacataatagcaacagacatacaaactaaag

SEQ ID NO: 16161 - DNA, 301 bp, Artificial Sequence
  Brca2.4_NTC.11
  crRNA array
  misc_feature (148)..(157): n is a, c, g, or t
cttggctttatatatcttgtggaaaggacgaaacaccgtaatttctactaagtgtagatgaaacgccgtatatatagagtaatttctactaagtgtagatcgttcgtcgacgaagcaatctaatttctactaagtgtagatttttttnnnnnnnnnnaagcttggcgtggatccgatatcaactagatcttgagacaaatggcagtattcatccacaattttaaaagaaaaggggggattggggggtacagtgcaggggaaagaatagtagacataatagcaacagacatacaaactaaag

SEQ ID NO: 16162 - DNA, 301 bp, Artificial Sequence
  Brca2.4_NTC.12
  crRNA array
  misc_feature (148)..(157): n is a, c, g, or t
cttggctttatatatcttgtggaaaggacgaaacaccgtaatttctactaagtgtagatgaaacgccgtatatatagagtaatttctactaagtgtagatcgccgacgattaatcaatagtaatttctactaagtgtagatttttttnnnnnnnnnnaagcttggcgtggatccgatatcaactagatcttgagacaaatggcagtattcatccacaattttaaaagaaaaggggggattggggggtacagtgcaggggaaagaatagtagacataatagcaacagacatacaaactaaag

SEQ ID NO: 16163 - DNA, 301 bp, Artificial Sequence
  Brca2.4_NTC.13
  crRNA array
  misc_feature (148)..(157): n is a, c, g, or t
cttggctttatatatcttgtggaaaggacgaaacaccgtaatttctactaagtgtagatgaaacgccgtatatatagagtaatttctactaagtgtagatgaccgttgtatcgcgatcaataatttctactaagtgtagatttttttnnnnnnnnnnaagcttggcgtggatccgatatcaactagatcttgagacaaatggcagtattcatccacaattttaaaagaaaaggggggattggggggtacagtgcaggggaaagaatagtagacataatagcaacagacatacaaactaaag

SEQ ID NO: 16164 - DNA, 301 bp, Artificial Sequence
  Brca2.4_NTC.14
  crRNA array
  misc_feature (148)..(157): n is a, c, g, or t
cttggctttatatatcttgtggaaaggacgaaacaccgtaatttctactaagtgtagatgaaacgccgtatatatagagtaatttctactaagtgtagatccgttcgtgcgatagtgttttaatttctactaagtgtagatttttttnnnnnnnnnnaagcttggcgtggatccgatatcaactagatcttgagacaaatggcagtattcatccacaattttaaaagaaaaggggggattggggggtacagtgcaggggaaagaatagtagacataatagcaacagacatacaaactaaag

SEQ ID NO: 16165 - DNA, 301 bp, Artificial Sequence
  Brca2.4_NTC.15
  crRNA array
  misc_feature (148)..(157): n is a, c, g, or t
cttggctttatatatcttgtggaaaggacgaaacaccgtaatttctactaagtgtagatgaaacgccgtatatatagagtaatttctactaagtgtagatgttgtcgtgccgcgaatttataatttctactaagtgtagatttttttnnnnnnnnnnaagcttggcgtggatccgatatcaactagatcttgagacaaatggcagtattcatccacaattttaaaagaaaaggggggattggggggtacagtgcaggggaaagaatagtagacataatagcaacagacatacaaactaaag

SEQ ID NO: 16166 - DNA, 301 bp, Artificial Sequence
  Brca2.4_NTC.16
  crRNA array
  misc_feature (148)..(157): n is a, c, g, or t
cttggctttatatatcttgtggaaaggacgaaacaccgtaatttctactaagtgtagatgaaacgccgtatatatagagtaatttctactaagtgtagatcggtacgttagacgaaaatttaatttctactaagtgtagatttttttnnnnnnnnnnaagcttggcgtggatccgatatcaactagatcttgagacaaatggcagtattcatccacaattttaaaagaaaaggggggattggggggtacagtgcaggggaaagaatagtagacataatagcaacagacatacaaactaaag

SEQ ID NO: 16167 - DNA, 301 bp, Artificial Sequence
  Brca2.4_NTC.17
  crRNA array
  misc_feature (148)..(157): n is a, c, g, or t
cttggctttatatatcttgtggaaaggacgaaacaccgtaatttctactaagtgtagatgaaacgccgtatatatagagtaatttctactaagtgtagattatcgaacgctatcgaacgttaatttctactaagtgtagatttttttnnnnnnnnnnaagcttggcgtggatccgatatcaactagatcttgagacaaatggcagtattcatccacaattttaaaagaaaaggggggattggggggtacagtgcaggggaaagaatagtagacataatagcaacagacatacaaactaaag

SEQ ID NO: 16168 - DNA, 301 bp, Artificial Sequence
  Brca2.4_NTC.18
  crRNA array
  misc_feature (148)..(157): n is a, c, g, or t
cttggctttatatatcttgtggaaaggacgaaacaccgtaatttctactaagtgtagatgaaacgccgtatatatagagtaatttctactaagtgtagattccggttacgaccggcaaaataatttctactaagtgtagatttttttnnnnnnnnnnaagcttggcgtggatccgatatcaactagatcttgagacaaatggcagtattcatccacaattttaaaagaaaaggggggattggggggtacagtgcaggggaaagaatagtagacataatagcaacagacatacaaactaaag

SEQ ID NO: 16169 - DNA, 301 bp, Artificial Sequence
  Brca2.4_NTC.19
  crRNA array
  misc_feature (148)..(157): n is a, c, g, or t
cttggctttatatatcttgtggaaaggacgaaacaccgtaatttctactaagtgtagatgaaacgccgtatatatagagtaatttctactaagtgtagatcgtcgtagaacgatacccgataatttctactaagtgtagatttttttnnnnnnnnnnaagcttggcgtggatccgatatcaactagatcttgagacaaatggcagtattcatccacaattttaaaagaaaaggggggattggggggtacagtgcaggggaaagaatagtagacataatagcaacagacatacaaactaaag

SEQ ID NO: 16170 - DNA, 301 bp, Artificial Sequence
  Brca2.4_NTC.2
  crRNA array
  misc_feature (148)..(157): n is a, c, g, or t
cttggctttatatatcttgtggaaaggacgaaacaccgtaatttctactaagtgtagatgaaacgccgtatatatagagtaatttctactaagtgtagatttatgtcgcgccgcgacccgtaatttctactaagtgtagatttttttnnnnnnnnnnaagcttggcgtggatccgatatcaactagatcttgagacaaatggcagtattcatccacaattttaaaagaaaaggggggattggggggtacagtgcaggggaaagaatagtagacataatagcaacagacatacaaactaaag

SEQ ID NO: 16171 - DNA, 301 bp, Artificial Sequence
  Brca2.4_NTC.20
  crRNA array
  misc_feature (148)..(157): n is a, c, g, or t
cttggctttatatatcttgtggaaaggacgaaacaccgtaatttctactaagtgtagatgaaacgccgtatatatagagtaatttctactaagtgtagatattccggcgcgaccagaagataatttctactaagtgtagatttttttnnnnnnnnnnaagcttggcgtggatccgatatcaactagatcttgagacaaatggcagtattcatccacaattttaaaagaaaaggggggattggggggtacagtgcaggggaaagaatagtagacataatagcaacagacatacaaactaaag

SEQ ID NO: 16172 - DNA, 301 bp, Artificial Sequence
  Brca2.4_NTC.21
  crRNA array
  misc_feature (148)..(157): n is a, c, g, or t
cttggctttatatatcttgtggaaaggacgaaacaccgtaatttctactaagtgtagatgaaacgccgtatatatagagtaatttctactaagtgtagatgtataacttcgcgcggtccgtaatttctactaagtgtagatttttttnnnnnnnnnnaagcttggcgtggatccgatatcaactagatcttgagacaaatggcagtattcatccacaattttaaaagaaaaggggggattggggggtacagtgcaggggaaagaatagtagacataatagcaacagacatacaaactaaag

SEQ ID NO: 16173 - DNA, 301 bp, Artificial Sequence
  Brca2.4_NTC.22
  crRNA array
  misc_feature (148)..(157): n is a, c, g, or t
cttggctttatatatcttgtggaaaggacgaaacaccgtaatttctactaagtgtagatgaaacgccgtatatatagagtaatttctactaagtgtagatgcgcgtcaacgtaatgtgcctaatttctactaagtgtagatttttttnnnnnnnnnnaagcttggcgtggatccgatatcaactagatcttgagacaaatggcagtattcatccacaattttaaaagaaaaggggggattggggggtacagtgcaggggaaagaatagtagacataatagcaacagacatacaaactaaag

SEQ ID NO: 16174 - DNA, 301 bp, Artificial Sequence
  Brca2.4_NTC.23
  crRNA array
  misc_feature (148)..(157): n is a, c, g, or t
cttggctttatatatcttgtggaaaggacgaaacaccgtaatttctactaagtgtagatgaaacgccgtatatatagagtaatttctactaagtgtagatacgcgctattatcgtaggtgtaatttctactaagtgtagatttttttnnnnnnnnnnaagcttggcgtggatccgatatcaactagatcttgagacaaatggcagtattcatccacaattttaaaagaaaaggggggattggggggtacagtgcaggggaaagaatagtagacataatagcaacagacatacaaactaaag

SEQ ID NO: 16175 - DNA, 301 bp, Artificial Sequence
  Brca2.4_NTC.24
  crRNA array
  misc_feature (148)..(157): n is a, c, g, or t
cttggctttatatatcttgtggaaaggacgaaacaccgtaatttctactaagtgtagatgaaacgccgtatatatagagtaatttctactaagtgtagatactatcgacgttcgtcccggtaatttctactaagtgtagatttttttnnnnnnnnnnaagcttggcgtggatccgatatcaactagatcttgagacaaatggcagtattcatccacaattttaaaagaaaaggggggattggggggtacagtgcaggggaaagaatagtagacataatagcaacagacatacaaactaaag

SEQ ID NO: 16176 - DNA, 301 bp, Artificial Sequence
  Brca2.4_NTC.25
  crRNA array
  misc_feature (148)..(157): n is a, c, g, or t
cttggctttatatatcttgtggaaaggacgaaacaccgtaatttctactaagtgtagatgaaacgccgtatatatagagtaatttctactaagtgtagattcgcgttatcgtgccgtgcgtaatttctactaagtgtagatttttttnnnnnnnnnnaagcttggcgtggatccgatatcaactagatcttgagacaaatggcagtattcatccacaattttaaaagaaaaggggggattggggggtacagtgcaggggaaagaatagtagacataatagcaacagacatacaaactaaag

SEQ ID NO: 16177 - DNA, 301 bp, Artificial Sequence
  Brca2.4_NTC.26
  crRNA array
  misc_feature (148)..(157): n is a, c, g, or t
cttggctttatatatcttgtggaaaggacgaaacaccgtaatttctactaagtgtagatgaaacgccgtatatatagagtaatttctactaagtgtagatcgcgacggcggttttaacactaatttctactaagtgtagatttttttnnnnnnnnnnaagcttggcgtggatccgatatcaactagatcttgagacaaatggcagtattcatccacaattttaaaagaaaaggggggattggggggtacagtgcaggggaaagaatagtagacataatagcaacagacatacaaactaaag

SEQ ID NO: 16178 - DNA, 301 bp, Artificial Sequence
  Brca2.4_NTC.27
  crRNA array
  misc_feature (148)..(157): n is a, c, g, or t
cttggctttatatatcttgtggaaaggacgaaacaccgtaatttctactaagtgtagatgaaacgccgtatatatagagtaatttctactaagtgtagatgtcgcgttgcgaccggcgcttaatttctactaagtgtagatttttttnnnnnnnnnnaagcttggcgtggatccgatatcaactagatcttgagacaaatggcagtattcatccacaattttaaaagaaaaggggggattggggggtacagtgcaggggaaagaatagtagacataatagcaacagacatacaaactaaag

SEQ ID NO: 16179 - DNA, 301 bp, Artificial Sequence
  Brca2.4_NTC.28
  crRNA array
  misc_feature (148)..(157): n is a, c, g, or t
cttggctttatatatcttgtggaaaggacgaaacaccgtaatttctactaagtgtagatgaaacgccgtatatatagagtaatttctactaagtgtagataccgctaatcggcgtaaacttaatttctactaagtgtagatttttttnnnnnnnnnnaagcttggcgtggatccgatatcaactagatcttgagacaaatggcagtattcatccacaattttaaaagaaaaggggggattggggggtacagtgcaggggaaagaatagtagacataatagcaacagacatacaaactaaag

SEQ ID NO: 16180 - DNA, 301 bp, Artificial Sequence
  Brca2.4_NTC.29
  crRNA array
  misc_feature (148)..(157): n is a, c, g, or t
cttggctttatatatcttgtggaaaggacgaaacaccgtaatttctactaagtgtagatgaaacgccgtatatatagagtaatttctactaagtgtagatcgcgatctataccgtctatataatttctactaagtgtagatttttttnnnnnnnnnnaagcttggcgtggatccgatatcaactagatcttgagacaaatggcagtattcatccacaattttaaaagaaaaggggggattggggggtacagtgcaggggaaagaatagtagacataatagcaacagacatacaaactaaag

SEQ ID NO: 16181 - DNA, 301 bp, Artificial Sequence
  Brca2.4_NTC.3
  crRNA array
  misc_feature (148)..(157): n is a, c, g, or t
cttggctttatatatcttgtggaaaggacgaaacaccgtaatttctactaagtgtagatgaaacgccgtatatatagagtaatttctactaagtgtagattcgacgcgagacgacgtacataatttctactaagtgtagatttttttnnnnnnnnnnaagcttggcgtggatccgatatcaactagatcttgagacaaatggcagtattcatccacaattttaaaagaaaaggggggattggggggtacagtgcaggggaaagaatagtagacataatagcaacagacatacaaactaaag

SEQ ID NO: 16182 - DNA, 301 bp, Artificial Sequence
  Brca2.4_NTC.30
  crRNA array
  misc_feature (148)..(157): n is a, c, g, or t
cttggctttatatatcttgtggaaaggacgaaacaccgtaatttctactaagtgtagatgaaacgccgtatatatagagtaatttctactaagtgtagatcgatcgtacgggtgtcctaataatttctactaagtgtagatttttttnnnnnnnnnnaagcttggcgtggatccgatatcaactagatcttgagacaaatggcagtattcatccacaattttaaaagaaaaggggggattggggggtacagtgcaggggaaagaatagtagacataatagcaacagacatacaaactaaag

SEQ ID NO: 16183 - DNA, 301 bp, Artificial Sequence
  Brca2.4_NTC.31
  crRNA array
  misc_feature (148)..(157): n is a, c, g, or t
cttggctttatatatcttgtggaaaggacgaaacaccgtaatttctactaagtgtagatgaaacgccgtatatatagagtaatttctactaagtgtagatgccgaccgcgtgattgtaggtaatttctactaagtgtagatttttttnnnnnnnnnnaagcttggcgtggatccgatatcaactagatcttgagacaaatggcagtattcatccacaattttaaaagaaaaggggggattggggggtacagtgcaggggaaagaatagtagacataatagcaacagacatacaaactaaag

SEQ ID NO: 16184 - DNA, 301 bp, Artificial Sequence
  Brca2.4_NTC.32
  crRNA array
  misc_feature (148)..(157): n is a, c, g, or t
cttggctttatatatcttgtggaaaggacgaaacaccgtaatttctactaagtgtagatgaaacgccgtatatatagagtaatttctactaagtgtagatgcacgttacgcccgggtcactaatttctactaagtgtagatttttttnnnnnnnnnnaagcttggcgtggatccgatatcaactagatcttgagacaaatggcagtattcatccacaattttaaaagaaaaggggggattggggggtacagtgcaggggaaagaatagtagacataatagcaacagacatacaaactaaag

SEQ ID NO: 16185 - DNA, 301 bp, Artificial Sequence
  Brca2.4_NTC.33
  crRNA array
  misc_feature (148)..(157): n is a, c, g, or t
cttggctttatatatcttgtggaaaggacgaaacaccgtaatttctactaagtgtagatgaaacgccgtatatatagagtaatttctactaagtgtagattaagcgaccgacgcattcgctaatttctactaagtgtagatttttttnnnnnnnnnnaagcttggcgtggatccgatatcaactagatcttgagacaaatggcagtattcatccacaattttaaaagaaaaggggggattggggggtacagtgcaggggaaagaatagtagacataatagcaacagacatacaaactaaag

SEQ ID NO: 16186 - DNA, 301 bp, Artificial Sequence
  Brca2.4_NTC.34
  crRNA array
  misc_feature (148)..(157): n is a, c, g, or t
cttggctttatatatcttgtggaaaggacgaaacaccgtaatttctactaagtgtagatgaaacgccgtatatatagagtaatttctactaagtgtagattagcgttcgacacgtgaaactaatttctactaagtgtagatttttttnnnnnnnnnnaagcttggcgtggatccgatatcaactagatcttgagacaaatggcagtattcatccacaattttaaaagaaaaggggggattggggggtacagtgcaggggaaagaatagtagacataatagcaacagacatacaaactaaag

SEQ ID NO: 16187 - DNA, 301 bp, Artificial Sequence
  Brca2.4_NTC.35
  crRNA array
  misc_feature (148)..(157): n is a, c, g, or t
cttggctttatatatcttgtggaaaggacgaaacaccgtaatttctactaagtgtagatgaaacgccgtatatatagagtaatttctactaagtgtagattggcgcgtaatcgctattcgtaatttctactaagtgtagatttttttnnnnnnnnnnaagcttggcgtggatccgatatcaactagatcttgagacaaatggcagtattcatccacaattttaaaagaaaaggggggattggggggtacagtgcaggggaaagaatagtagacataatagcaacagacatacaaactaaag

SEQ ID NO: 16188 - DNA, 301 bp, Artificial Sequence
  Brca2.4_NTC.36
  crRNA array
  misc_feature (148)..(157): n is a, c, g, or t
cttggctttatatatcttgtggaaaggacgaaacaccgtaatttctactaagtgtagatgaaacgccgtatatatagagtaatttctactaagtgtagatcaacccgccgtagcgggccttaatttctactaagtgtagatttttttnnnnnnnnnnaagcttggcgtggatccgatatcaactagatcttgagacaaatggcagtattcatccacaattttaaaagaaaaggggggattggggggtacagtgcaggggaaagaatagtagacataatagcaacagacatacaaactaaag

SEQ ID NO: 16189 - DNA, 301 bp, Artificial Sequence
  Brca2.4_NTC.37
  crRNA array
  misc_feature (148)..(157): n is a, c, g, or t
cttggctttatatatcttgtggaaaggacgaaacaccgtaatttctactaagtgtagatgaaacgccgtatatatagagtaatttctactaagtgtagattttgcgttgacgcgattacttaatttctactaagtgtagatttttttnnnnnnnnnnaagcttggcgtggatccgatatcaactagatcttgagacaaatggcagtattcatccacaattttaaaagaaaaggggggattggggggtacagtgcaggggaaagaatagtagacataatagcaacagacatacaaactaaag

SEQ ID NO: 16190 - DNA, 301 bp, Artificial Sequence
  Brca2.4_NTC.38
  crRNA array
  misc_feature (148)..(157): n is a, c, g, or t
cttggctttatatatcttgtggaaaggacgaaacaccgtaatttctactaagtgtagatgaaacgccgtatatatagagtaatttctactaagtgtagataacggagcgcgatactaccataatttctactaagtgtagatttttttnnnnnnnnnnaagcttggcgtggatccgatatcaactagatcttgagacaaatggcagtattcatccacaattttaaaagaaaaggggggattggggggtacagtgcaggggaaagaatagtagacataatagcaacagacatacaaactaaag

SEQ ID NO: 16191 - DNA, 301 bp, Artificial Sequence
  Brca2.4_NTC.39
  crRNA array
  misc_feature (148)..(157): n is a, c, g, or t
cttggctttatatatcttgtggaaaggacgaaacaccgtaatttctactaagtgtagatgaaacgccgtatatatagagtaatttctactaagtgtagatccggacgttataacgtttcttaatttctactaagtgtagatttttttnnnnnnnnnnaagcttggcgtggatccgatatcaactagatcttgagacaaatggcagtattcatccacaattttaaaagaaaaggggggattggggggtacagtgcaggggaaagaatagtagacataatagcaacagacatacaaactaaag

SEQ ID NO: 16192 - DNA, 301 bp, Artificial Sequence
  Brca2.4_NTC.4
  crRNA array
  misc_feature (148)..(157): n is a, c, g, or t
cttggctttatatatcttgtggaaaggacgaaacaccgtaatttctactaagtgtagatgaaacgccgtatatatagagtaatttctactaagtgtagatatacccgtcgcgaacgtgagtaatttctactaagtgtagatttttttnnnnnnnnnnaagcttggcgtggatccgatatcaactagatcttgagacaaatggcagtattcatccacaattttaaaagaaaaggggggattggggggtacagtgcaggggaaagaatagtagacataatagcaacagacatacaaactaaag

SEQ ID NO: 16193 - DNA, 301 bp, Artificial Sequence
  Brca2.4_NTC.40
  crRNA array
  misc_feature (148)..(157): n is a, c, g, or t
cttggctttatatatcttgtggaaaggacgaaacaccgtaatttctactaagtgtagatgaaacgccgtatatatagagtaatttctactaagtgtagatattcgcgaacccggccggaataatttctactaagtgtagatttttttnnnnnnnnnnaagcttggcgtggatccgatatcaactagatcttgagacaaatggcagtattcatccacaattttaaaagaaaaggggggattggggggtacagtgcaggggaaagaatagtagacataatagcaacagacatacaaactaaag

SEQ ID NO: 16194 - DNA, 301 bp, Artificial Sequence
  Brca2.4_NTC.41
  crRNA array
  misc_feature (148)..(157): n is a, c, g, or t
cttggctttatatatcttgtggaaaggacgaaacaccgtaatttctactaagtgtagatgaaacgccgtatatatagagtaatttctactaagtgtagatttgatggcgcgacgcgttattaatttctactaagtgtagatttttttnnnnnnnnnnaagcttggcgtggatccgatatcaactagatcttgagacaaatggcagtattcatccacaattttaaaagaaaaggggggattggggggtacagtgcaggggaaagaatagtagacataatagcaacagacatacaaactaaag

SEQ ID NO: 16195 - DNA, 301 bp, Artificial Sequence
  Brca2.4_NTC.42
  crRNA array
  misc_feature (148)..(157): n is a, c, g, or t
cttggctttatatatcttgtggaaaggacgaaacaccgtaatttctactaagtgtagatgaaacgccgtatatatagagtaatttctactaagtgtagatggtcaaatcgcggcgataactaatttctactaagtgtagatttttttnnnnnnnnnnaagcttggcgtggatccgatatcaactagatcttgagacaaatggcagtattcatccacaattttaaaagaaaaggggggattggggggtacagtgcaggggaaagaatagtagacataatagcaacagacatacaaactaaag

SEQ ID NO: 16196 - DNA, 301 bp, Artificial Sequence
  Brca2.4_NTC.43
  crRNA array
  misc_feature (148)..(157): n is a, c, g, or t
cttggctttatatatcttgtggaaaggacgaaacaccgtaatttctactaagtgtagatgaaacgccgtatatatagagtaatttctactaagtgtagatcgactcgcgcattgaactggtaatttctactaagtgtagatttttttnnnnnnnnnnaagcttggcgtggatccgatatcaactagatcttgagacaaatggcagtattcatccacaattttaaaagaaaaggggggattggggggtacagtgcaggggaaagaatagtagacataatagcaacagacatacaaactaaag

SEQ ID NO: 16197 - DNA, 301 bp, Artificial Sequence
  Brca2.4_NTC.44
  crRNA array
  misc_feature (148)..(157): n is a, c, g, or t
cttggctttatatatcttgtggaaaggacgaaacaccgtaatttctactaagtgtagatgaaacgccgtatatatagagtaatttctactaagtgtagatagcgtcgtacgatttatcgttaatttctactaagtgtagatttttttnnnnnnnnnnaagcttggcgtggatccgatatcaactagatcttgagacaaatggcagtattcatccacaattttaaaagaaaaggggggattggggggtacagtgcaggggaaagaatagtagacataatagcaacagacatacaaactaaag

SEQ ID NO: 16198 - DNA, 301 bp, Artificial Sequence
  Brca2.4_NTC.45
  crRNA array
  misc_feature (148)..(157): n is a, c, g, or t
cttggctttatatatcttgtggaaaggacgaaacaccgtaatttctactaagtgtagatgaaacgccgtatatatagagtaatttctactaagtgtagatcggaacgcgtgatactagggtaatttctactaagtgtagatttttttnnnnnnnnnnaagcttggcgtggatccgatatcaactagatcttgagacaaatggcagtattcatccacaattttaaaagaaaaggggggattggggggtacagtgcaggggaaagaatagtagacataatagcaacagacatacaaactaaag

SEQ ID NO: 16199 - DNA, 301 bp, Artificial Sequence
  Brca2.4_NTC.46
  crRNA array
  misc_feature (148)..(157): n is a, c, g, or t
cttggctttatatatcttgtggaaaggacgaaacaccgtaatttctactaagtgtagatgaaacgccgtatatatagagtaatttctactaagtgtagatagcgggtcgtagacgcgcggtaatttctactaagtgtagatttttttnnnnnnnnnnaagcttggcgtggatccgatatcaactagatcttgagacaaatggcagtattcatccacaattttaaaagaaaaggggggattggggggtacagtgcaggggaaagaatagtagacataatagcaacagacatacaaactaaag

SEQ ID NO: 16200 - DNA, 301 bp, Artificial Sequence
  Brca2.4_NTC.47
  crRNA array
  misc_feature (148)..(157): n is a, c, g, or t
cttggctttatatatcttgtggaaaggacgaaacaccgtaatttctactaagtgtagatgaaacgccgtatatatagagtaatttctactaagtgtagattctcgtatcgcgattgttaataatttctactaagtgtagatttttttnnnnnnnnnnaagcttggcgtggatccgatatcaactagatcttgagacaaatggcagtattcatccacaattttaaaagaaaaggggggattggggggtacagtgcaggggaaagaatagtagacataatagcaacagacatacaaactaaag

SEQ ID NO: 16201 - DNA, 301 bp, Artificial Sequence
  Brca2.4_NTC.48
  crRNA array
  misc_feature (148)..(157): n is a, c, g, or t
cttggctttatatatcttgtggaaaggacgaaacaccgtaatttctactaagtgtagatgaaacgccgtatatatagagtaatttctactaagtgtagatcggtcgactacggctgttagtaatttctactaagtgtagatttttttnnnnnnnnnnaagcttggcgtggatccgatatcaactagatcttgagacaaatggcagtattcatccacaattttaaaagaaaaggggggattggggggtacagtgcaggggaaagaatagtagacataatagcaacagacatacaaactaaag

SEQ ID NO: 16202 - DNA, 301 bp, Artificial Sequence
  Brca2.4_NTC.49
  crRNA array
  misc_feature (148)..(157): n is a, c, g, or t
cttggctttatatatcttgtggaaaggacgaaacaccgtaatttctactaagtgtagatgaaacgccgtatatatagagtaatttctactaagtgtagattcggggcgcgtcaactgaattaatttctactaagtgtagatttttttnnnnnnnnnnaagcttggcgtggatccgatatcaactagatcttgagacaaatggcagtattcatccacaattttaaaagaaaaggggggattggggggtacagtgcaggggaaagaatagtagacataatagcaacagacatacaaactaaag

SEQ ID NO: 16203 - DNA, 301 bp, Artificial Sequence
  Brca2.4_NTC.5
  crRNA array
  misc_feature (148)..(157): n is a, c, g, or t
cttggctttatatatcttgtggaaaggacgaaacaccgtaatttctactaagtgtagatgaaacgccgtatatatagagtaatttctactaagtgtagatgcttacgcgtcgcgaatgtataatttctactaagtgtagatttttttnnnnnnnnnnaagcttggcgtggatccgatatcaactagatcttgagacaaatggcagtattcatccacaattttaaaagaaaaggggggattggggggtacagtgcaggggaaagaatagtagacataatagcaacagacatacaaactaaag

SEQ ID NO: 16204 - DNA, 301 bp, Artificial Sequence
  Brca2.4_NTC.50
  crRNA array
  misc_feature (148)..(157): n is a, c, g, or t
cttggctttatatatcttgtggaaaggacgaaacaccgtaatttctactaagtgtagatgaaacgccgtatatatagagtaatttctactaagtgtagatattgccgctcgcgcaaaatctaatttctactaagtgtagatttttttnnnnnnnnnnaagcttggcgtggatccgatatcaactagatcttgagacaaatggcagtattcatccacaattttaaaagaaaaggggggattggggggtacagtgcaggggaaagaatagtagacataatagcaacagacatacaaactaaag

SEQ ID NO: 16205 - DNA, 301 bp, Artificial Sequence
  Brca2.4_NTC.51
  crRNA array
  misc_feature (148)..(157): n is a, c, g, or t
cttggctttatatatcttgtggaaaggacgaaacaccgtaatttctactaagtgtagatgaaacgccgtatatatagagtaatttctactaagtgtagattaacgcgcaacacgccaatgtaatttctactaagtgtagatttttttnnnnnnnnnnaagcttggcgtggatccgatatcaactagatcttgagacaaatggcagtattcatccacaattttaaaagaaaaggggggattggggggtacagtgcaggggaaagaatagtagacataatagcaacagacatacaaactaaag

SEQ ID NO: 16206 - DNA, 301 bp, Artificial Sequence
  Brca2.4_NTC.6
  crRNA array
  misc_feature (148)..(157): n is a, c, g, or t
cttggctttatatatcttgtggaaaggacgaaacaccgtaatttctactaagtgtagatgaaacgccgtatatatagagtaatttctactaagtgtagatcgaatcgcgcctacgggaattaatttctactaagtgtagatttttttnnnnnnnnnnaagcttggcgtggatccgatatcaactagatcttgagacaaatggcagtattcatccacaattttaaaagaaaaggggggattggggggtacagtgcaggggaaagaatagtagacataatagcaacagacatacaaactaaag

SEQ ID NO: 16207 - DNA, 301 bp, Artificial Sequence
  Brca2.4_NTC.7
  crRNA array
  misc_feature (148)..(157): n is a, c, g, or t
cttggctttatatatcttgtggaaaggacgaaacaccgtaatttctactaagtgtagatgaaacgccgtatatatagagtaatttctactaagtgtagatcgccgaacggataagactattaatttctactaagtgtagatttttttnnnnnnnnnnaagcttggcgtggatccgatatcaactagatcttgagacaaatggcagtattcatccacaattttaaaagaaaaggggggattggggggtacagtgcaggggaaagaatagtagacataatagcaacagacatacaaactaaag

SEQ ID NO: 16208 - DNA, 301 bp, Artificial Sequence
  Brca2.4_NTC.8
  crRNA array
  misc_feature (148)..(157): n is a, c, g, or t
cttggctttatatatcttgtggaaaggacgaaacaccgtaatttctactaagtgtagatgaaacgccgtatatatagagtaatttctactaagtgtagatcgaccgaggttacgctgggataatttctactaagtgtagatttttttnnnnnnnnnnaagcttggcgtggatccgatatcaactagatcttgagacaaatggcagtattcatccacaattttaaaagaaaaggggggattggggggtacagtgcaggggaaagaatagtagacataatagcaacagacatacaaactaaag

SEQ ID NO: 16209 - DNA, 301 bp, Artificial Sequence
  Brca2.4_NTC.9
  crRNA array
  misc_feature (148)..(157): n is a, c, g, or t
cttggctttatatatcttgtggaaaggacgaaacaccgtaatttctactaagtgtagatgaaacgccgtatatatagagtaatttctactaagtgtagatatcgccgtacggctatggcataatttctactaagtgtagatttttttnnnnnnnnnnaagcttggcgtggatccgatatcaactagatcttgagacaaatggcagtattcatccacaattttaaaagaaaaggggggattggggggtacagtgcaggggaaagaatagtagacataatagcaacagacatacaaactaaag

SEQ ID NO: 16210 - DNA, 301 bp, Artificial Sequence
  Cdkn2a.1_NTC.0
  crRNA array
  misc_feature (148)..(157): n is a, c, g, or t
cttggctttatatatcttgtggaaaggacgaaacaccgtaatttctactaagtgtagatcaatcacgggagggagcagataatttctactaagtgtagattatagcgtcgcgcgctaatttaatttctactaagtgtagatttttttnnnnnnnnnnaagcttggcgtggatccgatatcaactagatcttgagacaaatggcagtattcatccacaattttaaaagaaaaggggggattggggggtacagtgcaggggaaagaatagtagacataatagcaacagacatacaaactaaag

SEQ ID NO: 16211 - DNA, 301 bp, Artificial Sequence
  Cdkn2a.1_NTC.1
  crRNA array
  misc_feature (148)..(157): n is a, c, g, or t
cttggctttatatatcttgtggaaaggacgaaacaccgtaatttctactaagtgtagatcaatcacgggagggagcagataatttctactaagtgtagatcgcgtaaccgttccggctcctaatttctactaagtgtagatttttttnnnnnnnnnnaagcttggcgtggatccgatatcaactagatcttgagacaaatggcagtattcatccacaattttaaaagaaaaggggggattggggggtacagtgcaggggaaagaatagtagacataatagcaacagacatacaaactaaag

SEQ ID NO: 16212 - DNA, 301 bp, Artificial Sequence
  Cdkn2a.1_NTC.10
  crRNA array
  misc_feature (148)..(157): n is a, c, g, or t
cttggctttatatatcttgtggaaaggacgaaacaccgtaatttctactaagtgtagatcaatcacgggagggagcagataatttctactaagtgtagatcgctaagttcgcgcgggccgtaatttctactaagtgtagatttttttnnnnnnnnnnaagcttggcgtggatccgatatcaactagatcttgagacaaatggcagtattcatccacaattttaaaagaaaaggggggattggggggtacagtgcaggggaaagaatagtagacataatagcaacagacatacaaactaaag

SEQ ID NO: 16213 - DNA, 301 bp, Artificial Sequence
  Cdkn2a.1_NTC.11
  crRNA array
  misc_feature (148)..(157): n is a, c, g, or t
cttggctttatatatcttgtggaaaggacgaaacaccgtaatttctactaagtgtagatcaatcacgggagggagcagataatttctactaagtgtagatcgttcgtcgacgaagcaatctaatttctactaagtgtagatttttttnnnnnnnnnnaagcttggcgtggatccgatatcaactagatcttgagacaaatggcagtattcatccacaattttaaaagaaaaggggggattggggggtacagtgcaggggaaagaatagtagacataatagcaacagacatacaaactaaag

SEQ ID NO: 16214 - DNA, 301 bp, Artificial Sequence
  Cdkn2a.1_NTC.12
  crRNA array
  misc_feature (148)..(157): n is a, c, g, or t
cttggctttatatatcttgtggaaaggacgaaacaccgtaatttctactaagtgtagatcaatcacgggagggagcagataatttctactaagtgtagatcgccgacgattaatcaatagtaatttctactaagtgtagatttttttnnnnnnnnnnaagcttggcgtggatccgatatcaactagatcttgagacaaatggcagtattcatccacaattttaaaagaaaaggggggattggggggtacagtgcaggggaaagaatagtagacataatagcaacagacatacaaactaaag

SEQ ID NO: 16215 - DNA, 301 bp, Artificial Sequence
  Cdkn2a.1_NTC.13
  crRNA array
  misc_feature (148)..(157): n is a, c, g, or t
cttggctttatatatcttgtggaaaggacgaaacaccgtaatttctactaagtgtagatcaatcacgggagggagcagataatttctactaagtgtagatgaccgttgtatcgcgatcaataatttctactaagtgtagatttttttnnnnnnnnnnaagcttggcgtggatccgatatcaactagatcttgagacaaatggcagtattcatccacaattttaaaagaaaaggggggattggggggtacagtgcaggggaaagaatagtagacataatagcaacagacatacaaactaaag

SEQ ID NO: 16216 - DNA, 301 bp, Artificial Sequence
  Cdkn2a.1_NTC.14
  crRNA array
  misc_feature (148)..(157): n is a, c, g, or t
cttggctttatatatcttgtggaaaggacgaaacaccgtaatttctactaagtgtagatcaatcacgggagggagcagataatttctactaagtgtagatccgttcgtgcgatagtgttttaatttctactaagtgtagatttttttnnnnnnnnnnaagcttggcgtggatccgatatcaactagatcttgagacaaatggcagtattcatccacaattttaaaagaaaaggggggattggggggtacagtgcaggggaaagaatagtagacataatagcaacagacatacaaactaaag

SEQ ID NO: 16217 - DNA, 301 bp, Artificial Sequence
  Cdkn2a.1_NTC.15
  crRNA array
  misc_feature (148)..(157): n is a, c, g, or t
cttggctttatatatcttgtggaaaggacgaaacaccgtaatttctactaagtgtagatcaatcacgggagggagcagataatttctactaagtgtagatgttgtcgtgccgcgaatttataatttctactaagtgtagatttttttnnnnnnnnnnaagcttggcgtggatccgatatcaactagatcttgagacaaatggcagtattcatccacaattttaaaagaaaaggggggattggggggtacagtgcaggggaaagaatagtagacataatagcaacagacatacaaactaaag

SEQ ID NO: 16218 - DNA, 301 bp, Artificial Sequence
  Cdkn2a.1_NTC.16
  crRNA array
  misc_feature (148)..(157): n is a, c, g, or t
cttggctttatatatcttgtggaaaggacgaaacaccgtaatttctactaagtgtagatcaatcacgggagggagcagataatttctactaagtgtagatcggtacgttagacgaaaatttaatttctactaagtgtagatttttttnnnnnnnnnnaagcttggcgtggatccgatatcaactagatcttgagacaaatggcagtattcatccacaattttaaaagaaaaggggggattggggggtacagtgcaggggaaagaatagtagacataatagcaacagacatacaaactaaag

SEQ ID NO: 16219 - DNA, 301 bp, Artificial Sequence
  Cdkn2a.1_NTC.17
  crRNA array
  misc_feature (148)..(157): n is a, c, g, or t
cttggctttatatatcttgtggaaaggacgaaacaccgtaatttctactaagtgtagatcaatcacgggagggagcagataatttctactaagtgtagattatcgaacgctatcgaacgttaatttctactaagtgtagatttttttnnnnnnnnnnaagcttggcgtggatccgatatcaactagatcttgagacaaatggcagtattcatccacaattttaaaagaaaaggggggattggggggtacagtgcaggggaaagaatagtagacataatagcaacagacatacaaactaaag

SEQ ID NO: 16220 - DNA, 301 bp, Artificial Sequence
  Cdkn2a.1_NTC.18
  crRNA array
  misc_feature (148)..(157): n is a, c, g, or t
cttggctttatatatcttgtggaaaggacgaaacaccgtaatttctactaagtgtagatcaatcacgggagggagcagataatttctactaagtgtagattccggttacgaccggcaaaataatttctactaagtgtagatttttttnnnnnnnnnnaagcttggcgtggatccgatatcaactagatcttgagacaaatggcagtattcatccacaattttaaaagaaaaggggggattggggggtacagtgcaggggaaagaatagtagacataatagcaacagacatacaaactaaag

SEQ ID NO: 16221 - DNA, 301 bp, Artificial Sequence
  Cdkn2a.1_NTC.19
  crRNA array
  misc_feature (148)..(157): n is a, c, g, or t
cttggctttatatatcttgtggaaaggacgaaacaccgtaatttctactaagtgtagatcaatcacgggagggagcagataatttctactaagtgtagatcgtcgtagaacgatacccgataatttctactaagtgtagatttttttnnnnnnnnnnaagcttggcgtggatccgatatcaactagatcttgagacaaatggcagtattcatccacaattttaaaagaaaaggggggattggggggtacagtgcaggggaaagaatagtagacataatagcaacagacatacaaactaaag

SEQ ID NO: 16222 - DNA, 301 bp, Artificial Sequence
  Cdkn2a.1_NTC.2
  crRNA array
  misc_feature (148)..(157): n is a, c, g, or t
cttggctttatatatcttgtggaaaggacgaaacaccgtaatttctactaagtgtagatcaatcacgggagggagcagataatttctactaagtgtagatttatgtcgcgccgcgacccgtaatttctactaagtgtagatttttttnnnnnnnnnnaagcttggcgtggatccgatatcaactagatcttgagacaaatggcagtattcatccacaattttaaaagaaaaggggggattggggggtacagtgcaggggaaagaatagtagacataatagcaacagacatacaaactaaag

SEQ ID NO: 16223 - DNA, 301 bp, Artificial Sequence
  Cdkn2a.1_NTC.20
  crRNA array
  misc_feature (148)..(157): n is a, c, g, or t
cttggctttatatatcttgtggaaaggacgaaacaccgtaatttctactaagtgtagatcaatcacgggagggagcagataatttctactaagtgtagatattccggcgcgaccagaagataatttctactaagtgtagatttttttnnnnnnnnnnaagcttggcgtggatccgatatcaactagatcttgagacaaatggcagtattcatccacaattttaaaagaaaaggggggattggggggtacagtgcaggggaaagaatagtagacataatagcaacagacatacaaactaaag

SEQ ID NO: 16224 - DNA, 301 bp, Artificial Sequence
  Cdkn2a.1_NTC.21
  crRNA array
  misc_feature (148)..(157): n is a, c, g, or t
cttggctttatatatcttgtggaaaggacgaaacaccgtaatttctactaagtgtagatcaatcacgggagggagcagataatttctactaagtgtagatgtataacttcgcgcggtccgtaatttctactaagtgtagatttttttnnnnnnnnnnaagcttggcgtggatccgatatcaactagatcttgagacaaatggcagtattcatccacaattttaaaagaaaaggggggattggggggtacagtgcaggggaaagaatagtagacataatagcaacagacatacaaactaaag

SEQ ID NO: 16225 - DNA, 301 bp, Artificial Sequence
  Cdkn2a.1_NTC.22
  crRNA array
  misc_feature (148)..(157): n is a, c, g, or t
cttggctttatatatcttgtggaaaggacgaaacaccgtaatttctactaagtgtagatcaatcacgggagggagcagataatttctactaagtgtagatgcgcgtcaacgtaatgtgcctaatttctactaagtgtagatttttttnnnnnnnnnnaagcttggcgtggatccgatatcaactagatcttgagacaaatggcagtattcatccacaattttaaaagaaaaggggggattggggggtacagtgcaggggaaagaatagtagacataatagcaacagacatacaaactaaag

SEQ ID NO: 16226 - DNA, 301 bp, Artificial Sequence
  Cdkn2a.1_NTC.23
  crRNA array
  misc_feature (148)..(157): n is a, c, g, or t
cttggctttatatatcttgtggaaaggacgaaacaccgtaatttctactaagtgtagatcaatcacgggagggagcagataatttctactaagtgtagatacgcgctattatcgtaggtgtaatttctactaagtgtagatttttttnnnnnnnnnnaagcttggcgtggatccgatatcaactagatcttgagacaaatggcagtattcatccacaattttaaaagaaaaggggggattggggggtacagtgcaggggaaagaatagtagacataatagcaacagacatacaaactaaag

SEQ ID NO: 16227 - DNA, 301 bp, Artificial Sequence
  Cdkn2a.1_NTC.24
  crRNA array
  misc_feature (148)..(157): n is a, c, g, or t
cttggctttatatatcttgtggaaaggacgaaacaccgtaatttctactaagtgtagatcaatcacgggagggagcagataatttctactaagtgtagatactatcgacgttcgtcccggtaatttctactaagtgtagatttttttnnnnnnnnnnaagcttggcgtggatccgatatcaactagatcttgagacaaatggcagtattcatccacaattttaaaagaaaaggggggattggggggtacagtgcaggggaaagaatagtagacataatagcaacagacatacaaactaaag

SEQ ID NO: 16228 - DNA, 301 bp, Artificial Sequence
  Cdkn2a.1_NTC.25
  crRNA array
  misc_feature (148)..(157): n is a, c, g, or t
cttggctttatatatcttgtggaaaggacgaaacaccgtaatttctactaagtgtagatcaatcacgggagggagcagataatttctactaagtgtagattcgcgttatcgtgccgtgcgtaatttctactaagtgtagatttttttnnnnnnnnnnaagcttggcgtggatccgatatcaactagatcttgagacaaatggcagtattcatccacaattttaaaagaaaaggggggattggggggtacagtgcaggggaaagaatagtagacataatagcaacagacatacaaactaaag

SEQ ID NO: 16229 - DNA, 301 bp, Artificial Sequence
  Cdkn2a.1_NTC.26
  crRNA array
  misc_feature (148)..(157): n is a, c, g, or t
cttggctttatatatcttgtggaaaggacgaaacaccgtaatttctactaagtgtagatcaatcacgggagggagcagataatttctactaagtgtagatcgcgacggcggttttaacactaatttctactaagtgtagatttttttnnnnnnnnnnaagcttggcgtggatccgatatcaactagatcttgagacaaatggcagtattcatccacaattttaaaagaaaaggggggattggggggtacagtgcaggggaaagaatagtagacataatagcaacagacatacaaactaaag

SEQ ID NO: 16230 - DNA, 301 bp, Artificial Sequence
  Cdkn2a.1_NTC.27
  crRNA array
  misc_feature (148)..(157): n is a, c, g, or t
cttggctttatatatcttgtggaaaggacgaaacaccgtaatttctactaagtgtagatcaatcacgggagggagcagataatttctactaagtgtagatgtcgcgttgcgaccggcgcttaatttctactaagtgtagatttttttnnnnnnnnnnaagcttggcgtggatccgatatcaactagatcttgagacaaatggcagtattcatccacaattttaaaagaaaaggggggattggggggtacagtgcaggggaaagaatagtagacataatagcaacagacatacaaactaaag

SEQ ID NO: 16231 - DNA, 301 bp, Artificial Sequence
  Cdkn2a.1_NTC.28
  crRNA array
  misc_feature (148)..(157): n is a, c, g, or t
cttggctttatatatcttgtggaaaggacgaaacaccgtaatttctactaagtgtagatcaatcacgggagggagcagataatttctactaagtgtagataccgctaatcggcgtaaacttaatttctactaagtgtagatttttttnnnnnnnnnnaagcttggcgtggatccgatatcaactagatcttgagacaaatggcagtattcatccacaattttaaaagaaaaggggggattggggggtacagtgcaggggaaagaatagtagacataatagcaacagacatacaaactaaag

SEQ ID NO: 16232 - DNA, 301 bp, Artificial Sequence
  Cdkn2a.1_NTC.29
  crRNA array
  misc_feature (148)..(157): n is a, c, g, or t
cttggctttatatatcttgtggaaaggacgaaacaccgtaatttctactaagtgtagatcaatcacgggagggagcagataatttctactaagtgtagatcgcgatctataccgtctatataatttctactaagtgtagatttttttnnnnnnnnnnaagcttggcgtggatccgatatcaactagatcttgagacaaatggcagtattcatccacaattttaaaagaaaaggggggattggggggtacagtgcaggggaaagaatagtagacataatagcaacagacatacaaactaaag

SEQ ID NO: 16233 - DNA, 301 bp, Artificial Sequence
  Cdkn2a.1_NTC.3
  crRNA array
  misc_feature (148)..(157): n is a, c, g, or t
cttggctttatatatcttgtggaaaggacgaaacaccgtaatttctactaagtgtagatcaatcacgggagggagcagataatttctactaagtgtagattcgacgcgagacgacgtacataatttctactaagtgtagatttttttnnnnnnnnnnaagcttggcgtggatccgatatcaactagatcttgagacaaatggcagtattcatccacaattttaaaagaaaaggggggattggggggtacagtgcaggggaaagaatagtagacataatagcaacagacatacaaactaaag

SEQ ID NO: 16234 - DNA, 301 bp, Artificial Sequence
  Cdkn2a.1_NTC.30
  crRNA array
  misc_feature (148)..(157): n is a, c, g, or t
cttggctttatatatcttgtggaaaggacgaaacaccgtaatttctactaagtgtagatcaatcacgggagggagcagataatttctactaagtgtagatcgatcgtacgggtgtcctaataatttctactaagtgtagatttttttnnnnnnnnnnaagcttggcgtggatccgatatcaactagatcttgagacaaatggcagtattcatccacaattttaaaagaaaaggggggattggggggtacagtgcaggggaaagaatagtagacataatagcaacagacatacaaactaaag

SEQ ID NO: 16235 - DNA, 301 bp, Artificial Sequence
  Cdkn2a.1_NTC.31
  crRNA array
  misc_feature (148)..(157): n is a, c, g, or t
cttggctttatatatcttgtggaaaggacgaaacaccgtaatttctactaagtgtagatcaatcacgggagggagcagataatttctactaagtgtagatgccgaccgcgtgattgtaggtaatttctactaagtgtagatttttttnnnnnnnnnnaagcttggcgtggatccgatatcaactagatcttgagacaaatggcagtattcatccacaattttaaaagaaaaggggggattggggggtacagtgcaggggaaagaatagtagacataatagcaacagacatacaaactaaag

SEQ ID NO: 16236 - DNA, 301 bp, Artificial Sequence
  Cdkn2a.1_NTC.32
  crRNA array
  misc_feature (148)..(157): n is a, c, g, or t
cttggctttatatatcttgtggaaaggacgaaacaccgtaatttctactaagtgtagatcaatcacgggagggagcagataatttctactaagtgtagatgcacgttacgcccgggtcactaatttctactaagtgtagatttttttnnnnnnnnnnaagcttggcgtggatccgatatcaactagatcttgagacaaatggcagtattcatccacaattttaaaagaaaaggggggattggggggtacagtgcaggggaaagaatagtagacataatagcaacagacatacaaactaaag

SEQ ID NO: 16237 - DNA, 301 bp, Artificial Sequence
  Cdkn2a.1_NTC.33
  crRNA array
  misc_feature (148)..(157): n is a, c, g, or t
cttggctttatatatcttgtggaaaggacgaaacaccgtaatttctactaagtgtagatcaatcacgggagggagcagataatttctactaagtgtagattaagcgaccgacgcattcgctaatttctactaagtgtagatttttttnnnnnnnnnnaagcttggcgtggatccgatatcaactagatcttgagacaaatggcagtattcatccacaattttaaaagaaaaggggggattggggggtacagtgcaggggaaagaatagtagacataatagcaacagacatacaaactaaag

SEQ ID NO: 16238 - DNA, 301 bp, Artificial Sequence
  Cdkn2a.1_NTC.34
  crRNA array
  misc_feature (148)..(157): n is a, c, g, or t
cttggctttatatatcttgtggaaaggacgaaacaccgtaatttctactaagtgtagatcaatcacgggagggagcagataatttctactaagtgtagattagcgttcgacacgtgaaactaatttctactaagtgtagatttttttnnnnnnnnnnaagcttggcgtggatccgatatcaactagatcttgagacaaatggcagtattcatccacaattttaaaagaaaaggggggattggggggtacagtgcaggggaaagaatagtagacataatagcaacagacatacaaactaaag

SEQ ID NO: 16239 - DNA, 301 bp, Artificial Sequence
  Cdkn2a.1_NTC.35
  crRNA array
  misc_feature (148)..(157): n is a, c, g, or t
cttggctttatatatcttgtggaaaggacgaaacaccgtaatttctactaagtgtagatcaatcacgggagggagcagataatttctactaagtgtagattggcgcgtaatcgctattcgtaatttctactaagtgtagatttttttnnnnnnnnnnaagcttggcgtggatccgatatcaactagatcttgagacaaatggcagtattcatccacaattttaaaagaaaaggggggattggggggtacagtgcaggggaaagaatagtagacataatagcaacagacatacaaactaaag

SEQ ID NO: 16240 - DNA, 301 bp, Artificial Sequence
  Cdkn2a.1_NTC.36
  crRNA array
  misc_feature (148)..(157): n is a, c, g, or t
cttggctttatatatcttgtggaaaggacgaaacaccgtaatttctactaagtgtagatcaatcacgggagggagcagataatttctactaagtgtagatcaacccgccgtagcgggccttaatttctactaagtgtagatttttttnnnnnnnnnnaagcttggcgtggatccgatatcaactagatcttgagacaaatggcagtattcatccacaattttaaaagaaaaggggggattggggggtacagtgcaggggaaagaatagtagacataatagcaacagacatacaaactaaag

SEQ ID NO: 16241 - DNA, 301 bp, Artificial Sequence
  Cdkn2a.1_NTC.37
  crRNA array
  misc_feature (148)..(157): n is a, c, g, or t
cttggctttatatatcttgtggaaaggacgaaacaccgtaatttctactaagtgtagatcaatcacgggagggagcagataatttctactaagtgtagattttgcgttgacgcgattacttaatttctactaagtgtagatttttttnnnnnnnnnnaagcttggcgtggatccgatatcaactagatcttgagacaaatggcagtattcatccacaattttaaaagaaaaggggggattggggggtacagtgcaggggaaagaatagtagacataatagcaacagacatacaaactaaag

SEQ ID NO: 16242 - DNA, 301 bp, Artificial Sequence
  Cdkn2a.1_NTC.38
  crRNA array
  misc_feature (148)..(157): n is a, c, g, or t
cttggctttatatatcttgtggaaaggacgaaacaccgtaatttctactaagtgtagatcaatcacgggagggagcagataatttctactaagtgtagataacggagcgcgatactaccataatttctactaagtgtagatttttttnnnnnnnnnnaagcttggcgtggatccgatatcaactagatcttgagacaaatggcagtattcatccacaattttaaaagaaaaggggggattggggggtacagtgcaggggaaagaatagtagacataatagcaacagacatacaaactaaag

SEQ ID NO: 16243 - DNA, 301 bp, Artificial Sequence
  Cdkn2a.1_NTC.39
  crRNA array
  misc_feature (148)..(157): n is a, c, g, or t
cttggctttatatatcttgtggaaaggacgaaacaccgtaatttctactaagtgtagatcaatcacgggagggagcagataatttctactaagtgtagatccggacgttataacgtttcttaatttctactaagtgtagatttttttnnnnnnnnnnaagcttggcgtggatccgatatcaactagatcttgagacaaatggcagtattcatccacaattttaaaagaaaaggggggattggggggtacagtgcaggggaaagaatagtagacataatagcaacagacatacaaactaaag

SEQ ID NO: 16244 - DNA, 301 bp, Artificial Sequence
  Cdkn2a.1_NTC.4
  crRNA array
  misc_feature (148)..(157): n is a, c, g, or t
cttggctttatatatcttgtggaaaggacgaaacaccgtaatttctactaagtgtagatcaatcacgggagggagcagataatttctactaagtgtagatatacccgtcgcgaacgtgagtaatttctactaagtgtagatttttttnnnnnnnnnnaagcttggcgtggatccgatatcaactagatcttgagacaaatggcagtattcatccacaattttaaaagaaaaggggggattggggggtacagtgcaggggaaagaatagtagacataatagcaacagacatacaaactaaag

SEQ ID NO: 16245 - DNA, 301 bp, Artificial Sequence
  Cdkn2a.1_NTC.40
  crRNA array
  misc_feature (148)..(157): n is a, c, g, or t
cttggctttatatatcttgtggaaaggacgaaacaccgtaatttctactaagtgtagatcaatcacgggagggagcagataatttctactaagtgtagatattcgcgaacccggccggaataatttctactaagtgtagatttttttnnnnnnnnnnaagcttggcgtggatccgatatcaactagatcttgagacaaatggcagtattcatccacaattttaaaagaaaaggggggattggggggtacagtgcaggggaaagaatagtagacataatagcaacagacatacaaactaaag

SEQ ID NO: 16246 - DNA, 301 bp, Artificial Sequence
  Cdkn2a.1_NTC.41
  crRNA array
  misc_feature (148)..(157): n is a, c, g, or t
cttggctttatatatcttgtggaaaggacgaaacaccgtaatttctactaagtgtagatcaatcacgggagggagcagataatttctactaagtgtagatttgatggcgcgacgcgttattaatttctactaagtgtagatttttttnnnnnnnnnnaagcttggcgtggatccgatatcaactagatcttgagacaaatggcagtattcatccacaattttaaaagaaaaggggggattggggggtacagtgcaggggaaagaatagtagacataatagcaacagacatacaaactaaag

SEQ ID NO: 16247 - DNA, 301 bp, Artificial Sequence
  Cdkn2a.1_NTC.42
  crRNA array
  misc_feature (148)..(157): n is a, c, g, or t
cttggctttatatatcttgtggaaaggacgaaacaccgtaatttctactaagtgtagatcaatcacgggagggagcagataatttctactaagtgtagatggtcaaatcgcggcgataactaatttctactaagtgtagatttttttnnnnnnnnnnaagcttggcgtggatccgatatcaactagatcttgagacaaatggcagtattcatccacaattttaaaagaaaaggggggattggggggtacagtgcaggggaaagaatagtagacataatagcaacagacatacaaactaaag

SEQ ID NO: 16248 - DNA, 301 bp, Artificial Sequence
  Cdkn2a.1_NTC.43
  crRNA array
  misc_feature (148)..(157): n is a, c, g, or t
cttggctttatatatcttgtggaaaggacgaaacaccgtaatttctactaagtgtagatcaatcacgggagggagcagataatttctactaagtgtagatcgactcgcgcattgaactggtaatttctactaagtgtagatttttttnnnnnnnnnnaagcttggcgtggatccgatatcaactagatcttgagacaaatggcagtattcatccacaattttaaaagaaaaggggggattggggggtacagtgcaggggaaagaatagtagacataatagcaacagacatacaaactaaag

SEQ ID NO: 16249 - DNA, 301 bp, Artificial Sequence
  Cdkn2a.1_NTC.44
  crRNA array
  misc_feature (148)..(157): n is a, c, g, or t
cttggctttatatatcttgtggaaaggacgaaacaccgtaatttctactaagtgtagatcaatcacgggagggagcagataatttctactaagtgtagatagcgtcgtacgatttatcgttaatttctactaagtgtagatttttttnnnnnnnnnnaagcttggcgtggatccgatatcaactagatcttgagacaaatggcagtattcatccacaattttaaaagaaaaggggggattggggggtacagtgcaggggaaagaatagtagacataatagcaacagacatacaaactaaag

SEQ ID NO: 16250 - DNA, 301 bp, Artificial Sequence
  Cdkn2a.1_NTC.45
  crRNA array
  misc_feature (148)..(157): n is a, c, g, or t
cttggctttatatatcttgtggaaaggacgaaacaccgtaatttctactaagtgtagatcaatcacgggagggagcagataatttctactaagtgtagatcggaacgcgtgatactagggtaatttctactaagtgtagatttttttnnnnnnnnnnaagcttggcgtggatccgatatcaactagatcttgagacaaatggcagtattcatccacaattttaaaagaaaaggggggattggggggtacagtgcaggggaaagaatagtagacataatagcaacagacatacaaactaaag

SEQ ID NO: 16251 - DNA, 301 bp, Artificial Sequence
  Cdkn2a.1_NTC.46
  crRNA array
  misc_feature (148)..(157): n is a, c, g, or t
cttggctttatatatcttgtggaaaggacgaaacaccgtaatttctactaagtgtagatcaatcacgggagggagcagataatttctactaagtgtagatagcgggtcgtagacgcgcggtaatttctactaagtgtagatttttttnnnnnnnnnnaagcttggcgtggatccgatatcaactagatcttgagacaaatggcagtattcatccacaattttaaaagaaaaggggggattggggggtacagtgcaggggaaagaatagtagacataatagcaacagacatacaaactaaag

SEQ ID NO: 16252 - DNA, 301 bp, Artificial Sequence
  Cdkn2a.1_NTC.47
  crRNA array
  misc_feature (148)..(157): n is a, c, g, or t
cttggctttatatatcttgtggaaaggacgaaacaccgtaatttctactaagtgtagatcaatcacgggagggagcagataatttctactaagtgtagattctcgtatcgcgattgttaataatttctactaagtgtagatttttttnnnnnnnnnnaagcttggcgtggatccgatatcaactagatcttgagacaaatggcagtattcatccacaattttaaaagaaaaggggggattggggggtacagtgcaggggaaagaatagtagacataatagcaacagacatacaaactaaag

SEQ ID NO: 16253 - DNA, 301 bp, Artificial Sequence
  Cdkn2a.1_NTC.48
  crRNA array
  misc_feature (148)..(157): n is a, c, g, or t
cttggctttatatatcttgtggaaaggacgaaacaccgtaatttctactaagtgtagatcaatcacgggagggagcagataatttctactaagtgtagatcggtcgactacggctgttagtaatttctactaagtgtagatttttttnnnnnnnnnnaagcttggcgtggatccgatatcaactagatcttgagacaaatggcagtattcatccacaattttaaaagaaaaggggggattggggggtacagtgcaggggaaagaatagtagacataatagcaacagacatacaaactaaag

SEQ ID NO: 16254 - DNA, 301 bp, Artificial Sequence
  Cdkn2a.1_NTC.49
  crRNA array
  misc_feature (148)..(157): n is a, c, g, or t
cttggctttatatatcttgtggaaaggacgaaacaccgtaatttctactaagtgtagatcaatcacgggagggagcagataatttctactaagtgtagattcggggcgcgtcaactgaattaatttctactaagtgtagatttttttnnnnnnnnnnaagcttggcgtggatccgatatcaactagatcttgagacaaatggcagtattcatccacaattttaaaagaaaaggggggattggggggtacagtgcaggggaaagaatagtagacataatagcaacagacatacaaactaaag

SEQ ID NO: 16255 - DNA, 301 bp, Artificial Sequence
  Cdkn2a.1_NTC.5
  crRNA array
  misc_feature (148)..(157): n is a, c, g, or t
cttggctttatatatcttgtggaaaggacgaaacaccgtaatttctactaagtgtagatcaatcacgggagggagcagataatttctactaagtgtagatgcttacgcgtcgcgaatgtataatttctactaagtgtagatttttttnnnnnnnnnnaagcttggcgtggatccgatatcaactagatcttgagacaaatggcagtattcatccacaattttaaaagaaaaggggggattggggggtacagtgcaggggaaagaatagtagacataatagcaacagacatacaaactaaag

SEQ ID NO: 16256 - DNA, 301 bp, Artificial Sequence
  Cdkn2a.1_NTC.50
  crRNA array
  misc_feature (148)..(157): n is a, c, g, or t
cttggctttatatatcttgtggaaaggacgaaacaccgtaatttctactaagtgtagatcaatcacgggagggagcagataatttctactaagtgtagatattgccgctcgcgcaaaatctaatttctactaagtgtagatttttttnnnnnnnnnnaagcttggcgtggatccgatatcaactagatcttgagacaaatggcagtattcatccacaattttaaaagaaaaggggggattggggggtacagtgcaggggaaagaatagtagacataatagcaacagacatacaaactaaag

SEQ ID NO: 16257 - DNA, 301 bp, Artificial Sequence
  Cdkn2a.1_NTC.51
  crRNA array
  misc_feature (148)..(157): n is a, c, g, or t
cttggctttatatatcttgtggaaaggacgaaacaccgtaatttctactaagtgtagatcaatcacgggagggagcagataatttctactaagtgtagattaacgcgcaacacgccaatgtaatttctactaagtgtagatttttttnnnnnnnnnnaagcttggcgtggatccgatatcaactagatcttgagacaaatggcagtattcatccacaattttaaaagaaaaggggggattggggggtacagtgcaggggaaagaatagtagacataatagcaacagacatacaaactaaag

SEQ ID NO: 16258 - DNA, 301 bp, Artificial Sequence
  Cdkn2a.1_NTC.6
  crRNA array
  misc_feature (148)..(157): n is a, c, g, or t
cttggctttatatatcttgtggaaaggacgaaacaccgtaatttctactaagtgtagatcaatcacgggagggagcagataatttctactaagtgtagatcgaatcgcgcctacgggaattaatttctactaagtgtagatttttttnnnnnnnnnnaagcttggcgtggatccgatatcaactagatcttgagacaaatggcagtattcatccacaattttaaaagaaaaggggggattggggggtacagtgcaggggaaagaatagtagacataatagcaacagacatacaaactaaag

SEQ ID NO: 16259 - DNA, 301 bp, Artificial Sequence
  Cdkn2a.1_NTC.7
  crRNA array
  misc_feature (148)..(157): n is a, c, g, or t
cttggctttatatatcttgtggaaaggacgaaacaccgtaatttctactaagtgtagatcaatcacgggagggagcagataatttctactaagtgtagatcgccgaacggataagactattaatttctactaagtgtagatttttttnnnnnnnnnnaagcttggcgtggatccgatatcaactagatcttgagacaaatggcagtattcatccacaattttaaaagaaaaggggggattggggggtacagtgcaggggaaagaatagtagacataatagcaacagacatacaaactaaag

SEQ ID NO: 16260 - DNA, 301 bp, Artificial Sequence
  Cdkn2a.1_NTC.8
  crRNA array
  misc_feature (148)..(157): n is a, c, g, or t
cttggctttatatatcttgtggaaaggacgaaacaccgtaatttctactaagtgtagatcaatcacgggagggagcagataatttctactaagtgtagatcgaccgaggttacgctgggataatttctactaagtgtagatttttttnnnnnnnnnnaagcttggcgtggatccgatatcaactagatcttgagacaaatggcagtattcatccacaattttaaaagaaaaggggggattggggggtacagtgcaggggaaagaatagtagacataatagcaacagacatacaaactaaag

SEQ ID NO: 16261 - DNA, 301 bp, Artificial Sequence
  Cdkn2a.1_NTC.9
  crRNA array
  misc_feature (148)..(157): n is a, c, g, or t
cttggctttatatatcttgtggaaaggacgaaacaccgtaatttctactaagtgtagatcaatcacgggagggagcagataatttctactaagtgtagatatcgccgtacggctatggcataatttctactaagtgtagatttttttnnnnnnnnnnaagcttggcgtggatccgatatcaactagatcttgagacaaatggcagtattcatccacaattttaaaagaaaaggggggattggggggtacagtgcaggggaaagaatagtagacataatagcaacagacatacaaactaaag

SEQ ID NO: 16262 - DNA, 301 bp, Artificial Sequence
  Cdkn2a.2_NTC.0
  crRNA array
  misc_feature (148)..(157): n is a, c, g, or t
cttggctttatatatcttgtggaaaggacgaaacaccgtaatttctactaagtgtagatgcccaacgccccgaactctttaatttctactaagtgtagattatagcgtcgcgcgctaatttaatttctactaagtgtagatttttttnnnnnnnnnnaagcttggcgtggatccgatatcaactagatcttgagacaaatggcagtattcatccacaattttaaaagaaaaggggggattggggggtacagtgcaggggaaagaatagtagacataatagcaacagacatacaaactaaag

SEQ ID NO: 16263 - DNA, 301 bp, Artificial Sequence
  Cdkn2a.2_NTC.1
  crRNA array
  misc_feature (148)..(157): n is a, c, g, or t
cttggctttatatatcttgtggaaaggacgaaacaccgtaatttctactaagtgtagatgcccaacgccccgaactctttaatttctactaagtgtagatcgcgtaaccgttccggctcctaatttctactaagtgtagatttttttnnnnnnnnnnaagcttggcgtggatccgatatcaactagatcttgagacaaatggcagtattcatccacaattttaaaagaaaaggggggattggggggtacagtgcaggggaaagaatagtagacataatagcaacagacatacaaactaaag

SEQ ID NO: 16264 - DNA, 301 bp, Artificial Sequence
  Cdkn2a.2_NTC.10
  crRNA array
  misc_feature (148)..(157): n is a, c, g, or t
cttggctttatatatcttgtggaaaggacgaaacaccgtaatttctactaagtgtagatgcccaacgccccgaactctttaatttctactaagtgtagatcgctaagttcgcgcgggccgtaatttctactaagtgtagatttttttnnnnnnnnnnaagcttggcgtggatccgatatcaactagatcttgagacaaatggcagtattcatccacaattttaaaagaaaaggggggattggggggtacagtgcaggggaaagaatagtagacataatagcaacagacatacaaactaaag

SEQ ID NO: 16265 - DNA, 301 bp, Artificial Sequence
  Cdkn2a.2_NTC.11
  crRNA array
  misc_feature (148)..(157): n is a, c, g, or t
cttggctttatatatcttgtggaaaggacgaaacaccgtaatttctactaagtgtagatgcccaacgccccgaactctttaatttctactaagtgtagatcgttcgtcgacgaagcaatctaatttctactaagtgtagatttttttnnnnnnnnnnaagcttggcgtggatccgatatcaactagatcttgagacaaatggcagtattcatccacaattttaaaagaaaaggggggattggggggtacagtgcaggggaaagaatagtagacataatagcaacagacatacaaactaaag

SEQ ID NO: 16266 - DNA, 301 bp, Artificial Sequence
  Cdkn2a.2_NTC.12
  crRNA array
  misc_feature (148)..(157): n is a, c, g, or t
cttggctttatatatcttgtggaaaggacgaaacaccgtaatttctactaagtgtagatgcccaacgccccgaactctttaatttctactaagtgtagatcgccgacgattaatcaatagtaatttctactaagtgtagatttttttnnnnnnnnnnaagcttggcgtggatccgatatcaactagatcttgagacaaatggcagtattcatccacaattttaaaagaaaaggggggattggggggtacagtgcaggggaaagaatagtagacataatagcaacagacatacaaactaaag

SEQ ID NO: 16267 - DNA, 301 bp, Artificial Sequence
  Cdkn2a.2_NTC.13
  crRNA array
  misc_feature (148)..(157): n is a, c, g, or t
cttggctttatatatcttgtggaaaggacgaaacaccgtaatttctactaagtgtagatgcccaacgccccgaactctttaatttctactaagtgtagatgaccgttgtatcgcgatcaataatttctactaagtgtagatttttttnnnnnnnnnnaagcttggcgtggatccgatatcaactagatcttgagacaaatggcagtattcatccacaattttaaaagaaaaggggggattggggggtacagtgcaggggaaagaatagtagacataatagcaacagacatacaaactaaag

SEQ ID NO: 16268 - DNA, 301 bp, Artificial Sequence
  Cdkn2a.2_NTC.14
  crRNA array
  misc_feature (148)..(157): n is a, c, g, or t
cttggctttatatatcttgtggaaaggacgaaacaccgtaatttctactaagtgtagatgcccaacgccccgaactctttaatttctactaagtgtagatccgttcgtgcgatagtgttttaatttctactaagtgtagatttttttnnnnnnnnnnaagcttggcgtggatccgatatcaactagatcttgagacaaatggcagtattcatccacaattttaaaagaaaaggggggattggggggtacagtgcaggggaaagaatagtagacataatagcaacagacatacaaactaaag

SEQ ID NO: 16269 - DNA, 301 bp, Artificial Sequence
  Cdkn2a.2_NTC.15
  crRNA array
  misc_feature (148)..(157): n is a, c, g, or t
cttggctttatatatcttgtggaaaggacgaaacaccgtaatttctactaagtgtagatgcccaacgccccgaactctttaatttctactaagtgtagatgttgtcgtgccgcgaatttataatttctactaagtgtagatttttttnnnnnnnnnnaagcttggcgtggatccgatatcaactagatcttgagacaaatggcagtattcatccacaattttaaaagaaaaggggggattggggggtacagtgcaggggaaagaatagtagacataatagcaacagacatacaaactaaag

SEQ ID NO: 16270 - DNA, 301 bp, Artificial Sequence
  Cdkn2a.2_NTC.16
  crRNA array
  misc_feature (148)..(157): n is a, c, g, or t
cttggctttatatatcttgtggaaaggacgaaacaccgtaatttctactaagtgtagatgcccaacgccccgaactctttaatttctactaagtgtagatcggtacgttagacgaaaatttaatttctactaagtgtagatttttttnnnnnnnnnnaagcttggcgtggatccgatatcaactagatcttgagacaaatggcagtattcatccacaattttaaaagaaaaggggggattggggggtacagtgcaggggaaagaatagtagacataatagcaacagacatacaaactaaag

SEQ ID NO: 16271 - DNA, 301 bp, Artificial Sequence
  Cdkn2a.2_NTC.17
  crRNA array
  misc_feature (148)..(157): n is a, c, g, or t
cttggctttatatatcttgtggaaaggacgaaacaccgtaatttctactaagtgtagatgcccaacgccccgaactctttaatttctactaagtgtagattatcgaacgctatcgaacgttaatttctactaagtgtagatttttttnnnnnnnnnnaagcttggcgtggatccgatatcaactagatcttgagacaaatggcagtattcatccacaattttaaaagaaaaggggggattggggggtacagtgcaggggaaagaatagtagacataatagcaacagacatacaaactaaag

SEQ ID NO: 16272 - DNA, 301 bp, Artificial Sequence
  Cdkn2a.2_NTC.18
  crRNA array
  misc_feature (148)..(157): n is a, c, g, or t
cttggctttatatatcttgtggaaaggacgaaacaccgtaatttctactaagtgtagatgcccaacgccccgaactctttaatttctactaagtgtagattccggttacgaccggcaaaataatttctactaagtgtagatttttttnnnnnnnnnnaagcttggcgtggatccgatatcaactagatcttgagacaaatggcagtattcatccacaattttaaaagaaaaggggggattggggggtacagtgcaggggaaagaatagtagacataatagcaacagacatacaaactaaag

SEQ ID NO: 16273 - DNA, 301 bp, Artificial Sequence
  Cdkn2a.2_NTC.19
  crRNA array
  misc_feature (148)..(157): n is a, c, g, or t
cttggctttatatatcttgtggaaaggacgaaacaccgtaatttctactaagtgtagatgcccaacgccccgaactctttaatttctactaagtgtagatcgtcgtagaacgatacccgataatttctactaagtgtagatttttttnnnnnnnnnnaagcttggcgtggatccgatatcaactagatcttgagacaaatggcagtattcatccacaattttaaaagaaaaggggggattggggggtacagtgcaggggaaagaatagtagacataatagcaacagacatacaaactaaag

SEQ ID NO: 16274 - DNA, 301 bp, Artificial Sequence
  Cdkn2a.2_NTC.2
  crRNA array
  misc_feature (148)..(157): n is a, c, g, or t
cttggctttatatatcttgtggaaaggacgaaacaccgtaatttctactaagtgtagatgcccaacgccccgaactctttaatttctactaagtgtagatttatgtcgcgccgcgacccgtaatttctactaagtgtagatttttttnnnnnnnnnnaagcttggcgtggatccgatatcaactagatcttgagacaaatggcagtattcatccacaattttaaaagaaaaggggggattggggggtacagtgcaggggaaagaatagtagacataatagcaacagacatacaaactaaag

SEQ ID NO: 16275 - DNA, 301 bp, Artificial Sequence
  Cdkn2a.2_NTC.20
  crRNA array
  misc_feature (148)..(157): n is a, c, g, or t
cttggctttatatatcttgtggaaaggacgaaacaccgtaatttctactaagtgtagatgcccaacgccccgaactctttaatttctactaagtgtagatattccggcgcgaccagaagataatttctactaagtgtagatttttttnnnnnnnnnnaagcttggcgtggatccgatatcaactagatcttgagacaaatggcagtattcatccacaattttaaaagaaaaggggggattggggggtacagtgcaggggaaagaatagtagacataatagcaacagacatacaaactaaag

SEQ ID NO: 16276 - DNA, 301 bp, Artificial Sequence
  Cdkn2a.2_NTC.21
  crRNA array
  misc_feature (148)..(157): n is a, c, g, or t
cttggctttatatatcttgtggaaaggacgaaacaccgtaatttctactaagtgtagatgcccaacgccccgaactctttaatttctactaagtgtagatgtataacttcgcgcggtccgtaatttctactaagtgtagatttttttnnnnnnnnnnaagcttggcgtggatccgatatcaactagatcttgagacaaatggcagtattcatccacaattttaaaagaaaaggggggattggggggtacagtgcaggggaaagaatagtagacataatagcaacagacatacaaactaaag

SEQ ID NO: 16277 - DNA, 301 bp, Artificial Sequence
  Cdkn2a.2_NTC.22
  crRNA array
  misc_feature (148)..(157): n is a, c, g, or t
cttggctttatatatcttgtggaaaggacgaaacaccgtaatttctactaagtgtagatgcccaacgccccgaactctttaatttctactaagtgtagatgcgcgtcaacgtaatgtgcctaatttctactaagtgtagatttttttnnnnnnnnnnaagcttggcgtggatccgatatcaactagatcttgagacaaatggcagtattcatccacaattttaaaagaaaaggggggattggggggtacagtgcaggggaaagaatagtagacataatagcaacagacatacaaactaaag

SEQ ID NO: 16278 - DNA, 301 bp, Artificial Sequence
  Cdkn2a.2_NTC.23
  crRNA array
  misc_feature (148)..(157): n is a, c, g, or t
cttggctttatatatcttgtggaaaggacgaaacaccgtaatttctactaagtgtagatgcccaacgccccgaactctttaatttctactaagtgtagatacgcgctattatcgtaggtgtaatttctactaagtgtagatttttttnnnnnnnnnnaagcttggcgtggatccgatatcaactagatcttgagacaaatggcagtattcatccacaattttaaaagaaaaggggggattggggggtacagtgcaggggaaagaatagtagacataatagcaacagacatacaaactaaag

SEQ ID NO: 16279 - DNA, 301 bp, Artificial Sequence
  Cdkn2a.2_NTC.24
  crRNA array
  misc_feature (148)..(157): n is a, c, g, or t
cttggctttatatatcttgtggaaaggacgaaacaccgtaatttctactaagtgtagatgcccaacgccccgaactctttaatttctactaagtgtagatactatcgacgttcgtcccggtaatttctactaagtgtagatttttttnnnnnnnnnnaagcttggcgtggatccgatatcaactagatcttgagacaaatggcagtattcatccacaattttaaaagaaaaggggggattggggggtacagtgcaggggaaagaatagtagacataatagcaacagacatacaaactaaag

SEQ ID NO: 16280 - DNA, 301 bp, Artificial Sequence
  Cdkn2a.2_NTC.25
  crRNA array
  misc_feature (148)..(157): n is a, c, g, or t
cttggctttatatatcttgtggaaaggacgaaacaccgtaatttctactaagtgtagatgcccaacgccccgaactctttaatttctactaagtgtagattcgcgttatcgtgccgtgcgtaatttctactaagtgtagatttttttnnnnnnnnnnaagcttggcgtggatccgatatcaactagatcttgagacaaatggcagtattcatccacaattttaaaagaaaaggggggattggggggtacagtgcaggggaaagaatagtagacataatagcaacagacatacaaactaaag

SEQ ID NO: 16281 - DNA, 301 bp, Artificial Sequence
  Cdkn2a.2_NTC.26
  crRNA array
  misc_feature (148)..(157): n is a, c, g, or t
cttggctttatatatcttgtggaaaggacgaaacaccgtaatttctactaagtgtagatgcccaacgccccgaactctttaatttctactaagtgtagatcgcgacggcggttttaacactaatttctactaagtgtagatttttttnnnnnnnnnnaagcttggcgtggatccgatatcaactagatcttgagacaaatggcagtattcatccacaattttaaaagaaaaggggggattggggggtacagtgcaggggaaagaatagtagacataatagcaacagacatacaaactaaag

SEQ ID NO: 16282 - DNA, 301 bp, Artificial Sequence
  Cdkn2a.2_NTC.27
  crRNA array
  misc_feature (148)..(157): n is a, c, g, or t
cttggctttatatatcttgtggaaaggacgaaacaccgtaatttctactaagtgtagatgcccaacgccccgaactctttaatttctactaagtgtagatgtcgcgttgcgaccggcgcttaatttctactaagtgtagatttttttnnnnnnnnnnaagcttggcgtggatccgatatcaactagatcttgagacaaatggcagtattcatccacaattttaaaagaaaaggggggattggggggtacagtgcaggggaaagaatagtagacataatagcaacagacatacaaactaaag

SEQ ID NO: 16283 - DNA, 301 bp, Artificial Sequence
  Cdkn2a.2_NTC.28
  crRNA array
  misc_feature (148)..(157): n is a, c, g, or t
cttggctttatatatcttgtggaaaggacgaaacaccgtaatttctactaagtgtagatgcccaacgccccgaactctttaatttctactaagtgtagataccgctaatcggcgtaaacttaatttctactaagtgtagatttttttnnnnnnnnnnaagcttggcgtggatccgatatcaactagatcttgagacaaatggcagtattcatccacaattttaaaagaaaaggggggattggggggtacagtgcaggggaaagaatagtagacataatagcaacagacatacaaactaaag

SEQ ID NO: 16284 - DNA, 301 bp, Artificial Sequence
  Cdkn2a.2_NTC.29
  crRNA array
  misc_feature (148)..(157): n is a, c, g, or t
cttggctttatatatcttgtggaaaggacgaaacaccgtaatttctactaagtgtagatgcccaacgccccgaactctttaatttctactaagtgtagatcgcgatctataccgtctatataatttctactaagtgtagatttttttnnnnnnnnnnaagcttggcgtggatccgatatcaactagatcttgagacaaatggcagtattcatccacaattttaaaagaaaaggggggattggggggtacagtgcaggggaaagaatagtagacataatagcaacagacatacaaactaaag

SEQ ID NO: 16285 - DNA, 301 bp, Artificial Sequence
  Cdkn2a.2_NTC.3
  crRNA array
  misc_feature (148)..(157): n is a, c, g, or t
cttggctttatatatcttgtggaaaggacgaaacaccgtaatttctactaagtgtagatgcccaacgccccgaactctttaatttctactaagtgtagattcgacgcgagacgacgtacataatttctactaagtgtagatttttttnnnnnnnnnnaagcttggcgtggatccgatatcaactagatcttgagacaaatggcagtattcatccacaattttaaaagaaaaggggggattggggggtacagtgcaggggaaagaatagtagacataatagcaacagacatacaaactaaag

SEQ ID NO: 16286 - DNA, 301 bp, Artificial Sequence
  Cdkn2a.2_NTC.30
  crRNA array
  misc_feature (148)..(157): n is a, c, g, or t
cttggctttatatatcttgtggaaaggacgaaacaccgtaatttctactaagtgtagatgcccaacgccccgaactctttaatttctactaagtgtagatcgatcgtacgggtgtcctaataatttctactaagtgtagatttttttnnnnnnnnnnaagcttggcgtggatccgatatcaactagatcttgagacaaatggcagtattcatccacaattttaaaagaaaaggggggattggggggtacagtgcaggggaaagaatagtagacataatagcaacagacatacaaactaaag

SEQ ID NO: 16287 - DNA, 301 bp, Artificial Sequence
  Cdkn2a.2_NTC.31
  crRNA array
  misc_feature (148)..(157): n is a, c, g, or t
cttggctttatatatcttgtggaaaggacgaaacaccgtaatttctactaagtgtagatgcccaacgccccgaactctttaatttctactaagtgtagatgccgaccgcgtgattgtaggtaatttctactaagtgtagatttttttnnnnnnnnnnaagcttggcgtggatccgatatcaactagatcttgagacaaatggcagtattcatccacaattttaaaagaaaaggggggattggggggtacagtgcaggggaaagaatagtagacataatagcaacagacatacaaactaaag

SEQ ID NO: 16288 - DNA, 301 bp, Artificial Sequence
  Cdkn2a.2_NTC.32
  crRNA array
  misc_feature (148)..(157): n is a, c, g, or t
cttggctttatatatcttgtggaaaggacgaaacaccgtaatttctactaagtgtagatgcccaacgccccgaactctttaatttctactaagtgtagatgcacgttacgcccgggtcactaatttctactaagtgtagatttttttnnnnnnnnnnaagcttggcgtggatccgatatcaactagatcttgagacaaatggcagtattcatccacaattttaaaagaaaaggggggattggggggtacagtgcaggggaaagaatagtagacataatagcaacagacatacaaactaaag

SEQ ID NO: 16289 - DNA, 301 bp, Artificial Sequence
  Cdkn2a.2_NTC.33
  crRNA array
  misc_feature (148)..(157): n is a, c, g, or t
cttggctttatatatcttgtggaaaggacgaaacaccgtaatttctactaagtgtagatgcccaacgccccgaactctttaatttctactaagtgtagattaagcgaccgacgcattcgctaatttctactaagtgtagatttttttnnnnnnnnnnaagcttggcgtggatccgatatcaactagatcttgagacaaatggcagtattcatccacaattttaaaagaaaaggggggattggggggtacagtgcaggggaaagaatagtagacataatagcaacagacatacaaactaaag

SEQ ID NO: 16290 - DNA, 301 bp, Artificial Sequence
  Cdkn2a.2_NTC.34
  crRNA array
  misc_feature (148)..(157): n is a, c, g, or t
cttggctttatatatcttgtggaaaggacgaaacaccgtaatttctactaagtgtagatgcccaacgccccgaactctttaatttctactaagtgtagattagcgttcgacacgtgaaactaatttctactaagtgtagatttttttnnnnnnnnnnaagcttggcgtggatccgatatcaactagatcttgagacaaatggcagtattcatccacaattttaaaagaaaaggggggattggggggtacagtgcaggggaaagaatagtagacataatagcaacagacatacaaactaaag

SEQ ID NO: 16291 - DNA, 301 bp, Artificial Sequence
  Cdkn2a.2_NTC.35
  crRNA array
  misc_feature (148)..(157): n is a, c, g, or t
cttggctttatatatcttgtggaaaggacgaaacaccgtaatttctactaagtgtagatgcccaacgccccgaactctttaatttctactaagtgtagattggcgcgtaatcgctattcgtaatttctactaagtgtagatttttttnnnnnnnnnnaagcttggcgtggatccgatatcaactagatcttgagacaaatggcagtattcatccacaattttaaaagaaaaggggggattggggggtacagtgcaggggaaagaatagtagacataatagcaacagacatacaaactaaag

SEQ ID NO: 16292 - DNA, 301 bp, Artificial Sequence
  Cdkn2a.2_NTC.36
  crRNA array
  misc_feature (148)..(157): n is a, c, g, or t
cttggctttatatatcttgtggaaaggacgaaacaccgtaatttctactaagtgtagatgcccaacgccccgaactctttaatttctactaagtgtagatcaacccgccgtagcgggccttaatttctactaagtgtagatttttttnnnnnnnnnnaagcttggcgtggatccgatatcaactagatcttgagacaaatggcagtattcatccacaattttaaaagaaaaggggggattggggggtacagtgcaggggaaagaatagtagacataatagcaacagacatacaaactaaag

SEQ ID NO: 16293 - DNA, 301 bp, Artificial Sequence
  Cdkn2a.2_NTC.37
  crRNA array
  misc_feature (148)..(157): n is a, c, g, or t
cttggctttatatatcttgtggaaaggacgaaacaccgtaatttctactaagtgtagatgcccaacgccccgaactctttaatttctactaagtgtagattttgcgttgacgcgattacttaatttctactaagtgtagatttttttnnnnnnnnnnaagcttggcgtggatccgatatcaactagatcttgagacaaatggcagtattcatccacaattttaaaagaaaaggggggattggggggtacagtgcaggggaaagaatagtagacataatagcaacagacatacaaactaaag

SEQ ID NO: 16294 - DNA, 301 bp, Artificial Sequence
  Cdkn2a.2_NTC.38
  crRNA array
  misc_feature (148)..(157): n is a, c, g, or t
cttggctttatatatcttgtggaaaggacgaaacaccgtaatttctactaagtgtagatgcccaacgccccgaactctttaatttctactaagtgtagataacggagcgcgatactaccataatttctactaagtgtagatttttttnnnnnnnnnnaagcttggcgtggatccgatatcaactagatcttgagacaaatggcagtattcatccacaattttaaaagaaaaggggggattggggggtacagtgcaggggaaagaatagtagacataatagcaacagacatacaaactaaag

SEQ ID NO: 16295 - DNA, 301 bp, Artificial Sequence
  Cdkn2a.2_NTC.39
  crRNA array
  misc_feature (148)..(157): n is a, c, g, or t
cttggctttatatatcttgtggaaaggacgaaacaccgtaatttctactaagtgtagatgcccaacgccccgaactctttaatttctactaagtgtagatccggacgttataacgtttcttaatttctactaagtgtagatttttttnnnnnnnnnnaagcttggcgtggatccgatatcaactagatcttgagacaaatggcagtattcatccacaattttaaaagaaaaggggggattggggggtacagtgcaggggaaagaatagtagacataatagcaacagacatacaaactaaag

SEQ ID NO: 16296 - DNA, 301 bp, Artificial Sequence
  Cdkn2a.2_NTC.4
  crRNA array
  misc_feature (148)..(157): n is a, c, g, or t
cttggctttatatatcttgtggaaaggacgaaacaccgtaatttctactaagtgtagatgcccaacgccccgaactctttaatttctactaagtgtagatatacccgtcgcgaacgtgagtaatttctactaagtgtagatttttttnnnnnnnnnnaagcttggcgtggatccgatatcaactagatcttgagacaaatggcagtattcatccacaattttaaaagaaaaggggggattggggggtacagtgcaggggaaagaatagtagacataatagcaacagacatacaaactaaag

SEQ ID NO: 16297 - DNA, 301 bp, Artificial Sequence
  Cdkn2a.2_NTC.40
  crRNA array
  misc_feature (148)..(157): n is a, c, g, or t
cttggctttatatatcttgtggaaaggacgaaacaccgtaatttctactaagtgtagatgcccaacgccccgaactctttaatttctactaagtgtagatattcgcgaacccggccggaataatttctactaagtgtagatttttttnnnnnnnnnnaagcttggcgtggatccgatatcaactagatcttgagacaaatggcagtattcatccacaattttaaaagaaaaggggggattggggggtacagtgcaggggaaagaatagtagacataatagcaacagacatacaaactaaag

SEQ ID NO: 16298 - DNA, 301 bp, Artificial Sequence
  Cdkn2a.2_NTC.41
  crRNA array
  misc_feature (148)..(157): n is a, c, g, or t
cttggctttatatatcttgtggaaaggacgaaacaccgtaatttctactaagtgtagatgcccaacgccccgaactctttaatttctactaagtgtagatttgatggcgcgacgcgttattaatttctactaagtgtagatttttttnnnnnnnnnnaagcttggcgtggatccgatatcaactagatcttgagacaaatggcagtattcatccacaattttaaaagaaaaggggggattggggggtacagtgcaggggaaagaatagtagacataatagcaacagacatacaaactaaag

SEQ ID NO: 16299 - DNA, 301 bp, Artificial Sequence
  Cdkn2a.2_NTC.42
  crRNA array
  misc_feature (148)..(157): n is a, c, g, or t
cttggctttatatatcttgtggaaaggacgaaacaccgtaatttctactaagtgtagatgcccaacgccccgaactctttaatttctactaagtgtagatggtcaaatcgcggcgataactaatttctactaagtgtagatttttttnnnnnnnnnnaagcttggcgtggatccgatatcaactagatcttgagacaaatggcagtattcatccacaattttaaaagaaaaggggggattggggggtacagtgcaggggaaagaatagtagacataatagcaacagacatacaaactaaag

SEQ ID NO: 16300 - DNA, 301 bp, Artificial Sequence
  Cdkn2a.2_NTC.43
  crRNA array
  misc_feature (148)..(157): n is a, c, g, or t
cttggctttatatatcttgtggaaaggacgaaacaccgtaatttctactaagtgtagatgcccaacgccccgaactctttaatttctactaagtgtagatcgactcgcgcattgaactggtaatttctactaagtgtagatttttttnnnnnnnnnnaagcttggcgtggatccgatatcaactagatcttgagacaaatggcagtattcatccacaattttaaaagaaaaggggggattggggggtacagtgcaggggaaagaatagtagacataatagcaacagacatacaaactaaag

SEQ ID NO: 16301 - DNA, 301 bp, Artificial Sequence
  Cdkn2a.2_NTC.44
  crRNA array
  misc_feature (148)..(157): n is a, c, g, or t
cttggctttatatatcttgtggaaaggacgaaacaccgtaatttctactaagtgtagatgcccaacgccccgaactctttaatttctactaagtgtagatagcgtcgtacgatttatcgttaatttctactaagtgtagatttttttnnnnnnnnnnaagcttggcgtggatccgatatcaactagatcttgagacaaatggcagtattcatccacaattttaaaagaaaaggggggattggggggtacagtgcaggggaaagaatagtagacataatagcaacagacatacaaactaaag

SEQ ID NO: 16302 - DNA, 301 bp, Artificial Sequence
  Cdkn2a.2_NTC.45
  crRNA array
  misc_feature (148)..(157): n is a, c, g, or t
cttggctttatatatcttgtggaaaggacgaaacaccgtaatttctactaagtgtagatgcccaacgccccgaactctttaatttctactaagtgtagatcggaacgcgtgatactagggtaatttctactaagtgtagatttttttnnnnnnnnnnaagcttggcgtggatccgatatcaactagatcttgagacaaatggcagtattcatccacaattttaaaagaaaaggggggattggggggtacagtgcaggggaaagaatagtagacataatagcaacagacatacaaactaaag

SEQ ID NO: 16303 - DNA, 301 bp, Artificial Sequence
  Cdkn2a.2_NTC.46
  crRNA array
  misc_feature (148)..(157): n is a, c, g, or t
cttggctttatatatcttgtggaaaggacgaaacaccgtaatttctactaagtgtagatgcccaacgccccgaactctttaatttctactaagtgtagatagcgggtcgtagacgcgcggtaatttctactaagtgtagatttttttnnnnnnnnnnaagcttggcgtggatccgatatcaactagatcttgagacaaatggcagtattcatccacaattttaaaagaaaaggggggattggggggtacagtgcaggggaaagaatagtagacataatagcaacagacatacaaactaaag

SEQ ID NO: 16304 - DNA, 301 bp, Artificial Sequence
  Cdkn2a.2_NTC.47
  crRNA array
  misc_feature (148)..(157): n is a, c, g, or t
cttggctttatatatcttgtggaaaggacgaaacaccgtaatttctactaagtgtagatgcccaacgccccgaactctttaatttctactaagtgtagattctcgtatcgcgattgttaataatttctactaagtgtagatttttttnnnnnnnnnnaagcttggcgtggatccgatatcaactagatcttgagacaaatggcagtattcatccacaattttaaaagaaaaggggggattggggggtacagtgcaggggaaagaatagtagacataatagcaacagacatacaaactaaag

SEQ ID NO: 16305 - DNA, 301 bp, Artificial Sequence
  Cdkn2a.2_NTC.48
  crRNA array
  misc_feature (148)..(157): n is a, c, g, or t
cttggctttatatatcttgtggaaaggacgaaacaccgtaatttctactaagtgtagatgcccaacgccccgaactctttaatttctactaagtgtagatcggtcgactacggctgttagtaatttctactaagtgtagatttttttnnnnnnnnnnaagcttggcgtggatccgatatcaactagatcttgagacaaatggcagtattcatccacaattttaaaagaaaaggggggattggggggtacagtgcaggggaaagaatagtagacataatagcaacagacatacaaactaaag

SEQ ID NO: 16306 - DNA, 301 bp, Artificial Sequence
  Cdkn2a.2_NTC.49
  crRNA array
  misc_feature (148)..(157): n is a, c, g, or t
cttggctttatatatcttgtggaaaggacgaaacaccgtaatttctactaagtgtagatgcccaacgccccgaactctttaatttctactaagtgtagattcggggcgcgtcaactgaattaatttctactaagtgtagatttttttnnnnnnnnnnaagcttggcgtggatccgatatcaactagatcttgagacaaatggcagtattcatccacaattttaaaagaaaaggggggattggggggtacagtgcaggggaaagaatagtagacataatagcaacagacatacaaactaaag

SEQ ID NO: 16307 - DNA, 301 bp, Artificial Sequence
  Cdkn2a.2_NTC.5
  crRNA array
  misc_feature (148)..(157): n is a, c, g, or t
cttggctttatatatcttgtggaaaggacgaaacaccgtaatttctactaagtgtagatgcccaacgccccgaactctttaatttctactaagtgtagatgcttacgcgtcgcgaatgtataatttctactaagtgtagatttttttnnnnnnnnnnaagcttggcgtggatccgatatcaactagatcttgagacaaatggcagtattcatccacaattttaaaagaaaaggggggattggggggtacagtgcaggggaaagaatagtagacataatagcaacagacatacaaactaaag

SEQ ID NO: 16308 - DNA, 301 bp, Artificial Sequence
  Cdkn2a.2_NTC.50
  crRNA array
  misc_feature (148)..(157): n is a, c, g, or t
cttggctttatatatcttgtggaaaggacgaaacaccgtaatttctactaagtgtagatgcccaacgccccgaactctttaatttctactaagtgtagatattgccgctcgcgcaaaatctaatttctactaagtgtagatttttttnnnnnnnnnnaagcttggcgtggatccgatatcaactagatcttgagacaaatggcagtattcatccacaattttaaaagaaaaggggggattggggggtacagtgcaggggaaagaatagtagacataatagcaacagacatacaaactaaag

SEQ ID NO: 16309 - DNA, 301 bp, Artificial Sequence
  Cdkn2a.2_NTC.51
  crRNA array
  misc_feature (148)..(157): n is a, c, g, or t
cttggctttatatatcttgtggaaaggacgaaacaccgtaatttctactaagtgtagatgcccaacgccccgaactctttaatttctactaagtgtagattaacgcgcaacacgccaatgtaatttctactaagtgtagatttttttnnnnnnnnnnaagcttggcgtggatccgatatcaactagatcttgagacaaatggcagtattcatccacaattttaaaagaaaaggggggattggggggtacagtgcaggggaaagaatagtagacataatagcaacagacatacaaactaaag

SEQ ID NO: 16310 - DNA, 301 bp, Artificial Sequence
  Cdkn2a.2_NTC.6
  crRNA array
  misc_feature (148)..(157): n is a, c, g, or t
cttggctttatatatcttgtggaaaggacgaaacaccgtaatttctactaagtgtagatgcccaacgccccgaactctttaatttctactaagtgtagatcgaatcgcgcctacgggaattaatttctactaagtgtagatttttttnnnnnnnnnnaagcttggcgtggatccgatatcaactagatcttgagacaaatggcagtattcatccacaattttaaaagaaaaggggggattggggggtacagtgcaggggaaagaatagtagacataatagcaacagacatacaaactaaag

SEQ ID NO: 16311 - DNA, 301 bp, Artificial Sequence
  Cdkn2a.2_NTC.7
  crRNA array
  misc_feature (148)..(157): n is a, c, g, or t
cttggctttatatatcttgtggaaaggacgaaacaccgtaatttctactaagtgtagatgcccaacgccccgaactctttaatttctactaagtgtagatcgccgaacggataagactattaatttctactaagtgtagatttttttnnnnnnnnnnaagcttggcgtggatccgatatcaactagatcttgagacaaatggcagtattcatccacaattttaaaagaaaaggggggattggggggtacagtgcaggggaaagaatagtagacataatagcaacagacatacaaactaaag

SEQ ID NO: 16312 - DNA, 301 bp, Artificial Sequence
  Cdkn2a.2_NTC.8
  crRNA array
  misc_feature (148)..(157): n is a, c, g, or t
cttggctttatatatcttgtggaaaggacgaaacaccgtaatttctactaagtgtagatgcccaacgccccgaactctttaatttctactaagtgtagatcgaccgaggttacgctgggataatttctactaagtgtagatttttttnnnnnnnnnnaagcttggcgtggatccgatatcaactagatcttgagacaaatggcagtattcatccacaattttaaaagaaaaggggggattggggggtacagtgcaggggaaagaatagtagacataatagcaacagacatacaaactaaag

SEQ ID NO: 16313 - DNA, 301 bp, Artificial Sequence
  Cdkn2a.2_NTC.9
  crRNA array
  misc_feature (148)..(157): n is a, c, g, or t
cttggctttatatatcttgtggaaaggacgaaacaccgtaatttctactaagtgtagatgcccaacgccccgaactctttaatttctactaagtgtagatatcgccgtacggctatggcataatttctactaagtgtagatttttttnnnnnnnnnnaagcttggcgtggatccgatatcaactagatcttgagacaaatggcagtattcatccacaattttaaaagaaaaggggggattggggggtacagtgcaggggaaagaatagtagacataatagcaacagacatacaaactaaag

SEQ ID NO: 16314 - DNA, 301 bp, Artificial Sequence
  Cdkn2a.3_NTC.0
  crRNA array
  misc_feature (148)..(157): n is a, c, g, or t
cttggctttatatatcttgtggaaaggacgaaacaccgtaatttctactaagtgtagattgtaccgctgggaacgtcgctaatttctactaagtgtagattatagcgtcgcgcgctaatttaatttctactaagtgtagatttttttnnnnnnnnnnaagcttggcgtggatccgatatcaactagatcttgagacaaatggcagtattcatccacaattttaaaagaaaaggggggattggggggtacagtgcaggggaaagaatagtagacataatagcaacagacatacaaactaaag

SEQ ID NO: 16315 - DNA, 301 bp, Artificial Sequence
  Cdkn2a.3_NTC.1
  crRNA array
  misc_feature (148)..(157): n is a, c, g, or t
cttggctttatatatcttgtggaaaggacgaaacaccgtaatttctactaagtgtagattgtaccgctgggaacgtcgctaatttctactaagtgtagatcgcgtaaccgttccggctcctaatttctactaagtgtagatttttttnnnnnnnnnnaagcttggcgtggatccgatatcaactagatcttgagacaaatggcagtattcatccacaattttaaaagaaaaggggggattggggggtacagtgcaggggaaagaatagtagacataatagcaacagacatacaaactaaag

SEQ ID NO: 16316 - DNA, 301 bp, Artificial Sequence
  Cdkn2a.3_NTC.10
  crRNA array
  misc_feature (148)..(157): n is a, c, g, or t
cttggctttatatatcttgtggaaaggacgaaacaccgtaatttctactaagtgtagattgtaccgctgggaacgtcgctaatttctactaagtgtagatcgctaagttcgcgcgggccgtaatttctactaagtgtagatttttttnnnnnnnnnnaagcttggcgtggatccgatatcaactagatcttgagacaaatggcagtattcatccacaattttaaaagaaaaggggggattggggggtacagtgcaggggaaagaatagtagacataatagcaacagacatacaaactaaag

SEQ ID NO: 16317 - DNA, 301 bp, Artificial Sequence
  Cdkn2a.3_NTC.11
  crRNA array
  misc_feature (148)..(157): n is a, c, g, or t
cttggctttatatatcttgtggaaaggacgaaacaccgtaatttctactaagtgtagattgtaccgctgggaacgtcgctaatttctactaagtgtagatcgttcgtcgacgaagcaatctaatttctactaagtgtagatttttttnnnnnnnnnnaagcttggcgtggatccgatatcaactagatcttgagacaaatggcagtattcatccacaattttaaaagaaaaggggggattggggggtacagtgcaggggaaagaatagtagacataatagcaacagacatacaaactaaag

SEQ ID NO: 16318 - DNA, 301 bp, Artificial Sequence
  Cdkn2a.3_NTC.12
  crRNA array
  misc_feature (148)..(157): n is a, c, g, or t
cttggctttatatatcttgtggaaaggacgaaacaccgtaatttctactaagtgtagattgtaccgctgggaacgtcgctaatttctactaagtgtagatcgccgacgattaatcaatagtaatttctactaagtgtagatttttttnnnnnnnnnnaagcttggcgtggatccgatatcaactagatcttgagacaaatggcagtattcatccacaattttaaaagaaaaggggggattggggggtacagtgcaggggaaagaatagtagacataatagcaacagacatacaaactaaag

SEQ ID NO: 16319 - DNA, 301 bp, Artificial Sequence
  Cdkn2a.3_NTC.13
  crRNA array
  misc_feature (148)..(157): n is a, c, g, or t
cttggctttatatatcttgtggaaaggacgaaacaccgtaatttctactaagtgtagattgtaccgctgggaacgtcgctaatttctactaagtgtagatgaccgttgtatcgcgatcaataatttctactaagtgtagatttttttnnnnnnnnnnaagcttggcgtggatccgatatcaactagatcttgagacaaatggcagtattcatccacaattttaaaagaaaaggggggattggggggtacagtgcaggggaaagaatagtagacataatagcaacagacatacaaactaaag

SEQ ID NO: 16320 - DNA, 301 bp, Artificial Sequence
  Cdkn2a.3_NTC.14
  crRNA array
  misc_feature (148)..(157): n is a, c, g, or t
cttggctttatatatcttgtggaaaggacgaaacaccgtaatttctactaagtgtagattgtaccgctgggaacgtcgctaatttctactaagtgtagatccgttcgtgcgatagtgttttaatttctactaagtgtagatttttttnnnnnnnnnnaagcttggcgtggatccgatatcaactagatcttgagacaaatggcagtattcatccacaattttaaaagaaaaggggggattggggggtacagtgcaggggaaagaatagtagacataatagcaacagacatacaaactaaag

SEQ ID NO: 16321 - DNA, 301 bp, Artificial Sequence
  Cdkn2a.3_NTC.15
  crRNA array
  misc_feature (148)..(157): n is a, c, g, or t
cttggctttatatatcttgtggaaaggacgaaacaccgtaatttctactaagtgtagattgtaccgctgggaacgtcgctaatttctactaagtgtagatgttgtcgtgccgcgaatttataatttctactaagtgtagatttttttnnnnnnnnnnaagcttggcgtggatccgatatcaactagatcttgagacaaatggcagtattcatccacaattttaaaagaaaaggggggattggggggtacagtgcaggggaaagaatagtagacataatagcaacagacatacaaactaaag

SEQ ID NO: 16322 - DNA, 301 bp, Artificial Sequence
  Cdkn2a.3_NTC.16
  crRNA array
  misc_feature (148)..(157): n is a, c, g, or t
cttggctttatatatcttgtggaaaggacgaaacaccgtaatttctactaagtgtagattgtaccgctgggaacgtcgctaatttctactaagtgtagatcggtacgttagacgaaaatttaatttctactaagtgtagatttttttnnnnnnnnnnaagcttggcgtggatccgatatcaactagatcttgagacaaatggcagtattcatccacaattttaaaagaaaaggggggattggggggtacagtgcaggggaaagaatagtagacataatagcaacagacatacaaactaaag

SEQ ID NO: 16323 - DNA, 301 bp, Artificial Sequence
  Cdkn2a.3_NTC.17
  crRNA array
  misc_feature (148)..(157): n is a, c, g, or t
cttggctttatatatcttgtggaaaggacgaaacaccgtaatttctactaagtgtagattgtaccgctgggaacgtcgctaatttctactaagtgtagattatcgaacgctatcgaacgttaatttctactaagtgtagatttttttnnnnnnnnnnaagcttggcgtggatccgatatcaactagatcttgagacaaatggcagtattcatccacaattttaaaagaaaaggggggattggggggtacagtgcaggggaaagaatagtagacataatagcaacagacatacaaactaaag

SEQ ID NO: 16324 - DNA, 301 bp, Artificial Sequence
  Cdkn2a.3_NTC.18
  crRNA array
  misc_feature (148)..(157): n is a, c, g, or t
cttggctttatatatcttgtggaaaggacgaaacaccgtaatttctactaagtgtagattgtaccgctgggaacgtcgctaatttctactaagtgtagattccggttacgaccggcaaaataatttctactaagtgtagatttttttnnnnnnnnnnaagcttggcgtggatccgatatcaactagatcttgagacaaatggcagtattcatccacaattttaaaagaaaaggggggattggggggtacagtgcaggggaaagaatagtagacataatagcaacagacatacaaactaaag

SEQ ID NO: 16325 - DNA, 301 bp, Artificial Sequence
  Cdkn2a.3_NTC.19
  crRNA array
  misc_feature (148)..(157): n is a, c, g, or t
cttggctttatatatcttgtggaaaggacgaaacaccgtaatttctactaagtgtagattgtaccgctgggaacgtcgctaatttctactaagtgtagatcgtcgtagaacgatacccgataatttctactaagtgtagatttttttnnnnnnnnnnaagcttggcgtggatccgatatcaactagatcttgagacaaatggcagtattcatccacaattttaaaagaaaaggggggattggggggtacagtgcaggggaaagaatagtagacataatagcaacagacatacaaactaaag

SEQ ID NO: 16326 - DNA, 301 bp, Artificial Sequence
  Cdkn2a.3_NTC.2
  crRNA array
  misc_feature (148)..(157): n is a, c, g, or t
cttggctttatatatcttgtggaaaggacgaaacaccgtaatttctactaagtgtagattgtaccgctgggaacgtcgctaatttctactaagtgtagatttatgtcgcgccgcgacccgtaatttctactaagtgtagatttttttnnnnnnnnnnaagcttggcgtggatccgatatcaactagatcttgagacaaatggcagtattcatccacaattttaaaagaaaaggggggattggggggtacagtgcaggggaaagaatagtagacataatagcaacagacatacaaactaaag

SEQ ID NO: 16327 - DNA, 301 bp, Artificial Sequence
  Cdkn2a.3_NTC.20
  crRNA array
  misc_feature (148)..(157): n is a, c, g, or t
cttggctttatatatcttgtggaaaggacgaaacaccgtaatttctactaagtgtagattgtaccgctgggaacgtcgctaatttctactaagtgtagatattccggcgcgaccagaagataatttctactaagtgtagatttttttnnnnnnnnnnaagcttggcgtggatccgatatcaactagatcttgagacaaatggcagtattcatccacaattttaaaagaaaaggggggattggggggtacagtgcaggggaaagaatagtagacataatagcaacagacatacaaactaaag

SEQ ID NO: 16328 - DNA, 301 bp, Artificial Sequence
  Cdkn2a.3_NTC.21
  crRNA array
  misc_feature (148)..(157): n is a, c, g, or t
cttggctttatatatcttgtggaaaggacgaaacaccgtaatttctactaagtgtagattgtaccgctgggaacgtcgctaatttctactaagtgtagatgtataacttcgcgcggtccgtaatttctactaagtgtagatttttttnnnnnnnnnnaagcttggcgtggatccgatatcaactagatcttgagacaaatggcagtattcatccacaattttaaaagaaaaggggggattggggggtacagtgcaggggaaagaatagtagacataatagcaacagacatacaaactaaag

SEQ ID NO: 16329 - DNA, 301 bp, Artificial Sequence
  Cdkn2a.3_NTC.22
  crRNA array
  misc_feature (148)..(157): n is a, c, g, or t
cttggctttatatatcttgtggaaaggacgaaacaccgtaatttctactaagtgtagattgtaccgctgggaacgtcgctaatttctactaagtgtagatgcgcgtcaacgtaatgtgcctaatttctactaagtgtagatttttttnnnnnnnnnnaagcttggcgtggatccgatatcaactagatcttgagacaaatggcagtattcatccacaattttaaaagaaaaggggggattggggggtacagtgcaggggaaagaatagtagacataatagcaacagacatacaaactaaag

SEQ ID NO: 16330 - DNA, 301 bp, Artificial Sequence
  Cdkn2a.3_NTC.23
  crRNA array
  misc_feature (148)..(157): n is a, c, g, or t
cttggctttatatatcttgtggaaaggacgaaacaccgtaatttctactaagtgtagattgtaccgctgggaacgtcgctaatttctactaagtgtagatacgcgctattatcgtaggtgtaatttctactaagtgtagatttttttnnnnnnnnnnaagcttggcgtggatccgatatcaactagatcttgagacaaatggcagtattcatccacaattttaaaagaaaaggggggattggggggtacagtgcaggggaaagaatagtagacataatagcaacagacatacaaactaaag

SEQ ID NO: 16331 - DNA, 301 bp, Artificial Sequence
  Cdkn2a.3_NTC.24
  crRNA array
  misc_feature (148)..(157): n is a, c, g, or t
cttggctttatatatcttgtggaaaggacgaaacaccgtaatttctactaagtgtagattgtaccgctgggaacgtcgctaatttctactaagtgtagatactatcgacgttcgtcccggtaatttctactaagtgtagatttttttnnnnnnnnnnaagcttggcgtggatccgatatcaactagatcttgagacaaatggcagtattcatccacaattttaaaagaaaaggggggattggggggtacagtgcaggggaaagaatagtagacataatagcaacagacatacaaactaaag

SEQ ID NO: 16332 - DNA, 301 bp, Artificial Sequence
  Cdkn2a.3_NTC.25
  crRNA array
  misc_feature (148)..(157): n is a, c, g, or t
cttggctttatatatcttgtggaaaggacgaaacaccgtaatttctactaagtgtagattgtaccgctgggaacgtcgctaatttctactaagtgtagattcgcgttatcgtgccgtgcgtaatttctactaagtgtagatttttttnnnnnnnnnnaagcttggcgtggatccgatatcaactagatcttgagacaaatggcagtattcatccacaattttaaaagaaaaggggggattggggggtacagtgcaggggaaagaatagtagacataatagcaacagacatacaaactaaag

SEQ ID NO: 16333 - DNA, 301 bp, Artificial Sequence
  Cdkn2a.3_NTC.26
  crRNA array
  misc_feature (148)..(157): n is a, c, g, or t
cttggctttatatatcttgtggaaaggacgaaacaccgtaatttctactaagtgtagattgtaccgctgggaacgtcgctaatttctactaagtgtagatcgcgacggcggttttaacactaatttctactaagtgtagatttttttnnnnnnnnnnaagcttggcgtggatccgatatcaactagatcttgagacaaatggcagtattcatccacaattttaaaagaaaaggggggattggggggtacagtgcaggggaaagaatagtagacataatagcaacagacatacaaactaaag

SEQ ID NO: 16334 - DNA, 301 bp, Artificial Sequence
  Cdkn2a.3_NTC.27
  crRNA array
  misc_feature (148)..(157): n is a, c, g, or t
cttggctttatatatcttgtggaaaggacgaaacaccgtaatttctactaagtgtagattgtaccgctgggaacgtcgctaatttctactaagtgtagatgtcgcgttgcgaccggcgcttaatttctactaagtgtagatttttttnnnnnnnnnnaagcttggcgtggatccgatatcaactagatcttgagacaaatggcagtattcatccacaattttaaaagaaaaggggggattggggggtacagtgcaggggaaagaatagtagacataatagcaacagacatacaaactaaag

SEQ ID NO: 16335 - DNA, 301 bp, Artificial Sequence
  Cdkn2a.3_NTC.28
  crRNA array
  misc_feature (148)..(157): n is a, c, g, or t
cttggctttatatatcttgtggaaaggacgaaacaccgtaatttctactaagtgtagattgtaccgctgggaacgtcgctaatttctactaagtgtagataccgctaatcggcgtaaacttaatttctactaagtgtagatttttttnnnnnnnnnnaagcttggcgtggatccgatatcaactagatcttgagacaaatggcagtattcatccacaattttaaaagaaaaggggggattggggggtacagtgcaggggaaagaatagtagacataatagcaacagacatacaaactaaag

SEQ ID NO: 16336 - DNA, 301 bp, Artificial Sequence
  Cdkn2a.3_NTC.29
  crRNA array
  misc_feature (148)..(157): n is a, c, g, or t
cttggctttatatatcttgtggaaaggacgaaacaccgtaatttctactaagtgtagattgtaccgctgggaacgtcgctaatttctactaagtgtagatcgcgatctataccgtctatataatttctactaagtgtagatttttttnnnnnnnnnnaagcttggcgtggatccgatatcaactagatcttgagacaaatggcagtattcatccacaattttaaaagaaaaggggggattggggggtacagtgcaggggaaagaatagtagacataatagcaacagacatacaaactaaag

SEQ ID NO: 16337 - DNA, 301 bp, Artificial Sequence
  Cdkn2a.3_NTC.3
  crRNA array
  misc_feature (148)..(157): n is a, c, g, or t
cttggctttatatatcttgtggaaaggacgaaacaccgtaatttctactaagtgtagattgtaccgctgggaacgtcgctaatttctactaagtgtagattcgacgcgagacgacgtacataatttctactaagtgtagatttttttnnnnnnnnnnaagcttggcgtggatccgatatcaactagatcttgagacaaatggcagtattcatccacaattttaaaagaaaaggggggattggggggtacagtgcaggggaaagaatagtagacataatagcaacagacatacaaactaaag

SEQ ID NO: 16338 - DNA, 301 bp, Artificial Sequence
  Cdkn2a.3_NTC.30
  crRNA array
  misc_feature (148)..(157): n is a, c, g, or t
cttggctttatatatcttgtggaaaggacgaaacaccgtaatttctactaagtgtagattgtaccgctgggaacgtcgctaatttctactaagtgtagatcgatcgtacgggtgtcctaataatttctactaagtgtagatttttttnnnnnnnnnnaagcttggcgtggatccgatatcaactagatcttgagacaaatggcagtattcatccacaattttaaaagaaaaggggggattggggggtacagtgcaggggaaagaatagtagacataatagcaacagacatacaaactaaag

SEQ ID NO: 16339 - DNA, 301 bp, Artificial Sequence
  Cdkn2a.3_NTC.31
  crRNA array
  misc_feature (148)..(157): n is a, c, g, or t
cttggctttatatatcttgtggaaaggacgaaacaccgtaatttctactaagtgtagattgtaccgctgggaacgtcgctaatttctactaagtgtagatgccgaccgcgtgattgtaggtaatttctactaagtgtagatttttttnnnnnnnnnnaagcttggcgtggatccgatatcaactagatcttgagacaaatggcagtattcatccacaattttaaaagaaaaggggggattggggggtacagtgcaggggaaagaatagtagacataatagcaacagacatacaaactaaag

SEQ ID NO: 16340 - DNA, 301 bp, Artificial Sequence
  Cdkn2a.3_NTC.32
  crRNA array
  misc_feature (148)..(157): n is a, c, g, or t
cttggctttatatatcttgtggaaaggacgaaacaccgtaatttctactaagtgtagattgtaccgctgggaacgtcgctaatttctactaagtgtagatgcacgttacgcccgggtcactaatttctactaagtgtagatttttttnnnnnnnnnnaagcttggcgtggatccgatatcaactagatcttgagacaaatggcagtattcatccacaattttaaaagaaaaggggggattggggggtacagtgcaggggaaagaatagtagacataatagcaacagacatacaaactaaag

SEQ ID NO: 16341 - DNA, 301 bp, Artificial Sequence
  Cdkn2a.3_NTC.33
  crRNA array
  misc_feature (148)..(157): n is a, c, g, or t
cttggctttatatatcttgtggaaaggacgaaacaccgtaatttctactaagtgtagattgtaccgctgggaacgtcgctaatttctactaagtgtagattaagcgaccgacgcattcgctaatttctactaagtgtagatttttttnnnnnnnnnnaagcttggcgtggatccgatatcaactagatcttgagacaaatggcagtattcatccacaattttaaaagaaaaggggggattggggggtacagtgcaggggaaagaatagtagacataatagcaacagacatacaaactaaag

SEQ ID NO: 16342 - DNA, 301 bp, Artificial Sequence
  Cdkn2a.3_NTC.34
  crRNA array
  misc_feature (148)..(157): n is a, c, g, or t
cttggctttatatatcttgtggaaaggacgaaacaccgtaatttctactaagtgtagattgtaccgctgggaacgtcgctaatttctactaagtgtagattagcgttcgacacgtgaaactaatttctactaagtgtagatttttttnnnnnnnnnnaagcttggcgtggatccgatatcaactagatcttgagacaaatggcagtattcatccacaattttaaaagaaaaggggggattggggggtacagtgcaggggaaagaatagtagacataatagcaacagacatacaaactaaag

SEQ ID NO: 16343 - DNA, 301 bp, Artificial Sequence
  Cdkn2a.3_NTC.35
  crRNA array
  misc_feature (148)..(157): n is a, c, g, or t
cttggctttatatatcttgtggaaaggacgaaacaccgtaatttctactaagtgtagattgtaccgctgggaacgtcgctaatttctactaagtgtagattggcgcgtaatcgctattcgtaatttctactaagtgtagatttttttnnnnnnnnnnaagcttggcgtggatccgatatcaactagatcttgagacaaatggcagtattcatccacaattttaaaagaaaaggggggattggggggtacagtgcaggggaaagaatagtagacataatagcaacagacatacaaactaaag

SEQ ID NO: 16344 - DNA, 301 bp, Artificial Sequence
  Cdkn2a.3_NTC.36
  crRNA array
  misc_feature (148)..(157): n is a, c, g, or t
cttggctttatatatcttgtggaaaggacgaaacaccgtaatttctactaagtgtagattgtaccgctgggaacgtcgctaatttctactaagtgtagatcaacccgccgtagcgggccttaatttctactaagtgtagatttttttnnnnnnnnnnaagcttggcgtggatccgatatcaactagatcttgagacaaatggcagtattcatccacaattttaaaagaaaaggggggattggggggtacagtgcaggggaaagaatagtagacataatagcaacagacatacaaactaaag

SEQ ID NO: 16345 - DNA, 301 bp, Artificial Sequence
  Cdkn2a.3_NTC.37
  crRNA array
  misc_feature (148)..(157): n is a, c, g, or t
cttggctttatatatcttgtggaaaggacgaaacaccgtaatttctactaagtgtagattgtaccgctgggaacgtcgctaatttctactaagtgtagattttgcgttgacgcgattacttaatttctactaagtgtagatttttttnnnnnnnnnnaagcttggcgtggatccgatatcaactagatcttgagacaaatggcagtattcatccacaattttaaaagaaaaggggggattggggggtacagtgcaggggaaagaatagtagacataatagcaacagacatacaaactaaag

SEQ ID NO: 16346 - DNA, 301 bp, Artificial Sequence
  Cdkn2a.3_NTC.38
  crRNA array
  misc_feature (148)..(157): n is a, c, g, or t
cttggctttatatatcttgtggaaaggacgaaacaccgtaatttctactaagtgtagattgtaccgctgggaacgtcgctaatttctactaagtgtagataacggagcgcgatactaccataatttctactaagtgtagatttttttnnnnnnnnnnaagcttggcgtggatccgatatcaactagatcttgagacaaatggcagtattcatccacaattttaaaagaaaaggggggattggggggtacagtgcaggggaaagaatagtagacataatagcaacagacatacaaactaaag

SEQ ID NO: 16347 - DNA, 301 bp, Artificial Sequence
  Cdkn2a.3_NTC.39
  crRNA array
  misc_feature (148)..(157): n is a, c, g, or t
cttggctttatatatcttgtggaaaggacgaaacaccgtaatttctactaagtgtagattgtaccgctgggaacgtcgctaatttctactaagtgtagatccggacgttataacgtttcttaatttctactaagtgtagatttttttnnnnnnnnnnaagcttggcgtggatccgatatcaactagatcttgagacaaatggcagtattcatccacaattttaaaagaaaaggggggattggggggtacagtgcaggggaaagaatagtagacataatagcaacagacatacaaactaaag

SEQ ID NO: 16348 - DNA, 301 bp, Artificial Sequence
  Cdkn2a.3_NTC.4
  crRNA array
  misc_feature (148)..(157): n is a, c, g, or t
cttggctttatatatcttgtggaaaggacgaaacaccgtaatttctactaagtgtagattgtaccgctgggaacgtcgctaatttctactaagtgtagatatacccgtcgcgaacgtgagtaatttctactaagtgtagatttttttnnnnnnnnnnaagcttggcgtggatccgatatcaactagatcttgagacaaatggcagtattcatccacaattttaaaagaaaaggggggattggggggtacagtgcaggggaaagaatagtagacataatagcaacagacatacaaactaaag

SEQ ID NO: 16349 - DNA, 301 bp, Artificial Sequence
  Cdkn2a.3_NTC.40
  crRNA array
  misc_feature (148)..(157): n is a, c, g, or t
cttggctttatatatcttgtggaaaggacgaaacaccgtaatttctactaagtgtagattgtaccgctgggaacgtcgctaatttctactaagtgtagatattcgcgaacccggccggaataatttctactaagtgtagatttttttnnnnnnnnnnaagcttggcgtggatccgatatcaactagatcttgagacaaatggcagtattcatccacaattttaaaagaaaaggggggattggggggtacagtgcaggggaaagaatagtagacataatagcaacagacatacaaactaaag

SEQ ID NO: 16350 - DNA, 301 bp, Artificial Sequence
  Cdkn2a.3_NTC.41
  crRNA array
  misc_feature (148)..(157): n is a, c, g, or t
cttggctttatatatcttgtggaaaggacgaaacaccgtaatttctactaagtgtagattgtaccgctgggaacgtcgctaatttctactaagtgtagatttgatggcgcgacgcgttattaatttctactaagtgtagatttttttnnnnnnnnnnaagcttggcgtggatccgatatcaactagatcttgagacaaatggcagtattcatccacaattttaaaagaaaaggggggattggggggtacagtgcaggggaaagaatagtagacataatagcaacagacatacaaactaaag

SEQ ID NO: 16351 - DNA, 301 bp, Artificial Sequence
  Cdkn2a.3_NTC.42
  crRNA array
  misc_feature (148)..(157): n is a, c, g, or t
cttggctttatatatcttgtggaaaggacgaaacaccgtaatttctactaagtgtagattgtaccgctgggaacgtcgctaatttctactaagtgtagatggtcaaatcgcggcgataactaatttctactaagtgtagatttttttnnnnnnnnnnaagcttggcgtggatccgatatcaactagatcttgagacaaatggcagtattcatccacaattttaaaagaaaaggggggattggggggtacagtgcaggggaaagaatagtagacataatagcaacagacatacaaactaaag

SEQ ID NO: 16352 - DNA, 301 bp, Artificial Sequence
  Cdkn2a.3_NTC.43
  crRNA array
  misc_feature (148)..(157): n is a, c, g, or t
cttggctttatatatcttgtggaaaggacgaaacaccgtaatttctactaagtgtagattgtaccgctgggaacgtcgctaatttctactaagtgtagatcgactcgcgcattgaactggtaatttctactaagtgtagatttttttnnnnnnnnnnaagcttggcgtggatccgatatcaactagatcttgagacaaatggcagtattcatccacaattttaaaagaaaaggggggattggggggtacagtgcaggggaaagaatagtagacataatagcaacagacatacaaactaaag

SEQ ID NO: 16353 - DNA, 301 bp, Artificial Sequence
  Cdkn2a.3_NTC.44
  crRNA array
  misc_feature (148)..(157): n is a, c, g, or t
cttggctttatatatcttgtggaaaggacgaaacaccgtaatttctactaagtgtagattgtaccgctgggaacgtcgctaatttctactaagtgtagatagcgtcgtacgatttatcgttaatttctactaagtgtagatttttttnnnnnnnnnnaagcttggcgtggatccgatatcaactagatcttgagacaaatggcagtattcatccacaattttaaaagaaaaggggggattggggggtacagtgcaggggaaagaatagtagacataatagcaacagacatacaaactaaag

SEQ ID NO: 16354 - DNA, 301 bp, Artificial Sequence
  Cdkn2a.3_NTC.45
  crRNA array
  misc_feature (148)..(157): n is a, c, g, or t
cttggctttatatatcttgtggaaaggacgaaacaccgtaatttctactaagtgtagattgtaccgctgggaacgtcgctaatttctactaagtgtagatcggaacgcgtgatactagggtaatttctactaagtgtagatttttttnnnnnnnnnnaagcttggcgtggatccgatatcaactagatcttgagacaaatggcagtattcatccacaattttaaaagaaaaggggggattggggggtacagtgcaggggaaagaatagtagacataatagcaacagacatacaaactaaag

SEQ ID NO: 16355 - DNA, 301 bp, Artificial Sequence
  Cdkn2a.3_NTC.46
  crRNA array
  misc_feature (148)..(157): n is a, c, g, or t
cttggctttatatatcttgtggaaaggacgaaacaccgtaatttctactaagtgtagattgtaccgctgggaacgtcgctaatttctactaagtgtagatagcgggtcgtagacgcgcggtaatttctactaagtgtagatttttttnnnnnnnnnnaagcttggcgtggatccgatatcaactagatcttgagacaaatggcagtattcatccacaattttaaaagaaaaggggggattggggggtacagtgcaggggaaagaatagtagacataatagcaacagacatacaaactaaag

SEQ ID NO: 16356 - DNA, 301 bp, Artificial Sequence
  Cdkn2a.3_NTC.47
  crRNA array
  misc_feature (148)..(157): n is a, c, g, or t
cttggctttatatatcttgtggaaaggacgaaacaccgtaatttctactaagtgtagattgtaccgctgggaacgtcgctaatttctactaagtgtagattctcgtatcgcgattgttaataatttctactaagtgtagatttttttnnnnnnnnnnaagcttggcgtggatccgatatcaactagatcttgagacaaatggcagtattcatccacaattttaaaagaaaaggggggattggggggtacagtgcaggggaaagaatagtagacataatagcaacagacatacaaactaaag

SEQ ID NO: 16357 - DNA, 301 bp, Artificial Sequence
  Cdkn2a.3_NTC.48
  crRNA array
  misc_feature (148)..(157): n is a, c, g, or t
cttggctttatatatcttgtggaaaggacgaaacaccgtaatttctactaagtgtagattgtaccgctgggaacgtcgctaatttctactaagtgtagatcggtcgactacggctgttagtaatttctactaagtgtagatttttttnnnnnnnnnnaagcttggcgtggatccgatatcaactagatcttgagacaaatggcagtattcatccacaattttaaaagaaaaggggggattggggggtacagtgcaggggaaagaatagtagacataatagcaacagacatacaaactaaag

SEQ ID NO: 16358 - DNA, 301 bp, Artificial Sequence
  Cdkn2a.3_NTC.49
  crRNA array
  misc_feature (148)..(157): n is a, c, g, or t
cttggctttatatatcttgtggaaaggacgaaacaccgtaatttctactaagtgtagattgtaccgctgggaacgtcgctaatttctactaagtgtagattcggggcgcgtcaactgaattaatttctactaagtgtagatttttttnnnnnnnnnnaagcttggcgtggatccgatatcaactagatcttgagacaaatggcagtattcatccacaattttaaaagaaaaggggggattggggggtacagtgcaggggaaagaatagtagacataatagcaacagacatacaaactaaag

SEQ ID NO: 16359 - DNA, 301 bp, Artificial Sequence
  Cdkn2a.3_NTC.5
  crRNA array
  misc_feature (148)..(157): n is a, c, g, or t
cttggctttatatatcttgtggaaaggacgaaacaccgtaatttctactaagtgtagattgtaccgctgggaacgtcgctaatttctactaagtgtagatgcttacgcgtcgcgaatgtataatttctactaagtgtagatttttttnnnnnnnnnnaagcttggcgtggatccgatatcaactagatcttgagacaaatggcagtattcatccacaattttaaaagaaaaggggggattggggggtacagtgcaggggaaagaatagtagacataatagcaacagacatacaaactaaag

SEQ ID NO: 16360 - DNA, 301 bp, Artificial Sequence
  Cdkn2a.3_NTC.50
  crRNA array
  misc_feature (148)..(157): n is a, c, g, or t
cttggctttatatatcttgtggaaaggacgaaacaccgtaatttctactaagtgtagattgtaccgctgggaacgtcgctaatttctactaagtgtagatattgccgctcgcgcaaaatctaatttctactaagtgtagatttttttnnnnnnnnnnaagcttggcgtggatccgatatcaactagatcttgagacaaatggcagtattcatccacaattttaaaagaaaaggggggattggggggtacagtgcaggggaaagaatagtagacataatagcaacagacatacaaactaaag

SEQ ID NO: 16361 - DNA, 301 bp, Artificial Sequence
  Cdkn2a.3_NTC.51
  crRNA array
  misc_feature (148)..(157): n is a, c, g, or t
cttggctttatatatcttgtggaaaggacgaaacaccgtaatttctactaagtgtagattgtaccgctgggaacgtcgctaatttctactaagtgtagattaacgcgcaacacgccaatgtaatttctactaagtgtagatttttttnnnnnnnnnnaagcttggcgtggatccgatatcaactagatcttgagacaaatggcagtattcatccacaattttaaaagaaaaggggggattggggggtacagtgcaggggaaagaatagtagacataatagcaacagacatacaaactaaag

SEQ ID NO: 16362 - DNA, 301 bp, Artificial Sequence
  Cdkn2a.3_NTC.6
  crRNA array
  misc_feature (148)..(157): n is a, c, g, or t
cttggctttatatatcttgtggaaaggacgaaacaccgtaatttctactaagtgtagattgtaccgctgggaacgtcgctaatttctactaagtgtagatcgaatcgcgcctacgggaattaatttctactaagtgtagatttttttnnnnnnnnnnaagcttggcgtggatccgatatcaactagatcttgagacaaatggcagtattcatccacaattttaaaagaaaaggggggattggggggtacagtgcaggggaaagaatagtagacataatagcaacagacatacaaactaaag

SEQ ID NO: 16363 - DNA, 301 bp, Artificial Sequence
  Cdkn2a.3_NTC.7
  crRNA array
  misc_feature (148)..(157): n is a, c, g, or t
cttggctttatatatcttgtggaaaggacgaaacaccgtaatttctactaagtgtagattgtaccgctgggaacgtcgctaatttctactaagtgtagatcgccgaacggataagactattaatttctactaagtgtagatttttttnnnnnnnnnnaagcttggcgtggatccgatatcaactagatcttgagacaaatggcagtattcatccacaattttaaaagaaaaggggggattggggggtacagtgcaggggaaagaatagtagacataatagcaacagacatacaaactaaag

SEQ ID NO: 16364 - DNA, 301 bp, Artificial Sequence
  Cdkn2a.3_NTC.8
  crRNA array
  misc_feature (148)..(157): n is a, c, g, or t
cttggctttatatatcttgtggaaaggacgaaacaccgtaatttctactaagtgtagattgtaccgctgggaacgtcgctaatttctactaagtgtagatcgaccgaggttacgctgggataatttctactaagtgtagatttttttnnnnnnnnnnaagcttggcgtggatccgatatcaactagatcttgagacaaatggcagtattcatccacaattttaaaagaaaaggggggattggggggtacagtgcaggggaaagaatagtagacataatagcaacagacatacaaactaaag

SEQ ID NO: 16365 - DNA, 301 bp, Artificial Sequence
  Cdkn2a.3_NTC.9
  crRNA array
  misc_feature (148)..(157): n is a, c, g, or t
cttggctttatatatcttgtggaaaggacgaaacaccgtaatttctactaagtgtagattgtaccgctgggaacgtcgctaatttctactaagtgtagatatcgccgtacggctatggcataatttctactaagtgtagatttttttnnnnnnnnnnaagcttggcgtggatccgatatcaactagatcttgagacaaatggcagtattcatccacaattttaaaagaaaaggggggattggggggtacagtgcaggggaaagaatagtagacataatagcaacagacatacaaactaaag

SEQ ID NO: 16366 - DNA, 301 bp, Artificial Sequence
  Cdkn2a.4_NTC.0
  crRNA array
  misc_feature (148)..(157): n is a, c, g, or t
cttggctttatatatcttgtggaaaggacgaaacaccgtaatttctactaagtgtagataagccacatgctagacacgctaatttctactaagtgtagattatagcgtcgcgcgctaatttaatttctactaagtgtagatttttttnnnnnnnnnnaagcttggcgtggatccgatatcaactagatcttgagacaaatggcagtattcatccacaattttaaaagaaaaggggggattggggggtacagtgcaggggaaagaatagtagacataatagcaacagacatacaaactaaag

SEQ ID NO: 16367 - DNA, 301 bp, Artificial Sequence
  Cdkn2a.4_NTC.1
  crRNA array
  misc_feature (148)..(157): n is a, c, g, or t
cttggctttatatatcttgtggaaaggacgaaacaccgtaatttctactaagtgtagataagccacatgctagacacgctaatttctactaagtgtagatcgcgtaaccgttccggctcctaatttctactaagtgtagatttttttnnnnnnnnnnaagcttggcgtggatccgatatcaactagatcttgagacaaatggcagtattcatccacaattttaaaagaaaaggggggattggggggtacagtgcaggggaaagaatagtagacataatagcaacagacatacaaactaaag

SEQ ID NO: 16368 - DNA, 301 bp, Artificial Sequence
  Cdkn2a.4_NTC.10
  crRNA array
  misc_feature (148)..(157): n is a, c, g, or t
cttggctttatatatcttgtggaaaggacgaaacaccgtaatttctactaagtgtagataagccacatgctagacacgctaatttctactaagtgtagatcgctaagttcgcgcgggccgtaatttctactaagtgtagatttttttnnnnnnnnnnaagcttggcgtggatccgatatcaactagatcttgagacaaatggcagtattcatccacaattttaaaagaaaaggggggattggggggtacagtgcaggggaaagaatagtagacataatagcaacagacatacaaactaaag

SEQ ID NO: 16369 - DNA, 301 bp, Artificial Sequence
  Cdkn2a.4_NTC.11
  crRNA array
  misc_feature (148)..(157): n is a, c, g, or t
cttggctttatatatcttgtggaaaggacgaaacaccgtaatttctactaagtgtagataagccacatgctagacacgctaatttctactaagtgtagatcgttcgtcgacgaagcaatctaatttctactaagtgtagatttttttnnnnnnnnnnaagcttggcgtggatccgatatcaactagatcttgagacaaatggcagtattcatccacaattttaaaagaaaaggggggattggggggtacagtgcaggggaaagaatagtagacataatagcaacagacatacaaactaaag

SEQ ID NO: 16370 - DNA, 301 bp, Artificial Sequence
  Cdkn2a.4_NTC.12
  crRNA array
  misc_feature (148)..(157): n is a, c, g, or t
cttggctttatatatcttgtggaaaggacgaaacaccgtaatttctactaagtgtagataagccacatgctagacacgctaatttctactaagtgtagatcgccgacgattaatcaatagtaatttctactaagtgtagatttttttnnnnnnnnnnaagcttggcgtggatccgatatcaactagatcttgagacaaatggcagtattcatccacaattttaaaagaaaaggggggattggggggtacagtgcaggggaaagaatagtagacataatagcaacagacatacaaactaaag

SEQ ID NO: 16371 - DNA, 301 bp, Artificial Sequence
  Cdkn2a.4_NTC.13
  crRNA array
  misc_feature (148)..(157): n is a, c, g, or t
cttggctttatatatcttgtggaaaggacgaaacaccgtaatttctactaagtgtagataagccacatgctagacacgctaatttctactaagtgtagatgaccgttgtatcgcgatcaataatttctactaagtgtagatttttttnnnnnnnnnnaagcttggcgtggatccgatatcaactagatcttgagacaaatggcagtattcatccacaattttaaaagaaaaggggggattggggggtacagtgcaggggaaagaatagtagacataatagcaacagacatacaaactaaag

SEQ ID NO: 16372 - DNA, 301 bp, Artificial Sequence
  Cdkn2a.4_NTC.14
  crRNA array
  misc_feature (148)..(157): n is a, c, g, or t
cttggctttatatatcttgtggaaaggacgaaacaccgtaatttctactaagtgtagataagccacatgctagacacgctaatttctactaagtgtagatccgttcgtgcgatagtgttttaatttctactaagtgtagatttttttnnnnnnnnnnaagcttggcgtggatccgatatcaactagatcttgagacaaatggcagtattcatccacaattttaaaagaaaaggggggattggggggtacagtgcaggggaaagaatagtagacataatagcaacagacatacaaactaaag

SEQ ID NO: 16373 - DNA, 301 bp, Artificial Sequence
  Cdkn2a.4_NTC.15
  crRNA array
  misc_feature (148)..(157): n is a, c, g, or t
cttggctttatatatcttgtggaaaggacgaaacaccgtaatttctactaagtgtagataagccacatgctagacacgctaatttctactaagtgtagatgttgtcgtgccgcgaatttataatttctactaagtgtagatttttttnnnnnnnnnnaagcttggcgtggatccgatatcaactagatcttgagacaaatggcagtattcatccacaattttaaaagaaaaggggggattggggggtacagtgcaggggaaagaatagtagacataatagcaacagacatacaaactaaag

SEQ ID NO: 16374 - DNA, 301 bp, Artificial Sequence
  Cdkn2a.4_NTC.16
  crRNA array
  misc_feature (148)..(157): n is a, c, g, or t
cttggctttatatatcttgtggaaaggacgaaacaccgtaatttctactaagtgtagataagccacatgctagacacgctaatttctactaagtgtagatcggtacgttagacgaaaatttaatttctactaagtgtagatttttttnnnnnnnnnnaagcttggcgtggatccgatatcaactagatcttgagacaaatggcagtattcatccacaattttaaaagaaaaggggggattggggggtacagtgcaggggaaagaatagtagacataatagcaacagacatacaaactaaag

SEQ ID NO: 16375 - DNA, 301 bp, Artificial Sequence
  Cdkn2a.4_NTC.17
  crRNA array
  misc_feature (148)..(157): n is a, c, g, or t
cttggctttatatatcttgtggaaaggacgaaacaccgtaatttctactaagtgtagataagccacatgctagacacgctaatttctactaagtgtagattatcgaacgctatcgaacgttaatttctactaagtgtagatttttttnnnnnnnnnnaagcttggcgtggatccgatatcaactagatcttgagacaaatggcagtattcatccacaattttaaaagaaaaggggggattggggggtacagtgcaggggaaagaatagtagacataatagcaacagacatacaaactaaag

SEQ ID NO: 16376 - DNA, 301 bp, Artificial Sequence
  Cdkn2a.4_NTC.18
  crRNA array
  misc_feature (148)..(157): n is a, c, g, or t
cttggctttatatatcttgtggaaaggacgaaacaccgtaatttctactaagtgtagataagccacatgctagacacgctaatttctactaagtgtagattccggttacgaccggcaaaataatttctactaagtgtagatttttttnnnnnnnnnnaagcttggcgtggatccgatatcaactagatcttgagacaaatggcagtattcatccacaattttaaaagaaaaggggggattggggggtacagtgcaggggaaagaatagtagacataatagcaacagacatacaaactaaag

SEQ ID NO: 16377 - DNA, 301 bp, Artificial Sequence
  Cdkn2a.4_NTC.19
  crRNA array
  misc_feature (148)..(157): n is a, c, g, or t
cttggctttatatatcttgtggaaaggacgaaacaccgtaatttctactaagtgtagataagccacatgctagacacgctaatttctactaagtgtagatcgtcgtagaacgatacccgataatttctactaagtgtagatttttttnnnnnnnnnnaagcttggcgtggatccgatatcaactagatcttgagacaaatggcagtattcatccacaattttaaaagaaaaggggggattggggggtacagtgcaggggaaagaatagtagacataatagcaacagacatacaaactaaag

SEQ ID NO: 16378 - DNA, 301 bp, Artificial Sequence
  Cdkn2a.4_NTC.2
  crRNA array
  misc_feature (148)..(157): n is a, c, g, or t
cttggctttatatatcttgtggaaaggacgaaacaccgtaatttctactaagtgtagataagccacatgctagacacgctaatttctactaagtgtagatttatgtcgcgccgcgacccgtaatttctactaagtgtagatttttttnnnnnnnnnnaagcttggcgtggatccgatatcaactagatcttgagacaaatggcagtattcatccacaattttaaaagaaaaggggggattggggggtacagtgcaggggaaagaatagtagacataatagcaacagacatacaaactaaag

SEQ ID NO: 16379 - DNA, 301 bp, Artificial Sequence
  Cdkn2a.4_NTC.20
  crRNA array
  misc_feature (148)..(157): n is a, c, g, or t
cttggctttatatatcttgtggaaaggacgaaacaccgtaatttctactaagtgtagataagccacatgctagacacgctaatttctactaagtgtagatattccggcgcgaccagaagataatttctactaagtgtagatttttttnnnnnnnnnnaagcttggcgtggatccgatatcaactagatcttgagacaaatggcagtattcatccacaattttaaaagaaaaggggggattggggggtacagtgcaggggaaagaatagtagacataatagcaacagacatacaaactaaag

SEQ ID NO: 16380 - DNA, 301 bp, Artificial Sequence
  Cdkn2a.4_NTC.21
  crRNA array
  misc_feature (148)..(157): n is a, c, g, or t
cttggctttatatatcttgtggaaaggacgaaacaccgtaatttctactaagtgtagataagccacatgctagacacgctaatttctactaagtgtagatgtataacttcgcgcggtccgtaatttctactaagtgtagatttttttnnnnnnnnnnaagcttggcgtggatccgatatcaactagatcttgagacaaatggcagtattcatccacaattttaaaagaaaaggggggattggggggtacagtgcaggggaaagaatagtagacataatagcaacagacatacaaactaaag

SEQ ID NO: 16381 - DNA, 301 bp, Artificial Sequence
  Cdkn2a.4_NTC.22
  crRNA array
  misc_feature (148)..(157): n is a, c, g, or t
cttggctttatatatcttgtggaaaggacgaaacaccgtaatttctactaagtgtagataagccacatgctagacacgctaatttctactaagtgtagatgcgcgtcaacgtaatgtgcctaatttctactaagtgtagatttttttnnnnnnnnnnaagcttggcgtggatccgatatcaactagatcttgagacaaatggcagtattcatccacaattttaaaagaaaaggggggattggggggtacagtgcaggggaaagaatagtagacataatagcaacagacatacaaactaaag

SEQ ID NO: 16382 - DNA, 301 bp, Artificial Sequence
  Cdkn2a.4_NTC.23
  crRNA array
  misc_feature (148)..(157): n is a, c, g, or t
cttggctttatatatcttgtggaaaggacgaaacaccgtaatttctactaagtgtagataagccacatgctagacacgctaatttctactaagtgtagatacgcgctattatcgtaggtgtaatttctactaagtgtagatttttttnnnnnnnnnnaagcttggcgtggatccgatatcaactagatcttgagacaaatggcagtattcatccacaattttaaaagaaaaggggggattggggggtacagtgcaggggaaagaatagtagacataatagcaacagacatacaaactaaag

SEQ ID NO: 16383 - DNA, 301 bp, Artificial Sequence
  Cdkn2a.4_NTC.24
  crRNA array
  misc_feature (148)..(157): n is a, c, g, or t
cttggctttatatatcttgtggaaaggacgaaacaccgtaatttctactaagtgtagataagccacatgctagacacgctaatttctactaagtgtagatactatcgacgttcgtcccggtaatttctactaagtgtagatttttttnnnnnnnnnnaagcttggcgtggatccgatatcaactagatcttgagacaaatggcagtattcatccacaattttaaaagaaaaggggggattggggggtacagtgcaggggaaagaatagtagacataatagcaacagacatacaaactaaag

SEQ ID NO: 16384 - DNA, 301 bp, Artificial Sequence
  Cdkn2a.4_NTC.25
  crRNA array
  misc_feature (148)..(157): n is a, c, g, or t
cttggctttatatatcttgtggaaaggacgaaacaccgtaatttctactaagtgtagataagccacatgctagacacgctaatttctactaagtgtagattcgcgttatcgtgccgtgcgtaatttctactaagtgtagatttttttnnnnnnnnnnaagcttggcgtggatccgatatcaactagatcttgagacaaatggcagtattcatccacaattttaaaagaaaaggggggattggggggtacagtgcaggggaaagaatagtagacataatagcaacagacatacaaactaaag

SEQ ID NO: 16385 - DNA, 301 bp, Artificial Sequence
  Cdkn2a.4_NTC.26
  crRNA array
  misc_feature (148)..(157): n is a, c, g, or t
cttggctttatatatcttgtggaaaggacgaaacaccgtaatttctactaagtgtagataagccacatgctagacacgctaatttctactaagtgtagatcgcgacggcggttttaacactaatttctactaagtgtagatttttttnnnnnnnnnnaagcttggcgtggatccgatatcaactagatcttgagacaaatggcagtattcatccacaattttaaaagaaaaggggggattggggggtacagtgcaggggaaagaatagtagacataatagcaacagacatacaaactaaag

SEQ ID NO: 16386 - DNA, 301 bp, Artificial Sequence
  Cdkn2a.4_NTC.27
  crRNA array
  misc_feature (148)..(157): n is a, c, g, or t
cttggctttatatatcttgtggaaaggacgaaacaccgtaatttctactaagtgtagataagccacatgctagacacgctaatttctactaagtgtagatgtcgcgttgcgaccggcgcttaatttctactaagtgtagatttttttnnnnnnnnnnaagcttggcgtggatccgatatcaactagatcttgagacaaatggcagtattcatccacaattttaaaagaaaaggggggattggggggtacagtgcaggggaaagaatagtagacataatagcaacagacatacaaactaaag

SEQ ID NO: 16387 - DNA, 301 bp, Artificial Sequence
  Cdkn2a.4_NTC.28
  crRNA array
  misc_feature (148)..(157): n is a, c, g, or t
cttggctttatatatcttgtggaaaggacgaaacaccgtaatttctactaagtgtagataagccacatgctagacacgctaatttctactaagtgtagataccgctaatcggcgtaaacttaatttctactaagtgtagatttttttnnnnnnnnnnaagcttggcgtggatccgatatcaactagatcttgagacaaatggcagtattcatccacaattttaaaagaaaaggggggattggggggtacagtgcaggggaaagaatagtagacataatagcaacagacatacaaactaaag

SEQ ID NO: 16388 - DNA, 301 bp, Artificial Sequence
  Cdkn2a.4_NTC.29
  crRNA array
  misc_feature (148)..(157): n is a, c, g, or t
cttggctttatatatcttgtggaaaggacgaaacaccgtaatttctactaagtgtagataagccacatgctagacacgctaatttctactaagtgtagatcgcgatctataccgtctatataatttctactaagtgtagatttttttnnnnnnnnnnaagcttggcgtggatccgatatcaactagatcttgagacaaatggcagtattcatccacaattttaaaagaaaaggggggattggggggtacagtgcaggggaaagaatagtagacataatagcaacagacatacaaactaaag

SEQ ID NO: 16389 - DNA, 301 bp, Artificial Sequence
  Cdkn2a.4_NTC.3
  crRNA array
  misc_feature (148)..(157): n is a, c, g, or t
cttggctttatatatcttgtggaaaggacgaaacaccgtaatttctactaagtgtagataagccacatgctagacacgctaatttctactaagtgtagattcgacgcgagacgacgtacataatttctactaagtgtagatttttttnnnnnnnnnnaagcttggcgtggatccgatatcaactagatcttgagacaaatggcagtattcatccacaattttaaaagaaaaggggggattggggggtacagtgcaggggaaagaatagtagacataatagcaacagacatacaaactaaag

SEQ ID NO: 16390 - DNA, 301 bp, Artificial Sequence
  Cdkn2a.4_NTC.30
  crRNA array
  misc_feature (148)..(157): n is a, c, g, or t
cttggctttatatatcttgtggaaaggacgaaacaccgtaatttctactaagtgtagataagccacatgctagacacgctaatttctactaagtgtagatcgatcgtacgggtgtcctaataatttctactaagtgtagatttttttnnnnnnnnnnaagcttggcgtggatccgatatcaactagatcttgagacaaatggcagtattcatccacaattttaaaagaaaaggggggattggggggtacagtgcaggggaaagaatagtagacataatagcaacagacatacaaactaaag

SEQ ID NO: 16391 - DNA, 301 bp, Artificial Sequence
  Cdkn2a.4_NTC.31
  crRNA array
  misc_feature (148)..(157): n is a, c, g, or t
cttggctttatatatcttgtggaaaggacgaaacaccgtaatttctactaagtgtagataagccacatgctagacacgctaatttctactaagtgtagatgccgaccgcgtgattgtaggtaatttctactaagtgtagatttttttnnnnnnnnnnaagcttggcgtggatccgatatcaactagatcttgagacaaatggcagtattcatccacaattttaaaagaaaaggggggattggggggtacagtgcaggggaaagaatagtagacataatagcaacagacatacaaactaaag

SEQ ID NO: 16392 - DNA, 301 bp, Artificial Sequence
  Cdkn2a.4_NTC.32
  crRNA array
  misc_feature (148)..(157): n is a, c, g, or t
cttggctttatatatcttgtggaaaggacgaaacaccgtaatttctactaagtgtagataagccacatgctagacacgctaatttctactaagtgtagatgcacgttacgcccgggtcactaatttctactaagtgtagatttttttnnnnnnnnnnaagcttggcgtggatccgatatcaactagatcttgagacaaatggcagtattcatccacaattttaaaagaaaaggggggattggggggtacagtgcaggggaaagaatagtagacataatagcaacagacatacaaactaaag

SEQ ID NO: 16393 - DNA, 301 bp, Artificial Sequence
  Cdkn2a.4_NTC.33
  crRNA array
  misc_feature (148)..(157): n is a, c, g, or t
cttggctttatatatcttgtggaaaggacgaaacaccgtaatttctactaagtgtagataagccacatgctagacacgctaatttctactaagtgtagattaagcgaccgacgcattcgctaatttctactaagtgtagatttttttnnnnnnnnnnaagcttggcgtggatccgatatcaactagatcttgagacaaatggcagtattcatccacaattttaaaagaaaaggggggattggggggtacagtgcaggggaaagaatagtagacataatagcaacagacatacaaactaaag

SEQ ID NO: 16394 - DNA, 301 bp, Artificial Sequence
  Cdkn2a.4_NTC.34
  crRNA array
  misc_feature (148)..(157): n is a, c, g, or t
cttggctttatatatcttgtggaaaggacgaaacaccgtaatttctactaagtgtagataagccacatgctagacacgctaatttctactaagtgtagattagcgttcgacacgtgaaactaatttctactaagtgtagatttttttnnnnnnnnnnaagcttggcgtggatccgatatcaactagatcttgagacaaatggcagtattcatccacaattttaaaagaaaaggggggattggggggtacagtgcaggggaaagaatagtagacataatagcaacagacatacaaactaaag

SEQ ID NO: 16395 - DNA, 301 bp, Artificial Sequence
  Cdkn2a.4_NTC.35
  crRNA array
  misc_feature (148)..(157): n is a, c, g, or t
cttggctttatatatcttgtggaaaggacgaaacaccgtaatttctactaagtgtagataagccacatgctagacacgctaatttctactaagtgtagattggcgcgtaatcgctattcgtaatttctactaagtgtagatttttttnnnnnnnnnnaagcttggcgtggatccgatatcaactagatcttgagacaaatggcagtattcatccacaattttaaaagaaaaggggggattggggggtacagtgcaggggaaagaatagtagacataatagcaacagacatacaaactaaag

SEQ ID NO: 16396 - DNA, 301 bp, Artificial Sequence
  Cdkn2a.4_NTC.36
  crRNA array
  misc_feature (148)..(157): n is a, c, g, or t
cttggctttatatatcttgtggaaaggacgaaacaccgtaatttctactaagtgtagataagccacatgctagacacgctaatttctactaagtgtagatcaacccgccgtagcgggccttaatttctactaagtgtagatttttttnnnnnnnnnnaagcttggcgtggatccgatatcaactagatcttgagacaaatggcagtattcatccacaattttaaaagaaaaggggggattggggggtacagtgcaggggaaagaatagtagacataatagcaacagacatacaaactaaag

SEQ ID NO: 16397 - DNA, 301 bp, Artificial Sequence
  Cdkn2a.4_NTC.37
  crRNA array
  misc_feature (148)..(157): n is a, c, g, or t
cttggctttatatatcttgtggaaaggacgaaacaccgtaatttctactaagtgtagataagccacatgctagacacgctaatttctactaagtgtagattttgcgttgacgcgattacttaatttctactaagtgtagatttttttnnnnnnnnnnaagcttggcgtggatccgatatcaactagatcttgagacaaatggcagtattcatccacaattttaaaagaaaaggggggattggggggtacagtgcaggggaaagaatagtagacataatagcaacagacatacaaactaaag

SEQ ID NO: 16398 - DNA, 301 bp, Artificial Sequence
  Cdkn2a.4_NTC.38
  crRNA array
  misc_feature (148)..(157): n is a, c, g, or t
cttggctttatatatcttgtggaaaggacgaaacaccgtaatttctactaagtgtagataagccacatgctagacacgctaatttctactaagtgtagataacggagcgcgatactaccataatttctactaagtgtagatttttttnnnnnnnnnnaagcttggcgtggatccgatatcaactagatcttgagacaaatggcagtattcatccacaattttaaaagaaaaggggggattggggggtacagtgcaggggaaagaatagtagacataatagcaacagacatacaaactaaag

SEQ ID NO: 16399 - DNA, 301 bp, Artificial Sequence
  Cdkn2a.4_NTC.39
  crRNA array
  misc_feature (148)..(157): n is a, c, g, or t
cttggctttatatatcttgtggaaaggacgaaacaccgtaatttctactaagtgtagataagccacatgctagacacgctaatttctactaagtgtagatccggacgttataacgtttcttaatttctactaagtgtagatttttttnnnnnnnnnnaagcttggcgtggatccgatatcaactagatcttgagacaaatggcagtattcatccacaattttaaaagaaaaggggggattggggggtacagtgcaggggaaagaatagtagacataatagcaacagacatacaaactaaag

SEQ ID NO: 16400 - DNA, 301 bp, Artificial Sequence
  Cdkn2a.4_NTC.4
  crRNA array
  misc_feature (148)..(157): n is a, c, g, or t
cttggctttatatatcttgtggaaaggacgaaacaccgtaatttctactaagtgtagataagccacatgctagacacgctaatttctactaagtgtagatatacccgtcgcgaacgtgagtaatttctactaagtgtagatttttttnnnnnnnnnnaagcttggcgtggatccgatatcaactagatcttgagacaaatggcagtattcatccacaattttaaaagaaaaggggggattggggggtacagtgcaggggaaagaatagtagacataatagcaacagacatacaaactaaag

SEQ ID NO: 16401 - DNA, 301 bp, Artificial Sequence
  Cdkn2a.4_NTC.40
  crRNA array
  misc_feature (148)..(157): n is a, c, g, or t
cttggctttatatatcttgtggaaaggacgaaacaccgtaatttctactaagtgtagataagccacatgctagacacgctaatttctactaagtgtagatattcgcgaacccggccggaataatttctactaagtgtagatttttttnnnnnnnnnnaagcttggcgtggatccgatatcaactagatcttgagacaaatggcagtattcatccacaattttaaaagaaaaggggggattggggggtacagtgcaggggaaagaatagtagacataatagcaacagacatacaaactaaag

SEQ ID NO: 16402 - DNA, 301 bp, Artificial Sequence
  Cdkn2a.4_NTC.41
  crRNA array
  misc_feature (148)..(157): n is a, c, g, or t
cttggctttatatatcttgtggaaaggacgaaacaccgtaatttctactaagtgtagataagccacatgctagacacgctaatttctactaagtgtagatttgatggcgcgacgcgttattaatttctactaagtgtagatttttttnnnnnnnnnnaagcttggcgtggatccgatatcaactagatcttgagacaaatggcagtattcatccacaattttaaaagaaaaggggggattggggggtacagtgcaggggaaagaatagtagacataatagcaacagacatacaaactaaag

SEQ ID NO: 16403 - DNA, 301 bp, Artificial Sequence
  Cdkn2a.4_NTC.42
  crRNA array
  misc_feature (148)..(157): n is a, c, g, or t
cttggctttatatatcttgtggaaaggacgaaacaccgtaatttctactaagtgtagataagccacatgctagacacgctaatttctactaagtgtagatggtcaaatcgcggcgataactaatttctactaagtgtagatttttttnnnnnnnnnnaagcttggcgtggatccgatatcaactagatcttgagacaaatggcagtattcatccacaattttaaaagaaaaggggggattggggggtacagtgcaggggaaagaatagtagacataatagcaacagacatacaaactaaag

SEQ ID NO: 16404 - DNA, 301 bp, Artificial Sequence
  Cdkn2a.4_NTC.43
  crRNA array
  misc_feature (148)..(157): n is a, c, g, or t
cttggctttatatatcttgtggaaaggacgaaacaccgtaatttctactaagtgtagataagccacatgctagacacgctaatttctactaagtgtagatcgactcgcgcattgaactggtaatttctactaagtgtagatttttttnnnnnnnnnnaagcttggcgtggatccgatatcaactagatcttgagacaaatggcagtattcatccacaattttaaaagaaaaggggggattggggggtacagtgcaggggaaagaatagtagacataatagcaacagacatacaaactaaag

SEQ ID NO: 16405 - DNA, 301 bp, Artificial Sequence
  Cdkn2a.4_NTC.44
  crRNA array
  misc_feature (148)..(157): n is a, c, g, or t
cttggctttatatatcttgtggaaaggacgaaacaccgtaatttctactaagtgtagataagccacatgctagacacgctaatttctactaagtgtagatagcgtcgtacgatttatcgttaatttctactaagtgtagatttttttnnnnnnnnnnaagcttggcgtggatccgatatcaactagatcttgagacaaatggcagtattcatccacaattttaaaagaaaaggggggattggggggtacagtgcaggggaaagaatagtagacataatagcaacagacatacaaactaaag

SEQ ID NO: 16406 - DNA, 301 bp, Artificial Sequence
  Cdkn2a.4_NTC.45
  crRNA array
  misc_feature (148)..(157): n is a, c, g, or t
cttggctttatatatcttgtggaaaggacgaaacaccgtaatttctactaagtgtagataagccacatgctagacacgctaatttctactaagtgtagatcggaacgcgtgatactagggtaatttctactaagtgtagatttttttnnnnnnnnnnaagcttggcgtggatccgatatcaactagatcttgagacaaatggcagtattcatccacaattttaaaagaaaaggggggattggggggtacagtgcaggggaaagaatagtagacataatagcaacagacatacaaactaaag

SEQ ID NO: 16407 - DNA, 301 bp, Artificial Sequence
  Cdkn2a.4_NTC.46
  crRNA array
  misc_feature (148)..(157): n is a, c, g, or t
cttggctttatatatcttgtggaaaggacgaaacaccgtaatttctactaagtgtagataagccacatgctagacacgctaatttctactaagtgtagatagcgggtcgtagacgcgcggtaatttctactaagtgtagatttttttnnnnnnnnnnaagcttggcgtggatccgatatcaactagatcttgagacaaatggcagtattcatccacaattttaaaagaaaaggggggattggggggtacagtgcaggggaaagaatagtagacataatagcaacagacatacaaactaaag

SEQ ID NO: 16408 - DNA, 301 bp, Artificial Sequence
  Cdkn2a.4_NTC.47
  crRNA array
  misc_feature (148)..(157): n is a, c, g, or t
cttggctttatatatcttgtggaaaggacgaaacaccgtaatttctactaagtgtagataagccacatgctagacacgctaatttctactaagtgtagattctcgtatcgcgattgttaataatttctactaagtgtagatttttttnnnnnnnnnnaagcttggcgtggatccgatatcaactagatcttgagacaaatggcagtattcatccacaattttaaaagaaaaggggggattggggggtacagtgcaggggaaagaatagtagacataatagcaacagacatacaaactaaag

SEQ ID NO: 16409 - DNA, 301 bp, Artificial Sequence
  Cdkn2a.4_NTC.48
  crRNA array
  misc_feature (148)..(157): n is a, c, g, or t
cttggctttatatatcttgtggaaaggacgaaacaccgtaatttctactaagtgtagataagccacatgctagacacgctaatttctactaagtgtagatcggtcgactacggctgttagtaatttctactaagtgtagatttttttnnnnnnnnnnaagcttggcgtggatccgatatcaactagatcttgagacaaatggcagtattcatccacaattttaaaagaaaaggggggattggggggtacagtgcaggggaaagaatagtagacataatagcaacagacatacaaactaaag

SEQ ID NO: 16410 - DNA, 301 bp, Artificial Sequence
  Cdkn2a.4_NTC.49
  crRNA array
  misc_feature (148)..(157): n is a, c, g, or t
cttggctttatatatcttgtggaaaggacgaaacaccgtaatttctactaagtgtagataagccacatgctagacacgctaatttctactaagtgtagattcggggcgcgtcaactgaattaatttctactaagtgtagatttttttnnnnnnnnnnaagcttggcgtggatccgatatcaactagatcttgagacaaatggcagtattcatccacaattttaaaagaaaaggggggattggggggtacagtgcaggggaaagaatagtagacataatagcaacagacatacaaactaaag

SEQ ID NO: 16411 - DNA, 301 bp, Artificial Sequence
  Cdkn2a.4_NTC.5
  crRNA array
  misc_feature (148)..(157): n is a, c, g, or t
cttggctttatatatcttgtggaaaggacgaaacaccgtaatttctactaagtgtagataagccacatgctagacacgctaatttctactaagtgtagatgcttacgcgtcgcgaatgtataatttctactaagtgtagatttttttnnnnnnnnnnaagcttggcgtggatccgatatcaactagatcttgagacaaatggcagtattcatccacaattttaaaagaaaaggggggattggggggtacagtgcaggggaaagaatagtagacataatagcaacagacatacaaactaaag

SEQ ID NO: 16412 - DNA, 301 bp, Artificial Sequence
  Cdkn2a.4_NTC.50
  crRNA array
  misc_feature (148)..(157): n is a, c, g, or t
cttggctttatatatcttgtggaaaggacgaaacaccgtaatttctactaagtgtagataagccacatgctagacacgctaatttctactaagtgtagatattgccgctcgcgcaaaatctaatttctactaagtgtagatttttttnnnnnnnnnnaagcttggcgtggatccgatatcaactagatcttgagacaaatggcagtattcatccacaattttaaaagaaaaggggggattggggggtacagtgcaggggaaagaatagtagacataatagcaacagacatacaaactaaag

SEQ ID NO: 16413 - DNA, 301 bp, Artificial Sequence
  Cdkn2a.4_NTC.51
  crRNA array
  misc_feature (148)..(157): n is a, c, g, or t
cttggctttatatatcttgtggaaaggacgaaacaccgtaatttctactaagtgtagataagccacatgctagacacgctaatttctactaagtgtagattaacgcgcaacacgccaatgtaatttctactaagtgtagatttttttnnnnnnnnnnaagcttggcgtggatccgatatcaactagatcttgagacaaatggcagtattcatccacaattttaaaagaaaaggggggattggggggtacagtgcaggggaaagaatagtagacataatagcaacagacatacaaactaaag

SEQ ID NO: 16414 - DNA, 301 bp, Artificial Sequence
  Cdkn2a.4_NTC.6
  crRNA array
  misc_feature (148)..(157): n is a, c, g, or t
cttggctttatatatcttgtggaaaggacgaaacaccgtaatttctactaagtgtagataagccacatgctagacacgctaatttctactaagtgtagatcgaatcgcgcctacgggaattaatttctactaagtgtagatttttttnnnnnnnnnnaagcttggcgtggatccgatatcaactagatcttgagacaaatggcagtattcatccacaattttaaaagaaaaggggggattggggggtacagtgcaggggaaagaatagtagacataatagcaacagacatacaaactaaag

SEQ ID NO: 16415 - DNA, 301 bp, Artificial Sequence
  Cdkn2a.4_NTC.7
  crRNA array
  misc_feature (148)..(157): n is a, c, g, or t
cttggctttatatatcttgtggaaaggacgaaacaccgtaatttctactaagtgtagataagccacatgctagacacgctaatttctactaagtgtagatcgccgaacggataagactattaatttctactaagtgtagatttttttnnnnnnnnnnaagcttggcgtggatccgatatcaactagatcttgagacaaatggcagtattcatccacaattttaaaagaaaaggggggattggggggtacagtgcaggggaaagaatagtagacataatagcaacagacatacaaactaaag

SEQ ID NO: 16416 - DNA, 301 bp, Artificial Sequence
  Cdkn2a.4_NTC.8
  crRNA array
  misc_feature (148)..(157): n is a, c, g, or t
cttggctttatatatcttgtggaaaggacgaaacaccgtaatttctactaagtgtagataagccacatgctagacacgctaatttctactaagtgtagatcgaccgaggttacgctgggataatttctactaagtgtagatttttttnnnnnnnnnnaagcttggcgtggatccgatatcaactagatcttgagacaaatggcagtattcatccacaattttaaaagaaaaggggggattggggggtacagtgcaggggaaagaatagtagacataatagcaacagacatacaaactaaag

SEQ ID NO: 16417 - DNA, 301 bp, Artificial Sequence
  Cdkn2a.4_NTC.9
  crRNA array
  misc_feature (148)..(157): n is a, c, g, or t
cttggctttatatatcttgtggaaaggacgaaacaccgtaatttctactaagtgtagataagccacatgctagacacgctaatttctactaagtgtagatatcgccgtacggctatggcataatttctactaagtgtagatttttttnnnnnnnnnnaagcttggcgtggatccgatatcaactagatcttgagacaaatggcagtattcatccacaattttaaaagaaaaggggggattggggggtacagtgcaggggaaagaatagtagacataatagcaacagacatacaaactaaag

SEQ ID NO: 16418 - DNA, 301 bp, Artificial Sequence
  Chd1.1_NTC.0
  crRNA array
  misc_feature (148)..(157): n is a, c, g, or t
cttggctttatatatcttgtggaaaggacgaaacaccgtaatttctactaagtgtagatcgccccactctgcaatccattaatttctactaagtgtagattatagcgtcgcgcgctaatttaatttctactaagtgtagatttttttnnnnnnnnnnaagcttggcgtggatccgatatcaactagatcttgagacaaatggcagtattcatccacaattttaaaagaaaaggggggattggggggtacagtgcaggggaaagaatagtagacataatagcaacagacatacaaactaaag

SEQ ID NO: 16419 - DNA, 301 bp, Artificial Sequence
  Chd1.1_NTC.1
  crRNA array
  misc_feature (148)..(157): n is a, c, g, or t
cttggctttatatatcttgtggaaaggacgaaacaccgtaatttctactaagtgtagatcgccccactctgcaatccattaatttctactaagtgtagatcgcgtaaccgttccggctcctaatttctactaagtgtagatttttttnnnnnnnnnnaagcttggcgtggatccgatatcaactagatcttgagacaaatggcagtattcatccacaattttaaaagaaaaggggggattggggggtacagtgcaggggaaagaatagtagacataatagcaacagacatacaaactaaag

SEQ ID NO: 16420 - DNA, 301 bp, Artificial Sequence
  Chd1.1_NTC.10
  crRNA array
  misc_feature (148)..(157): n is a, c, g, or t
cttggctttatatatcttgtggaaaggacgaaacaccgtaatttctactaagtgtagatcgccccactctgcaatccattaatttctactaagtgtagatcgctaagttcgcgcgggccgtaatttctactaagtgtagatttttttnnnnnnnnnnaagcttggcgtggatccgatatcaactagatcttgagacaaatggcagtattcatccacaattttaaaagaaaaggggggattggggggtacagtgcaggggaaagaatagtagacataatagcaacagacatacaaactaaag

SEQ ID NO: 16421 - DNA, 301 bp, Artificial Sequence
  Chd1.1_NTC.11
  crRNA array
  misc_feature (148)..(157): n is a, c, g, or t
cttggctttatatatcttgtggaaaggacgaaacaccgtaatttctactaagtgtagatcgccccactctgcaatccattaatttctactaagtgtagatcgttcgtcgacgaagcaatctaatttctactaagtgtagatttttttnnnnnnnnnnaagcttggcgtggatccgatatcaactagatcttgagacaaatggcagtattcatccacaattttaaaagaaaaggggggattggggggtacagtgcaggggaaagaatagtagacataatagcaacagacatacaaactaaag

SEQ ID NO: 16422 - DNA, 301 bp, Artificial Sequence
  Chd1.1_NTC.12
  crRNA array
  misc_feature (148)..(157): n is a, c, g, or t
cttggctttatatatcttgtggaaaggacgaaacaccgtaatttctactaagtgtagatcgccccactctgcaatccattaatttctactaagtgtagatcgccgacgattaatcaatagtaatttctactaagtgtagatttttttnnnnnnnnnnaagcttggcgtggatccgatatcaactagatcttgagacaaatggcagtattcatccacaattttaaaagaaaaggggggattggggggtacagtgcaggggaaagaatagtagacataatagcaacagacatacaaactaaag

SEQ ID NO: 16423 - DNA, 301 bp, Artificial Sequence
  Chd1.1_NTC.13
  crRNA array
  misc_feature (148)..(157): n is a, c, g, or t
cttggctttatatatcttgtggaaaggacgaaacaccgtaatttctactaagtgtagatcgccccactctgcaatccattaatttctactaagtgtagatgaccgttgtatcgcgatcaataatttctactaagtgtagatttttttnnnnnnnnnnaagcttggcgtggatccgatatcaactagatcttgagacaaatggcagtattcatccacaattttaaaagaaaaggggggattggggggtacagtgcaggggaaagaatagtagacataatagcaacagacatacaaactaaag

SEQ ID NO: 16424 - DNA, 301 bp, Artificial Sequence
  Chd1.1_NTC.14
  crRNA array
  misc_feature (148)..(157): n is a, c, g, or t
cttggctttatatatcttgtggaaaggacgaaacaccgtaatttctactaagtgtagatcgccccactctgcaatccattaatttctactaagtgtagatccgttcgtgcgatagtgttttaatttctactaagtgtagatttttttnnnnnnnnnnaagcttggcgtggatccgatatcaactagatcttgagacaaatggcagtattcatccacaattttaaaagaaaaggggggattggggggtacagtgcaggggaaagaatagtagacataatagcaacagacatacaaactaaag

SEQ ID NO: 16425 - DNA, 301 bp, Artificial Sequence
  Chd1.1_NTC.15
  crRNA array
  misc_feature (148)..(157): n is a, c, g, or t
cttggctttatatatcttgtggaaaggacgaaacaccgtaatttctactaagtgtagatcgccccactctgcaatccattaatttctactaagtgtagatgttgtcgtgccgcgaatttataatttctactaagtgtagatttttttnnnnnnnnnnaagcttggcgtggatccgatatcaactagatcttgagacaaatggcagtattcatccacaattttaaaagaaaaggggggattggggggtacagtgcaggggaaagaatagtagacataatagcaacagacatacaaactaaag

SEQ ID NO: 16426 - DNA, 301 bp, Artificial Sequence
  Chd1.1_NTC.16
  crRNA array
  misc_feature (148)..(157): n is a, c, g, or t
cttggctttatatatcttgtggaaaggacgaaacaccgtaatttctactaagtgtagatcgccccactctgcaatccattaatttctactaagtgtagatcggtacgttagacgaaaatttaatttctactaagtgtagatttttttnnnnnnnnnnaagcttggcgtggatccgatatcaactagatcttgagacaaatggcagtattcatccacaattttaaaagaaaaggggggattggggggtacagtgcaggggaaagaatagtagacataatagcaacagacatacaaactaaag

SEQ ID NO: 16427 - DNA, 301 bp, Artificial Sequence
  Chd1.1_NTC.17
  crRNA array
  misc_feature (148)..(157): n is a, c, g, or t
cttggctttatatatcttgtggaaaggacgaaacaccgtaatttctactaagtgtagatcgccccactctgcaatccattaatttctactaagtgtagattatcgaacgctatcgaacgttaatttctactaagtgtagatttttttnnnnnnnnnnaagcttggcgtggatccgatatcaactagatcttgagacaaatggcagtattcatccacaattttaaaagaaaaggggggattggggggtacagtgcaggggaaagaatagtagacataatagcaacagacatacaaactaaag

SEQ ID NO: 16428 - DNA, 301 bp, Artificial Sequence
  Chd1.1_NTC.18
  crRNA array
  misc_feature (148)..(157): n is a, c, g, or t
cttggctttatatatcttgtggaaaggacgaaacaccgtaatttctactaagtgtagatcgccccactctgcaatccattaatttctactaagtgtagattccggttacgaccggcaaaataatttctactaagtgtagatttttttnnnnnnnnnnaagcttggcgtggatccgatatcaactagatcttgagacaaatggcagtattcatccacaattttaaaagaaaaggggggattggggggtacagtgcaggggaaagaatagtagacataatagcaacagacatacaaactaaag

SEQ ID NO: 16429 - DNA, 301 bp, Artificial Sequence
  Chd1.1_NTC.19
  crRNA array
  misc_feature (148)..(157): n is a, c, g, or t
cttggctttatatatcttgtggaaaggacgaaacaccgtaatttctactaagtgtagatcgccccactctgcaatccattaatttctactaagtgtagatcgtcgtagaacgatacccgataatttctactaagtgtagatttttttnnnnnnnnnnaagcttggcgtggatccgatatcaactagatcttgagacaaatggcagtattcatccacaattttaaaagaaaaggggggattggggggtacagtgcaggggaaagaatagtagacataatagcaacagacatacaaactaaag

SEQ ID NO: 16430 - DNA, 301 bp, Artificial Sequence
  Chd1.1_NTC.2
  crRNA array
  misc_feature (148)..(157): n is a, c, g, or t
cttggctttatatatcttgtggaaaggacgaaacaccgtaatttctactaagtgtagatcgccccactctgcaatccattaatttctactaagtgtagatttatgtcgcgccgcgacccgtaatttctactaagtgtagatttttttnnnnnnnnnnaagcttggcgtggatccgatatcaactagatcttgagacaaatggcagtattcatccacaattttaaaagaaaaggggggattggggggtacagtgcaggggaaagaatagtagacataatagcaacagacatacaaactaaag

SEQ ID NO: 16431 - DNA, 301 bp, Artificial Sequence
  Chd1.1_NTC.20
  crRNA array
  misc_feature (148)..(157): n is a, c, g, or t
cttggctttatatatcttgtggaaaggacgaaacaccgtaatttctactaagtgtagatcgccccactctgcaatccattaatttctactaagtgtagatattccggcgcgaccagaagataatttctactaagtgtagatttttttnnnnnnnnnnaagcttggcgtggatccgatatcaactagatcttgagacaaatggcagtattcatccacaattttaaaagaaaaggggggattggggggtacagtgcaggggaaagaatagtagacataatagcaacagacatacaaactaaag

SEQ ID NO: 16432 - DNA, 301 bp, Artificial Sequence
  Chd1.1_NTC.21
  crRNA array
  misc_feature (148)..(157): n is a, c, g, or t
cttggctttatatatcttgtggaaaggacgaaacaccgtaatttctactaagtgtagatcgccccactctgcaatccattaatttctactaagtgtagatgtataacttcgcgcggtccgtaatttctactaagtgtagatttttttnnnnnnnnnnaagcttggcgtggatccgatatcaactagatcttgagacaaatggcagtattcatccacaattttaaaagaaaaggggggattggggggtacagtgcaggggaaagaatagtagacataatagcaacagacatacaaactaaag

SEQ ID NO: 16433 - DNA, 301 bp, Artificial Sequence
  Chd1.1_NTC.22
  crRNA array
  misc_feature (148)..(157): n is a, c, g, or t
cttggctttatatatcttgtggaaaggacgaaacaccgtaatttctactaagtgtagatcgccccactctgcaatccattaatttctactaagtgtagatgcgcgtcaacgtaatgtgcctaatttctactaagtgtagatttttttnnnnnnnnnnaagcttggcgtggatccgatatcaactagatcttgagacaaatggcagtattcatccacaattttaaaagaaaaggggggattggggggtacagtgcaggggaaagaatagtagacataatagcaacagacatacaaactaaag

SEQ ID NO: 16434 - DNA, 301 bp, Artificial Sequence
  Chd1.1_NTC.23
  crRNA array
  misc_feature (148)..(157): n is a, c, g, or t
cttggctttatatatcttgtggaaaggacgaaacaccgtaatttctactaagtgtagatcgccccactctgcaatccattaatttctactaagtgtagatacgcgctattatcgtaggtgtaatttctactaagtgtagatttttttnnnnnnnnnnaagcttggcgtggatccgatatcaactagatcttgagacaaatggcagtattcatccacaattttaaaagaaaaggggggattggggggtacagtgcaggggaaagaatagtagacataatagcaacagacatacaaactaaag

SEQ ID NO: 16435 - DNA, 301 bp, Artificial Sequence
  Chd1.1_NTC.24
  crRNA array
  misc_feature (148)..(157): n is a, c, g, or t
cttggctttatatatcttgtggaaaggacgaaacaccgtaatttctactaagtgtagatcgccccactctgcaatccattaatttctactaagtgtagatactatcgacgttcgtcccggtaatttctactaagtgtagatttttttnnnnnnnnnnaagcttggcgtggatccgatatcaactagatcttgagacaaatggcagtattcatccacaattttaaaagaaaaggggggattggggggtacagtgcaggggaaagaatagtagacataatagcaacagacatacaaactaaag

SEQ ID NO: 16436 - DNA, 301 bp, Artificial Sequence
  Chd1.1_NTC.25
  crRNA array
  misc_feature (148)..(157): n is a, c, g, or t
cttggctttatatatcttgtggaaaggacgaaacaccgtaatttctactaagtgtagatcgccccactctgcaatccattaatttctactaagtgtagattcgcgttatcgtgccgtgcgtaatttctactaagtgtagatttttttnnnnnnnnnnaagcttggcgtggatccgatatcaactagatcttgagacaaatggcagtattcatccacaattttaaaagaaaaggggggattggggggtacagtgcaggggaaagaatagtagacataatagcaacagacatacaaactaaag

SEQ ID NO: 16437 - DNA, 301 bp, Artificial Sequence
  Chd1.1_NTC.26
  crRNA array
  misc_feature (148)..(157): n is a, c, g, or t
cttggctttatatatcttgtggaaaggacgaaacaccgtaatttctactaagtgtagatcgccccactctgcaatccattaatttctactaagtgtagatcgcgacggcggttttaacactaatttctactaagtgtagatttttttnnnnnnnnnnaagcttggcgtggatccgatatcaactagatcttgagacaaatggcagtattcatccacaattttaaaagaaaaggggggattggggggtacagtgcaggggaaagaatagtagacataatagcaacagacatacaaactaaag

SEQ ID NO: 16438 - DNA, 301 bp, Artificial Sequence
  Chd1.1_NTC.27
  crRNA array
  misc_feature (148)..(157): n is a, c, g, or t
cttggctttatatatcttgtggaaaggacgaaacaccgtaatttctactaagtgtagatcgccccactctgcaatccattaatttctactaagtgtagatgtcgcgttgcgaccggcgcttaatttctactaagtgtagatttttttnnnnnnnnnnaagcttggcgtggatccgatatcaactagatcttgagacaaatggcagtattcatccacaattttaaaagaaaaggggggattggggggtacagtgcaggggaaagaatagtagacataatagcaacagacatacaaactaaag

SEQ ID NO: 16439 - DNA, 301 bp, Artificial Sequence
  Chd1.1_NTC.28
  crRNA array
  misc_feature (148)..(157): n is a, c, g, or t
cttggctttatatatcttgtggaaaggacgaaacaccgtaatttctactaagtgtagatcgccccactctgcaatccattaatttctactaagtgtagataccgctaatcggcgtaaacttaatttctactaagtgtagatttttttnnnnnnnnnnaagcttggcgtggatccgatatcaactagatcttgagacaaatggcagtattcatccacaattttaaaagaaaaggggggattggggggtacagtgcaggggaaagaatagtagacataatagcaacagacatacaaactaaag

SEQ ID NO: 16440 - DNA, 301 bp, Artificial Sequence
  Chd1.1_NTC.29
  crRNA array
  misc_feature (148)..(157): n is a, c, g, or t
cttggctttatatatcttgtggaaaggacgaaacaccgtaatttctactaagtgtagatcgccccactctgcaatccattaatttctactaagtgtagatcgcgatctataccgtctatataatttctactaagtgtagatttttttnnnnnnnnnnaagcttggcgtggatccgatatcaactagatcttgagacaaatggcagtattcatccacaattttaaaagaaaaggggggattggggggtacagtgcaggggaaagaatagtagacataatagcaacagacatacaaactaaag

SEQ ID NO: 16441 - DNA, 301 bp, Artificial Sequence
  Chd1.1_NTC.3
  crRNA array
  misc_feature (148)..(157): n is a, c, g, or t
cttggctttatatatcttgtggaaaggacgaaacaccgtaatttctactaagtgtagatcgccccactctgcaatccattaatttctactaagtgtagattcgacgcgagacgacgtacataatttctactaagtgtagatttttttnnnnnnnnnnaagcttggcgtggatccgatatcaactagatcttgagacaaatggcagtattcatccacaattttaaaagaaaaggggggattggggggtacagtgcaggggaaagaatagtagacataatagcaacagacatacaaactaaag

SEQ ID NO: 16442 - DNA, 301 bp, Artificial Sequence
  Chd1.1_NTC.30
  crRNA array
  misc_feature (148)..(157): n is a, c, g, or t
cttggctttatatatcttgtggaaaggacgaaacaccgtaatttctactaagtgtagatcgccccactctgcaatccattaatttctactaagtgtagatcgatcgtacgggtgtcctaataatttctactaagtgtagatttttttnnnnnnnnnnaagcttggcgtggatccgatatcaactagatcttgagacaaatggcagtattcatccacaattttaaaagaaaaggggggattggggggtacagtgcaggggaaagaatagtagacataatagcaacagacatacaaactaaag

SEQ ID NO: 16443 - DNA, 301 bp, Artificial Sequence
  Chd1.1_NTC.31
  crRNA array
  misc_feature (148)..(157): n is a, c, g, or t
cttggctttatatatcttgtggaaaggacgaaacaccgtaatttctactaagtgtagatcgccccactctgcaatccattaatttctactaagtgtagatgccgaccgcgtgattgtaggtaatttctactaagtgtagatttttttnnnnnnnnnnaagcttggcgtggatccgatatcaactagatcttgagacaaatggcagtattcatccacaattttaaaagaaaaggggggattggggggtacagtgcaggggaaagaatagtagacataatagcaacagacatacaaactaaag

SEQ ID NO: 16444 - DNA, 301 bp, Artificial Sequence
  Chd1.1_NTC.32
  crRNA array
  misc_feature (148)..(157): n is a, c, g, or t
cttggctttatatatcttgtggaaaggacgaaacaccgtaatttctactaagtgtagatcgccccactctgcaatccattaatttctactaagtgtagatgcacgttacgcccgggtcactaatttctactaagtgtagatttttttnnnnnnnnnnaagcttggcgtggatccgatatcaactagatcttgagacaaatggcagtattcatccacaattttaaaagaaaaggggggattggggggtacagtgcaggggaaagaatagtagacataatagcaacagacatacaaactaaag

SEQ ID NO: 16445 - DNA, 301 bp, Artificial Sequence
  Chd1.1_NTC.33
  crRNA array
  misc_feature (148)..(157): n is a, c, g, or t
cttggctttatatatcttgtggaaaggacgaaacaccgtaatttctactaagtgtagatcgccccactctgcaatccattaatttctactaagtgtagattaagcgaccgacgcattcgctaatttctactaagtgtagatttttttnnnnnnnnnnaagcttggcgtggatccgatatcaactagatcttgagacaaatggcagtattcatccacaattttaaaagaaaaggggggattggggggtacagtgcaggggaaagaatagtagacataatagcaacagacatacaaactaaag

SEQ ID NO: 16446 - DNA, 301 bp, Artificial Sequence
  Chd1.1_NTC.34
  crRNA array
  misc_feature (148)..(157): n is a, c, g, or t
cttggctttatatatcttgtggaaaggacgaaacaccgtaatttctactaagtgtagatcgccccactctgcaatccattaatttctactaagtgtagattagcgttcgacacgtgaaactaatttctactaagtgtagatttttttnnnnnnnnnnaagcttggcgtggatccgatatcaactagatcttgagacaaatggcagtattcatccacaattttaaaagaaaaggggggattggggggtacagtgcaggggaaagaatagtagacataatagcaacagacatacaaactaaag

SEQ ID NO: 16447 - DNA, 301 bp, Artificial Sequence
  Chd1.1_NTC.35
  crRNA array
  misc_feature (148)..(157): n is a, c, g, or t
cttggctttatatatcttgtggaaaggacgaaacaccgtaatttctactaagtgtagatcgccccactctgcaatccattaatttctactaagtgtagattggcgcgtaatcgctattcgtaatttctactaagtgtagatttttttnnnnnnnnnnaagcttggcgtggatccgatatcaactagatcttgagacaaatggcagtattcatccacaattttaaaagaaaaggggggattggggggtacagtgcaggggaaagaatagtagacataatagcaacagacatacaaactaaag

SEQ ID NO: 16448 - DNA, 301 bp, Artificial Sequence
  Chd1.1_NTC.36
  crRNA array
  misc_feature (148)..(157): n is a, c, g, or t
cttggctttatatatcttgtggaaaggacgaaacaccgtaatttctactaagtgtagatcgccccactctgcaatccattaatttctactaagtgtagatcaacccgccgtagcgggccttaatttctactaagtgtagatttttttnnnnnnnnnnaagcttggcgtggatccgatatcaactagatcttgagacaaatggcagtattcatccacaattttaaaagaaaaggggggattggggggtacagtgcaggggaaagaatagtagacataatagcaacagacatacaaactaaag

SEQ ID NO: 16449 - DNA, 301 bp, Artificial Sequence
  Chd1.1_NTC.37
  crRNA array
  misc_feature (148)..(157): n is a, c, g, or t
cttggctttatatatcttgtggaaaggacgaaacaccgtaatttctactaagtgtagatcgccccactctgcaatccattaatttctactaagtgtagattttgcgttgacgcgattacttaatttctactaagtgtagatttttttnnnnnnnnnnaagcttggcgtggatccgatatcaactagatcttgagacaaatggcagtattcatccacaattttaaaagaaaaggggggattggggggtacagtgcaggggaaagaatagtagacataatagcaacagacatacaaactaaag

SEQ ID NO: 16450 - DNA, 301 bp, Artificial Sequence
  Chd1.1_NTC.38
  crRNA array
  misc_feature (148)..(157): n is a, c, g, or t
cttggctttatatatcttgtggaaaggacgaaacaccgtaatttctactaagtgtagatcgccccactctgcaatccattaatttctactaagtgtagataacggagcgcgatactaccataatttctactaagtgtagatttttttnnnnnnnnnnaagcttggcgtggatccgatatcaactagatcttgagacaaatggcagtattcatccacaattttaaaagaaaaggggggattggggggtacagtgcaggggaaagaatagtagacataatagcaacagacatacaaactaaag

SEQ ID NO: 16451 - DNA, 301 bp, Artificial Sequence
  Chd1.1_NTC.39
  crRNA array
  misc_feature (148)..(157): n is a, c, g, or t
cttggctttatatatcttgtggaaaggacgaaacaccgtaatttctactaagtgtagatcgccccactctgcaatccattaatttctactaagtgtagatccggacgttataacgtttcttaatttctactaagtgtagatttttttnnnnnnnnnnaagcttggcgtggatccgatatcaactagatcttgagacaaatggcagtattcatccacaattttaaaagaaaaggggggattggggggtacagtgcaggggaaagaatagtagacataatagcaacagacatacaaactaaag

SEQ ID NO: 16452 - DNA, 301 bp, Artificial Sequence
  Chd1.1_NTC.4
  crRNA array
  misc_feature (148)..(157): n is a, c, g, or t
cttggctttatatatcttgtggaaaggacgaaacaccgtaatttctactaagtgtagatcgccccactctgcaatccattaatttctactaagtgtagatatacccgtcgcgaacgtgagtaatttctactaagtgtagatttttttnnnnnnnnnnaagcttggcgtggatccgatatcaactagatcttgagacaaatggcagtattcatccacaattttaaaagaaaaggggggattggggggtacagtgcaggggaaagaatagtagacataatagcaacagacatacaaactaaag

SEQ ID NO: 16453 - DNA, 301 bp, Artificial Sequence
  Chd1.1_NTC.40
  crRNA array
  misc_feature (148)..(157): n is a, c, g, or t
cttggctttatatatcttgtggaaaggacgaaacaccgtaatttctactaagtgtagatcgccccactctgcaatccattaatttctactaagtgtagatattcgcgaacccggccggaataatttctactaagtgtagatttttttnnnnnnnnnnaagcttggcgtggatccgatatcaactagatcttgagacaaatggcagtattcatccacaattttaaaagaaaaggggggattggggggtacagtgcaggggaaagaatagtagacataatagcaacagacatacaaactaaag

SEQ ID NO: 16454 - DNA, 301 bp, Artificial Sequence
  Chd1.1_NTC.41
  crRNA array
  misc_feature (148)..(157): n is a, c, g, or t
cttggctttatatatcttgtggaaaggacgaaacaccgtaatttctactaagtgtagatcgccccactctgcaatccattaatttctactaagtgtagatttgatggcgcgacgcgttattaatttctactaagtgtagatttttttnnnnnnnnnnaagcttggcgtggatccgatatcaactagatcttgagacaaatggcagtattcatccacaattttaaaagaaaaggggggattggggggtacagtgcaggggaaagaatagtagacataatagcaacagacatacaaactaaag

SEQ ID NO: 16455 - DNA, 301 bp, Artificial Sequence
  Chd1.1_NTC.42
  crRNA array
  misc_feature (148)..(157): n is a, c, g, or t
cttggctttatatatcttgtggaaaggacgaaacaccgtaatttctactaagtgtagatcgccccactctgcaatccattaatttctactaagtgtagatggtcaaatcgcggcgataactaatttctactaagtgtagatttttttnnnnnnnnnnaagcttggcgtggatccgatatcaactagatcttgagacaaatggcagtattcatccacaattttaaaagaaaaggggggattggggggtacagtgcaggggaaagaatagtagacataatagcaacagacatacaaactaaag

SEQ ID NO: 16456 - DNA, 301 bp, Artificial Sequence
  Chd1.1_NTC.43
  crRNA array
  misc_feature (148)..(157): n is a, c, g, or t
cttggctttatatatcttgtggaaaggacgaaacaccgtaatttctactaagtgtagatcgccccactctgcaatccattaatttctactaagtgtagatcgactcgcgcattgaactggtaatttctactaagtgtagatttttttnnnnnnnnnnaagcttggcgtggatccgatatcaactagatcttgagacaaatggcagtattcatccacaattttaaaagaaaaggggggattggggggtacagtgcaggggaaagaatagtagacataatagcaacagacatacaaactaaag

SEQ ID NO: 16457 - DNA, 301 bp, Artificial Sequence
  Chd1.1_NTC.44
  crRNA array
  misc_feature (148)..(157): n is a, c, g, or t
cttggctttatatatcttgtggaaaggacgaaacaccgtaatttctactaagtgtagatcgccccactctgcaatccattaatttctactaagtgtagatagcgtcgtacgatttatcgttaatttctactaagtgtagatttttttnnnnnnnnnnaagcttggcgtggatccgatatcaactagatcttgagacaaatggcagtattcatccacaattttaaaagaaaaggggggattggggggtacagtgcaggggaaagaatagtagacataatagcaacagacatacaaactaaag

SEQ ID NO: 16458 - DNA, 301 bp, Artificial Sequence
  Chd1.1_NTC.45
  crRNA array
  misc_feature (148)..(157): n is a, c, g, or t
cttggctttatatatcttgtggaaaggacgaaacaccgtaatttctactaagtgtagatcgccccactctgcaatccattaatttctactaagtgtagatcggaacgcgtgatactagggtaatttctactaagtgtagatttttttnnnnnnnnnnaagcttggcgtggatccgatatcaactagatcttgagacaaatggcagtattcatccacaattttaaaagaaaaggggggattggggggtacagtgcaggggaaagaatagtagacataatagcaacagacatacaaactaaag

SEQ ID NO: 16459 - DNA, 301 bp, Artificial Sequence
  Chd1.1_NTC.46
  crRNA array
  misc_feature (148)..(157): n is a, c, g, or t
cttggctttatatatcttgtggaaaggacgaaacaccgtaatttctactaagtgtagatcgccccactctgcaatccattaatttctactaagtgtagatagcgggtcgtagacgcgcggtaatttctactaagtgtagatttttttnnnnnnnnnnaagcttggcgtggatccgatatcaactagatcttgagacaaatggcagtattcatccacaattttaaaagaaaaggggggattggggggtacagtgcaggggaaagaatagtagacataatagcaacagacatacaaactaaag

SEQ ID NO: 16460 - DNA, 301 bp, Artificial Sequence
  Chd1.1_NTC.47
  crRNA array
  misc_feature (148)..(157): n is a, c, g, or t
cttggctttatatatcttgtggaaaggacgaaacaccgtaatttctactaagtgtagatcgccccactctgcaatccattaatttctactaagtgtagattctcgtatcgcgattgttaataatttctactaagtgtagatttttttnnnnnnnnnnaagcttggcgtggatccgatatcaactagatcttgagacaaatggcagtattcatccacaattttaaaagaaaaggggggattggggggtacagtgcaggggaaagaatagtagacataatagcaacagacatacaaactaaag

SEQ ID NO: 16461 - DNA, 301 bp, Artificial Sequence
  Chd1.1_NTC.48
  crRNA array
  misc_feature (148)..(157): n is a, c, g, or t
cttggctttatatatcttgtggaaaggacgaaacaccgtaatttctactaagtgtagatcgccccactctgcaatccattaatttctactaagtgtagatcggtcgactacggctgttagtaatttctactaagtgtagatttttttnnnnnnnnnnaagcttggcgtggatccgatatcaactagatcttgagacaaatggcagtattcatccacaattttaaaagaaaaggggggattggggggtacagtgcaggggaaagaatagtagacataatagcaacagacatacaaactaaag

SEQ ID NO: 16462 - DNA, 301 bp, Artificial Sequence
  Chd1.1_NTC.49
  crRNA array
  misc_feature (148)..(157): n is a, c, g, or t
cttggctttatatatcttgtggaaaggacgaaacaccgtaatttctactaagtgtagatcgccccactctgcaatccattaatttctactaagtgtagattcggggcgcgtcaactgaattaatttctactaagtgtagatttttttnnnnnnnnnnaagcttggcgtggatccgatatcaactagatcttgagacaaatggcagtattcatccacaattttaaaagaaaaggggggattggggggtacagtgcaggggaaagaatagtagacataatagcaacagacatacaaactaaag

SEQ ID NO: 16463 - DNA, 301 bp, Artificial Sequence
  Chd1.1_NTC.5
  crRNA array
  misc_feature (148)..(157): n is a, c, g, or t
cttggctttatatatcttgtggaaaggacgaaacaccgtaatttctactaagtgtagatcgccccactctgcaatccattaatttctactaagtgtagatgcttacgcgtcgcgaatgtataatttctactaagtgtagatttttttnnnnnnnnnnaagcttggcgtggatccgatatcaactagatcttgagacaaatggcagtattcatccacaattttaaaagaaaaggggggattggggggtacagtgcaggggaaagaatagtagacataatagcaacagacatacaaactaaag

SEQ ID NO: 16464 - DNA, 301 bp, Artificial Sequence
  Chd1.1_NTC.50
  crRNA array
  misc_feature (148)..(157): n is a, c, g, or t
cttggctttatatatcttgtggaaaggacgaaacaccgtaatttctactaagtgtagatcgccccactctgcaatccattaatttctactaagtgtagatattgccgctcgcgcaaaatctaatttctactaagtgtagatttttttnnnnnnnnnnaagcttggcgtggatccgatatcaactagatcttgagacaaatggcagtattcatccacaattttaaaagaaaaggggggattggggggtacagtgcaggggaaagaatagtagacataatagcaacagacatacaaactaaag

SEQ ID NO: 16465 - DNA, 301 bp, Artificial Sequence
  Chd1.1_NTC.51
  crRNA array
  misc_feature (148)..(157): n is a, c, g, or t
cttggctttatatatcttgtggaaaggacgaaacaccgtaatttctactaagtgtagatcgccccactctgcaatccattaatttctactaagtgtagattaacgcgcaacacgccaatgtaatttctactaagtgtagatttttttnnnnnnnnnnaagcttggcgtggatccgatatcaactagatcttgagacaaatggcagtattcatccacaattttaaaagaaaaggggggattggggggtacagtgcaggggaaagaatagtagacataatagcaacagacatacaaactaaag

SEQ ID NO: 16466 - DNA, 301 bp, Artificial Sequence
  Chd1.1_NTC.6
  crRNA array
  misc_feature (148)..(157): n is a, c, g, or t
cttggctttatatatcttgtggaaaggacgaaacaccgtaatttctactaagtgtagatcgccccactctgcaatccattaatttctactaagtgtagatcgaatcgcgcctacgggaattaatttctactaagtgtagatttttttnnnnnnnnnnaagcttggcgtggatccgatatcaactagatcttgagacaaatggcagtattcatccacaattttaaaagaaaaggggggattggggggtacagtgcaggggaaagaatagtagacataatagcaacagacatacaaactaaag

SEQ ID NO: 16467 - DNA, 301 bp, Artificial Sequence
  Chd1.1_NTC.7
  crRNA array
  misc_feature (148)..(157): n is a, c, g, or t
cttggctttatatatcttgtggaaaggacgaaacaccgtaatttctactaagtgtagatcgccccactctgcaatccattaatttctactaagtgtagatcgccgaacggataagactattaatttctactaagtgtagatttttttnnnnnnnnnnaagcttggcgtggatccgatatcaactagatcttgagacaaatggcagtattcatccacaattttaaaagaaaaggggggattggggggtacagtgcaggggaaagaatagtagacataatagcaacagacatacaaactaaag

SEQ ID NO: 16468 - DNA, 301 bp, Artificial Sequence
  Chd1.1_NTC.8
  crRNA array
  misc_feature (148)..(157): n is a, c, g, or t
cttggctttatatatcttgtggaaaggacgaaacaccgtaatttctactaagtgtagatcgccccactctgcaatccattaatttctactaagtgtagatcgaccgaggttacgctgggataatttctactaagtgtagatttttttnnnnnnnnnnaagcttggcgtggatccgatatcaactagatcttgagacaaatggcagtattcatccacaattttaaaagaaaaggggggattggggggtacagtgcaggggaaagaatagtagacataatagcaacagacatacaaactaaag

SEQ ID NO: 16469 - DNA, 301 bp, Artificial Sequence
  Chd1.1_NTC.9
  crRNA array
  misc_feature (148)..(157): n is a, c, g, or t
cttggctttatatatcttgtggaaaggacgaaacaccgtaatttctactaagtgtagatcgccccactctgcaatccattaatttctactaagtgtagatatcgccgtacggctatggcataatttctactaagtgtagatttttttnnnnnnnnnnaagcttggcgtggatccgatatcaactagatcttgagacaaatggcagtattcatccacaattttaaaagaaaaggggggattggggggtacagtgcaggggaaagaatagtagacataatagcaacagacatacaaactaaag

SEQ ID NO: 16470 - DNA, 301 bp, Artificial Sequence
  Chd1.2_NTC.0
  crRNA array
  misc_feature (148)..(157): n is a, c, g, or t
cttggctttatatatcttgtggaaaggacgaaacaccgtaatttctactaagtgtagattgcagccggcgtctggcagctaatttctactaagtgtagattatagcgtcgcgcgctaatttaatttctactaagtgtagatttttttnnnnnnnnnnaagcttggcgtggatccgatatcaactagatcttgagacaaatggcagtattcatccacaattttaaaagaaaaggggggattggggggtacagtgcaggggaaagaatagtagacataatagcaacagacatacaaactaaag

SEQ ID NO: 16471 - DNA, 301 bp, Artificial Sequence
  Chd1.2_NTC.1
  crRNA array
  misc_feature (148)..(157): n is a, c, g, or t
cttggctttatatatcttgtggaaaggacgaaacaccgtaatttctactaagtgtagattgcagccggcgtctggcagctaatttctactaagtgtagatcgcgtaaccgttccggctcctaatttctactaagtgtagatttttttnnnnnnnnnnaagcttggcgtggatccgatatcaactagatcttgagacaaatggcagtattcatccacaattttaaaagaaaaggggggattggggggtacagtgcaggggaaagaatagtagacataatagcaacagacatacaaactaaag

SEQ ID NO: 16472 - DNA, 301 bp, Artificial Sequence
  Chd1.2_NTC.10
  crRNA array
  misc_feature (148)..(157): n is a, c, g, or t
cttggctttatatatcttgtggaaaggacgaaacaccgtaatttctactaagtgtagattgcagccggcgtctggcagctaatttctactaagtgtagatcgctaagttcgcgcgggccgtaatttctactaagtgtagatttttttnnnnnnnnnnaagcttggcgtggatccgatatcaactagatcttgagacaaatggcagtattcatccacaattttaaaagaaaaggggggattggggggtacagtgcaggggaaagaatagtagacataatagcaacagacatacaaactaaag

SEQ ID NO: 16473 - DNA, 301 bp, Artificial Sequence
  Chd1.2_NTC.11
  crRNA array
  misc_feature (148)..(157): n is a, c, g, or t
cttggctttatatatcttgtggaaaggacgaaacaccgtaatttctactaagtgtagattgcagccggcgtctggcagctaatttctactaagtgtagatcgttcgtcgacgaagcaatctaatttctactaagtgtagatttttttnnnnnnnnnnaagcttggcgtggatccgatatcaactagatcttgagacaaatggcagtattcatccacaattttaaaagaaaaggggggattggggggtacagtgcaggggaaagaatagtagacataatagcaacagacatacaaactaaag

SEQ ID NO: 16474 - DNA, 301 bp, Artificial Sequence
  Chd1.2_NTC.12
  crRNA array
  misc_feature (148)..(157): n is a, c, g, or t
cttggctttatatatcttgtggaaaggacgaaacaccgtaatttctactaagtgtagattgcagccggcgtctggcagctaatttctactaagtgtagatcgccgacgattaatcaatagtaatttctactaagtgtagatttttttnnnnnnnnnnaagcttggcgtggatccgatatcaactagatcttgagacaaatggcagtattcatccacaattttaaaagaaaaggggggattggggggtacagtgcaggggaaagaatagtagacataatagcaacagacatacaaactaaag

SEQ ID NO: 16475 - DNA, 301 bp, Artificial Sequence
  Chd1.2_NTC.13
  crRNA array
  misc_feature (148)..(157): n is a, c, g, or t
cttggctttatatatcttgtggaaaggacgaaacaccgtaatttctactaagtgtagattgcagccggcgtctggcagctaatttctactaagtgtagatgaccgttgtatcgcgatcaataatttctactaagtgtagatttttttnnnnnnnnnnaagcttggcgtggatccgatatcaactagatcttgagacaaatggcagtattcatccacaattttaaaagaaaaggggggattggggggtacagtgcaggggaaagaatagtagacataatagcaacagacatacaaactaaag

SEQ ID NO: 16476 - DNA, 301 bp, Artificial Sequence
  Chd1.2_NTC.14
  crRNA array
  misc_feature (148)..(157): n is a, c, g, or t
cttggctttatatatcttgtggaaaggacgaaacaccgtaatttctactaagtgtagattgcagccggcgtctggcagctaatttctactaagtgtagatccgttcgtgcgatagtgttttaatttctactaagtgtagatttttttnnnnnnnnnnaagcttggcgtggatccgatatcaactagatcttgagacaaatggcagtattcatccacaattttaaaagaaaaggggggattggggggtacagtgcaggggaaagaatagtagacataatagcaacagacatacaaactaaag

SEQ ID NO: 16477 - DNA, 301 bp, Artificial Sequence
  Chd1.2_NTC.15
  crRNA array
  misc_feature (148)..(157): n is a, c, g, or t
cttggctttatatatcttgtggaaaggacgaaacaccgtaatttctactaagtgtagattgcagccggcgtctggcagctaatttctactaagtgtagatgttgtcgtgccgcgaatttataatttctactaagtgtagatttttttnnnnnnnnnnaagcttggcgtggatccgatatcaactagatcttgagacaaatggcagtattcatccacaattttaaaagaaaaggggggattggggggtacagtgcaggggaaagaatagtagacataatagcaacagacatacaaactaaag

SEQ ID NO: 16478 - DNA, 301 bp, Artificial Sequence
  Chd1.2_NTC.16
  crRNA array
  misc_feature (148)..(157): n is a, c, g, or t
cttggctttatatatcttgtggaaaggacgaaacaccgtaatttctactaagtgtagattgcagccggcgtctggcagctaatttctactaagtgtagatcggtacgttagacgaaaatttaatttctactaagtgtagatttttttnnnnnnnnnnaagcttggcgtggatccgatatcaactagatcttgagacaaatggcagtattcatccacaattttaaaagaaaaggggggattggggggtacagtgcaggggaaagaatagtagacataatagcaacagacatacaaactaaag

SEQ ID NO: 16479 - DNA, 301 bp, Artificial Sequence
  Chd1.2_NTC.17
  crRNA array
  misc_feature (148)..(157): n is a, c, g, or t
cttggctttatatatcttgtggaaaggacgaaacaccgtaatttctactaagtgtagattgcagccggcgtctggcagctaatttctactaagtgtagattatcgaacgctatcgaacgttaatttctactaagtgtagatttttttnnnnnnnnnnaagcttggcgtggatccgatatcaactagatcttgagacaaatggcagtattcatccacaattttaaaagaaaaggggggattggggggtacagtgcaggggaaagaatagtagacataatagcaacagacatacaaactaaag

SEQ ID NO: 16480 - DNA, 301 bp, Artificial Sequence
  Chd1.2_NTC.18
  crRNA array
  misc_feature (148)..(157): n is a, c, g, or t
cttggctttatatatcttgtggaaaggacgaaacaccgtaatttctactaagtgtagattgcagccggcgtctggcagctaatttctactaagtgtagattccggttacgaccggcaaaataatttctactaagtgtagatttttttnnnnnnnnnnaagcttggcgtggatccgatatcaactagatcttgagacaaatggcagtattcatccacaattttaaaagaaaaggggggattggggggtacagtgcaggggaaagaatagtagacataatagcaacagacatacaaactaaag

SEQ ID NO: 16481 - DNA, 301 bp, Artificial Sequence
  Chd1.2_NTC.19
  crRNA array
  misc_feature (148)..(157): n is a, c, g, or t
cttggctttatatatcttgtggaaaggacgaaacaccgtaatttctactaagtgtagattgcagccggcgtctggcagctaatttctactaagtgtagatcgtcgtagaacgatacccgataatttctactaagtgtagatttttttnnnnnnnnnnaagcttggcgtggatccgatatcaactagatcttgagacaaatggcagtattcatccacaattttaaaagaaaaggggggattggggggtacagtgcaggggaaagaatagtagacataatagcaacagacatacaaactaaag

SEQ ID NO: 16482 - DNA, 301 bp, Artificial Sequence
  Chd1.2_NTC.2
  crRNA array
  misc_feature (148)..(157): n is a, c, g, or t
cttggctttatatatcttgtggaaaggacgaaacaccgtaatttctactaagtgtagattgcagccggcgtctggcagctaatttctactaagtgtagatttatgtcgcgccgcgacccgtaatttctactaagtgtagatttttttnnnnnnnnnnaagcttggcgtggatccgatatcaactagatcttgagacaaatggcagtattcatccacaattttaaaagaaaaggggggattggggggtacagtgcaggggaaagaatagtagacataatagcaacagacatacaaactaaag

SEQ ID NO: 16483 - DNA, 301 bp, Artificial Sequence
  Chd1.2_NTC.20
  crRNA array
  misc_feature (148)..(157): n is a, c, g, or t
cttggctttatatatcttgtggaaaggacgaaacaccgtaatttctactaagtgtagattgcagccggcgtctggcagctaatttctactaagtgtagatattccggcgcgaccagaagataatttctactaagtgtagatttttttnnnnnnnnnnaagcttggcgtggatccgatatcaactagatcttgagacaaatggcagtattcatccacaattttaaaagaaaaggggggattggggggtacagtgcaggggaaagaatagtagacataatagcaacagacatacaaactaaag

SEQ ID NO: 16484 - DNA, 301 bp, Artificial Sequence
  Chd1.2_NTC.21
  crRNA array
  misc_feature (148)..(157): n is a, c, g, or t
cttggctttatatatcttgtggaaaggacgaaacaccgtaatttctactaagtgtagattgcagccggcgtctggcagctaatttctactaagtgtagatgtataacttcgcgcggtccgtaatttctactaagtgtagatttttttnnnnnnnnnnaagcttggcgtggatccgatatcaactagatcttgagacaaatggcagtattcatccacaattttaaaagaaaaggggggattggggggtacagtgcaggggaaagaatagtagacataatagcaacagacatacaaactaaag

SEQ ID NO: 16485 - DNA, 301 bp, Artificial Sequence
  Chd1.2_NTC.22
  crRNA array
  misc_feature (148)..(157): n is a, c, g, or t
cttggctttatatatcttgtggaaaggacgaaacaccgtaatttctactaagtgtagattgcagccggcgtctggcagctaatttctactaagtgtagatgcgcgtcaacgtaatgtgcctaatttctactaagtgtagatttttttnnnnnnnnnnaagcttggcgtggatccgatatcaactagatcttgagacaaatggcagtattcatccacaattttaaaagaaaaggggggattggggggtacagtgcaggggaaagaatagtagacataatagcaacagacatacaaactaaag

SEQ ID NO: 16486 - DNA, 301 bp, Artificial Sequence
  Chd1.2_NTC.23
  crRNA array
  misc_feature (148)..(157): n is a, c, g, or t
cttggctttatatatcttgtggaaaggacgaaacaccgtaatttctactaagtgtagattgcagccggcgtctggcagctaatttctactaagtgtagatacgcgctattatcgtaggtgtaatttctactaagtgtagatttttttnnnnnnnnnnaagcttggcgtggatccgatatcaactagatcttgagacaaatggcagtattcatccacaattttaaaagaaaaggggggattggggggtacagtgcaggggaaagaatagtagacataatagcaacagacatacaaactaaag

SEQ ID NO: 16487 - DNA, 301 bp, Artificial Sequence
  Chd1.2_NTC.24
  crRNA array
  misc_feature (148)..(157): n is a, c, g, or t
cttggctttatatatcttgtggaaaggacgaaacaccgtaatttctactaagtgtagattgcagccggcgtctggcagctaatttctactaagtgtagatactatcgacgttcgtcccggtaatttctactaagtgtagatttttttnnnnnnnnnnaagcttggcgtggatccgatatcaactagatcttgagacaaatggcagtattcatccacaattttaaaagaaaaggggggattggggggtacagtgcaggggaaagaatagtagacataatagcaacagacatacaaactaaag

SEQ ID NO: 16488 - DNA, 301 bp, Artificial Sequence
  Chd1.2_NTC.25
  crRNA array
  misc_feature (148)..(157): n is a, c, g, or t
cttggctttatatatcttgtggaaaggacgaaacaccgtaatttctactaagtgtagattgcagccggcgtctggcagctaatttctactaagtgtagattcgcgttatcgtgccgtgcgtaatttctactaagtgtagatttttttnnnnnnnnnnaagcttggcgtggatccgatatcaactagatcttgagacaaatggcagtattcatccacaattttaaaagaaaaggggggattggggggtacagtgcaggggaaagaatagtagacataatagcaacagacatacaaactaaag

SEQ ID NO: 16489 - DNA, 301 bp, Artificial Sequence
  Chd1.2_NTC.26
  crRNA array
  misc_feature (148)..(157): n is a, c, g, or t
cttggctttatatatcttgtggaaaggacgaaacaccgtaatttctactaagtgtagattgcagccggcgtctggcagctaatttctactaagtgtagatcgcgacggcggttttaacactaatttctactaagtgtagatttttttnnnnnnnnnnaagcttggcgtggatccgatatcaactagatcttgagacaaatggcagtattcatccacaattttaaaagaaaaggggggattggggggtacagtgcaggggaaagaatagtagacataatagcaacagacatacaaactaaag

SEQ ID NO: 16490 - DNA, 301 bp, Artificial Sequence
  Chd1.2_NTC.27
  crRNA array
  misc_feature (148)..(157): n is a, c, g, or t
cttggctttatatatcttgtggaaaggacgaaacaccgtaatttctactaagtgtagattgcagccggcgtctggcagctaatttctactaagtgtagatgtcgcgttgcgaccggcgcttaatttctactaagtgtagatttttttnnnnnnnnnnaagcttggcgtggatccgatatcaactagatcttgagacaaatggcagtattcatccacaattttaaaagaaaaggggggattggggggtacagtgcaggggaaagaatagtagacataatagcaacagacatacaaactaaag

SEQ ID NO: 16491 - DNA, 301 bp, Artificial Sequence
  Chd1.2_NTC.28
  crRNA array
  misc_feature (148)..(157): n is a, c, g, or t
cttggctttatatatcttgtggaaaggacgaaacaccgtaatttctactaagtgtagattgcagccggcgtctggcagctaatttctactaagtgtagataccgctaatcggcgtaaacttaatttctactaagtgtagatttttttnnnnnnnnnnaagcttggcgtggatccgatatcaactagatcttgagacaaatggcagtattcatccacaattttaaaagaaaaggggggattggggggtacagtgcaggggaaagaatagtagacataatagcaacagacatacaaactaaag

SEQ ID NO: 16492 - DNA, 301 bp, Artificial Sequence
  Chd1.2_NTC.29
  crRNA array
  misc_feature (148)..(157): n is a, c, g, or t
cttggctttatatatcttgtggaaaggacgaaacaccgtaatttctactaagtgtagattgcagccggcgtctggcagctaatttctactaagtgtagatcgcgatctataccgtctatataatttctactaagtgtagatttttttnnnnnnnnnnaagcttggcgtggatccgatatcaactagatcttgagacaaatggcagtattcatccacaattttaaaagaaaaggggggattggggggtacagtgcaggggaaagaatagtagacataatagcaacagacatacaaactaaag

SEQ ID NO: 16493 - DNA, 301 bp, Artificial Sequence
  Chd1.2_NTC.3
  crRNA array
  misc_feature (148)..(157): n is a, c, g, or t
cttggctttatatatcttgtggaaaggacgaaacaccgtaatttctactaagtgtagattgcagccggcgtctggcagctaatttctactaagtgtagattcgacgcgagacgacgtacataatttctactaagtgtagatttttttnnnnnnnnnnaagcttggcgtggatccgatatcaactagatcttgagacaaatggcagtattcatccacaattttaaaagaaaaggggggattggggggtacagtgcaggggaaagaatagtagacataatagcaacagacatacaaactaaag

SEQ ID NO: 16494 - DNA, 301 bp, Artificial Sequence
  Chd1.2_NTC.30
  crRNA array
  misc_feature (148)..(157): n is a, c, g, or t
cttggctttatatatcttgtggaaaggacgaaacaccgtaatttctactaagtgtagattgcagccggcgtctggcagctaatttctactaagtgtagatcgatcgtacgggtgtcctaataatttctactaagtgtagatttttttnnnnnnnnnnaagcttggcgtggatccgatatcaactagatcttgagacaaatggcagtattcatccacaattttaaaagaaaaggggggattggggggtacagtgcaggggaaagaatagtagacataatagcaacagacatacaaactaaag

SEQ ID NO: 16495 - DNA, 301 bp, Artificial Sequence
  Chd1.2_NTC.31
  crRNA array
  misc_feature (148)..(157): n is a, c, g, or t
cttggctttatatatcttgtggaaaggacgaaacaccgtaatttctactaagtgtagattgcagccggcgtctggcagctaatttctactaagtgtagatgccgaccgcgtgattgtaggtaatttctactaagtgtagatttttttnnnnnnnnnnaagcttggcgtggatccgatatcaactagatcttgagacaaatggcagtattcatccacaattttaaaagaaaaggggggattggggggtacagtgcaggggaaagaatagtagacataatagcaacagacatacaaactaaag

SEQ ID NO: 16496 - DNA, 301 bp, Artificial Sequence
  Chd1.2_NTC.32
  crRNA array
  misc_feature (148)..(157): n is a, c, g, or t
cttggctttatatatcttgtggaaaggacgaaacaccgtaatttctactaagtgtagattgcagccggcgtctggcagctaatttctactaagtgtagatgcacgttacgcccgggtcactaatttctactaagtgtagatttttttnnnnnnnnnnaagcttggcgtggatccgatatcaactagatcttgagacaaatggcagtattcatccacaattttaaaagaaaaggggggattggggggtacagtgcaggggaaagaatagtagacataatagcaacagacatacaaactaaag

SEQ ID NO: 16497 - DNA, 301 bp, Artificial Sequence
  Chd1.2_NTC.33
  crRNA array
  misc_feature (148)..(157): n is a, c, g, or t
cttggctttatatatcttgtggaaaggacgaaacaccgtaatttctactaagtgtagattgcagccggcgtctggcagctaatttctactaagtgtagattaagcgaccgacgcattcgctaatttctactaagtgtagatttttttnnnnnnnnnnaagcttggcgtggatccgatatcaactagatcttgagacaaatggcagtattcatccacaattttaaaagaaaaggggggattggggggtacagtgcaggggaaagaatagtagacataatagcaacagacatacaaactaaag

SEQ ID NO: 16498 - DNA, 301 bp, Artificial Sequence
  Chd1.2_NTC.34
  crRNA array
  misc_feature (148)..(157): n is a, c, g, or t
cttggctttatatatcttgtggaaaggacgaaacaccgtaatttctactaagtgtagattgcagccggcgtctggcagctaatttctactaagtgtagattagcgttcgacacgtgaaactaatttctactaagtgtagatttttttnnnnnnnnnnaagcttggcgtggatccgatatcaactagatcttgagacaaatggcagtattcatccacaattttaaaagaaaaggggggattggggggtacagtgcaggggaaagaatagtagacataatagcaacagacatacaaactaaag

SEQ ID NO: 16499 - DNA, 301 bp, Artificial Sequence
  Chd1.2_NTC.35
  crRNA array
  misc_feature (148)..(157): n is a, c, g, or t
cttggctttatatatcttgtggaaaggacgaaacaccgtaatttctactaagtgtagattgcagccggcgtctggcagctaatttctactaagtgtagattggcgcgtaatcgctattcgtaatttctactaagtgtagatttttttnnnnnnnnnnaagcttggcgtggatccgatatcaactagatcttgagacaaatggcagtattcatccacaattttaaaagaaaaggggggattggggggtacagtgcaggggaaagaatagtagacataatagcaacagacatacaaactaaag

SEQ ID NO: 16500 - DNA, 301 bp, Artificial Sequence
  Chd1.2_NTC.36
  crRNA array
  misc_feature (148)..(157): n is a, c, g, or t
cttggctttatatatcttgtggaaaggacgaaacaccgtaatttctactaagtgtagattgcagccggcgtctggcagctaatttctactaagtgtagatcaacccgccgtagcgggccttaatttctactaagtgtagatttttttnnnnnnnnnnaagcttggcgtggatccgatatcaactagatcttgagacaaatggcagtattcatccacaattttaaaagaaaaggggggattggggggtacagtgcaggggaaagaatagtagacataatagcaacagacatacaaactaaag

SEQ ID NO: 16501 - DNA, 301 bp, Artificial Sequence
  Chd1.2_NTC.37
  crRNA array
  misc_feature (148)..(157): n is a, c, g, or t
cttggctttatatatcttgtggaaaggacgaaacaccgtaatttctactaagtgtagattgcagccggcgtctggcagctaatttctactaagtgtagattttgcgttgacgcgattacttaatttctactaagtgtagatttttttnnnnnnnnnnaagcttggcgtggatccgatatcaactagatcttgagacaaatggcagtattcatccacaattttaaaagaaaaggggggattggggggtacagtgcaggggaaagaatagtagacataatagcaacagacatacaaactaaag

SEQ ID NO: 16502 - DNA, 301 bp, Artificial Sequence
  Chd1.2_NTC.38
  crRNA array
  misc_feature (148)..(157): n is a, c, g, or t
cttggctttatatatcttgtggaaaggacgaaacaccgtaatttctactaagtgtagattgcagccggcgtctggcagctaatttctactaagtgtagataacggagcgcgatactaccataatttctactaagtgtagatttttttnnnnnnnnnnaagcttggcgtggatccgatatcaactagatcttgagacaaatggcagtattcatccacaattttaaaagaaaaggggggattggggggtacagtgcaggggaaagaatagtagacataatagcaacagacatacaaactaaag

SEQ ID NO: 16503 - DNA, 301 bp, Artificial Sequence
  Chd1.2_NTC.39
  crRNA array
  misc_feature (148)..(157): n is a, c, g, or t
cttggctttatatatcttgtggaaaggacgaaacaccgtaatttctactaagtgtagattgcagccggcgtctggcagctaatttctactaagtgtagatccggacgttataacgtttcttaatttctactaagtgtagatttttttnnnnnnnnnnaagcttggcgtggatccgatatcaactagatcttgagacaaatggcagtattcatccacaattttaaaagaaaaggggggattggggggtacagtgcaggggaaagaatagtagacataatagcaacagacatacaaactaaag

SEQ ID NO: 16504 - DNA, 301 bp, Artificial Sequence
  Chd1.2_NTC.4
  crRNA array
  misc_feature (148)..(157): n is a, c, g, or t
cttggctttatatatcttgtggaaaggacgaaacaccgtaatttctactaagtgtagattgcagccggcgtctggcagctaatttctactaagtgtagatatacccgtcgcgaacgtgagtaatttctactaagtgtagatttttttnnnnnnnnnnaagcttggcgtggatccgatatcaactagatcttgagacaaatggcagtattcatccacaattttaaaagaaaaggggggattggggggtacagtgcaggggaaagaatagtagacataatagcaacagacatacaaactaaag

SEQ ID NO: 16505 - DNA, 301 bp, Artificial Sequence
  Chd1.2_NTC.40
  crRNA array
  misc_feature (148)..(157): n is a, c, g, or t
cttggctttatatatcttgtggaaaggacgaaacaccgtaatttctactaagtgtagattgcagccggcgtctggcagctaatttctactaagtgtagatattcgcgaacccggccggaataatttctactaagtgtagatttttttnnnnnnnnnnaagcttggcgtggatccgatatcaactagatcttgagacaaatggcagtattcatccacaattttaaaagaaaaggggggattggggggtacagtgcaggggaaagaatagtagacataatagcaacagacatacaaactaaag

SEQ ID NO: 16506 - DNA, 301 bp, Artificial Sequence
  Chd1.2_NTC.41
  crRNA array
  misc_feature (148)..(157): n is a, c, g, or t
cttggctttatatatcttgtggaaaggacgaaacaccgtaatttctactaagtgtagattgcagccggcgtctggcagctaatttctactaagtgtagatttgatggcgcgacgcgttattaatttctactaagtgtagatttttttnnnnnnnnnnaagcttggcgtggatccgatatcaactagatcttgagacaaatggcagtattcatccacaattttaaaagaaaaggggggattggggggtacagtgcaggggaaagaatagtagacataatagcaacagacatacaaactaaag

SEQ ID NO: 16507 - DNA, 301 bp, Artificial Sequence
  Chd1.2_NTC.42
  crRNA array
  misc_feature (148)..(157): n is a, c, g, or t
cttggctttatatatcttgtggaaaggacgaaacaccgtaatttctactaagtgtagattgcagccggcgtctggcagctaatttctactaagtgtagatggtcaaatcgcggcgataactaatttctactaagtgtagatttttttnnnnnnnnnnaagcttggcgtggatccgatatcaactagatcttgagacaaatggcagtattcatccacaattttaaaagaaaaggggggattggggggtacagtgcaggggaaagaatagtagacataatagcaacagacatacaaactaaag

SEQ ID NO: 16508 - DNA, 301 bp, Artificial Sequence
  Chd1.2_NTC.43
  crRNA array
  misc_feature (148)..(157): n is a, c, g, or t
cttggctttatatatcttgtggaaaggacgaaacaccgtaatttctactaagtgtagattgcagccggcgtctggcagctaatttctactaagtgtagatcgactcgcgcattgaactggtaatttctactaagtgtagatttttttnnnnnnnnnnaagcttggcgtggatccgatatcaactagatcttgagacaaatggcagtattcatccacaattttaaaagaaaaggggggattggggggtacagtgcaggggaaagaatagtagacataatagcaacagacatacaaactaaag

SEQ ID NO: 16509 - DNA, 301 bp, Artificial Sequence
  Chd1.2_NTC.44
  crRNA array
  misc_feature (148)..(157): n is a, c, g, or t
cttggctttatatatcttgtggaaaggacgaaacaccgtaatttctactaagtgtagattgcagccggcgtctggcagctaatttctactaagtgtagatagcgtcgtacgatttatcgttaatttctactaagtgtagatttttttnnnnnnnnnnaagcttggcgtggatccgatatcaactagatcttgagacaaatggcagtattcatccacaattttaaaagaaaaggggggattggggggtacagtgcaggggaaagaatagtagacataatagcaacagacatacaaactaaag

SEQ ID NO: 16510 - DNA, 301 bp, Artificial Sequence
  Chd1.2_NTC.45
  crRNA array
  misc_feature (148)..(157): n is a, c, g, or t
cttggctttatatatcttgtggaaaggacgaaacaccgtaatttctactaagtgtagattgcagccggcgtctggcagctaatttctactaagtgtagatcggaacgcgtgatactagggtaatttctactaagtgtagatttttttnnnnnnnnnnaagcttggcgtggatccgatatcaactagatcttgagacaaatggcagtattcatccacaattttaaaagaaaaggggggattggggggtacagtgcaggggaaagaatagtagacataatagcaacagacatacaaactaaag

SEQ ID NO: 16511 - DNA, 301 bp, Artificial Sequence
  Chd1.2_NTC.46
  crRNA array
  misc_feature (148)..(157): n is a, c, g, or t
cttggctttatatatcttgtggaaaggacgaaacaccgtaatttctactaagtgtagattgcagccggcgtctggcagctaatttctactaagtgtagatagcgggtcgtagacgcgcggtaatttctactaagtgtagatttttttnnnnnnnnnnaagcttggcgtggatccgatatcaactagatcttgagacaaatggcagtattcatccacaattttaaaagaaaaggggggattggggggtacagtgcaggggaaagaatagtagacataatagcaacagacatacaaactaaag

SEQ ID NO: 16512 - DNA, 301 bp, Artificial Sequence
  Chd1.2_NTC.47
  crRNA array
  misc_feature (148)..(157): n is a, c, g, or t
cttggctttatatatcttgtggaaaggacgaaacaccgtaatttctactaagtgtagattgcagccggcgtctggcagctaatttctactaagtgtagattctcgtatcgcgattgttaataatttctactaagtgtagatttttttnnnnnnnnnnaagcttggcgtggatccgatatcaactagatcttgagacaaatggcagtattcatccacaattttaaaagaaaaggggggattggggggtacagtgcaggggaaagaatagtagacataatagcaacagacatacaaactaaag

SEQ ID NO: 16513 - DNA, 301 bp, Artificial Sequence
  Chd1.2_NTC.48
  crRNA array
  misc_feature (148)..(157): n is a, c, g, or t
cttggctttatatatcttgtggaaaggacgaaacaccgtaatttctactaagtgtagattgcagccggcgtctggcagctaatttctactaagtgtagatcggtcgactacggctgttagtaatttctactaagtgtagatttttttnnnnnnnnnnaagcttggcgtggatccgatatcaactagatcttgagacaaatggcagtattcatccacaattttaaaagaaaaggggggattggggggtacagtgcaggggaaagaatagtagacataatagcaacagacatacaaactaaag

SEQ ID NO: 16514 - DNA, 301 bp, Artificial Sequence
  Chd1.2_NTC.49
  crRNA array
  misc_feature (148)..(157): n is a, c, g, or t
cttggctttatatatcttgtggaaaggacgaaacaccgtaatttctactaagtgtagattgcagccggcgtctggcagctaatttctactaagtgtagattcggggcgcgtcaactgaattaatttctactaagtgtagatttttttnnnnnnnnnnaagcttggcgtggatccgatatcaactagatcttgagacaaatggcagtattcatccacaattttaaaagaaaaggggggattggggggtacagtgcaggggaaagaatagtagacataatagcaacagacatacaaactaaag

SEQ ID NO: 16515 - DNA, 301 bp, Artificial Sequence
  Chd1.2_NTC.5
  crRNA array
  misc_feature (148)..(157): n is a, c, g, or t
cttggctttatatatcttgtggaaaggacgaaacaccgtaatttctactaagtgtagattgcagccggcgtctggcagctaatttctactaagtgtagatgcttacgcgtcgcgaatgtataatttctactaagtgtagatttttttnnnnnnnnnnaagcttggcgtggatccgatatcaactagatcttgagacaaatggcagtattcatccacaattttaaaagaaaaggggggattggggggtacagtgcaggggaaagaatagtagacataatagcaacagacatacaaactaaag

SEQ ID NO: 16516 - DNA, 301 bp, Artificial Sequence
  Chd1.2_NTC.50
  crRNA array
  misc_feature (148)..(157): n is a, c, g, or t
cttggctttatatatcttgtggaaaggacgaaacaccgtaatttctactaagtgtagattgcagccggcgtctggcagctaatttctactaagtgtagatattgccgctcgcgcaaaatctaatttctactaagtgtagatttttttnnnnnnnnnnaagcttggcgtggatccgatatcaactagatcttgagacaaatggcagtattcatccacaattttaaaagaaaaggggggattggggggtacagtgcaggggaaagaatagtagacataatagcaacagacatacaaactaaag

SEQ ID NO: 16517 - DNA, 301 bp, Artificial Sequence
  Chd1.2_NTC.51
  crRNA array
  misc_feature (148)..(157): n is a, c, g, or t
cttggctttatatatcttgtggaaaggacgaaacaccgtaatttctactaagtgtagattgcagccggcgtctggcagctaatttctactaagtgtagattaacgcgcaacacgccaatgtaatttctactaagtgtagatttttttnnnnnnnnnnaagcttggcgtggatccgatatcaactagatcttgagacaaatggcagtattcatccacaattttaaaagaaaaggggggattggggggtacagtgcaggggaaagaatagtagacataatagcaacagacatacaaactaaag

SEQ ID NO: 16518 - DNA, 301 bp, Artificial Sequence
  Chd1.2_NTC.6
  crRNA array
  misc_feature (148)..(157): n is a, c, g, or t
cttggctttatatatcttgtggaaaggacgaaacaccgtaatttctactaagtgtagattgcagccggcgtctggcagctaatttctactaagtgtagatcgaatcgcgcctacgggaattaatttctactaagtgtagatttttttnnnnnnnnnnaagcttggcgtggatccgatatcaactagatcttgagacaaatggcagtattcatccacaattttaaaagaaaaggggggattggggggtacagtgcaggggaaagaatagtagacataatagcaacagacatacaaactaaag

SEQ ID NO: 16519 - DNA, 301 bp, Artificial Sequence
  Chd1.2_NTC.7
  crRNA array
  misc_feature (148)..(157): n is a, c, g, or t
cttggctttatatatcttgtggaaaggacgaaacaccgtaatttctactaagtgtagattgcagccggcgtctggcagctaatttctactaagtgtagatcgccgaacggataagactattaatttctactaagtgtagatttttttnnnnnnnnnnaagcttggcgtggatccgatatcaactagatcttgagacaaatggcagtattcatccacaattttaaaagaaaaggggggattggggggtacagtgcaggggaaagaatagtagacataatagcaacagacatacaaactaaag

SEQ ID NO: 16520 - DNA, 301 bp, Artificial Sequence
  Chd1.2_NTC.8
  crRNA array
  misc_feature (148)..(157): n is a, c, g, or t
cttggctttatatatcttgtggaaaggacgaaacaccgtaatttctactaagtgtagattgcagccggcgtctggcagctaatttctactaagtgtagatcgaccgaggttacgctgggataatttctactaagtgtagatttttttnnnnnnnnnnaagcttggcgtggatccgatatcaactagatcttgagacaaatggcagtattcatccacaattttaaaagaaaaggggggattggggggtacagtgcaggggaaagaatagtagacataatagcaacagacatacaaactaaag

SEQ ID NO: 16521 - DNA, 301 bp, Artificial Sequence
  Chd1.2_NTC.9
  crRNA array
  misc_feature (148)..(157): n is a, c, g, or t
cttggctttatatatcttgtggaaaggacgaaacaccgtaatttctactaagtgtagattgcagccggcgtctggcagctaatttctactaagtgtagatatcgccgtacggctatggcataatttctactaagtgtagatttttttnnnnnnnnnnaagcttggcgtggatccgatatcaactagatcttgagacaaatggcagtattcatccacaattttaaaagaaaaggggggattggggggtacagtgcaggggaaagaatagtagacataatagcaacagacatacaaactaaag

SEQ ID NO: 16522 - DNA, 301 bp, Artificial Sequence
  Chd1.3_NTC.0
  crRNA array
  misc_feature (148)..(157): n is a, c, g, or t
cttggctttatatatcttgtggaaaggacgaaacaccgtaatttctactaagtgtagatatcagcaagtatgcaactattaatttctactaagtgtagattatagcgtcgcgcgctaatttaatttctactaagtgtagatttttttnnnnnnnnnnaagcttggcgtggatccgatatcaactagatcttgagacaaatggcagtattcatccacaattttaaaagaaaaggggggattggggggtacagtgcaggggaaagaatagtagacataatagcaacagacatacaaactaaag

SEQ ID NO: 16523 - DNA, 301 bp, Artificial Sequence
  Chd1.3_NTC.1
  crRNA array
  misc_feature (148)..(157): n is a, c, g, or t
cttggctttatatatcttgtggaaaggacgaaacaccgtaatttctactaagtgtagatatcagcaagtatgcaactattaatttctactaagtgtagatcgcgtaaccgttccggctcctaatttctactaagtgtagatttttttnnnnnnnnnnaagcttggcgtggatccgatatcaactagatcttgagacaaatggcagtattcatccacaattttaaaagaaaaggggggattggggggtacagtgcaggggaaagaatagtagacataatagcaacagacatacaaactaaag

SEQ ID NO: 16524 - DNA, 301 bp, Artificial Sequence
  Chd1.3_NTC.10
  crRNA array
  misc_feature (148)..(157): n is a, c, g, or t
cttggctttatatatcttgtggaaaggacgaaacaccgtaatttctactaagtgtagatatcagcaagtatgcaactattaatttctactaagtgtagatcgctaagttcgcgcgggccgtaatttctactaagtgtagatttttttnnnnnnnnnnaagcttggcgtggatccgatatcaactagatcttgagacaaatggcagtattcatccacaattttaaaagaaaaggggggattggggggtacagtgcaggggaaagaatagtagacataatagcaacagacatacaaactaaag

SEQ ID NO: 16525 - DNA, 301 bp, Artificial Sequence
  Chd1.3_NTC.11
  crRNA array
  misc_feature (148)..(157): n is a, c, g, or t
cttggctttatatatcttgtggaaaggacgaaacaccgtaatttctactaagtgtagatatcagcaagtatgcaactattaatttctactaagtgtagatcgttcgtcgacgaagcaatctaatttctactaagtgtagatttttttnnnnnnnnnnaagcttggcgtggatccgatatcaactagatcttgagacaaatggcagtattcatccacaattttaaaagaaaaggggggattggggggtacagtgcaggggaaagaatagtagacataatagcaacagacatacaaactaaag

SEQ ID NO: 16526 - DNA, 301 bp, Artificial Sequence
  Chd1.3_NTC.12
  crRNA array
  misc_feature (148)..(157): n is a, c, g, or t
cttggctttatatatcttgtggaaaggacgaaacaccgtaatttctactaagtgtagatatcagcaagtatgcaactattaatttctactaagtgtagatcgccgacgattaatcaatagtaatttctactaagtgtagatttttttnnnnnnnnnnaagcttggcgtggatccgatatcaactagatcttgagacaaatggcagtattcatccacaattttaaaagaaaaggggggattggggggtacagtgcaggggaaagaatagtagacataatagcaacagacatacaaactaaag

SEQ ID NO: 16527 - DNA, 301 bp, Artificial Sequence
  Chd1.3_NTC.13
  crRNA array
  misc_feature (148)..(157): n is a, c, g, or t
cttggctttatatatcttgtggaaaggacgaaacaccgtaatttctactaagtgtagatatcagcaagtatgcaactattaatttctactaagtgtagatgaccgttgtatcgcgatcaataatttctactaagtgtagatttttttnnnnnnnnnnaagcttggcgtggatccgatatcaactagatcttgagacaaatggcagtattcatccacaattttaaaagaaaaggggggattggggggtacagtgcaggggaaagaatagtagacataatagcaacagacatacaaactaaag

SEQ ID NO: 16528 - DNA, 301 bp, Artificial Sequence
  Chd1.3_NTC.14
  crRNA array
  misc_feature (148)..(157): n is a, c, g, or t
cttggctttatatatcttgtggaaaggacgaaacaccgtaatttctactaagtgtagatatcagcaagtatgcaactattaatttctactaagtgtagatccgttcgtgcgatagtgttttaatttctactaagtgtagatttttttnnnnnnnnnnaagcttggcgtggatccgatatcaactagatcttgagacaaatggcagtattcatccacaattttaaaagaaaaggggggattggggggtacagtgcaggggaaagaatagtagacataatagcaacagacatacaaactaaag

SEQ ID NO: 16529 - DNA, 301 bp, Artificial Sequence
  Chd1.3_NTC.15
  crRNA array
  misc_feature (148)..(157): n is a, c, g, or t
cttggctttatatatcttgtggaaaggacgaaacaccgtaatttctactaagtgtagatatcagcaagtatgcaactattaatttctactaagtgtagatgttgtcgtgccgcgaatttataatttctactaagtgtagatttttttnnnnnnnnnnaagcttggcgtggatccgatatcaactagatcttgagacaaatggcagtattcatccacaattttaaaagaaaaggggggattggggggtacagtgcaggggaaagaatagtagacataatagcaacagacatacaaactaaag

SEQ ID NO: 16530 - DNA, 301 bp, Artificial Sequence
  Chd1.3_NTC.16
  crRNA array
  misc_feature (148)..(157): n is a, c, g, or t
cttggctttatatatcttgtggaaaggacgaaacaccgtaatttctactaagtgtagatatcagcaagtatgcaactattaatttctactaagtgtagatcggtacgttagacgaaaatttaatttctactaagtgtagatttttttnnnnnnnnnnaagcttggcgtggatccgatatcaactagatcttgagacaaatggcagtattcatccacaattttaaaagaaaaggggggattggggggtacagtgcaggggaaagaatagtagacataatagcaacagacatacaaactaaag

SEQ ID NO: 16531 - DNA, 301 bp, Artificial Sequence
  Chd1.3_NTC.17
  crRNA array
  misc_feature (148)..(157): n is a, c, g, or t
cttggctttatatatcttgtggaaaggacgaaacaccgtaatttctactaagtgtagatatcagcaagtatgcaactattaatttctactaagtgtagattatcgaacgctatcgaacgttaatttctactaagtgtagatttttttnnnnnnnnnnaagcttggcgtggatccgatatcaactagatcttgagacaaatggcagtattcatccacaattttaaaagaaaaggggggattggggggtacagtgcaggggaaagaatagtagacataatagcaacagacatacaaactaaag

SEQ ID NO: 16532 - DNA, 301 bp, Artificial Sequence
  Chd1.3_NTC.18
  crRNA array
  misc_feature (148)..(157): n is a, c, g, or t
cttggctttatatatcttgtggaaaggacgaaacaccgtaatttctactaagtgtagatatcagcaagtatgcaactattaatttctactaagtgtagattccggttacgaccggcaaaataatttctactaagtgtagatttttttnnnnnnnnnnaagcttggcgtggatccgatatcaactagatcttgagacaaatggcagtattcatccacaattttaaaagaaaaggggggattggggggtacagtgcaggggaaagaatagtagacataatagcaacagacatacaaactaaag

SEQ ID NO: 16533 - DNA, 301 bp, Artificial Sequence
  Chd1.3_NTC.19
  crRNA array
  misc_feature (148)..(157): n is a, c, g, or t
cttggctttatatatcttgtggaaaggacgaaacaccgtaatttctactaagtgtagatatcagcaagtatgcaactattaatttctactaagtgtagatcgtcgtagaacgatacccgataatttctactaagtgtagatttttttnnnnnnnnnnaagcttggcgtggatccgatatcaactagatcttgagacaaatggcagtattcatccacaattttaaaagaaaaggggggattggggggtacagtgcaggggaaagaatagtagacataatagcaacagacatacaaactaaag

SEQ ID NO: 16534 - DNA, 301 bp, Artificial Sequence
  Chd1.3_NTC.2
  crRNA array
  misc_feature (148)..(157): n is a, c, g, or t
cttggctttatatatcttgtggaaaggacgaaacaccgtaatttctactaagtgtagatatcagcaagtatgcaactattaatttctactaagtgtagatttatgtcgcgccgcgacccgtaatttctactaagtgtagatttttttnnnnnnnnnnaagcttggcgtggatccgatatcaactagatcttgagacaaatggcagtattcatccacaattttaaaagaaaaggggggattggggggtacagtgcaggggaaagaatagtagacataatagcaacagacatacaaactaaag

SEQ ID NO: 16535 - DNA, 301 bp, Artificial Sequence
  Chd1.3_NTC.20
  crRNA array
  misc_feature (148)..(157): n is a, c, g, or t
cttggctttatatatcttgtggaaaggacgaaacaccgtaatttctactaagtgtagatatcagcaagtatgcaactattaatttctactaagtgtagatattccggcgcgaccagaagataatttctactaagtgtagatttttttnnnnnnnnnnaagcttggcgtggatccgatatcaactagatcttgagacaaatggcagtattcatccacaattttaaaagaaaaggggggattggggggtacagtgcaggggaaagaatagtagacataatagcaacagacatacaaactaaag

SEQ ID NO: 16536 - DNA, 301 bp, Artificial Sequence
  Chd1.3_NTC.21
  crRNA array
  misc_feature (148)..(157): n is a, c, g, or t
cttggctttatatatcttgtggaaaggacgaaacaccgtaatttctactaagtgtagatatcagcaagtatgcaactattaatttctactaagtgtagatgtataacttcgcgcggtccgtaatttctactaagtgtagatttttttnnnnnnnnnnaagcttggcgtggatccgatatcaactagatcttgagacaaatggcagtattcatccacaattttaaaagaaaaggggggattggggggtacagtgcaggggaaagaatagtagacataatagcaacagacatacaaactaaag

SEQ ID NO: 16537 - DNA, 301 bp, Artificial Sequence
  Chd1.3_NTC.22
  crRNA array
  misc_feature (148)..(157): n is a, c, g, or t
cttggctttatatatcttgtggaaaggacgaaacaccgtaatttctactaagtgtagatatcagcaagtatgcaactattaatttctactaagtgtagatgcgcgtcaacgtaatgtgcctaatttctactaagtgtagatttttttnnnnnnnnnnaagcttggcgtggatccgatatcaactagatcttgagacaaatggcagtattcatccacaattttaaaagaaaaggggggattggggggtacagtgcaggggaaagaatagtagacataatagcaacagacatacaaactaaag

SEQ ID NO: 16538 - DNA, 301 bp, Artificial Sequence
  Chd1.3_NTC.23
  crRNA array
  misc_feature (148)..(157): n is a, c, g, or t
cttggctttatatatcttgtggaaaggacgaaacaccgtaatttctactaagtgtagatatcagcaagtatgcaactattaatttctactaagtgtagatacgcgctattatcgtaggtgtaatttctactaagtgtagatttttttnnnnnnnnnnaagcttggcgtggatccgatatcaactagatcttgagacaaatggcagtattcatccacaattttaaaagaaaaggggggattggggggtacagtgcaggggaaagaatagtagacataatagcaacagacatacaaactaaag

SEQ ID NO: 16539 - DNA, 301 bp, Artificial Sequence
  Chd1.3_NTC.24
  crRNA array
  misc_feature (148)..(157): n is a, c, g, or t
cttggctttatatatcttgtggaaaggacgaaacaccgtaatttctactaagtgtagatatcagcaagtatgcaactattaatttctactaagtgtagatactatcgacgttcgtcccggtaatttctactaagtgtagatttttttnnnnnnnnnnaagcttggcgtggatccgatatcaactagatcttgagacaaatggcagtattcatccacaattttaaaagaaaaggggggattggggggtacagtgcaggggaaagaatagtagacataatagcaacagacatacaaactaaag

SEQ ID NO: 16540 - DNA, 301 bp, Artificial Sequence
  Chd1.3_NTC.25
  crRNA array
  misc_feature (148)..(157): n is a, c, g, or t
cttggctttatatatcttgtggaaaggacgaaacaccgtaatttctactaagtgtagatatcagcaagtatgcaactattaatttctactaagtgtagattcgcgttatcgtgccgtgcgtaatttctactaagtgtagatttttttnnnnnnnnnnaagcttggcgtggatccgatatcaactagatcttgagacaaatggcagtattcatccacaattttaaaagaaaaggggggattggggggtacagtgcaggggaaagaatagtagacataatagcaacagacatacaaactaaag

SEQ ID NO: 16541 - DNA, 301 bp, Artificial Sequence
  Chd1.3_NTC.26
  crRNA array
  misc_feature (148)..(157): n is a, c, g, or t
cttggctttatatatcttgtggaaaggacgaaacaccgtaatttctactaagtgtagatatcagcaagtatgcaactattaatttctactaagtgtagatcgcgacggcggttttaacactaatttctactaagtgtagatttttttnnnnnnnnnnaagcttggcgtggatccgatatcaactagatcttgagacaaatggcagtattcatccacaattttaaaagaaaaggggggattggggggtacagtgcaggggaaagaatagtagacataatagcaacagacatacaaactaaag

SEQ ID NO: 16542 - DNA, 301 bp, Artificial Sequence
  Chd1.3_NTC.27
  crRNA array
  misc_feature (148)..(157): n is a, c, g, or t
cttggctttatatatcttgtggaaaggacgaaacaccgtaatttctactaagtgtagatatcagcaagtatgcaactattaatttctactaagtgtagatgtcgcgttgcgaccggcgcttaatttctactaagtgtagatttttttnnnnnnnnnnaagcttggcgtggatccgatatcaactagatcttgagacaaatggcagtattcatccacaattttaaaagaaaaggggggattggggggtacagtgcaggggaaagaatagtagacataatagcaacagacatacaaactaaag

SEQ ID NO: 16543 - DNA, 301 bp, Artificial Sequence
  Chd1.3_NTC.28
  crRNA array
  misc_feature (148)..(157): n is a, c, g, or t
cttggctttatatatcttgtggaaaggacgaaacaccgtaatttctactaagtgtagatatcagcaagtatgcaactattaatttctactaagtgtagataccgctaatcggcgtaaacttaatttctactaagtgtagatttttttnnnnnnnnnnaagcttggcgtggatccgatatcaactagatcttgagacaaatggcagtattcatccacaattttaaaagaaaaggggggattggggggtacagtgcaggggaaagaatagtagacataatagcaacagacatacaaactaaag

SEQ ID NO: 16544 - DNA, 301 bp, Artificial Sequence
  Chd1.3_NTC.29
  crRNA array
  misc_feature (148)..(157): n is a, c, g, or t
cttggctttatatatcttgtggaaaggacgaaacaccgtaatttctactaagtgtagatatcagcaagtatgcaactattaatttctactaagtgtagatcgcgatctataccgtctatataatttctactaagtgtagatttttttnnnnnnnnnnaagcttggcgtggatccgatatcaactagatcttgagacaaatggcagtattcatccacaattttaaaagaaaaggggggattggggggtacagtgcaggggaaagaatagtagacataatagcaacagacatacaaactaaag

SEQ ID NO: 16545 - DNA, 301 bp, Artificial Sequence
  Chd1.3_NTC.3
  crRNA array
  misc_feature (148)..(157): n is a, c, g, or t
cttggctttatatatcttgtggaaaggacgaaacaccgtaatttctactaagtgtagatatcagcaagtatgcaactattaatttctactaagtgtagattcgacgcgagacgacgtacataatttctactaagtgtagatttttttnnnnnnnnnnaagcttggcgtggatccgatatcaactagatcttgagacaaatggcagtattcatccacaattttaaaagaaaaggggggattggggggtacagtgcaggggaaagaatagtagacataatagcaacagacatacaaactaaag

SEQ ID NO: 16546 - DNA, 301 bp, Artificial Sequence
  Chd1.3_NTC.30
  crRNA array
  misc_feature (148)..(157): n is a, c, g, or t
cttggctttatatatcttgtggaaaggacgaaacaccgtaatttctactaagtgtagatatcagcaagtatgcaactattaatttctactaagtgtagatcgatcgtacgggtgtcctaataatttctactaagtgtagatttttttnnnnnnnnnnaagcttggcgtggatccgatatcaactagatcttgagacaaatggcagtattcatccacaattttaaaagaaaaggggggattggggggtacagtgcaggggaaagaatagtagacataatagcaacagacatacaaactaaag

SEQ ID NO: 16547 - DNA, 301 bp, Artificial Sequence
  Chd1.3_NTC.31
  crRNA array
  misc_feature (148)..(157): n is a, c, g, or t
cttggctttatatatcttgtggaaaggacgaaacaccgtaatttctactaagtgtagatatcagcaagtatgcaactattaatttctactaagtgtagatgccgaccgcgtgattgtaggtaatttctactaagtgtagatttttttnnnnnnnnnnaagcttggcgtggatccgatatcaactagatcttgagacaaatggcagtattcatccacaattttaaaagaaaaggggggattggggggtacagtgcaggggaaagaatagtagacataatagcaacagacatacaaactaaag

SEQ ID NO: 16548 - DNA, 301 bp, Artificial Sequence
  Chd1.3_NTC.32
  crRNA array
  misc_feature (148)..(157): n is a, c, g, or t
cttggctttatatatcttgtggaaaggacgaaacaccgtaatttctactaagtgtagatatcagcaagtatgcaactattaatttctactaagtgtagatgcacgttacgcccgggtcactaatttctactaagtgtagatttttttnnnnnnnnnnaagcttggcgtggatccgatatcaactagatcttgagacaaatggcagtattcatccacaattttaaaagaaaaggggggattggggggtacagtgcaggggaaagaatagtagacataatagcaacagacatacaaactaaag

SEQ ID NO: 16549 - DNA, 301 bp, Artificial Sequence
  Chd1.3_NTC.33
  crRNA array
  misc_feature (148)..(157): n is a, c, g, or t
cttggctttatatatcttgtggaaaggacgaaacaccgtaatttctactaagtgtagatatcagcaagtatgcaactattaatttctactaagtgtagattaagcgaccgacgcattcgctaatttctactaagtgtagatttttttnnnnnnnnnnaagcttggcgtggatccgatatcaactagatcttgagacaaatggcagtattcatccacaattttaaaagaaaaggggggattggggggtacagtgcaggggaaagaatagtagacataatagcaacagacatacaaactaaag

SEQ ID NO: 16550 - DNA, 301 bp, Artificial Sequence
  Chd1.3_NTC.34
  crRNA array
  misc_feature (148)..(157): n is a, c, g, or t
cttggctttatatatcttgtggaaaggacgaaacaccgtaatttctactaagtgtagatatcagcaagtatgcaactattaatttctactaagtgtagattagcgttcgacacgtgaaactaatttctactaagtgtagatttttttnnnnnnnnnnaagcttggcgtggatccgatatcaactagatcttgagacaaatggcagtattcatccacaattttaaaagaaaaggggggattggggggtacagtgcaggggaaagaatagtagacataatagcaacagacatacaaactaaag

SEQ ID NO: 16551 - DNA, 301 bp, Artificial Sequence
  Chd1.3_NTC.35
  crRNA array
  misc_feature (148)..(157): n is a, c, g, or t
cttggctttatatatcttgtggaaaggacgaaacaccgtaatttctactaagtgtagatatcagcaagtatgcaactattaatttctactaagtgtagattggcgcgtaatcgctattcgtaatttctactaagtgtagatttttttnnnnnnnnnnaagcttggcgtggatccgatatcaactagatcttgagacaaatggcagtattcatccacaattttaaaagaaaaggggggattggggggtacagtgcaggggaaagaatagtagacataatagcaacagacatacaaactaaag

SEQ ID NO: 16552 - DNA, 301 bp, Artificial Sequence
  Chd1.3_NTC.36
  crRNA array
  misc_feature (148)..(157): n is a, c, g, or t
cttggctttatatatcttgtggaaaggacgaaacaccgtaatttctactaagtgtagatatcagcaagtatgcaactattaatttctactaagtgtagatcaacccgccgtagcgggccttaatttctactaagtgtagatttttttnnnnnnnnnnaagcttggcgtggatccgatatcaactagatcttgagacaaatggcagtattcatccacaattttaaaagaaaaggggggattggggggtacagtgcaggggaaagaatagtagacataatagcaacagacatacaaactaaag

SEQ ID NO: 16553 - DNA, 301 bp, Artificial Sequence
  Chd1.3_NTC.37
  crRNA array
  misc_feature (148)..(157): n is a, c, g, or t
cttggctttatatatcttgtggaaaggacgaaacaccgtaatttctactaagtgtagatatcagcaagtatgcaactattaatttctactaagtgtagattttgcgttgacgcgattacttaatttctactaagtgtagatttttttnnnnnnnnnnaagcttggcgtggatccgatatcaactagatcttgagacaaatggcagtattcatccacaattttaaaagaaaaggggggattggggggtacagtgcaggggaaagaatagtagacataatagcaacagacatacaaactaaag

SEQ ID NO: 16554 - DNA, 301 bp, Artificial Sequence
  Chd1.3_NTC.38
  crRNA array
  misc_feature (148)..(157): n is a, c, g, or t
cttggctttatatatcttgtggaaaggacgaaacaccgtaatttctactaagtgtagatatcagcaagtatgcaactattaatttctactaagtgtagataacggagcgcgatactaccataatttctactaagtgtagatttttttnnnnnnnnnnaagcttggcgtggatccgatatcaactagatcttgagacaaatggcagtattcatccacaattttaaaagaaaaggggggattggggggtacagtgcaggggaaagaatagtagacataatagcaacagacatacaaactaaag

SEQ ID NO: 16555 - DNA, 301 bp, Artificial Sequence
  Chd1.3_NTC.39
  crRNA array
  misc_feature (148)..(157): n is a, c, g, or t
cttggctttatatatcttgtggaaaggacgaaacaccgtaatttctactaagtgtagatatcagcaagtatgcaactattaatttctactaagtgtagatccggacgttataacgtttcttaatttctactaagtgtagatttttttnnnnnnnnnnaagcttggcgtggatccgatatcaactagatcttgagacaaatggcagtattcatccacaattttaaaagaaaaggggggattggggggtacagtgcaggggaaagaatagtagacataatagcaacagacatacaaactaaag

SEQ ID NO: 16556 - DNA, 301 bp, Artificial Sequence
  Chd1.3_NTC.4
  crRNA array
  misc_feature (148)..(157): n is a, c, g, or t
cttggctttatatatcttgtggaaaggacgaaacaccgtaatttctactaagtgtagatatcagcaagtatgcaactattaatttctactaagtgtagatatacccgtcgcgaacgtgagtaatttctactaagtgtagatttttttnnnnnnnnnnaagcttggcgtggatccgatatcaactagatcttgagacaaatggcagtattcatccacaattttaaaagaaaaggggggattggggggtacagtgcaggggaaagaatagtagacataatagcaacagacatacaaactaaag

SEQ ID NO: 16557 - DNA, 301 bp, Artificial Sequence
  Chd1.3_NTC.40
  crRNA array
  misc_feature (148)..(157): n is a, c, g, or t
cttggctttatatatcttgtggaaaggacgaaacaccgtaatttctactaagtgtagatatcagcaagtatgcaactattaatttctactaagtgtagatattcgcgaacccggccggaataatttctactaagtgtagatttttttnnnnnnnnnnaagcttggcgtggatccgatatcaactagatcttgagacaaatggcagtattcatccacaattttaaaagaaaaggggggattggggggtacagtgcaggggaaagaatagtagacataatagcaacagacatacaaactaaag

SEQ ID NO: 16558 - DNA, 301 bp, Artificial Sequence
  Chd1.3_NTC.41
  crRNA array
  misc_feature (148)..(157): n is a, c, g, or t
cttggctttatatatcttgtggaaaggacgaaacaccgtaatttctactaagtgtagatatcagcaagtatgcaactattaatttctactaagtgtagatttgatggcgcgacgcgttattaatttctactaagtgtagatttttttnnnnnnnnnnaagcttggcgtggatccgatatcaactagatcttgagacaaatggcagtattcatccacaattttaaaagaaaaggggggattggggggtacagtgcaggggaaagaatagtagacataatagcaacagacatacaaactaaag

SEQ ID NO: 16559 - DNA, 301 bp, Artificial Sequence
  Chd1.3_NTC.42
  crRNA array
  misc_feature (148)..(157): n is a, c, g, or t
cttggctttatatatcttgtggaaaggacgaaacaccgtaatttctactaagtgtagatatcagcaagtatgcaactattaatttctactaagtgtagatggtcaaatcgcggcgataactaatttctactaagtgtagatttttttnnnnnnnnnnaagcttggcgtggatccgatatcaactagatcttgagacaaatggcagtattcatccacaattttaaaagaaaaggggggattggggggtacagtgcaggggaaagaatagtagacataatagcaacagacatacaaactaaag

SEQ ID NO: 16560 - DNA, 301 bp, Artificial Sequence
  Chd1.3_NTC.43
  crRNA array
  misc_feature (148)..(157): n is a, c, g, or t
cttggctttatatatcttgtggaaaggacgaaacaccgtaatttctactaagtgtagatatcagcaagtatgcaactattaatttctactaagtgtagatcgactcgcgcattgaactggtaatttctactaagtgtagatttttttnnnnnnnnnnaagcttggcgtggatccgatatcaactagatcttgagacaaatggcagtattcatccacaattttaaaagaaaaggggggattggggggtacagtgcaggggaaagaatagtagacataatagcaacagacatacaaactaaag

SEQ ID NO: 16561 - DNA, 301 bp, Artificial Sequence
  Chd1.3_NTC.44
  crRNA array
  misc_feature (148)..(157): n is a, c, g, or t
cttggctttatatatcttgtggaaaggacgaaacaccgtaatttctactaagtgtagatatcagcaagtatgcaactattaatttctactaagtgtagatagcgtcgtacgatttatcgttaatttctactaagtgtagatttttttnnnnnnnnnnaagcttggcgtggatccgatatcaactagatcttgagacaaatggcagtattcatccacaattttaaaagaaaaggggggattggggggtacagtgcaggggaaagaatagtagacataatagcaacagacatacaaactaaag

SEQ ID NO: 16562 - DNA, 301 bp, Artificial Sequence
  Chd1.3_NTC.45
  crRNA array
  misc_feature (148)..(157): n is a, c, g, or t
cttggctttatatatcttgtggaaaggacgaaacaccgtaatttctactaagtgtagatatcagcaagtatgcaactattaatttctactaagtgtagatcggaacgcgtgatactagggtaatttctactaagtgtagatttttttnnnnnnnnnnaagcttggcgtggatccgatatcaactagatcttgagacaaatggcagtattcatccacaattttaaaagaaaaggggggattggggggtacagtgcaggggaaagaatagtagacataatagcaacagacatacaaactaaag

SEQ ID NO: 16563 - DNA, 301 bp, Artificial Sequence
  Chd1.3_NTC.46
  crRNA array
  misc_feature (148)..(157): n is a, c, g, or t
cttggctttatatatcttgtggaaaggacgaaacaccgtaatttctactaagtgtagatatcagcaagtatgcaactattaatttctactaagtgtagatagcgggtcgtagacgcgcggtaatttctactaagtgtagatttttttnnnnnnnnnnaagcttggcgtggatccgatatcaactagatcttgagacaaatggcagtattcatccacaattttaaaagaaaaggggggattggggggtacagtgcaggggaaagaatagtagacataatagcaacagacatacaaactaaag

SEQ ID NO: 16564 - DNA, 301 bp, Artificial Sequence
  Chd1.3_NTC.47
  crRNA array
  misc_feature (148)..(157): n is a, c, g, or t
cttggctttatatatcttgtggaaaggacgaaacaccgtaatttctactaagtgtagatatcagcaagtatgcaactattaatttctactaagtgtagattctcgtatcgcgattgttaataatttctactaagtgtagatttttttnnnnnnnnnnaagcttggcgtggatccgatatcaactagatcttgagacaaatggcagtattcatccacaattttaaaagaaaaggggggattggggggtacagtgcaggggaaagaatagtagacataatagcaacagacatacaaactaaag

SEQ ID NO: 16565 - DNA, 301 bp, Artificial Sequence
  Chd1.3_NTC.48
  crRNA array
  misc_feature (148)..(157): n is a, c, g, or t
cttggctttatatatcttgtggaaaggacgaaacaccgtaatttctactaagtgtagatatcagcaagtatgcaactattaatttctactaagtgtagatcggtcgactacggctgttagtaatttctactaagtgtagatttttttnnnnnnnnnnaagcttggcgtggatccgatatcaactagatcttgagacaaatggcagtattcatccacaattttaaaagaaaaggggggattggggggtacagtgcaggggaaagaatagtagacataatagcaacagacatacaaactaaag

SEQ ID NO: 16566 - DNA, 301 bp, Artificial Sequence
  Chd1.3_NTC.49
  crRNA array
  misc_feature (148)..(157): n is a, c, g, or t
cttggctttatatatcttgtggaaaggacgaaacaccgtaatttctactaagtgtagatatcagcaagtatgcaactattaatttctactaagtgtagattcggggcgcgtcaactgaattaatttctactaagtgtagatttttttnnnnnnnnnnaagcttggcgtggatccgatatcaactagatcttgagacaaatggcagtattcatccacaattttaaaagaaaaggggggattggggggtacagtgcaggggaaagaatagtagacataatagcaacagacatacaaactaaag

SEQ ID NO: 16567 - DNA, 301 bp, Artificial Sequence
  Chd1.3_NTC.5
  crRNA array
  misc_feature (148)..(157): n is a, c, g, or t
cttggctttatatatcttgtggaaaggacgaaacaccgtaatttctactaagtgtagatatcagcaagtatgcaactattaatttctactaagtgtagatgcttacgcgtcgcgaatgtataatttctactaagtgtagatttttttnnnnnnnnnnaagcttggcgtggatccgatatcaactagatcttgagacaaatggcagtattcatccacaattttaaaagaaaaggggggattggggggtacagtgcaggggaaagaatagtagacataatagcaacagacatacaaactaaag

SEQ ID NO: 16568 - DNA, 301 bp, Artificial Sequence
  Chd1.3_NTC.50
  crRNA array
  misc_feature (148)..(157): n is a, c, g, or t
cttggctttatatatcttgtggaaaggacgaaacaccgtaatttctactaagtgtagatatcagcaagtatgcaactattaatttctactaagtgtagatattgccgctcgcgcaaaatctaatttctactaagtgtagatttttttnnnnnnnnnnaagcttggcgtggatccgatatcaactagatcttgagacaaatggcagtattcatccacaattttaaaagaaaaggggggattggggggtacagtgcaggggaaagaatagtagacataatagcaacagacatacaaactaaag

SEQ ID NO: 16569 - DNA, 301 bp, Artificial Sequence
  Chd1.3_NTC.51
  crRNA array
  misc_feature (148)..(157): n is a, c, g, or t
cttggctttatatatcttgtggaaaggacgaaacaccgtaatttctactaagtgtagatatcagcaagtatgcaactattaatttctactaagtgtagattaacgcgcaacacgccaatgtaatttctactaagtgtagatttttttnnnnnnnnnnaagcttggcgtggatccgatatcaactagatcttgagacaaatggcagtattcatccacaattttaaaagaaaaggggggattggggggtacagtgcaggggaaagaatagtagacataatagcaacagacatacaaactaaag

SEQ ID NO: 16570 - DNA, 301 bp, Artificial Sequence
  Chd1.3_NTC.6
  crRNA array
  misc_feature (148)..(157): n is a, c, g, or t
cttggctttatatatcttgtggaaaggacgaaacaccgtaatttctactaagtgtagatatcagcaagtatgcaactattaatttctactaagtgtagatcgaatcgcgcctacgggaattaatttctactaagtgtagatttttttnnnnnnnnnnaagcttggcgtggatccgatatcaactagatcttgagacaaatggcagtattcatccacaattttaaaagaaaaggggggattggggggtacagtgcaggggaaagaatagtagacataatagcaacagacatacaaactaaag

SEQ ID NO: 16571 - DNA, 301 bp, Artificial Sequence
  Chd1.3_NTC.7
  crRNA array
  misc_feature (148)..(157): n is a, c, g, or t
cttggctttatatatcttgtggaaaggacgaaacaccgtaatttctactaagtgtagatatcagcaagtatgcaactattaatttctactaagtgtagatcgccgaacggataagactattaatttctactaagtgtagatttttttnnnnnnnnnnaagcttggcgtggatccgatatcaactagatcttgagacaaatggcagtattcatccacaattttaaaagaaaaggggggattggggggtacagtgcaggggaaagaatagtagacataatagcaacagacatacaaactaaag

SEQ ID NO: 16572 - DNA, 301 bp, Artificial Sequence
  Chd1.3_NTC.8
  crRNA array
  misc_feature (148)..(157): n is a, c, g, or t
cttggctttatatatcttgtggaaaggacgaaacaccgtaatttctactaagtgtagatatcagcaagtatgcaactattaatttctactaagtgtagatcgaccgaggttacgctgggataatttctactaagtgtagatttttttnnnnnnnnnnaagcttggcgtggatccgatatcaactagatcttgagacaaatggcagtattcatccacaattttaaaagaaaaggggggattggggggtacagtgcaggggaaagaatagtagacataatagcaacagacatacaaactaaag

SEQ ID NO: 16573 - DNA, 301 bp, Artificial Sequence
  Chd1.3_NTC.9
  crRNA array
  misc_feature (148)..(157): n is a, c, g, or t
cttggctttatatatcttgtggaaaggacgaaacaccgtaatttctactaagtgtagatatcagcaagtatgcaactattaatttctactaagtgtagatatcgccgtacggctatggcataatttctactaagtgtagatttttttnnnnnnnnnnaagcttggcgtggatccgatatcaactagatcttgagacaaatggcagtattcatccacaattttaaaagaaaaggggggattggggggtacagtgcaggggaaagaatagtagacataatagcaacagacatacaaactaaag

SEQ ID NO: 16574 - DNA, 301 bp, Artificial Sequence
  Chd1.4_NTC.0
  crRNA array
  misc_feature (148)..(157): n is a, c, g, or t
cttggctttatatatcttgtggaaaggacgaaacaccgtaatttctactaagtgtagataaatggcggataactcctcttaatttctactaagtgtagattatagcgtcgcgcgctaatttaatttctactaagtgtagatttttttnnnnnnnnnnaagcttggcgtggatccgatatcaactagatcttgagacaaatggcagtattcatccacaattttaaaagaaaaggggggattggggggtacagtgcaggggaaagaatagtagacataatagcaacagacatacaaactaaag

SEQ ID NO: 16575 - DNA, 301 bp, Artificial Sequence
  Chd1.4_NTC.1
  crRNA array
  misc_feature (148)..(157): n is a, c, g, or t
cttggctttatatatcttgtggaaaggacgaaacaccgtaatttctactaagtgtagataaatggcggataactcctcttaatttctactaagtgtagatcgcgtaaccgttccggctcctaatttctactaagtgtagatttttttnnnnnnnnnnaagcttggcgtggatccgatatcaactagatcttgagacaaatggcagtattcatccacaattttaaaagaaaaggggggattggggggtacagtgcaggggaaagaatagtagacataatagcaacagacatacaaactaaag

SEQ ID NO: 16576 - DNA, 301 bp, Artificial Sequence
  Chd1.4_NTC.10
  crRNA array
  misc_feature (148)..(157): n is a, c, g, or t
cttggctttatatatcttgtggaaaggacgaaacaccgtaatttctactaagtgtagataaatggcggataactcctcttaatttctactaagtgtagatcgctaagttcgcgcgggccgtaatttctactaagtgtagatttttttnnnnnnnnnnaagcttggcgtggatccgatatcaactagatcttgagacaaatggcagtattcatccacaattttaaaagaaaaggggggattggggggtacagtgcaggggaaagaatagtagacataatagcaacagacatacaaactaaag

SEQ ID NO: 16577 - DNA, 301 bp, Artificial Sequence
  Chd1.4_NTC.11
  crRNA array
  misc_feature (148)..(157): n is a, c, g, or t
cttggctttatatatcttgtggaaaggacgaaacaccgtaatttctactaagtgtagataaatggcggataactcctcttaatttctactaagtgtagatcgttcgtcgacgaagcaatctaatttctactaagtgtagatttttttnnnnnnnnnnaagcttggcgtggatccgatatcaactagatcttgagacaaatggcagtattcatccacaattttaaaagaaaaggggggattggggggtacagtgcaggggaaagaatagtagacataatagcaacagacatacaaactaaag

SEQ ID NO: 16578 - DNA, 301 bp, Artificial Sequence
  Chd1.4_NTC.12
  crRNA array
  misc_feature (148)..(157): n is a, c, g, or t
cttggctttatatatcttgtggaaaggacgaaacaccgtaatttctactaagtgtagataaatggcggataactcctcttaatttctactaagtgtagatcgccgacgattaatcaatagtaatttctactaagtgtagatttttttnnnnnnnnnnaagcttggcgtggatccgatatcaactagatcttgagacaaatggcagtattcatccacaattttaaaagaaaaggggggattggggggtacagtgcaggggaaagaatagtagacataatagcaacagacatacaaactaaag

SEQ ID NO: 16579 - DNA, 301 bp, Artificial Sequence
  Chd1.4_NTC.13
  crRNA array
  misc_feature (148)..(157): n is a, c, g, or t
cttggctttatatatcttgtggaaaggacgaaacaccgtaatttctactaagtgtagataaatggcggataactcctcttaatttctactaagtgtagatgaccgttgtatcgcgatcaataatttctactaagtgtagatttttttnnnnnnnnnnaagcttggcgtggatccgatatcaactagatcttgagacaaatggcagtattcatccacaattttaaaagaaaaggggggattggggggtacagtgcaggggaaagaatagtagacataatagcaacagacatacaaactaaag

SEQ ID NO: 16580 - DNA, 301 bp, Artificial Sequence
  Chd1.4_NTC.14
  crRNA array
  misc_feature (148)..(157): n is a, c, g, or t
cttggctttatatatcttgtggaaaggacgaaacaccgtaatttctactaagtgtagataaatggcggataactcctcttaatttctactaagtgtagatccgttcgtgcgatagtgttttaatttctactaagtgtagatttttttnnnnnnnnnnaagcttggcgtggatccgatatcaactagatcttgagacaaatggcagtattcatccacaattttaaaagaaaaggggggattggggggtacagtgcaggggaaagaatagtagacataatagcaacagacatacaaactaaag

SEQ ID NO: 16581 - DNA, 301 bp, Artificial Sequence
  Chd1.4_NTC.15
  crRNA array
  misc_feature (148)..(157): n is a, c, g, or t
cttggctttatatatcttgtggaaaggacgaaacaccgtaatttctactaagtgtagataaatggcggataactcctcttaatttctactaagtgtagatgttgtcgtgccgcgaatttataatttctactaagtgtagatttttttnnnnnnnnnnaagcttggcgtggatccgatatcaactagatcttgagacaaatggcagtattcatccacaattttaaaagaaaaggggggattggggggtacagtgcaggggaaagaatagtagacataatagcaacagacatacaaactaaag

SEQ ID NO: 16582 - DNA, 301 bp, Artificial Sequence
  Chd1.4_NTC.16
  crRNA array
  misc_feature (148)..(157): n is a, c, g, or t
cttggctttatatatcttgtggaaaggacgaaacaccgtaatttctactaagtgtagataaatggcggataactcctcttaatttctactaagtgtagatcggtacgttagacgaaaatttaatttctactaagtgtagatttttttnnnnnnnnnnaagcttggcgtggatccgatatcaactagatcttgagacaaatggcagtattcatccacaattttaaaagaaaaggggggattggggggtacagtgcaggggaaagaatagtagacataatagcaacagacatacaaactaaag

SEQ ID NO: 16583 - DNA, 301 bp, Artificial Sequence
  Chd1.4_NTC.17
  crRNA array
  misc_feature (148)..(157): n is a, c, g, or t
cttggctttatatatcttgtggaaaggacgaaacaccgtaatttctactaagtgtagataaatggcggataactcctcttaatttctactaagtgtagattatcgaacgctatcgaacgttaatttctactaagtgtagatttttttnnnnnnnnnnaagcttggcgtggatccgatatcaactagatcttgagacaaatggcagtattcatccacaattttaaaagaaaaggggggattggggggtacagtgcaggggaaagaatagtagacataatagcaacagacatacaaactaaag

SEQ ID NO: 16584 - DNA, 301 bp, Artificial Sequence
  Chd1.4_NTC.18
  crRNA array
  misc_feature (148)..(157): n is a, c, g, or t
cttggctttatatatcttgtggaaaggacgaaacaccgtaatttctactaagtgtagataaatggcggataactcctcttaatttctactaagtgtagattccggttacgaccggcaaaataatttctactaagtgtagatttttttnnnnnnnnnnaagcttggcgtggatccgatatcaactagatcttgagacaaatggcagtattcatccacaattttaaaagaaaaggggggattggggggtacagtgcaggggaaagaatagtagacataatagcaacagacatacaaactaaag

SEQ ID NO: 16585 - DNA, 301 bp, Artificial Sequence
  Chd1.4_NTC.19
  crRNA array
  misc_feature (148)..(157): n is a, c, g, or t
cttggctttatatatcttgtggaaaggacgaaacaccgtaatttctactaagtgtagataaatggcggataactcctcttaatttctactaagtgtagatcgtcgtagaacgatacccgataatttctactaagtgtagatttttttnnnnnnnnnnaagcttggcgtggatccgatatcaactagatcttgagacaaatggcagtattcatccacaattttaaaagaaaaggggggattggggggtacagtgcaggggaaagaatagtagacataatagcaacagacatacaaactaaag

SEQ ID NO: 16586 - DNA, 301 bp, Artificial Sequence
  Chd1.4_NTC.2
  crRNA array
  misc_feature (148)..(157): n is a, c, g, or t
cttggctttatatatcttgtggaaaggacgaaacaccgtaatttctactaagtgtagataaatggcggataactcctcttaatttctactaagtgtagatttatgtcgcgccgcgacccgtaatttctactaagtgtagatttttttnnnnnnnnnnaagcttggcgtggatccgatatcaactagatcttgagacaaatggcagtattcatccacaattttaaaagaaaaggggggattggggggtacagtgcaggggaaagaatagtagacataatagcaacagacatacaaactaaag

SEQ ID NO: 16587 - DNA, 301 bp, Artificial Sequence
  Chd1.4_NTC.20
  crRNA array
  misc_feature (148)..(157): n is a, c, g, or t
cttggctttatatatcttgtggaaaggacgaaacaccgtaatttctactaagtgtagataaatggcggataactcctcttaatttctactaagtgtagatattccggcgcgaccagaagataatttctactaagtgtagatttttttnnnnnnnnnnaagcttggcgtggatccgatatcaactagatcttgagacaaatggcagtattcatccacaattttaaaagaaaaggggggattggggggtacagtgcaggggaaagaatagtagacataatagcaacagacatacaaactaaag

SEQ ID NO: 16588 - DNA, 301 bp, Artificial Sequence
  Chd1.4_NTC.21
  crRNA array
  misc_feature (148)..(157): n is a, c, g, or t
cttggctttatatatcttgtggaaaggacgaaacaccgtaatttctactaagtgtagataaatggcggataactcctcttaatttctactaagtgtagatgtataacttcgcgcggtccgtaatttctactaagtgtagatttttttnnnnnnnnnnaagcttggcgtggatccgatatcaactagatcttgagacaaatggcagtattcatccacaattttaaaagaaaaggggggattggggggtacagtgcaggggaaagaatagtagacataatagcaacagacatacaaactaaag

SEQ ID NO: 16589 - DNA, 301 bp, Artificial Sequence
  Chd1.4_NTC.22
  crRNA array
  misc_feature (148)..(157): n is a, c, g, or t
cttggctttatatatcttgtggaaaggacgaaacaccgtaatttctactaagtgtagataaatggcggataactcctcttaatttctactaagtgtagatgcgcgtcaacgtaatgtgcctaatttctactaagtgtagatttttttnnnnnnnnnnaagcttggcgtggatccgatatcaactagatcttgagacaaatggcagtattcatccacaattttaaaagaaaaggggggattggggggtacagtgcaggggaaagaatagtagacataatagcaacagacatacaaactaaag

SEQ ID NO: 16590 - DNA, 301 bp, Artificial Sequence
  Chd1.4_NTC.23
  crRNA array
  misc_feature (148)..(157): n is a, c, g, or t
cttggctttatatatcttgtggaaaggacgaaacaccgtaatttctactaagtgtagataaatggcggataactcctcttaatttctactaagtgtagatacgcgctattatcgtaggtgtaatttctactaagtgtagatttttttnnnnnnnnnnaagcttggcgtggatccgatatcaactagatcttgagacaaatggcagtattcatccacaattttaaaagaaaaggggggattggggggtacagtgcaggggaaagaatagtagacataatagcaacagacatacaaactaaag

SEQ ID NO: 16591 - DNA, 301 bp, Artificial Sequence
  Chd1.4_NTC.24
  crRNA array
  misc_feature (148)..(157): n is a, c, g, or t
cttggctttatatatcttgtggaaaggacgaaacaccgtaatttctactaagtgtagataaatggcggataactcctcttaatttctactaagtgtagatactatcgacgttcgtcccggtaatttctactaagtgtagatttttttnnnnnnnnnnaagcttggcgtggatccgatatcaactagatcttgagacaaatggcagtattcatccacaattttaaaagaaaaggggggattggggggtacagtgcaggggaaagaatagtagacataatagcaacagacatacaaactaaag

SEQ ID NO: 16592 - DNA, 301 bp, Artificial Sequence
  Chd1.4_NTC.25
  crRNA array
  misc_feature (148)..(157): n is a, c, g, or t
cttggctttatatatcttgtggaaaggacgaaacaccgtaatttctactaagtgtagataaatggcggataactcctcttaatttctactaagtgtagattcgcgttatcgtgccgtgcgtaatttctactaagtgtagatttttttnnnnnnnnnnaagcttggcgtggatccgatatcaactagatcttgagacaaatggcagtattcatccacaattttaaaagaaaaggggggattggggggtacagtgcaggggaaagaatagtagacataatagcaacagacatacaaactaaag

SEQ ID NO: 16593 - DNA, 301 bp, Artificial Sequence
  Chd1.4_NTC.26
  crRNA array
  misc_feature (148)..(157): n is a, c, g, or t
cttggctttatatatcttgtggaaaggacgaaacaccgtaatttctactaagtgtagataaatggcggataactcctcttaatttctactaagtgtagatcgcgacggcggttttaacactaatttctactaagtgtagatttttttnnnnnnnnnnaagcttggcgtggatccgatatcaactagatcttgagacaaatggcagtattcatccacaattttaaaagaaaaggggggattggggggtacagtgcaggggaaagaatagtagacataatagcaacagacatacaaactaaag

SEQ ID NO: 16594 - DNA, 301 bp, Artificial Sequence
  Chd1.4_NTC.27
  crRNA array
  misc_feature (148)..(157): n is a, c, g, or t
cttggctttatatatcttgtggaaaggacgaaacaccgtaatttctactaagtgtagataaatggcggataactcctcttaatttctactaagtgtagatgtcgcgttgcgaccggcgcttaatttctactaagtgtagatttttttnnnnnnnnnnaagcttggcgtggatccgatatcaactagatcttgagacaaatggcagtattcatccacaattttaaaagaaaaggggggattggggggtacagtgcaggggaaagaatagtagacataatagcaacagacatacaaactaaag

SEQ ID NO: 16595 - DNA, 301 bp, Artificial Sequence
  Chd1.4_NTC.28
  crRNA array
  misc_feature (148)..(157): n is a, c, g, or t
cttggctttatatatcttgtggaaaggacgaaacaccgtaatttctactaagtgtagataaatggcggataactcctcttaatttctactaagtgtagataccgctaatcggcgtaaacttaatttctactaagtgtagatttttttnnnnnnnnnnaagcttggcgtggatccgatatcaactagatcttgagacaaatggcagtattcatccacaattttaaaagaaaaggggggattggggggtacagtgcaggggaaagaatagtagacataatagcaacagacatacaaactaaag

SEQ ID NO: 16596 - DNA, 301 bp, Artificial Sequence
  Chd1.4_NTC.29
  crRNA array
  misc_feature (148)..(157): n is a, c, g, or t
cttggctttatatatcttgtggaaaggacgaaacaccgtaatttctactaagtgtagataaatggcggataactcctcttaatttctactaagtgtagatcgcgatctataccgtctatataatttctactaagtgtagatttttttnnnnnnnnnnaagcttggcgtggatccgatatcaactagatcttgagacaaatggcagtattcatccacaattttaaaagaaaaggggggattggggggtacagtgcaggggaaagaatagtagacataatagcaacagacatacaaactaaag

SEQ ID NO: 16597 - DNA, 301 bp, Artificial Sequence
  Chd1.4_NTC.3
  crRNA array
  misc_feature (148)..(157): n is a, c, g, or t
cttggctttatatatcttgtggaaaggacgaaacaccgtaatttctactaagtgtagataaatggcggataactcctcttaatttctactaagtgtagattcgacgcgagacgacgtacataatttctactaagtgtagatttttttnnnnnnnnnnaagcttggcgtggatccgatatcaactagatcttgagacaaatggcagtattcatccacaattttaaaagaaaaggggggattggggggtacagtgcaggggaaagaatagtagacataatagcaacagacatacaaactaaag

SEQ ID NO: 16598 - DNA, 301 bp, Artificial Sequence
  Chd1.4_NTC.30
  crRNA array
  misc_feature (148)..(157): n is a, c, g, or t
cttggctttatatatcttgtggaaaggacgaaacaccgtaatttctactaagtgtagataaatggcggataactcctcttaatttctactaagtgtagatcgatcgtacgggtgtcctaataatttctactaagtgtagatttttttnnnnnnnnnnaagcttggcgtggatccgatatcaactagatcttgagacaaatggcagtattcatccacaattttaaaagaaaaggggggattggggggtacagtgcaggggaaagaatagtagacataatagcaacagacatacaaactaaag

SEQ ID NO: 16599 - DNA, 301 bp, Artificial Sequence
  Chd1.4_NTC.31
  crRNA array
  misc_feature (148)..(157): n is a, c, g, or t
cttggctttatatatcttgtggaaaggacgaaacaccgtaatttctactaagtgtagataaatggcggataactcctcttaatttctactaagtgtagatgccgaccgcgtgattgtaggtaatttctactaagtgtagatttttttnnnnnnnnnnaagcttggcgtggatccgatatcaactagatcttgagacaaatggcagtattcatccacaattttaaaagaaaaggggggattggggggtacagtgcaggggaaagaatagtagacataatagcaacagacatacaaactaaag

SEQ ID NO: 16600 - DNA, 301 bp, Artificial Sequence
  Chd1.4_NTC.32
  crRNA array
  misc_feature (148)..(157): n is a, c, g, or t
cttggctttatatatcttgtggaaaggacgaaacaccgtaatttctactaagtgtagataaatggcggataactcctcttaatttctactaagtgtagatgcacgttacgcccgggtcactaatttctactaagtgtagatttttttnnnnnnnnnnaagcttggcgtggatccgatatcaactagatcttgagacaaatggcagtattcatccacaattttaaaagaaaaggggggattggggggtacagtgcaggggaaagaatagtagacataatagcaacagacatacaaactaaag

SEQ ID NO: 16601 - DNA, 301 bp, Artificial Sequence
  Chd1.4_NTC.33
  crRNA array
  misc_feature (148)..(157): n is a, c, g, or t
cttggctttatatatcttgtggaaaggacgaaacaccgtaatttctactaagtgtagataaatggcggataactcctcttaatttctactaagtgtagattaagcgaccgacgcattcgctaatttctactaagtgtagatttttttnnnnnnnnnnaagcttggcgtggatccgatatcaactagatcttgagacaaatggcagtattcatccacaattttaaaagaaaaggggggattggggggtacagtgcaggggaaagaatagtagacataatagcaacagacatacaaactaaag

SEQ ID NO: 16602 - DNA, 301 bp, Artificial Sequence
  Chd1.4_NTC.34
  crRNA array
  misc_feature (148)..(157): n is a, c, g, or t
cttggctttatatatcttgtggaaaggacgaaacaccgtaatttctactaagtgtagataaatggcggataactcctcttaatttctactaagtgtagattagcgttcgacacgtgaaactaatttctactaagtgtagatttttttnnnnnnnnnnaagcttggcgtggatccgatatcaactagatcttgagacaaatggcagtattcatccacaattttaaaagaaaaggggggattggggggtacagtgcaggggaaagaatagtagacataatagcaacagacatacaaactaaag

SEQ ID NO: 16603 - DNA, 301 bp, Artificial Sequence
  Chd1.4_NTC.35
  crRNA array
  misc_feature (148)..(157): n is a, c, g, or t
cttggctttatatatcttgtggaaaggacgaaacaccgtaatttctactaagtgtagataaatggcggataactcctcttaatttctactaagtgtagattggcgcgtaatcgctattcgtaatttctactaagtgtagatttttttnnnnnnnnnnaagcttggcgtggatccgatatcaactagatcttgagacaaatggcagtattcatccacaattttaaaagaaaaggggggattggggggtacagtgcaggggaaagaatagtagacataatagcaacagacatacaaactaaag

SEQ ID NO: 16604 - DNA, 301 bp, Artificial Sequence
  Chd1.4_NTC.36
  crRNA array
  misc_feature (148)..(157): n is a, c, g, or t
cttggctttatatatcttgtggaaaggacgaaacaccgtaatttctactaagtgtagataaatggcggataactcctcttaatttctactaagtgtagatcaacccgccgtagcgggccttaatttctactaagtgtagatttttttnnnnnnnnnnaagcttggcgtggatccgatatcaactagatcttgagacaaatggcagtattcatccacaattttaaaagaaaaggggggattggggggtacagtgcaggggaaagaatagtagacataatagcaacagacatacaaactaaag

SEQ ID NO: 16605 - DNA, 301 bp, Artificial Sequence
  Chd1.4_NTC.37
  crRNA array
  misc_feature (148)..(157): n is a, c, g, or t
cttggctttatatatcttgtggaaaggacgaaacaccgtaatttctactaagtgtagataaatggcggataactcctcttaatttctactaagtgtagattttgcgttgacgcgattacttaatttctactaagtgtagatttttttnnnnnnnnnnaagcttggcgtggatccgatatcaactagatcttgagacaaatggcagtattcatccacaattttaaaagaaaaggggggattggggggtacagtgcaggggaaagaatagtagacataatagcaacagacatacaaactaaag

SEQ ID NO: 16606 - DNA, 301 bp, Artificial Sequence
  Chd1.4_NTC.38
  crRNA array
  misc_feature (148)..(157): n is a, c, g, or t
cttggctttatatatcttgtggaaaggacgaaacaccgtaatttctactaagtgtagataaatggcggataactcctcttaatttctactaagtgtagataacggagcgcgatactaccataatttctactaagtgtagatttttttnnnnnnnnnnaagcttggcgtggatccgatatcaactagatcttgagacaaatggcagtattcatccacaattttaaaagaaaaggggggattggggggtacagtgcaggggaaagaatagtagacataatagcaacagacatacaaactaaag

SEQ ID NO: 16607 - DNA, 301 bp, Artificial Sequence
  Chd1.4_NTC.39
  crRNA array
  misc_feature (148)..(157): n is a, c, g, or t
cttggctttatatatcttgtggaaaggacgaaacaccgtaatttctactaagtgtagataaatggcggataactcctcttaatttctactaagtgtagatccggacgttataacgtttcttaatttctactaagtgtagatttttttnnnnnnnnnnaagcttggcgtggatccgatatcaactagatcttgagacaaatggcagtattcatccacaattttaaaagaaaaggggggattggggggtacagtgcaggggaaagaatagtagacataatagcaacagacatacaaactaaag

SEQ ID NO: 16608 - DNA, 301 bp, Artificial Sequence
  Chd1.4_NTC.4
  crRNA array
  misc_feature (148)..(157): n is a, c, g, or t
cttggctttatatatcttgtggaaaggacgaaacaccgtaatttctactaagtgtagataaatggcggataactcctcttaatttctactaagtgtagatatacccgtcgcgaacgtgagtaatttctactaagtgtagatttttttnnnnnnnnnnaagcttggcgtggatccgatatcaactagatcttgagacaaatggcagtattcatccacaattttaaaagaaaaggggggattggggggtacagtgcaggggaaagaatagtagacataatagcaacagacatacaaactaaag

SEQ ID NO: 16609 - DNA, 301 bp, Artificial Sequence
  Chd1.4_NTC.40
  crRNA array
  misc_feature (148)..(157): n is a, c, g, or t
cttggctttatatatcttgtggaaaggacgaaacaccgtaatttctactaagtgtagataaatggcggataactcctcttaatttctactaagtgtagatattcgcgaacccggccggaataatttctactaagtgtagatttttttnnnnnnnnnnaagcttggcgtggatccgatatcaactagatcttgagacaaatggcagtattcatccacaattttaaaagaaaaggggggattggggggtacagtgcaggggaaagaatagtagacataatagcaacagacatacaaactaaag

SEQ ID NO: 16610 - DNA, 301 bp, Artificial Sequence
  Chd1.4_NTC.41
  crRNA array
  misc_feature (148)..(157): n is a, c, g, or t
cttggctttatatatcttgtggaaaggacgaaacaccgtaatttctactaagtgtagataaatggcggataactcctcttaatttctactaagtgtagatttgatggcgcgacgcgttattaatttctactaagtgtagatttttttnnnnnnnnnnaagcttggcgtggatccgatatcaactagatcttgagacaaatggcagtattcatccacaattttaaaagaaaaggggggattggggggtacagtgcaggggaaagaatagtagacataatagcaacagacatacaaactaaag

SEQ ID NO: 16611 - DNA, 301 bp, Artificial Sequence
  Chd1.4_NTC.42
  crRNA array
  misc_feature (148)..(157): n is a, c, g, or t
cttggctttatatatcttgtggaaaggacgaaacaccgtaatttctactaagtgtagataaatggcggataactcctcttaatttctactaagtgtagatggtcaaatcgcggcgataactaatttctactaagtgtagatttttttnnnnnnnnnnaagcttggcgtggatccgatatcaactagatcttgagacaaatggcagtattcatccacaattttaaaagaaaaggggggattggggggtacagtgcaggggaaagaatagtagacataatagcaacagacatacaaactaaag

SEQ ID NO: 16612 - DNA, 301 bp, Artificial Sequence
  Chd1.4_NTC.43
  crRNA array
  misc_feature (148)..(157): n is a, c, g, or t
cttggctttatatatcttgtggaaaggacgaaacaccgtaatttctactaagtgtagataaatggcggataactcctcttaatttctactaagtgtagatcgactcgcgcattgaactggtaatttctactaagtgtagatttttttnnnnnnnnnnaagcttggcgtggatccgatatcaactagatcttgagacaaatggcagtattcatccacaattttaaaagaaaaggggggattggggggtacagtgcaggggaaagaatagtagacataatagcaacagacatacaaactaaag

SEQ ID NO: 16613 - DNA, 301 bp, Artificial Sequence
  Chd1.4_NTC.44
  crRNA array
  misc_feature (148)..(157): n is a, c, g, or t
cttggctttatatatcttgtggaaaggacgaaacaccgtaatttctactaagtgtagataaatggcggataactcctcttaatttctactaagtgtagatagcgtcgtacgatttatcgttaatttctactaagtgtagatttttttnnnnnnnnnnaagcttggcgtggatccgatatcaactagatcttgagacaaatggcagtattcatccacaattttaaaagaaaaggggggattggggggtacagtgcaggggaaagaatagtagacataatagcaacagacatacaaactaaag

SEQ ID NO: 16614 - DNA, 301 bp, Artificial Sequence
  Chd1.4_NTC.45
  crRNA array
  misc_feature (148)..(157): n is a, c, g, or t
cttggctttatatatcttgtggaaaggacgaaacaccgtaatttctactaagtgtagataaatggcggataactcctcttaatttctactaagtgtagatcggaacgcgtgatactagggtaatttctactaagtgtagatttttttnnnnnnnnnnaagcttggcgtggatccgatatcaactagatcttgagacaaatggcagtattcatccacaattttaaaagaaaaggggggattggggggtacagtgcaggggaaagaatagtagacataatagcaacagacatacaaactaaag

SEQ ID NO: 16615 - DNA, 301 bp, Artificial Sequence
  Chd1.4_NTC.46
  crRNA array
  misc_feature (148)..(157): n is a, c, g, or t
cttggctttatatatcttgtggaaaggacgaaacaccgtaatttctactaagtgtagataaatggcggataactcctcttaatttctactaagtgtagatagcgggtcgtagacgcgcggtaatttctactaagtgtagatttttttnnnnnnnnnnaagcttggcgtggatccgatatcaactagatcttgagacaaatggcagtattcatccacaattttaaaagaaaaggggggattggggggtacagtgcaggggaaagaatagtagacataatagcaacagacatacaaactaaag

SEQ ID NO: 16616 - DNA, 301 bp, Artificial Sequence
  Chd1.4_NTC.47
  crRNA array
  misc_feature (148)..(157): n is a, c, g, or t
cttggctttatatatcttgtggaaaggacgaaacaccgtaatttctactaagtgtagataaatggcggataactcctcttaatttctactaagtgtagattctcgtatcgcgattgttaataatttctactaagtgtagatttttttnnnnnnnnnnaagcttggcgtggatccgatatcaactagatcttgagacaaatggcagtattcatccacaattttaaaagaaaaggggggattggggggtacagtgcaggggaaagaatagtagacataatagcaacagacatacaaactaaag

SEQ ID NO: 16617 - DNA, 301 bp, Artificial Sequence
  Chd1.4_NTC.48
  crRNA array
  misc_feature (148)..(157): n is a, c, g, or t
cttggctttatatatcttgtggaaaggacgaaacaccgtaatttctactaagtgtagataaatggcggataactcctcttaatttctactaagtgtagatcggtcgactacggctgttagtaatttctactaagtgtagatttttttnnnnnnnnnnaagcttggcgtggatccgatatcaactagatcttgagacaaatggcagtattcatccacaattttaaaagaaaaggggggattggggggtacagtgcaggggaaagaatagtagacataatagcaacagacatacaaactaaag

SEQ ID NO: 16618 - DNA, 301 bp, Artificial Sequence
  Chd1.4_NTC.49
  crRNA array
  misc_feature (148)..(157): n is a, c, g, or t
cttggctttatatatcttgtggaaaggacgaaacaccgtaatttctactaagtgtagataaatggcggataactcctcttaatttctactaagtgtagattcggggcgcgtcaactgaattaatttctactaagtgtagatttttttnnnnnnnnnnaagcttggcgtggatccgatatcaactagatcttgagacaaatggcagtattcatccacaattttaaaagaaaaggggggattggggggtacagtgcaggggaaagaatagtagacataatagcaacagacatacaaactaaag

SEQ ID NO: 16619 - DNA, 301 bp, Artificial Sequence
  Chd1.4_NTC.5
  crRNA array
  misc_feature (148)..(157): n is a, c, g, or t
cttggctttatatatcttgtggaaaggacgaaacaccgtaatttctactaagtgtagataaatggcggataactcctcttaatttctactaagtgtagatgcttacgcgtcgcgaatgtataatttctactaagtgtagatttttttnnnnnnnnnnaagcttggcgtggatccgatatcaactagatcttgagacaaatggcagtattcatccacaattttaaaagaaaaggggggattggggggtacagtgcaggggaaagaatagtagacataatagcaacagacatacaaactaaag

SEQ ID NO: 16620 - DNA, 301 bp, Artificial Sequence
  Chd1.4_NTC.50
  crRNA array
  misc_feature (148)..(157): n is a, c, g, or t
cttggctttatatatcttgtggaaaggacgaaacaccgtaatttctactaagtgtagataaatggcggataactcctcttaatttctactaagtgtagatattgccgctcgcgcaaaatctaatttctactaagtgtagatttttttnnnnnnnnnnaagcttggcgtggatccgatatcaactagatcttgagacaaatggcagtattcatccacaattttaaaagaaaaggggggattggggggtacagtgcaggggaaagaatagtagacataatagcaacagacatacaaactaaag

SEQ ID NO: 16621 - DNA, 301 bp, Artificial Sequence
  Chd1.4_NTC.51
  crRNA array
  misc_feature (148)..(157): n is a, c, g, or t
cttggctttatatatcttgtggaaaggacgaaacaccgtaatttctactaagtgtagataaatggcggataactcctcttaatttctactaagtgtagattaacgcgcaacacgccaatgtaatttctactaagtgtagatttttttnnnnnnnnnnaagcttggcgtggatccgatatcaactagatcttgagacaaatggcagtattcatccacaattttaaaagaaaaggggggattggggggtacagtgcaggggaaagaatagtagacataatagcaacagacatacaaactaaag

SEQ ID NO: 16622 - DNA, 301 bp, Artificial Sequence
  Chd1.4_NTC.6
  crRNA array
  misc_feature (148)..(157): n is a, c, g, or t
cttggctttatatatcttgtggaaaggacgaaacaccgtaatttctactaagtgtagataaatggcggataactcctcttaatttctactaagtgtagatcgaatcgcgcctacgggaattaatttctactaagtgtagatttttttnnnnnnnnnnaagcttggcgtggatccgatatcaactagatcttgagacaaatggcagtattcatccacaattttaaaagaaaaggggggattggggggtacagtgcaggggaaagaatagtagacataatagcaacagacatacaaactaaag

SEQ ID NO: 16623 - DNA, 301 bp, Artificial Sequence
  Chd1.4_NTC.7
  crRNA array
  misc_feature (148)..(157): n is a, c, g, or t
cttggctttatatatcttgtggaaaggacgaaacaccgtaatttctactaagtgtagataaatggcggataactcctcttaatttctactaagtgtagatcgccgaacggataagactattaatttctactaagtgtagatttttttnnnnnnnnnnaagcttggcgtggatccgatatcaactagatcttgagacaaatggcagtattcatccacaattttaaaagaaaaggggggattggggggtacagtgcaggggaaagaatagtagacataatagcaacagacatacaaactaaag

SEQ ID NO: 16624 - DNA, 301 bp, Artificial Sequence
  Chd1.4_NTC.8
  crRNA array
  misc_feature (148)..(157): n is a, c, g, or t
cttggctttatatatcttgtggaaaggacgaaacaccgtaatttctactaagtgtagataaatggcggataactcctcttaatttctactaagtgtagatcgaccgaggttacgctgggataatttctactaagtgtagatttttttnnnnnnnnnnaagcttggcgtggatccgatatcaactagatcttgagacaaatggcagtattcatccacaattttaaaagaaaaggggggattggggggtacagtgcaggggaaagaatagtagacataatagcaacagacatacaaactaaag

SEQ ID NO: 16625 - DNA, 301 bp, Artificial Sequence
  Chd1.4_NTC.9
  crRNA array
  misc_feature (148)..(157): n is a, c, g, or t
cttggctttatatatcttgtggaaaggacgaaacaccgtaatttctactaagtgtagataaatggcggataactcctcttaatttctactaagtgtagatatcgccgtacggctatggcataatttctactaagtgtagatttttttnnnnnnnnnnaagcttggcgtggatccgatatcaactagatcttgagacaaatggcagtattcatccacaattttaaaagaaaaggggggattggggggtacagtgcaggggaaagaatagtagacataatagcaacagacatacaaactaaag

SEQ ID NO: 16626 - DNA, 301 bp, Artificial Sequence
  Crebbp.1_NTC.0
  crRNA array
  misc_feature (148)..(157): n is a, c, g, or t
cttggctttatatatcttgtggaaaggacgaaacaccgtaatttctactaagtgtagatctcacggcggcggcgggccgtaatttctactaagtgtagattatagcgtcgcgcgctaatttaatttctactaagtgtagatttttttnnnnnnnnnnaagcttggcgtggatccgatatcaactagatcttgagacaaatggcagtattcatccacaattttaaaagaaaaggggggattggggggtacagtgcaggggaaagaatagtagacataatagcaacagacatacaaactaaag

SEQ ID NO: 16627 - DNA, 301 bp, Artificial Sequence
  Crebbp.1_NTC.1
  crRNA array
  misc_feature (148)..(157): n is a, c, g, or t
cttggctttatatatcttgtggaaaggacgaaacaccgtaatttctactaagtgtagatctcacggcggcggcgggccgtaatttctactaagtgtagatcgcgtaaccgttccggctcctaatttctactaagtgtagatttttttnnnnnnnnnnaagcttggcgtggatccgatatcaactagatcttgagacaaatggcagtattcatccacaattttaaaagaaaaggggggattggggggtacagtgcaggggaaagaatagtagacataatagcaacagacatacaaactaaag

SEQ ID NO: 16628 - DNA, 301 bp, Artificial Sequence
  Crebbp.1_NTC.10
  crRNA array
  misc_feature (148)..(157): n is a, c, g, or t
cttggctttatatatcttgtggaaaggacgaaacaccgtaatttctactaagtgtagatctcacggcggcggcgggccgtaatttctactaagtgtagatcgctaagttcgcgcgggccgtaatttctactaagtgtagatttttttnnnnnnnnnnaagcttggcgtggatccgatatcaactagatcttgagacaaatggcagtattcatccacaattttaaaagaaaaggggggattggggggtacagtgcaggggaaagaatagtagacataatagcaacagacatacaaactaaag

SEQ ID NO: 16629 - DNA, 301 bp, Artificial Sequence
  Crebbp.1_NTC.11
  crRNA array
  misc_feature (148)..(157): n is a, c, g, or t
cttggctttatatatcttgtggaaaggacgaaacaccgtaatttctactaagtgtagatctcacggcggcggcgggccgtaatttctactaagtgtagatcgttcgtcgacgaagcaatctaatttctactaagtgtagatttttttnnnnnnnnnnaagcttggcgtggatccgatatcaactagatcttgagacaaatggcagtattcatccacaattttaaaagaaaaggggggattggggggtacagtgcaggggaaagaatagtagacataatagcaacagacatacaaactaaag

SEQ ID NO: 16630 - DNA, 301 bp, Artificial Sequence
  Crebbp.1_NTC.12
  crRNA array
  misc_feature (148)..(157): n is a, c, g, or t
cttggctttatatatcttgtggaaaggacgaaacaccgtaatttctactaagtgtagatctcacggcggcggcgggccgtaatttctactaagtgtagatcgccgacgattaatcaatagtaatttctactaagtgtagatttttttnnnnnnnnnnaagcttggcgtggatccgatatcaactagatcttgagacaaatggcagtattcatccacaattttaaaagaaaaggggggattggggggtacagtgcaggggaaagaatagtagacataatagcaacagacatacaaactaaag

SEQ ID NO: 16631 - DNA, 301 bp, Artificial Sequence
  Crebbp.1_NTC.13
  crRNA array
  misc_feature (148)..(157): n is a, c, g, or t
cttggctttatatatcttgtggaaaggacgaaacaccgtaatttctactaagtgtagatctcacggcggcggcgggccgtaatttctactaagtgtagatgaccgttgtatcgcgatcaataatttctactaagtgtagatttttttnnnnnnnnnnaagcttggcgtggatccgatatcaactagatcttgagacaaatggcagtattcatccacaattttaaaagaaaaggggggattggggggtacagtgcaggggaaagaatagtagacataatagcaacagacatacaaactaaag

SEQ ID NO: 16632 - DNA, 301 bp, Artificial Sequence
  Crebbp.1_NTC.14
  crRNA array
  misc_feature (148)..(157): n is a, c, g, or t
cttggctttatatatcttgtggaaaggacgaaacaccgtaatttctactaagtgtagatctcacggcggcggcgggccgtaatttctactaagtgtagatccgttcgtgcgatagtgttttaatttctactaagtgtagatttttttnnnnnnnnnnaagcttggcgtggatccgatatcaactagatcttgagacaaatggcagtattcatccacaattttaaaagaaaaggggggattggggggtacagtgcaggggaaagaatagtagacataatagcaacagacatacaaactaaag

SEQ ID NO: 16633 - DNA, 301 bp, Artificial Sequence
  Crebbp.1_NTC.15
  crRNA array
  misc_feature (148)..(157): n is a, c, g, or t
cttggctttatatatcttgtggaaaggacgaaacaccgtaatttctactaagtgtagatctcacggcggcggcgggccgtaatttctactaagtgtagatgttgtcgtgccgcgaatttataatttctactaagtgtagatttttttnnnnnnnnnnaagcttggcgtggatccgatatcaactagatcttgagacaaatggcagtattcatccacaattttaaaagaaaaggggggattggggggtacagtgcaggggaaagaatagtagacataatagcaacagacatacaaactaaag

SEQ ID NO: 16634 - DNA, 301 bp, Artificial Sequence
  Crebbp.1_NTC.16
  crRNA array
  misc_feature (148)..(157): n is a, c, g, or t
cttggctttatatatcttgtggaaaggacgaaacaccgtaatttctactaagtgtagatctcacggcggcggcgggccgtaatttctactaagtgtagatcggtacgttagacgaaaatttaatttctactaagtgtagatttttttnnnnnnnnnnaagcttggcgtggatccgatatcaactagatcttgagacaaatggcagtattcatccacaattttaaaagaaaaggggggattggggggtacagtgcaggggaaagaatagtagacataatagcaacagacatacaaactaaag

SEQ ID NO: 16635 - DNA, 301 bp, Artificial Sequence
  Crebbp.1_NTC.17
  crRNA array
  misc_feature (148)..(157): n is a, c, g, or t
cttggctttatatatcttgtggaaaggacgaaacaccgtaatttctactaagtgtagatctcacggcggcggcgggccgtaatttctactaagtgtagattatcgaacgctatcgaacgttaatttctactaagtgtagatttttttnnnnnnnnnnaagcttggcgtggatccgatatcaactagatcttgagacaaatggcagtattcatccacaattttaaaagaaaaggggggattggggggtacagtgcaggggaaagaatagtagacataatagcaacagacatacaaactaaag

SEQ ID NO: 16636 - DNA, 301 bp, Artificial Sequence
  Crebbp.1_NTC.18
  crRNA array
  misc_feature (148)..(157): n is a, c, g, or t
cttggctttatatatcttgtggaaaggacgaaacaccgtaatttctactaagtgtagatctcacggcggcggcgggccgtaatttctactaagtgtagattccggttacgaccggcaaaataatttctactaagtgtagatttttttnnnnnnnnnnaagcttggcgtggatccgatatcaactagatcttgagacaaatggcagtattcatccacaattttaaaagaaaaggggggattggggggtacagtgcaggggaaagaatagtagacataatagcaacagacatacaaactaaag

SEQ ID NO: 16637 - DNA, 301 bp, Artificial Sequence
  Crebbp.1_NTC.19
  crRNA array
  misc_feature (148)..(157): n is a, c, g, or t
cttggctttatatatcttgtggaaaggacgaaacaccgtaatttctactaagtgtagatctcacggcggcggcgggccgtaatttctactaagtgtagatcgtcgtagaacgatacccgataatttctactaagtgtagatttttttnnnnnnnnnnaagcttggcgtggatccgatatcaactagatcttgagacaaatggcagtattcatccacaattttaaaagaaaaggggggattggggggtacagtgcaggggaaagaatagtagacataatagcaacagacatacaaactaaag

SEQ ID NO: 16638 - DNA, 301 bp, Artificial Sequence
  Crebbp.1_NTC.2
  crRNA array
  misc_feature (148)..(157): n is a, c, g, or t
cttggctttatatatcttgtggaaaggacgaaacaccgtaatttctactaagtgtagatctcacggcggcggcgggccgtaatttctactaagtgtagatttatgtcgcgccgcgacccgtaatttctactaagtgtagatttttttnnnnnnnnnnaagcttggcgtggatccgatatcaactagatcttgagacaaatggcagtattcatccacaattttaaaagaaaaggggggattggggggtacagtgcaggggaaagaatagtagacataatagcaacagacatacaaactaaag

SEQ ID NO: 16639 - DNA, 301 bp, Artificial Sequence
  Crebbp.1_NTC.20
  crRNA array
  misc_feature (148)..(157): n is a, c, g, or t
cttggctttatatatcttgtggaaaggacgaaacaccgtaatttctactaagtgtagatctcacggcggcggcgggccgtaatttctactaagtgtagatattccggcgcgaccagaagataatttctactaagtgtagatttttttnnnnnnnnnnaagcttggcgtggatccgatatcaactagatcttgagacaaatggcagtattcatccacaattttaaaagaaaaggggggattggggggtacagtgcaggggaaagaatagtagacataatagcaacagacatacaaactaaag

SEQ ID NO: 16640 - DNA, 301 bp, Artificial Sequence
  Crebbp.1_NTC.21
  crRNA array
  misc_feature (148)..(157): n is a, c, g, or t
cttggctttatatatcttgtggaaaggacgaaacaccgtaatttctactaagtgtagatctcacggcggcggcgggccgtaatttctactaagtgtagatgtataacttcgcgcggtccgtaatttctactaagtgtagatttttttnnnnnnnnnnaagcttggcgtggatccgatatcaactagatcttgagacaaatggcagtattcatccacaattttaaaagaaaaggggggattggggggtacagtgcaggggaaagaatagtagacataatagcaacagacatacaaactaaag

SEQ ID NO: 16641 - DNA, 301 bp, Artificial Sequence
  Crebbp.1_NTC.22
  crRNA array
  misc_feature (148)..(157): n is a, c, g, or t
cttggctttatatatcttgtggaaaggacgaaacaccgtaatttctactaagtgtagatctcacggcggcggcgggccgtaatttctactaagtgtagatgcgcgtcaacgtaatgtgcctaatttctactaagtgtagatttttttnnnnnnnnnnaagcttggcgtggatccgatatcaactagatcttgagacaaatggcagtattcatccacaattttaaaagaaaaggggggattggggggtacagtgcaggggaaagaatagtagacataatagcaacagacatacaaactaaag

SEQ ID NO: 16642 - DNA, 301 bp, Artificial Sequence
  Crebbp.1_NTC.23
  crRNA array
  misc_feature (148)..(157): n is a, c, g, or t
cttggctttatatatcttgtggaaaggacgaaacaccgtaatttctactaagtgtagatctcacggcggcggcgggccgtaatttctactaagtgtagatacgcgctattatcgtaggtgtaatttctactaagtgtagatttttttnnnnnnnnnnaagcttggcgtggatccgatatcaactagatcttgagacaaatggcagtattcatccacaattttaaaagaaaaggggggattggggggtacagtgcaggggaaagaatagtagacataatagcaacagacatacaaactaaag

SEQ ID NO: 16643 - DNA, 301 bp, Artificial Sequence
  Crebbp.1_NTC.24
  crRNA array
  misc_feature (148)..(157): n is a, c, g, or t
cttggctttatatatcttgtggaaaggacgaaacaccgtaatttctactaagtgtagatctcacggcggcggcgggccgtaatttctactaagtgtagatactatcgacgttcgtcccggtaatttctactaagtgtagatttttttnnnnnnnnnnaagcttggcgtggatccgatatcaactagatcttgagacaaatggcagtattcatccacaattttaaaagaaaaggggggattggggggtacagtgcaggggaaagaatagtagacataatagcaacagacatacaaactaaag

SEQ ID NO: 16644 - DNA, 301 bp, Artificial Sequence
  Crebbp.1_NTC.25
  crRNA array
  misc_feature (148)..(157): n is a, c, g, or t
cttggctttatatatcttgtggaaaggacgaaacaccgtaatttctactaagtgtagatctcacggcggcggcgggccgtaatttctactaagtgtagattcgcgttatcgtgccgtgcgtaatttctactaagtgtagatttttttnnnnnnnnnnaagcttggcgtggatccgatatcaactagatcttgagacaaatggcagtattcatccacaattttaaaagaaaaggggggattggggggtacagtgcaggggaaagaatagtagacataatagcaacagacatacaaactaaag

SEQ ID NO: 16645 - DNA, 301 bp, Artificial Sequence
  Crebbp.1_NTC.26
  crRNA array
  misc_feature (148)..(157): n is a, c, g, or t
cttggctttatatatcttgtggaaaggacgaaacaccgtaatttctactaagtgtagatctcacggcggcggcgggccgtaatttctactaagtgtagatcgcgacggcggttttaacactaatttctactaagtgtagatttttttnnnnnnnnnnaagcttggcgtggatccgatatcaactagatcttgagacaaatggcagtattcatccacaattttaaaagaaaaggggggattggggggtacagtgcaggggaaagaatagtagacataatagcaacagacatacaaactaaag

SEQ ID NO: 16646 - DNA, 301 bp, Artificial Sequence
  Crebbp.1_NTC.27
  crRNA array
  misc_feature (148)..(157): n is a, c, g, or t
cttggctttatatatcttgtggaaaggacgaaacaccgtaatttctactaagtgtagatctcacggcggcggcgggccgtaatttctactaagtgtagatgtcgcgttgcgaccggcgcttaatttctactaagtgtagatttttttnnnnnnnnnnaagcttggcgtggatccgatatcaactagatcttgagacaaatggcagtattcatccacaattttaaaagaaaaggggggattggggggtacagtgcaggggaaagaatagtagacataatagcaacagacatacaaactaaag

SEQ ID NO: 16647 - DNA, 301 bp, Artificial Sequence
  Crebbp.1_NTC.28
  crRNA array
  misc_feature (148)..(157): n is a, c, g, or t
cttggctttatatatcttgtggaaaggacgaaacaccgtaatttctactaagtgtagatctcacggcggcggcgggccgtaatttctactaagtgtagataccgctaatcggcgtaaacttaatttctactaagtgtagatttttttnnnnnnnnnnaagcttggcgtggatccgatatcaactagatcttgagacaaatggcagtattcatccacaattttaaaagaaaaggggggattggggggtacagtgcaggggaaagaatagtagacataatagcaacagacatacaaactaaag

SEQ ID NO: 16648 - DNA, 301 bp, Artificial Sequence
  Crebbp.1_NTC.29
  crRNA array
  misc_feature (148)..(157): n is a, c, g, or t
cttggctttatatatcttgtggaaaggacgaaacaccgtaatttctactaagtgtagatctcacggcggcggcgggccgtaatttctactaagtgtagatcgcgatctataccgtctatataatttctactaagtgtagatttttttnnnnnnnnnnaagcttggcgtggatccgatatcaactagatcttgagacaaatggcagtattcatccacaattttaaaagaaaaggggggattggggggtacagtgcaggggaaagaatagtagacataatagcaacagacatacaaactaaag

SEQ ID NO: 16649 - DNA, 301 bp, Artificial Sequence
  Crebbp.1_NTC.3
  crRNA array
  misc_feature (148)..(157): n is a, c, g, or t
cttggctttatatatcttgtggaaaggacgaaacaccgtaatttctactaagtgtagatctcacggcggcggcgggccgtaatttctactaagtgtagattcgacgcgagacgacgtacataatttctactaagtgtagatttttttnnnnnnnnnnaagcttggcgtggatccgatatcaactagatcttgagacaaatggcagtattcatccacaattttaaaagaaaaggggggattggggggtacagtgcaggggaaagaatagtagacataatagcaacagacatacaaactaaag

SEQ ID NO: 16650 - DNA, 301 bp, Artificial Sequence
  Crebbp.1_NTC.30
  crRNA array
  misc_feature (148)..(157): n is a, c, g, or t
cttggctttatatatcttgtggaaaggacgaaacaccgtaatttctactaagtgtagatctcacggcggcggcgggccgtaatttctactaagtgtagatcgatcgtacgggtgtcctaataatttctactaagtgtagatttttttnnnnnnnnnnaagcttggcgtggatccgatatcaactagatcttgagacaaatggcagtattcatccacaattttaaaagaaaaggggggattggggggtacagtgcaggggaaagaatagtagacataatagcaacagacatacaaactaaag

SEQ ID NO: 16651 - DNA, 301 bp, Artificial Sequence
  Crebbp.1_NTC.31
  crRNA array
  misc_feature (148)..(157): n is a, c, g, or t
cttggctttatatatcttgtggaaaggacgaaacaccgtaatttctactaagtgtagatctcacggcggcggcgggccgtaatttctactaagtgtagatgccgaccgcgtgattgtaggtaatttctactaagtgtagatttttttnnnnnnnnnnaagcttggcgtggatccgatatcaactagatcttgagacaaatggcagtattcatccacaattttaaaagaaaaggggggattggggggtacagtgcaggggaaagaatagtagacataatagcaacagacatacaaactaaag

SEQ ID NO: 16652 - DNA, 301 bp, Artificial Sequence
  Crebbp.1_NTC.32
  crRNA array
  misc_feature (148)..(157): n is a, c, g, or t
cttggctttatatatcttgtggaaaggacgaaacaccgtaatttctactaagtgtagatctcacggcggcggcgggccgtaatttctactaagtgtagatgcacgttacgcccgggtcactaatttctactaagtgtagatttttttnnnnnnnnnnaagcttggcgtggatccgatatcaactagatcttgagacaaatggcagtattcatccacaattttaaaagaaaaggggggattggggggtacagtgcaggggaaagaatagtagacataatagcaacagacatacaaactaaag

SEQ ID NO: 16653 - DNA, 301 bp, Artificial Sequence
  Crebbp.1_NTC.33
  crRNA array
  misc_feature (148)..(157): n is a, c, g, or t
cttggctttatatatcttgtggaaaggacgaaacaccgtaatttctactaagtgtagatctcacggcggcggcgggccgtaatttctactaagtgtagattaagcgaccgacgcattcgctaatttctactaagtgtagatttttttnnnnnnnnnnaagcttggcgtggatccgatatcaactagatcttgagacaaatggcagtattcatccacaattttaaaagaaaaggggggattggggggtacagtgcaggggaaagaatagtagacataatagcaacagacatacaaactaaag

SEQ ID NO: 16654 - DNA, 301 bp, Artificial Sequence
  Crebbp.1_NTC.34
  crRNA array
  misc_feature (148)..(157): n is a, c, g, or t
cttggctttatatatcttgtggaaaggacgaaacaccgtaatttctactaagtgtagatctcacggcggcggcgggccgtaatttctactaagtgtagattagcgttcgacacgtgaaactaatttctactaagtgtagatttttttnnnnnnnnnnaagcttggcgtggatccgatatcaactagatcttgagacaaatggcagtattcatccacaattttaaaagaaaaggggggattggggggtacagtgcaggggaaagaatagtagacataatagcaacagacatacaaactaaag

SEQ ID NO: 16655 - DNA, 301 bp, Artificial Sequence
  Crebbp.1_NTC.35
  crRNA array
  misc_feature (148)..(157): n is a, c, g, or t
cttggctttatatatcttgtggaaaggacgaaacaccgtaatttctactaagtgtagatctcacggcggcggcgggccgtaatttctactaagtgtagattggcgcgtaatcgctattcgtaatttctactaagtgtagatttttttnnnnnnnnnnaagcttggcgtggatccgatatcaactagatcttgagacaaatggcagtattcatccacaattttaaaagaaaaggggggattggggggtacagtgcaggggaaagaatagtagacataatagcaacagacatacaaactaaag

SEQ ID NO: 16656 - DNA, 301 bp, Artificial Sequence
  Crebbp.1_NTC.36
  crRNA array
  misc_feature (148)..(157): n is a, c, g, or t
cttggctttatatatcttgtggaaaggacgaaacaccgtaatttctactaagtgtagatctcacggcggcggcgggccgtaatttctactaagtgtagatcaacccgccgtagcgggccttaatttctactaagtgtagatttttttnnnnnnnnnnaagcttggcgtggatccgatatcaactagatcttgagacaaatggcagtattcatccacaattttaaaagaaaaggggggattggggggtacagtgcaggggaaagaatagtagacataatagcaacagacatacaaactaaag

SEQ ID NO: 16657 - DNA, 301 bp, Artificial Sequence
  Crebbp.1_NTC.37
  crRNA array
  misc_feature (148)..(157): n is a, c, g, or t
cttggctttatatatcttgtggaaaggacgaaacaccgtaatttctactaagtgtagatctcacggcggcggcgggccgtaatttctactaagtgtagattttgcgttgacgcgattacttaatttctactaagtgtagatttttttnnnnnnnnnnaagcttggcgtggatccgatatcaactagatcttgagacaaatggcagtattcatccacaattttaaaagaaaaggggggattggggggtacagtgcaggggaaagaatagtagacataatagcaacagacatacaaactaaag

SEQ ID NO: 16658 - DNA, 301 bp, Artificial Sequence
  Crebbp.1_NTC.38
  crRNA array
  misc_feature (148)..(157): n is a, c, g, or t
cttggctttatatatcttgtggaaaggacgaaacaccgtaatttctactaagtgtagatctcacggcggcggcgggccgtaatttctactaagtgtagataacggagcgcgatactaccataatttctactaagtgtagatttttttnnnnnnnnnnaagcttggcgtggatccgatatcaactagatcttgagacaaatggcagtattcatccacaattttaaaagaaaaggggggattggggggtacagtgcaggggaaagaatagtagacataatagcaacagacatacaaactaaag

SEQ ID NO: 16659 - DNA, 301 bp, Artificial Sequence
  Crebbp.1_NTC.39
  crRNA array
  misc_feature (148)..(157): n is a, c, g, or t
cttggctttatatatcttgtggaaaggacgaaacaccgtaatttctactaagtgtagatctcacggcggcggcgggccgtaatttctactaagtgtagatccggacgttataacgtttcttaatttctactaagtgtagatttttttnnnnnnnnnnaagcttggcgtggatccgatatcaactagatcttgagacaaatggcagtattcatccacaattttaaaagaaaaggggggattggggggtacagtgcaggggaaagaatagtagacataatagcaacagacatacaaactaaag

SEQ ID NO: 16660 - DNA, 301 bp, Artificial Sequence
  Crebbp.1_NTC.4
  crRNA array
  misc_feature (148)..(157): n is a, c, g, or t
cttggctttatatatcttgtggaaaggacgaaacaccgtaatttctactaagtgtagatctcacggcggcggcgggccgtaatttctactaagtgtagatatacccgtcgcgaacgtgagtaatttctactaagtgtagatttttttnnnnnnnnnnaagcttggcgtggatccgatatcaactagatcttgagacaaatggcagtattcatccacaattttaaaagaaaaggggggattggggggtacagtgcaggggaaagaatagtagacataatagcaacagacatacaaactaaag

SEQ ID NO: 16661 - DNA, 301 bp, Artificial Sequence
  Crebbp.1_NTC.40
  crRNA array
  misc_feature (148)..(157): n is a, c, g, or t
cttggctttatatatcttgtggaaaggacgaaacaccgtaatttctactaagtgtagatctcacggcggcggcgggccgtaatttctactaagtgtagatattcgcgaacccggccggaataatttctactaagtgtagatttttttnnnnnnnnnnaagcttggcgtggatccgatatcaactagatcttgagacaaatggcagtattcatccacaattttaaaagaaaaggggggattggggggtacagtgcaggggaaagaatagtagacataatagcaacagacatacaaactaaag

SEQ ID NO: 16662 - DNA, 301 bp, Artificial Sequence
  Crebbp.1_NTC.41
  crRNA array
  misc_feature (148)..(157): n is a, c, g, or t
cttggctttatatatcttgtggaaaggacgaaacaccgtaatttctactaagtgtagatctcacggcggcggcgggccgtaatttctactaagtgtagatttgatggcgcgacgcgttattaatttctactaagtgtagatttttttnnnnnnnnnnaagcttggcgtggatccgatatcaactagatcttgagacaaatggcagtattcatccacaattttaaaagaaaaggggggattggggggtacagtgcaggggaaagaatagtagacataatagcaacagacatacaaactaaag

SEQ ID NO: 16663 - DNA, 301 bp, Artificial Sequence
  Crebbp.1_NTC.42
  crRNA array
  misc_feature (148)..(157): n is a, c, g, or t
cttggctttatatatcttgtggaaaggacgaaacaccgtaatttctactaagtgtagatctcacggcggcggcgggccgtaatttctactaagtgtagatggtcaaatcgcggcgataactaatttctactaagtgtagatttttttnnnnnnnnnnaagcttggcgtggatccgatatcaactagatcttgagacaaatggcagtattcatccacaattttaaaagaaaaggggggattggggggtacagtgcaggggaaagaatagtagacataatagcaacagacatacaaactaaag

SEQ ID NO: 16664 - DNA, 301 bp, Artificial Sequence
  Crebbp.1_NTC.43
  crRNA array
  misc_feature (148)..(157): n is a, c, g, or t
cttggctttatatatcttgtggaaaggacgaaacaccgtaatttctactaagtgtagatctcacggcggcggcgggccgtaatttctactaagtgtagatcgactcgcgcattgaactggtaatttctactaagtgtagatttttttnnnnnnnnnnaagcttggcgtggatccgatatcaactagatcttgagacaaatggcagtattcatccacaattttaaaagaaaaggggggattggggggtacagtgcaggggaaagaatagtagacataatagcaacagacatacaaactaaag

SEQ ID NO: 16665 - DNA, 301 bp, Artificial Sequence
  Crebbp.1_NTC.44
  crRNA array
  misc_feature (148)..(157): n is a, c, g, or t
cttggctttatatatcttgtggaaaggacgaaacaccgtaatttctactaagtgtagatctcacggcggcggcgggccgtaatttctactaagtgtagatagcgtcgtacgatttatcgttaatttctactaagtgtagatttttttnnnnnnnnnnaagcttggcgtggatccgatatcaactagatcttgagacaaatggcagtattcatccacaattttaaaagaaaaggggggattggggggtacagtgcaggggaaagaatagtagacataatagcaacagacatacaaactaaag

SEQ ID NO: 16666 - DNA, 301 bp, Artificial Sequence
  Crebbp.1_NTC.45
  crRNA array
  misc_feature (148)..(157): n is a, c, g, or t
cttggctttatatatcttgtggaaaggacgaaacaccgtaatttctactaagtgtagatctcacggcggcggcgggccgtaatttctactaagtgtagatcggaacgcgtgatactagggtaatttctactaagtgtagatttttttnnnnnnnnnnaagcttggcgtggatccgatatcaactagatcttgagacaaatggcagtattcatccacaattttaaaagaaaaggggggattggggggtacagtgcaggggaaagaatagtagacataatagcaacagacatacaaactaaag

SEQ ID NO: 16667 - DNA, 301 bp, Artificial Sequence
  Crebbp.1_NTC.46
  crRNA array
  misc_feature (148)..(157): n is a, c, g, or t
cttggctttatatatcttgtggaaaggacgaaacaccgtaatttctactaagtgtagatctcacggcggcggcgggccgtaatttctactaagtgtagatagcgggtcgtagacgcgcggtaatttctactaagtgtagatttttttnnnnnnnnnnaagcttggcgtggatccgatatcaactagatcttgagacaaatggcagtattcatccacaattttaaaagaaaaggggggattggggggtacagtgcaggggaaagaatagtagacataatagcaacagacatacaaactaaag

SEQ ID NO: 16668 - DNA, 301 bp, Artificial Sequence
  Crebbp.1_NTC.47
  crRNA array
  misc_feature (148)..(157): n is a, c, g, or t
cttggctttatatatcttgtggaaaggacgaaacaccgtaatttctactaagtgtagatctcacggcggcggcgggccgtaatttctactaagtgtagattctcgtatcgcgattgttaataatttctactaagtgtagatttttttnnnnnnnnnnaagcttggcgtggatccgatatcaactagatcttgagacaaatggcagtattcatccacaattttaaaagaaaaggggggattggggggtacagtgcaggggaaagaatagtagacataatagcaacagacatacaaactaaag

SEQ ID NO: 16669 - DNA, 301 bp, Artificial Sequence
  Crebbp.1_NTC.48
  crRNA array
  misc_feature (148)..(157): n is a, c, g, or t
cttggctttatatatcttgtggaaaggacgaaacaccgtaatttctactaagtgtagatctcacggcggcggcgggccgtaatttctactaagtgtagatcggtcgactacggctgttagtaatttctactaagtgtagatttttttnnnnnnnnnnaagcttggcgtggatccgatatcaactagatcttgagacaaatggcagtattcatccacaattttaaaagaaaaggggggattggggggtacagtgcaggggaaagaatagtagacataatagcaacagacatacaaactaaag

SEQ ID NO: 16670 - DNA, 301 bp, Artificial Sequence
  Crebbp.1_NTC.49
  crRNA array
  misc_feature (148)..(157): n is a, c, g, or t
cttggctttatatatcttgtggaaaggacgaaacaccgtaatttctactaagtgtagatctcacggcggcggcgggccgtaatttctactaagtgtagattcggggcgcgtcaactgaattaatttctactaagtgtagatttttttnnnnnnnnnnaagcttggcgtggatccgatatcaactagatcttgagacaaatggcagtattcatccacaattttaaaagaaaaggggggattggggggtacagtgcaggggaaagaatagtagacataatagcaacagacatacaaactaaag

SEQ ID NO: 16671 - DNA, 301 bp, Artificial Sequence
  Crebbp.1_NTC.5
  crRNA array
  misc_feature (148)..(157): n is a, c, g, or t
cttggctttatatatcttgtggaaaggacgaaacaccgtaatttctactaagtgtagatctcacggcggcggcgggccgtaatttctactaagtgtagatgcttacgcgtcgcgaatgtataatttctactaagtgtagatttttttnnnnnnnnnnaagcttggcgtggatccgatatcaactagatcttgagacaaatggcagtattcatccacaattttaaaagaaaaggggggattggggggtacagtgcaggggaaagaatagtagacataatagcaacagacatacaaactaaag

SEQ ID NO: 16672 - DNA, 301 bp, Artificial Sequence
  Crebbp.1_NTC.50
  crRNA array
  misc_feature (148)..(157): n is a, c, g, or t
cttggctttatatatcttgtggaaaggacgaaacaccgtaatttctactaagtgtagatctcacggcggcggcgggccgtaatttctactaagtgtagatattgccgctcgcgcaaaatctaatttctactaagtgtagatttttttnnnnnnnnnnaagcttggcgtggatccgatatcaactagatcttgagacaaatggcagtattcatccacaattttaaaagaaaaggggggattggggggtacagtgcaggggaaagaatagtagacataatagcaacagacatacaaactaaag

SEQ ID NO: 16673 - DNA, 301 bp, Artificial Sequence
  Crebbp.1_NTC.51
  crRNA array
  misc_feature (148)..(157): n is a, c, g, or t
cttggctttatatatcttgtggaaaggacgaaacaccgtaatttctactaagtgtagatctcacggcggcggcgggccgtaatttctactaagtgtagattaacgcgcaacacgccaatgtaatttctactaagtgtagatttttttnnnnnnnnnnaagcttggcgtggatccgatatcaactagatcttgagacaaatggcagtattcatccacaattttaaaagaaaaggggggattggggggtacagtgcaggggaaagaatagtagacataatagcaacagacatacaaactaaag

SEQ ID NO: 16674 - DNA, 301 bp, Artificial Sequence
  Crebbp.1_NTC.6
  crRNA array
  misc_feature (148)..(157): n is a, c, g, or t
cttggctttatatatcttgtggaaaggacgaaacaccgtaatttctactaagtgtagatctcacggcggcggcgggccgtaatttctactaagtgtagatcgaatcgcgcctacgggaattaatttctactaagtgtagatttttttnnnnnnnnnnaagcttggcgtggatccgatatcaactagatcttgagacaaatggcagtattcatccacaattttaaaagaaaaggggggattggggggtacagtgcaggggaaagaatagtagacataatagcaacagacatacaaactaaag

SEQ ID NO: 16675 - DNA, 301 bp, Artificial Sequence
  Crebbp.1_NTC.7
  crRNA array
  misc_feature (148)..(157): n is a, c, g, or t
cttggctttatatatcttgtggaaaggacgaaacaccgtaatttctactaagtgtagatctcacggcggcggcgggccgtaatttctactaagtgtagatcgccgaacggataagactattaatttctactaagtgtagatttttttnnnnnnnnnnaagcttggcgtggatccgatatcaactagatcttgagacaaatggcagtattcatccacaattttaaaagaaaaggggggattggggggtacagtgcaggggaaagaatagtagacataatagcaacagacatacaaactaaag

SEQ ID NO: 16676 - DNA, 301 bp, Artificial Sequence
  Crebbp.1_NTC.8
  crRNA array
  misc_feature (148)..(157): n is a, c, g, or t
cttggctttatatatcttgtggaaaggacgaaacaccgtaatttctactaagtgtagatctcacggcggcggcgggccgtaatttctactaagtgtagatcgaccgaggttacgctgggataatttctactaagtgtagatttttttnnnnnnnnnnaagcttggcgtggatccgatatcaactagatcttgagacaaatggcagtattcatccacaattttaaaagaaaaggggggattggggggtacagtgcaggggaaagaatagtagacataatagcaacagacatacaaactaaag

SEQ ID NO: 16677 - DNA, 301 bp, Artificial Sequence
  Crebbp.1_NTC.9
  crRNA array
  misc_feature (148)..(157): n is a, c, g, or t
cttggctttatatatcttgtggaaaggacgaaacaccgtaatttctactaagtgtagatctcacggcggcggcgggccgtaatttctactaagtgtagatatcgccgtacggctatggcataatttctactaagtgtagatttttttnnnnnnnnnnaagcttggcgtggatccgatatcaactagatcttgagacaaatggcagtattcatccacaattttaaaagaaaaggggggattggggggtacagtgcaggggaaagaatagtagacataatagcaacagacatacaaactaaag

SEQ ID NO: 16678 - DNA, 301 bp, Artificial Sequence
  Crebbp.2_NTC.0
  crRNA array
  misc_feature (148)..(157): n is a, c, g, or t
cttggctttatatatcttgtggaaaggacgaaacaccgtaatttctactaagtgtagatcgcgagcaggtgaagatggctaatttctactaagtgtagattatagcgtcgcgcgctaatttaatttctactaagtgtagatttttttnnnnnnnnnnaagcttggcgtggatccgatatcaactagatcttgagacaaatggcagtattcatccacaattttaaaagaaaaggggggattggggggtacagtgcaggggaaagaatagtagacataatagcaacagacatacaaactaaag

SEQ ID NO: 16679 - DNA, 301 bp, Artificial Sequence
  Crebbp.2_NTC.1
  crRNA array
  misc_feature (148)..(157): n is a, c, g, or t
cttggctttatatatcttgtggaaaggacgaaacaccgtaatttctactaagtgtagatcgcgagcaggtgaagatggctaatttctactaagtgtagatcgcgtaaccgttccggctcctaatttctactaagtgtagatttttttnnnnnnnnnnaagcttggcgtggatccgatatcaactagatcttgagacaaatggcagtattcatccacaattttaaaagaaaaggggggattggggggtacagtgcaggggaaagaatagtagacataatagcaacagacatacaaactaaag

SEQ ID NO: 16680 - DNA, 301 bp, Artificial Sequence
  Crebbp.2_NTC.10
  crRNA array
  misc_feature (148)..(157): n is a, c, g, or t
cttggctttatatatcttgtggaaaggacgaaacaccgtaatttctactaagtgtagatcgcgagcaggtgaagatggctaatttctactaagtgtagatcgctaagttcgcgcgggccgtaatttctactaagtgtagatttttttnnnnnnnnnnaagcttggcgtggatccgatatcaactagatcttgagacaaatggcagtattcatccacaattttaaaagaaaaggggggattggggggtacagtgcaggggaaagaatagtagacataatagcaacagacatacaaactaaag

SEQ ID NO: 16681 - DNA, 301 bp, Artificial Sequence
  Crebbp.2_NTC.11
  crRNA array
  misc_feature (148)..(157): n is a, c, g, or t
cttggctttatatatcttgtggaaaggacgaaacaccgtaatttctactaagtgtagatcgcgagcaggtgaagatggctaatttctactaagtgtagatcgttcgtcgacgaagcaatctaatttctactaagtgtagatttttttnnnnnnnnnnaagcttggcgtggatccgatatcaactagatcttgagacaaatggcagtattcatccacaattttaaaagaaaaggggggattggggggtacagtgcaggggaaagaatagtagacataatagcaacagacatacaaactaaag

SEQ ID NO: 16682 - DNA, 301 bp, Artificial Sequence
  Crebbp.2_NTC.12
  crRNA array
  misc_feature (148)..(157): n is a, c, g, or t
cttggctttatatatcttgtggaaaggacgaaacaccgtaatttctactaagtgtagatcgcgagcaggtgaagatggctaatttctactaagtgtagatcgccgacgattaatcaatagtaatttctactaagtgtagatttttttnnnnnnnnnnaagcttggcgtggatccgatatcaactagatcttgagacaaatggcagtattcatccacaattttaaaagaaaaggggggattggggggtacagtgcaggggaaagaatagtagacataatagcaacagacatacaaactaaag

SEQ ID NO: 16683 - DNA, 301 bp, Artificial Sequence
  Crebbp.2_NTC.13
  crRNA array
  misc_feature (148)..(157): n is a, c, g, or t
cttggctttatatatcttgtggaaaggacgaaacaccgtaatttctactaagtgtagatcgcgagcaggtgaagatggctaatttctactaagtgtagatgaccgttgtatcgcgatcaataatttctactaagtgtagatttttttnnnnnnnnnnaagcttggcgtggatccgatatcaactagatcttgagacaaatggcagtattcatccacaattttaaaagaaaaggggggattggggggtacagtgcaggggaaagaatagtagacataatagcaacagacatacaaactaaag

SEQ ID NO: 16684 - DNA, 301 bp, Artificial Sequence
  Crebbp.2_NTC.14
  crRNA array
  misc_feature (148)..(157): n is a, c, g, or t
cttggctttatatatcttgtggaaaggacgaaacaccgtaatttctactaagtgtagatcgcgagcaggtgaagatggctaatttctactaagtgtagatccgttcgtgcgatagtgttttaatttctactaagtgtagatttttttnnnnnnnnnnaagcttggcgtggatccgatatcaactagatcttgagacaaatggcagtattcatccacaattttaaaagaaaaggggggattggggggtacagtgcaggggaaagaatagtagacataatagcaacagacatacaaactaaag

SEQ ID NO: 16685 - DNA, 301 bp, Artificial Sequence
  Crebbp.2_NTC.15
  crRNA array
  misc_feature (148)..(157): n is a, c, g, or t
cttggctttatatatcttgtggaaaggacgaaacaccgtaatttctactaagtgtagatcgcgagcaggtgaagatggctaatttctactaagtgtagatgttgtcgtgccgcgaatttataatttctactaagtgtagatttttttnnnnnnnnnnaagcttggcgtggatccgatatcaactagatcttgagacaaatggcagtattcatccacaattttaaaagaaaaggggggattggggggtacagtgcaggggaaagaatagtagacataatagcaacagacatacaaactaaag

SEQ ID NO: 16686 - DNA, 301 bp, Artificial Sequence
  Crebbp.2_NTC.16
  crRNA array
  misc_feature (148)..(157): n is a, c, g, or t
cttggctttatatatcttgtggaaaggacgaaacaccgtaatttctactaagtgtagatcgcgagcaggtgaagatggctaatttctactaagtgtagatcggtacgttagacgaaaatttaatttctactaagtgtagatttttttnnnnnnnnnnaagcttggcgtggatccgatatcaactagatcttgagacaaatggcagtattcatccacaattttaaaagaaaaggggggattggggggtacagtgcaggggaaagaatagtagacataatagcaacagacatacaaactaaag

SEQ ID NO: 16687 - DNA, 301 bp, Artificial Sequence
  Crebbp.2_NTC.17
  crRNA array
  misc_feature (148)..(157): n is a, c, g, or t
cttggctttatatatcttgtggaaaggacgaaacaccgtaatttctactaagtgtagatcgcgagcaggtgaagatggctaatttctactaagtgtagattatcgaacgctatcgaacgttaatttctactaagtgtagatttttttnnnnnnnnnnaagcttggcgtggatccgatatcaactagatcttgagacaaatggcagtattcatccacaattttaaaagaaaaggggggattggggggtacagtgcaggggaaagaatagtagacataatagcaacagacatacaaactaaag

SEQ ID NO: 16688 - DNA, 301 bp, Artificial Sequence
  Crebbp.2_NTC.18
  crRNA array
  misc_feature (148)..(157): n is a, c, g, or t
cttggctttatatatcttgtggaaaggacgaaacaccgtaatttctactaagtgtagatcgcgagcaggtgaagatggctaatttctactaagtgtagattccggttacgaccggcaaaataatttctactaagtgtagatttttttnnnnnnnnnnaagcttggcgtggatccgatatcaactagatcttgagacaaatggcagtattcatccacaattttaaaagaaaaggggggattggggggtacagtgcaggggaaagaatagtagacataatagcaacagacatacaaactaaag

SEQ ID NO: 16689 - DNA, 301 bp, Artificial Sequence
  Crebbp.2_NTC.19
  crRNA array
  misc_feature (148)..(157): n is a, c, g, or t
cttggctttatatatcttgtggaaaggacgaaacaccgtaatttctactaagtgtagatcgcgagcaggtgaagatggctaatttctactaagtgtagatcgtcgtagaacgatacccgataatttctactaagtgtagatttttttnnnnnnnnnnaagcttggcgtggatccgatatcaactagatcttgagacaaatggcagtattcatccacaattttaaaagaaaaggggggattggggggtacagtgcaggggaaagaatagtagacataatagcaacagacatacaaactaaag

SEQ ID NO: 16690 - DNA, 301 bp, Artificial Sequence
  Crebbp.2_NTC.2
  crRNA array
  misc_feature (148)..(157): n is a, c, g, or t
cttggctttatatatcttgtggaaaggacgaaacaccgtaatttctactaagtgtagatcgcgagcaggtgaagatggctaatttctactaagtgtagatttatgtcgcgccgcgacccgtaatttctactaagtgtagatttttttnnnnnnnnnnaagcttggcgtggatccgatatcaactagatcttgagacaaatggcagtattcatccacaattttaaaagaaaaggggggattggggggtacagtgcaggggaaagaatagtagacataatagcaacagacatacaaactaaag

SEQ ID NO: 16691 - DNA, 301 bp, Artificial Sequence
  Crebbp.2_NTC.20
  crRNA array
  misc_feature (148)..(157): n is a, c, g, or t
cttggctttatatatcttgtggaaaggacgaaacaccgtaatttctactaagtgtagatcgcgagcaggtgaagatggctaatttctactaagtgtagatattccggcgcgaccagaagataatttctactaagtgtagatttttttnnnnnnnnnnaagcttggcgtggatccgatatcaactagatcttgagacaaatggcagtattcatccacaattttaaaagaaaaggggggattggggggtacagtgcaggggaaagaatagtagacataatagcaacagacatacaaactaaag

SEQ ID NO: 16692 - DNA, 301 bp, Artificial Sequence
  Crebbp.2_NTC.21
  crRNA array
  misc_feature (148)..(157): n is a, c, g, or t
cttggctttatatatcttgtggaaaggacgaaacaccgtaatttctactaagtgtagatcgcgagcaggtgaagatggctaatttctactaagtgtagatgtataacttcgcgcggtccgtaatttctactaagtgtagatttttttnnnnnnnnnnaagcttggcgtggatccgatatcaactagatcttgagacaaatggcagtattcatccacaattttaaaagaaaaggggggattggggggtacagtgcaggggaaagaatagtagacataatagcaacagacatacaaactaaag

SEQ ID NO: 16693 - DNA, 301 bp, Artificial Sequence
  Crebbp.2_NTC.22
  crRNA array
  misc_feature (148)..(157): n is a, c, g, or t
cttggctttatatatcttgtggaaaggacgaaacaccgtaatttctactaagtgtagatcgcgagcaggtgaagatggctaatttctactaagtgtagatgcgcgtcaacgtaatgtgcctaatttctactaagtgtagatttttttnnnnnnnnnnaagcttggcgtggatccgatatcaactagatcttgagacaaatggcagtattcatccacaattttaaaagaaaaggggggattggggggtacagtgcaggggaaagaatagtagacataatagcaacagacatacaaactaaag

SEQ ID NO: 16694 - DNA, 301 bp, Artificial Sequence
  Crebbp.2_NTC.23
  crRNA array
  misc_feature (148)..(157): n is a, c, g, or t
cttggctttatatatcttgtggaaaggacgaaacaccgtaatttctactaagtgtagatcgcgagcaggtgaagatggctaatttctactaagtgtagatacgcgctattatcgtaggtgtaatttctactaagtgtagatttttttnnnnnnnnnnaagcttggcgtggatccgatatcaactagatcttgagacaaatggcagtattcatccacaattttaaaagaaaaggggggattggggggtacagtgcaggggaaagaatagtagacataatagcaacagacatacaaactaaag

SEQ ID NO: 16695 - DNA, 301 bp, Artificial Sequence
  Crebbp.2_NTC.24
  crRNA array
  misc_feature (148)..(157): n is a, c, g, or t
cttggctttatatatcttgtggaaaggacgaaacaccgtaatttctactaagtgtagatcgcgagcaggtgaagatggctaatttctactaagtgtagatactatcgacgttcgtcccggtaatttctactaagtgtagatttttttnnnnnnnnnnaagcttggcgtggatccgatatcaactagatcttgagacaaatggcagtattcatccacaattttaaaagaaaaggggggattggggggtacagtgcaggggaaagaatagtagacataatagcaacagacatacaaactaaag

SEQ ID NO: 16696 - DNA, 301 bp, Artificial Sequence
  Crebbp.2_NTC.25
  crRNA array
  misc_feature (148)..(157): n is a, c, g, or t
cttggctttatatatcttgtggaaaggacgaaacaccgtaatttctactaagtgtagatcgcgagcaggtgaagatggctaatttctactaagtgtagattcgcgttatcgtgccgtgcgtaatttctactaagtgtagatttttttnnnnnnnnnnaagcttggcgtggatccgatatcaactagatcttgagacaaatggcagtattcatccacaattttaaaagaaaaggggggattggggggtacagtgcaggggaaagaatagtagacataatagcaacagacatacaaactaaag

SEQ ID NO: 16697 - DNA, 301 bp, Artificial Sequence
  Crebbp.2_NTC.26
  crRNA array
  misc_feature (148)..(157): n is a, c, g, or t
cttggctttatatatcttgtggaaaggacgaaacaccgtaatttctactaagtgtagatcgcgagcaggtgaagatggctaatttctactaagtgtagatcgcgacggcggttttaacactaatttctactaagtgtagatttttttnnnnnnnnnnaagcttggcgtggatccgatatcaactagatcttgagacaaatggcagtattcatccacaattttaaaagaaaaggggggattggggggtacagtgcaggggaaagaatagtagacataatagcaacagacatacaaactaaag

SEQ ID NO: 16698 - DNA, 301 bp, Artificial Sequence
  Crebbp.2_NTC.27
  crRNA array
  misc_feature (148)..(157): n is a, c, g, or t
cttggctttatatatcttgtggaaaggacgaaacaccgtaatttctactaagtgtagatcgcgagcaggtgaagatggctaatttctactaagtgtagatgtcgcgttgcgaccggcgcttaatttctactaagtgtagatttttttnnnnnnnnnnaagcttggcgtggatccgatatcaactagatcttgagacaaatggcagtattcatccacaattttaaaagaaaaggggggattggggggtacagtgcaggggaaagaatagtagacataatagcaacagacatacaaactaaag

SEQ ID NO: 16699 - DNA, 301 bp, Artificial Sequence
  Crebbp.2_NTC.28
  crRNA array
  misc_feature (148)..(157): n is a, c, g, or t
cttggctttatatatcttgtggaaaggacgaaacaccgtaatttctactaagtgtagatcgcgagcaggtgaagatggctaatttctactaagtgtagataccgctaatcggcgtaaacttaatttctactaagtgtagatttttttnnnnnnnnnnaagcttggcgtggatccgatatcaactagatcttgagacaaatggcagtattcatccacaattttaaaagaaaaggggggattggggggtacagtgcaggggaaagaatagtagacataatagcaacagacatacaaactaaag

SEQ ID NO: 16700 - DNA, 301 bp, Artificial Sequence
  Crebbp.2_NTC.29
  crRNA array
  misc_feature (148)..(157): n is a, c, g, or t
cttggctttatatatcttgtggaaaggacgaaacaccgtaatttctactaagtgtagatcgcgagcaggtgaagatggctaatttctactaagtgtagatcgcgatctataccgtctatataatttctactaagtgtagatttttttnnnnnnnnnnaagcttggcgtggatccgatatcaactagatcttgagacaaatggcagtattcatccacaattttaaaagaaaaggggggattggggggtacagtgcaggggaaagaatagtagacataatagcaacagacatacaaactaaag

SEQ ID NO: 16701 - DNA, 301 bp, Artificial Sequence
  Crebbp.2_NTC.3
  crRNA array
  misc_feature (148)..(157): n is a, c, g, or t
cttggctttatatatcttgtggaaaggacgaaacaccgtaatttctactaagtgtagatcgcgagcaggtgaagatggctaatttctactaagtgtagattcgacgcgagacgacgtacataatttctactaagtgtagatttttttnnnnnnnnnnaagcttggcgtggatccgatatcaactagatcttgagacaaatggcagtattcatccacaattttaaaagaaaaggggggattggggggtacagtgcaggggaaagaatagtagacataatagcaacagacatacaaactaaag

SEQ ID NO: 16702 - DNA, 301 bp, Artificial Sequence
  Crebbp.2_NTC.30
  crRNA array
  misc_feature (148)..(157): n is a, c, g, or t
cttggctttatatatcttgtggaaaggacgaaacaccgtaatttctactaagtgtagatcgcgagcaggtgaagatggctaatttctactaagtgtagatcgatcgtacgggtgtcctaataatttctactaagtgtagatttttttnnnnnnnnnnaagcttggcgtggatccgatatcaactagatcttgagacaaatggcagtattcatccacaattttaaaagaaaaggggggattggggggtacagtgcaggggaaagaatagtagacataatagcaacagacatacaaactaaag

SEQ ID NO: 16703 - DNA, 301 bp, Artificial Sequence
  Crebbp.2_NTC.31
  crRNA array
  misc_feature (148)..(157): n is a, c, g, or t
cttggctttatatatcttgtggaaaggacgaaacaccgtaatttctactaagtgtagatcgcgagcaggtgaagatggctaatttctactaagtgtagatgccgaccgcgtgattgtaggtaatttctactaagtgtagatttttttnnnnnnnnnnaagcttggcgtggatccgatatcaactagatcttgagacaaatggcagtattcatccacaattttaaaagaaaaggggggattggggggtacagtgcaggggaaagaatagtagacataatagcaacagacatacaaactaaag

SEQ ID NO: 16704 - DNA, 301 bp, Artificial Sequence
  Crebbp.2_NTC.32
  crRNA array
  misc_feature (148)..(157): n is a, c, g, or t
cttggctttatatatcttgtggaaaggacgaaacaccgtaatttctactaagtgtagatcgcgagcaggtgaagatggctaatttctactaagtgtagatgcacgttacgcccgggtcactaatttctactaagtgtagatttttttnnnnnnnnnnaagcttggcgtggatccgatatcaactagatcttgagacaaatggcagtattcatccacaattttaaaagaaaaggggggattggggggtacagtgcaggggaaagaatagtagacataatagcaacagacatacaaactaaag

SEQ ID NO: 16705 - DNA, 301 bp, Artificial Sequence
  Crebbp.2_NTC.33
  crRNA array
  misc_feature (148)..(157): n is a, c, g, or t
cttggctttatatatcttgtggaaaggacgaaacaccgtaatttctactaagtgtagatcgcgagcaggtgaagatggctaatttctactaagtgtagattaagcgaccgacgcattcgctaatttctactaagtgtagatttttttnnnnnnnnnnaagcttggcgtggatccgatatcaactagatcttgagacaaatggcagtattcatccacaattttaaaagaaaaggggggattggggggtacagtgcaggggaaagaatagtagacataatagcaacagacatacaaactaaag

SEQ ID NO: 16706 - DNA, 301 bp, Artificial Sequence
  Crebbp.2_NTC.34
  crRNA array
  misc_feature (148)..(157): n is a, c, g, or t
cttggctttatatatcttgtggaaaggacgaaacaccgtaatttctactaagtgtagatcgcgagcaggtgaagatggctaatttctactaagtgtagattagcgttcgacacgtgaaactaatttctactaagtgtagatttttttnnnnnnnnnnaagcttggcgtggatccgatatcaactagatcttgagacaaatggcagtattcatccacaattttaaaagaaaaggggggattggggggtacagtgcaggggaaagaatagtagacataatagcaacagacatacaaactaaag

SEQ ID NO: 16707 - DNA, 301 bp, Artificial Sequence
  Crebbp.2_NTC.35
  crRNA array
  misc_feature (148)..(157): n is a, c, g, or t
cttggctttatatatcttgtggaaaggacgaaacaccgtaatttctactaagtgtagatcgcgagcaggtgaagatggctaatttctactaagtgtagattggcgcgtaatcgctattcgtaatttctactaagtgtagatttttttnnnnnnnnnnaagcttggcgtggatccgatatcaactagatcttgagacaaatggcagtattcatccacaattttaaaagaaaaggggggattggggggtacagtgcaggggaaagaatagtagacataatagcaacagacatacaaactaaag

SEQ ID NO: 16708 - DNA, 301 bp, Artificial Sequence
  Crebbp.2_NTC.36
  crRNA array
  misc_feature (148)..(157): n is a, c, g, or t
cttggctttatatatcttgtggaaaggacgaaacaccgtaatttctactaagtgtagatcgcgagcaggtgaagatggctaatttctactaagtgtagatcaacccgccgtagcgggccttaatttctactaagtgtagatttttttnnnnnnnnnnaagcttggcgtggatccgatatcaactagatcttgagacaaatggcagtattcatccacaattttaaaagaaaaggggggattggggggtacagtgcaggggaaagaatagtagacataatagcaacagacatacaaactaaag

SEQ ID NO: 16709 - DNA, 301 bp, Artificial Sequence
  Crebbp.2_NTC.37
  crRNA array
  misc_feature (148)..(157): n is a, c, g, or t
cttggctttatatatcttgtggaaaggacgaaacaccgtaatttctactaagtgtagatcgcgagcaggtgaagatggctaatttctactaagtgtagattttgcgttgacgcgattacttaatttctactaagtgtagatttttttnnnnnnnnnnaagcttggcgtggatccgatatcaactagatcttgagacaaatggcagtattcatccacaattttaaaagaaaaggggggattggggggtacagtgcaggggaaagaatagtagacataatagcaacagacatacaaactaaag

SEQ ID NO: 16710 - DNA, 301 bp, Artificial Sequence
  Crebbp.2_NTC.38
  crRNA array
  misc_feature (148)..(157): n is a, c, g, or t
cttggctttatatatcttgtggaaaggacgaaacaccgtaatttctactaagtgtagatcgcgagcaggtgaagatggctaatttctactaagtgtagataacggagcgcgatactaccataatttctactaagtgtagatttttttnnnnnnnnnnaagcttggcgtggatccgatatcaactagatcttgagacaaatggcagtattcatccacaattttaaaagaaaaggggggattggggggtacagtgcaggggaaagaatagtagacataatagcaacagacatacaaactaaag

SEQ ID NO: 16711 - DNA, 301 bp, Artificial Sequence
  Crebbp.2_NTC.39
  crRNA array
  misc_feature (148)..(157): n is a, c, g, or t
cttggctttatatatcttgtggaaaggacgaaacaccgtaatttctactaagtgtagatcgcgagcaggtgaagatggctaatttctactaagtgtagatccggacgttataacgtttcttaatttctactaagtgtagatttttttnnnnnnnnnnaagcttggcgtggatccgatatcaactagatcttgagacaaatggcagtattcatccacaattttaaaagaaaaggggggattggggggtacagtgcaggggaaagaatagtagacataatagcaacagacatacaaactaaag

SEQ ID NO: 16712 - DNA, 301 bp, Artificial Sequence
  Crebbp.2_NTC.4
  crRNA array
  misc_feature (148)..(157): n is a, c, g, or t
cttggctttatatatcttgtggaaaggacgaaacaccgtaatttctactaagtgtagatcgcgagcaggtgaagatggctaatttctactaagtgtagatatacccgtcgcgaacgtgagtaatttctactaagtgtagatttttttnnnnnnnnnnaagcttggcgtggatccgatatcaactagatcttgagacaaatggcagtattcatccacaattttaaaagaaaaggggggattggggggtacagtgcaggggaaagaatagtagacataatagcaacagacatacaaactaaag

SEQ ID NO: 16713 - DNA, 301 bp, Artificial Sequence
  Crebbp.2_NTC.40
  crRNA array
  misc_feature (148)..(157): n is a, c, g, or t
cttggctttatatatcttgtggaaaggacgaaacaccgtaatttctactaagtgtagatcgcgagcaggtgaagatggctaatttctactaagtgtagatattcgcgaacccggccggaataatttctactaagtgtagatttttttnnnnnnnnnnaagcttggcgtggatccgatatcaactagatcttgagacaaatggcagtattcatccacaattttaaaagaaaaggggggattggggggtacagtgcaggggaaagaatagtagacataatagcaacagacatacaaactaaag

SEQ ID NO: 16714 - DNA, 301 bp, Artificial Sequence
  Crebbp.2_NTC.41
  crRNA array
  misc_feature (148)..(157): n is a, c, g, or t
cttggctttatatatcttgtggaaaggacgaaacaccgtaatttctactaagtgtagatcgcgagcaggtgaagatggctaatttctactaagtgtagatttgatggcgcgacgcgttattaatttctactaagtgtagatttttttnnnnnnnnnnaagcttggcgtggatccgatatcaactagatcttgagacaaatggcagtattcatccacaattttaaaagaaaaggggggattggggggtacagtgcaggggaaagaatagtagacataatagcaacagacatacaaactaaag

SEQ ID NO: 16715 - DNA, 301 bp, Artificial Sequence
  Crebbp.2_NTC.42
  crRNA array
  misc_feature (148)..(157): n is a, c, g, or t
cttggctttatatatcttgtggaaaggacgaaacaccgtaatttctactaagtgtagatcgcgagcaggtgaagatggctaatttctactaagtgtagatggtcaaatcgcggcgataactaatttctactaagtgtagatttttttnnnnnnnnnnaagcttggcgtggatccgatatcaactagatcttgagacaaatggcagtattcatccacaattttaaaagaaaaggggggattggggggtacagtgcaggggaaagaatagtagacataatagcaacagacatacaaactaaag

SEQ ID NO: 16716 - DNA, 301 bp, Artificial Sequence
  Crebbp.2_NTC.43
  crRNA array
  misc_feature (148)..(157): n is a, c, g, or t
cttggctttatatatcttgtggaaaggacgaaacaccgtaatttctactaagtgtagatcgcgagcaggtgaagatggctaatttctactaagtgtagatcgactcgcgcattgaactggtaatttctactaagtgtagatttttttnnnnnnnnnnaagcttggcgtggatccgatatcaactagatcttgagacaaatggcagtattcatccacaattttaaaagaaaaggggggattggggggtacagtgcaggggaaagaatagtagacataatagcaacagacatacaaactaaag

SEQ ID NO: 16717 - DNA, 301 bp, Artificial Sequence
  Crebbp.2_NTC.44
  crRNA array
  misc_feature (148)..(157): n is a, c, g, or t
cttggctttatatatcttgtggaaaggacgaaacaccgtaatttctactaagtgtagatcgcgagcaggtgaagatggctaatttctactaagtgtagatagcgtcgtacgatttatcgttaatttctactaagtgtagatttttttnnnnnnnnnnaagcttggcgtggatccgatatcaactagatcttgagacaaatggcagtattcatccacaattttaaaagaaaaggggggattggggggtacagtgcaggggaaagaatagtagacataatagcaacagacatacaaactaaag

SEQ ID NO: 16718 - DNA, 301 bp, Artificial Sequence
  Crebbp.2_NTC.45
  crRNA array
  misc_feature (148)..(157): n is a, c, g, or t
cttggctttatatatcttgtggaaaggacgaaacaccgtaatttctactaagtgtagatcgcgagcaggtgaagatggctaatttctactaagtgtagatcggaacgcgtgatactagggtaatttctactaagtgtagatttttttnnnnnnnnnnaagcttggcgtggatccgatatcaactagatcttgagacaaatggcagtattcatccacaattttaaaagaaaaggggggattggggggtacagtgcaggggaaagaatagtagacataatagcaacagacatacaaactaaag

SEQ ID NO: 16719 - DNA, 301 bp, Artificial Sequence
  Crebbp.2_NTC.46
  crRNA array
  misc_feature (148)..(157): n is a, c, g, or t
cttggctttatatatcttgtggaaaggacgaaacaccgtaatttctactaagtgtagatcgcgagcaggtgaagatggctaatttctactaagtgtagatagcgggtcgtagacgcgcggtaatttctactaagtgtagatttttttnnnnnnnnnnaagcttggcgtggatccgatatcaactagatcttgagacaaatggcagtattcatccacaattttaaaagaaaaggggggattggggggtacagtgcaggggaaagaatagtagacataatagcaacagacatacaaactaaag

SEQ ID NO: 16720 - DNA, 301 bp, Artificial Sequence
  Crebbp.2_NTC.47
  crRNA array
  misc_feature (148)..(157): n is a, c, g, or t
cttggctttatatatcttgtggaaaggacgaaacaccgtaatttctactaagtgtagatcgcgagcaggtgaagatggctaatttctactaagtgtagattctcgtatcgcgattgttaataatttctactaagtgtagatttttttnnnnnnnnnnaagcttggcgtggatccgatatcaactagatcttgagacaaatggcagtattcatccacaattttaaaagaaaaggggggattggggggtacagtgcaggggaaagaatagtagacataatagcaacagacatacaaactaaag

SEQ ID NO: 16721 - DNA, 301 bp, Artificial Sequence
  Crebbp.2_NTC.48
  crRNA array
  misc_feature (148)..(157): n is a, c, g, or t
cttggctttatatatcttgtggaaaggacgaaacaccgtaatttctactaagtgtagatcgcgagcaggtgaagatggctaatttctactaagtgtagatcggtcgactacggctgttagtaatttctactaagtgtagatttttttnnnnnnnnnnaagcttggcgtggatccgatatcaactagatcttgagacaaatggcagtattcatccacaattttaaaagaaaaggggggattggggggtacagtgcaggggaaagaatagtagacataatagcaacagacatacaaactaaag

SEQ ID NO: 16722 - DNA, 301 bp, Artificial Sequence
  Crebbp.2_NTC.49
  crRNA array
  misc_feature (148)..(157): n is a, c, g, or t
cttggctttatatatcttgtggaaaggacgaaacaccgtaatttctactaagtgtagatcgcgagcaggtgaagatggctaatttctactaagtgtagattcggggcgcgtcaactgaattaatttctactaagtgtagatttttttnnnnnnnnnnaagcttggcgtggatccgatatcaactagatcttgagacaaatggcagtattcatccacaattttaaaagaaaaggggggattggggggtacagtgcaggggaaagaatagtagacataatagcaacagacatacaaactaaag

SEQ ID NO: 16723 - DNA, 301 bp, Artificial Sequence
  Crebbp.2_NTC.5
  crRNA array
  misc_feature (148)..(157): n is a, c, g, or t
cttggctttatatatcttgtggaaaggacgaaacaccgtaatttctactaagtgtagatcgcgagcaggtgaagatggctaatttctactaagtgtagatgcttacgcgtcgcgaatgtataatttctactaagtgtagatttttttnnnnnnnnnnaagcttggcgtggatccgatatcaactagatcttgagacaaatggcagtattcatccacaattttaaaagaaaaggggggattggggggtacagtgcaggggaaagaatagtagacataatagcaacagacatacaaactaaag

SEQ ID NO: 16724 - DNA, 301 bp, Artificial Sequence
  Crebbp.2_NTC.50
  crRNA array
  misc_feature (148)..(157): n is a, c, g, or t
cttggctttatatatcttgtggaaaggacgaaacaccgtaatttctactaagtgtagatcgcgagcaggtgaagatggctaatttctactaagtgtagatattgccgctcgcgcaaaatctaatttctactaagtgtagatttttttnnnnnnnnnnaagcttggcgtggatccgatatcaactagatcttgagacaaatggcagtattcatccacaattttaaaagaaaaggggggattggggggtacagtgcaggggaaagaatagtagacataatagcaacagacatacaaactaaag

SEQ ID NO: 16725 - DNA, 301 bp, Artificial Sequence
  Crebbp.2_NTC.51
  crRNA array
  misc_feature (148)..(157): n is a, c, g, or t
cttggctttatatatcttgtggaaaggacgaaacaccgtaatttctactaagtgtagatcgcgagcaggtgaagatggctaatttctactaagtgtagattaacgcgcaacacgccaatgtaatttctactaagtgtagatttttttnnnnnnnnnnaagcttggcgtggatccgatatcaactagatcttgagacaaatggcagtattcatccacaattttaaaagaaaaggggggattggggggtacagtgcaggggaaagaatagtagacataatagcaacagacatacaaactaaag

SEQ ID NO: 16726 - DNA, 301 bp, Artificial Sequence
  Crebbp.2_NTC.6
  crRNA array
  misc_feature (148)..(157): n is a, c, g, or t
cttggctttatatatcttgtggaaaggacgaaacaccgtaatttctactaagtgtagatcgcgagcaggtgaagatggctaatttctactaagtgtagatcgaatcgcgcctacgggaattaatttctactaagtgtagatttttttnnnnnnnnnnaagcttggcgtggatccgatatcaactagatcttgagacaaatggcagtattcatccacaattttaaaagaaaaggggggattggggggtacagtgcaggggaaagaatagtagacataatagcaacagacatacaaactaaag

SEQ ID NO: 16727 - DNA, 301 bp, Artificial Sequence
  Crebbp.2_NTC.7
  crRNA array
  misc_feature (148)..(157): n is a, c, g, or t
cttggctttatatatcttgtggaaaggacgaaacaccgtaatttctactaagtgtagatcgcgagcaggtgaagatggctaatttctactaagtgtagatcgccgaacggataagactattaatttctactaagtgtagatttttttnnnnnnnnnnaagcttggcgtggatccgatatcaactagatcttgagacaaatggcagtattcatccacaattttaaaagaaaaggggggattggggggtacagtgcaggggaaagaatagtagacataatagcaacagacatacaaactaaag

SEQ ID NO: 16728 - DNA, 301 bp, Artificial Sequence
  Crebbp.2_NTC.8
  crRNA array
  misc_feature (148)..(157): n is a, c, g, or t
cttggctttatatatcttgtggaaaggacgaaacaccgtaatttctactaagtgtagatcgcgagcaggtgaagatggctaatttctactaagtgtagatcgaccgaggttacgctgggataatttctactaagtgtagatttttttnnnnnnnnnnaagcttggcgtggatccgatatcaactagatcttgagacaaatggcagtattcatccacaattttaaaagaaaaggggggattggggggtacagtgcaggggaaagaatagtagacataatagcaacagacatacaaactaaag

SEQ ID NO: 16729 - DNA, 301 bp, Artificial Sequence
  Crebbp.2_NTC.9
  crRNA array
  misc_feature (148)..(157): n is a, c, g, or t
cttggctttatatatcttgtggaaaggacgaaacaccgtaatttctactaagtgtagatcgcgagcaggtgaagatggctaatttctactaagtgtagatatcgccgtacggctatggcataatttctactaagtgtagatttttttnnnnnnnnnnaagcttggcgtggatccgatatcaactagatcttgagacaaatggcagtattcatccacaattttaaaagaaaaggggggattggggggtacagtgcaggggaaagaatagtagacataatagcaacagacatacaaactaaag

SEQ ID NO: 16730 - DNA, 301 bp, Artificial Sequence
  Crebbp.3_NTC.0
  crRNA array
  misc_feature (148)..(157): n is a, c, g, or t
cttggctttatatatcttgtggaaaggacgaaacaccgtaatttctactaagtgtagatggctccgccgcccgcccgcgtaatttctactaagtgtagattatagcgtcgcgcgctaatttaatttctactaagtgtagatttttttnnnnnnnnnnaagcttggcgtggatccgatatcaactagatcttgagacaaatggcagtattcatccacaattttaaaagaaaaggggggattggggggtacagtgcaggggaaagaatagtagacataatagcaacagacatacaaactaaag

SEQ ID NO: 16731 - DNA, 301 bp, Artificial Sequence
  Crebbp.3_NTC.1
  crRNA array
  misc_feature (148)..(157): n is a, c, g, or t
cttggctttatatatcttgtggaaaggacgaaacaccgtaatttctactaagtgtagatggctccgccgcccgcccgcgtaatttctactaagtgtagatcgcgtaaccgttccggctcctaatttctactaagtgtagatttttttnnnnnnnnnnaagcttggcgtggatccgatatcaactagatcttgagacaaatggcagtattcatccacaattttaaaagaaaaggggggattggggggtacagtgcaggggaaagaatagtagacataatagcaacagacatacaaactaaag

SEQ ID NO: 16732 - DNA, 301 bp, Artificial Sequence
  Crebbp.3_NTC.10
  crRNA array
  misc_feature (148)..(157): n is a, c, g, or t
cttggctttatatatcttgtggaaaggacgaaacaccgtaatttctactaagtgtagatggctccgccgcccgcccgcgtaatttctactaagtgtagatcgctaagttcgcgcgggccgtaatttctactaagtgtagatttttttnnnnnnnnnnaagcttggcgtggatccgatatcaactagatcttgagacaaatggcagtattcatccacaattttaaaagaaaaggggggattggggggtacagtgcaggggaaagaatagtagacataatagcaacagacatacaaactaaag

SEQ ID NO: 16733 - DNA, 301 bp, Artificial Sequence
  Crebbp.3_NTC.11
  crRNA array
  misc_feature (148)..(157): n is a, c, g, or t
cttggctttatatatcttgtggaaaggacgaaacaccgtaatttctactaagtgtagatggctccgccgcccgcccgcgtaatttctactaagtgtagatcgttcgtcgacgaagcaatctaatttctactaagtgtagatttttttnnnnnnnnnnaagcttggcgtggatccgatatcaactagatcttgagacaaatggcagtattcatccacaattttaaaagaaaaggggggattggggggtacagtgcaggggaaagaatagtagacataatagcaacagacatacaaactaaag

SEQ ID NO: 16734 - DNA, 301 bp, Artificial Sequence
  Crebbp.3_NTC.12
  crRNA array
  misc_feature (148)..(157): n is a, c, g, or t
cttggctttatatatcttgtggaaaggacgaaacaccgtaatttctactaagtgtagatggctccgccgcccgcccgcgtaatttctactaagtgtagatcgccgacgattaatcaatagtaatttctactaagtgtagatttttttnnnnnnnnnnaagcttggcgtggatccgatatcaactagatcttgagacaaatggcagtattcatccacaattttaaaagaaaaggggggattggggggtacagtgcaggggaaagaatagtagacataatagcaacagacatacaaactaaag

SEQ ID NO: 16735 - DNA, 301 bp, Artificial Sequence
  Crebbp.3_NTC.13
  crRNA array
  misc_feature (148)..(157): n is a, c, g, or t
cttggctttatatatcttgtggaaaggacgaaacaccgtaatttctactaagtgtagatggctccgccgcccgcccgcgtaatttctactaagtgtagatgaccgttgtatcgcgatcaataatttctactaagtgtagatttttttnnnnnnnnnnaagcttggcgtggatccgatatcaactagatcttgagacaaatggcagtattcatccacaattttaaaagaaaaggggggattggggggtacagtgcaggggaaagaatagtagacataatagcaacagacatacaaactaaag

SEQ ID NO: 16736 - DNA, 301 bp, Artificial Sequence
  Crebbp.3_NTC.14
  crRNA array
  misc_feature (148)..(157): n is a, c, g, or t
cttggctttatatatcttgtggaaaggacgaaacaccgtaatttctactaagtgtagatggctccgccgcccgcccgcgtaatttctactaagtgtagatccgttcgtgcgatagtgttttaatttctactaagtgtagatttttttnnnnnnnnnnaagcttggcgtggatccgatatcaactagatcttgagacaaatggcagtattcatccacaattttaaaagaaaaggggggattggggggtacagtgcaggggaaagaatagtagacataatagcaacagacatacaaactaaag

SEQ ID NO: 16737 - DNA, 301 bp, Artificial Sequence
  Crebbp.3_NTC.15
  crRNA array
  misc_feature (148)..(157): n is a, c, g, or t
cttggctttatatatcttgtggaaaggacgaaacaccgtaatttctactaagtgtagatggctccgccgcccgcccgcgtaatttctactaagtgtagatgttgtcgtgccgcgaatttataatttctactaagtgtagatttttttnnnnnnnnnnaagcttggcgtggatccgatatcaactagatcttgagacaaatggcagtattcatccacaattttaaaagaaaaggggggattggggggtacagtgcaggggaaagaatagtagacataatagcaacagacatacaaactaaag

SEQ ID NO: 16738 - DNA, 301 bp, Artificial Sequence
  Crebbp.3_NTC.16
  crRNA array
  misc_feature (148)..(157): n is a, c, g, or t
cttggctttatatatcttgtggaaaggacgaaacaccgtaatttctactaagtgtagatggctccgccgcccgcccgcgtaatttctactaagtgtagatcggtacgttagacgaaaatttaatttctactaagtgtagatttttttnnnnnnnnnnaagcttggcgtggatccgatatcaactagatcttgagacaaatggcagtattcatccacaattttaaaagaaaaggggggattggggggtacagtgcaggggaaagaatagtagacataatagcaacagacatacaaactaaag

SEQ ID NO: 16739 - DNA, 301 bp, Artificial Sequence
  Crebbp.3_NTC.17
  crRNA array
  misc_feature (148)..(157): n is a, c, g, or t
cttggctttatatatcttgtggaaaggacgaaacaccgtaatttctactaagtgtagatggctccgccgcccgcccgcgtaatttctactaagtgtagattatcgaacgctatcgaacgttaatttctactaagtgtagatttttttnnnnnnnnnnaagcttggcgtggatccgatatcaactagatcttgagacaaatggcagtattcatccacaattttaaaagaaaaggggggattggggggtacagtgcaggggaaagaatagtagacataatagcaacagacatacaaactaaag

SEQ ID NO: 16740 - DNA, 301 bp, Artificial Sequence
  Crebbp.3_NTC.18
  crRNA array
  misc_feature (148)..(157): n is a, c, g, or t
cttggctttatatatcttgtggaaaggacgaaacaccgtaatttctactaagtgtagatggctccgccgcccgcccgcgtaatttctactaagtgtagattccggttacgaccggcaaaataatttctactaagtgtagatttttttnnnnnnnnnnaagcttggcgtggatccgatatcaactagatcttgagacaaatggcagtattcatccacaattttaaaagaaaaggggggattggggggtacagtgcaggggaaagaatagtagacataatagcaacagacatacaaactaaag

SEQ ID NO: 16741 - DNA, 301 bp, Artificial Sequence
  Crebbp.3_NTC.19
  crRNA array
  misc_feature (148)..(157): n is a, c, g, or t
cttggctttatatatcttgtggaaaggacgaaacaccgtaatttctactaagtgtagatggctccgccgcccgcccgcgtaatttctactaagtgtagatcgtcgtagaacgatacccgataatttctactaagtgtagatttttttnnnnnnnnnnaagcttggcgtggatccgatatcaactagatcttgagacaaatggcagtattcatccacaattttaaaagaaaaggggggattggggggtacagtgcaggggaaagaatagtagacataatagcaacagacatacaaactaaag

SEQ ID NO: 16742 - DNA, 301 bp, Artificial Sequence
  Crebbp.3_NTC.2
  crRNA array
  misc_feature (148)..(157): n is a, c, g, or t
cttggctttatatatcttgtggaaaggacgaaacaccgtaatttctactaagtgtagatggctccgccgcccgcccgcgtaatttctactaagtgtagatttatgtcgcgccgcgacccgtaatttctactaagtgtagatttttttnnnnnnnnnnaagcttggcgtggatccgatatcaactagatcttgagacaaatggcagtattcatccacaattttaaaagaaaaggggggattggggggtacagtgcaggggaaagaatagtagacataatagcaacagacatacaaactaaag

SEQ ID NO: 16743 - DNA, 301 bp, Artificial Sequence
  Crebbp.3_NTC.20
  crRNA array
  misc_feature (148)..(157): n is a, c, g, or t
cttggctttatatatcttgtggaaaggacgaaacaccgtaatttctactaagtgtagatggctccgccgcccgcccgcgtaatttctactaagtgtagatattccggcgcgaccagaagataatttctactaagtgtagatttttttnnnnnnnnnnaagcttggcgtggatccgatatcaactagatcttgagacaaatggcagtattcatccacaattttaaaagaaaaggggggattggggggtacagtgcaggggaaagaatagtagacataatagcaacagacatacaaactaaag

SEQ ID NO: 16744 - DNA, 301 bp, Artificial Sequence
  Crebbp.3_NTC.21
  crRNA array
  misc_feature (148)..(157): n is a, c, g, or t
cttggctttatatatcttgtggaaaggacgaaacaccgtaatttctactaagtgtagatggctccgccgcccgcccgcgtaatttctactaagtgtagatgtataacttcgcgcggtccgtaatttctactaagtgtagatttttttnnnnnnnnnnaagcttggcgtggatccgatatcaactagatcttgagacaaatggcagtattcatccacaattttaaaagaaaaggggggattggggggtacagtgcaggggaaagaatagtagacataatagcaacagacatacaaactaaag

SEQ ID NO: 16745 - DNA, 301 bp, Artificial Sequence
  Crebbp.3_NTC.22
  crRNA array
  misc_feature (148)..(157): n is a, c, g, or t
cttggctttatatatcttgtggaaaggacgaaacaccgtaatttctactaagtgtagatggctccgccgcccgcccgcgtaatttctactaagtgtagatgcgcgtcaacgtaatgtgcctaatttctactaagtgtagatttttttnnnnnnnnnnaagcttggcgtggatccgatatcaactagatcttgagacaaatggcagtattcatccacaattttaaaagaaaaggggggattggggggtacagtgcaggggaaagaatagtagacataatagcaacagacatacaaactaaag

SEQ ID NO: 16746 - DNA, 301 bp, Artificial Sequence
  Crebbp.3_NTC.23
  crRNA array
  misc_feature (148)..(157): n is a, c, g, or t
cttggctttatatatcttgtggaaaggacgaaacaccgtaatttctactaagtgtagatggctccgccgcccgcccgcgtaatttctactaagtgtagatacgcgctattatcgtaggtgtaatttctactaagtgtagatttttttnnnnnnnnnnaagcttggcgtggatccgatatcaactagatcttgagacaaatggcagtattcatccacaattttaaaagaaaaggggggattggggggtacagtgcaggggaaagaatagtagacataatagcaacagacatacaaactaaag

SEQ ID NO: 16747 - DNA, 301 bp, Artificial Sequence
  Crebbp.3_NTC.24
  crRNA array
  misc_feature (148)..(157): n is a, c, g, or t
cttggctttatatatcttgtggaaaggacgaaacaccgtaatttctactaagtgtagatggctccgccgcccgcccgcgtaatttctactaagtgtagatactatcgacgttcgtcccggtaatttctactaagtgtagatttttttnnnnnnnnnnaagcttggcgtggatccgatatcaactagatcttgagacaaatggcagtattcatccacaattttaaaagaaaaggggggattggggggtacagtgcaggggaaagaatagtagacataatagcaacagacatacaaactaaag

SEQ ID NO: 16748 - DNA, 301 bp, Artificial Sequence
  Crebbp.3_NTC.25
  crRNA array
  misc_feature (148)..(157): n is a, c, g, or t
cttggctttatatatcttgtggaaaggacgaaacaccgtaatttctactaagtgtagatggctccgccgcccgcccgcgtaatttctactaagtgtagattcgcgttatcgtgccgtgcgtaatttctactaagtgtagatttttttnnnnnnnnnnaagcttggcgtggatccgatatcaactagatcttgagacaaatggcagtattcatccacaattttaaaagaaaaggggggattggggggtacagtgcaggggaaagaatagtagacataatagcaacagacatacaaactaaag

SEQ ID NO: 16749 - DNA, 301 bp, Artificial Sequence
  Crebbp.3_NTC.26
  crRNA array
  misc_feature (148)..(157): n is a, c, g, or t
cttggctttatatatcttgtggaaaggacgaaacaccgtaatttctactaagtgtagatggctccgccgcccgcccgcgtaatttctactaagtgtagatcgcgacggcggttttaacactaatttctactaagtgtagatttttttnnnnnnnnnnaagcttggcgtggatccgatatcaactagatcttgagacaaatggcagtattcatccacaattttaaaagaaaaggggggattggggggtacagtgcaggggaaagaatagtagacataatagcaacagacatacaaactaaag

SEQ ID NO: 16750 - DNA, 301 bp, Artificial Sequence
  Crebbp.3_NTC.27
  crRNA array
  misc_feature (148)..(157): n is a, c, g, or t
cttggctttatatatcttgtggaaaggacgaaacaccgtaatttctactaagtgtagatggctccgccgcccgcccgcgtaatttctactaagtgtagatgtcgcgttgcgaccggcgcttaatttctactaagtgtagatttttttnnnnnnnnnnaagcttggcgtggatccgatatcaactagatcttgagacaaatggcagtattcatccacaattttaaaagaaaaggggggattggggggtacagtgcaggggaaagaatagtagacataatagcaacagacatacaaactaaag

SEQ ID NO: 16751 - DNA, 301 bp, Artificial Sequence
  Crebbp.3_NTC.28
  crRNA array
  misc_feature (148)..(157): n is a, c, g, or t
cttggctttatatatcttgtggaaaggacgaaacaccgtaatttctactaagtgtagatggctccgccgcccgcccgcgtaatttctactaagtgtagataccgctaatcggcgtaaacttaatttctactaagtgtagatttttttnnnnnnnnnnaagcttggcgtggatccgatatcaactagatcttgagacaaatggcagtattcatccacaattttaaaagaaaaggggggattggggggtacagtgcaggggaaagaatagtagacataatagcaacagacatacaaactaaag

SEQ ID NO: 16752 - DNA, 301 bp, Artificial Sequence
  Crebbp.3_NTC.29
  crRNA array
  misc_feature (148)..(157): n is a, c, g, or t
cttggctttatatatcttgtggaaaggacgaaacaccgtaatttctactaagtgtagatggctccgccgcccgcccgcgtaatttctactaagtgtagatcgcgatctataccgtctatataatttctactaagtgtagatttttttnnnnnnnnnnaagcttggcgtggatccgatatcaactagatcttgagacaaatggcagtattcatccacaattttaaaagaaaaggggggattggggggtacagtgcaggggaaagaatagtagacataatagcaacagacatacaaactaaag

SEQ ID NO: 16753 - DNA, 301 bp, Artificial Sequence
  Crebbp.3_NTC.3
  crRNA array
  misc_feature (148)..(157): n is a, c, g, or t
cttggctttatatatcttgtggaaaggacgaaacaccgtaatttctactaagtgtagatggctccgccgcccgcccgcgtaatttctactaagtgtagattcgacgcgagacgacgtacataatttctactaagtgtagatttttttnnnnnnnnnnaagcttggcgtggatccgatatcaactagatcttgagacaaatggcagtattcatccacaattttaaaagaaaaggggggattggggggtacagtgcaggggaaagaatagtagacataatagcaacagacatacaaactaaag

SEQ ID NO: 16754 - DNA, 301 bp, Artificial Sequence
  Crebbp.3_NTC.30
  crRNA array
  misc_feature (148)..(157): n is a, c, g, or t
cttggctttatatatcttgtggaaaggacgaaacaccgtaatttctactaagtgtagatggctccgccgcccgcccgcgtaatttctactaagtgtagatcgatcgtacgggtgtcctaataatttctactaagtgtagatttttttnnnnnnnnnnaagcttggcgtggatccgatatcaactagatcttgagacaaatggcagtattcatccacaattttaaaagaaaaggggggattggggggtacagtgcaggggaaagaatagtagacataatagcaacagacatacaaactaaag

SEQ ID NO: 16755 - DNA, 301 bp, Artificial Sequence
  Crebbp.3_NTC.31
  crRNA array
  misc_feature (148)..(157): n is a, c, g, or t
cttggctttatatatcttgtggaaaggacgaaacaccgtaatttctactaagtgtagatggctccgccgcccgcccgcgtaatttctactaagtgtagatgccgaccgcgtgattgtaggtaatttctactaagtgtagatttttttnnnnnnnnnnaagcttggcgtggatccgatatcaactagatcttgagacaaatggcagtattcatccacaattttaaaagaaaaggggggattggggggtacagtgcaggggaaagaatagtagacataatagcaacagacatacaaactaaag

SEQ ID NO: 16756 - DNA, 301 bp, Artificial Sequence
  Crebbp.3_NTC.32
  crRNA array
  misc_feature (148)..(157): n is a, c, g, or t
cttggctttatatatcttgtggaaaggacgaaacaccgtaatttctactaagtgtagatggctccgccgcccgcccgcgtaatttctactaagtgtagatgcacgttacgcccgggtcactaatttctactaagtgtagatttttttnnnnnnnnnnaagcttggcgtggatccgatatcaactagatcttgagacaaatggcagtattcatccacaattttaaaagaaaaggggggattggggggtacagtgcaggggaaagaatagtagacataatagcaacagacatacaaactaaag

SEQ ID NO: 16757 - DNA, 301 bp, Artificial Sequence
  Crebbp.3_NTC.33
  crRNA array
  misc_feature (148)..(157): n is a, c, g, or t
cttggctttatatatcttgtggaaaggacgaaacaccgtaatttctactaagtgtagatggctccgccgcccgcccgcgtaatttctactaagtgtagattaagcgaccgacgcattcgctaatttctactaagtgtagatttttttnnnnnnnnnnaagcttggcgtggatccgatatcaactagatcttgagacaaatggcagtattcatccacaattttaaaagaaaaggggggattggggggtacagtgcaggggaaagaatagtagacataatagcaacagacatacaaactaaag

SEQ ID NO: 16758 - DNA, 301 bp, Artificial Sequence
  Crebbp.3_NTC.34
  crRNA array
  misc_feature (148)..(157): n is a, c, g, or t
cttggctttatatatcttgtggaaaggacgaaacaccgtaatttctactaagtgtagatggctccgccgcccgcccgcgtaatttctactaagtgtagattagcgttcgacacgtgaaactaatttctactaagtgtagatttttttnnnnnnnnnnaagcttggcgtggatccgatatcaactagatcttgagacaaatggcagtattcatccacaattttaaaagaaaaggggggattggggggtacagtgcaggggaaagaatagtagacataatagcaacagacatacaaactaaag

SEQ ID NO: 16759 - DNA, 301 bp, Artificial Sequence
  Crebbp.3_NTC.35
  crRNA array
  misc_feature (148)..(157): n is a, c, g, or t
cttggctttatatatcttgtggaaaggacgaaacaccgtaatttctactaagtgtagatggctccgccgcccgcccgcgtaatttctactaagtgtagattggcgcgtaatcgctattcgtaatttctactaagtgtagatttttttnnnnnnnnnnaagcttggcgtggatccgatatcaactagatcttgagacaaatggcagtattcatccacaattttaaaagaaaaggggggattggggggtacagtgcaggggaaagaatagtagacataatagcaacagacatacaaactaaag

SEQ ID NO: 16760 - DNA, 301 bp, Artificial Sequence
  Crebbp.3_NTC.36
  crRNA array
  misc_feature (148)..(157): n is a, c, g, or t
cttggctttatatatcttgtggaaaggacgaaacaccgtaatttctactaagtgtagatggctccgccgcccgcccgcgtaatttctactaagtgtagatcaacccgccgtagcgggccttaatttctactaagtgtagatttttttnnnnnnnnnnaagcttggcgtggatccgatatcaactagatcttgagacaaatggcagtattcatccacaattttaaaagaaaaggggggattggggggtacagtgcaggggaaagaatagtagacataatagcaacagacatacaaactaaag

SEQ ID NO: 16761 - DNA, 301 bp, Artificial Sequence
  Crebbp.3_NTC.37
  crRNA array
  misc_feature (148)..(157): n is a, c, g, or t
cttggctttatatatcttgtggaaaggacgaaacaccgtaatttctactaagtgtagatggctccgccgcccgcccgcgtaatttctactaagtgtagattttgcgttgacgcgattacttaatttctactaagtgtagatttttttnnnnnnnnnnaagcttggcgtggatccgatatcaactagatcttgagacaaatggcagtattcatccacaattttaaaagaaaaggggggattggggggtacagtgcaggggaaagaatagtagacataatagcaacagacatacaaactaaag

SEQ ID NO: 16762 - DNA, 301 bp, Artificial Sequence
  Crebbp.3_NTC.38
  crRNA array
  misc_feature (148)..(157): n is a, c, g, or t
cttggctttatatatcttgtggaaaggacgaaacaccgtaatttctactaagtgtagatggctccgccgcccgcccgcgtaatttctactaagtgtagataacggagcgcgatactaccataatttctactaagtgtagatttttttnnnnnnnnnnaagcttggcgtggatccgatatcaactagatcttgagacaaatggcagtattcatccacaattttaaaagaaaaggggggattggggggtacagtgcaggggaaagaatagtagacataatagcaacagacatacaaactaaag

SEQ ID NO: 16763 - DNA, 301 bp, Artificial Sequence
  Crebbp.3_NTC.39
  crRNA array
  misc_feature (148)..(157): n is a, c, g, or t
cttggctttatatatcttgtggaaaggacgaaacaccgtaatttctactaagtgtagatggctccgccgcccgcccgcgtaatttctactaagtgtagatccggacgttataacgtttcttaatttctactaagtgtagatttttttnnnnnnnnnnaagcttggcgtggatccgatatcaactagatcttgagacaaatggcagtattcatccacaattttaaaagaaaaggggggattggggggtacagtgcaggggaaagaatagtagacataatagcaacagacatacaaactaaag

SEQ ID NO: 16764 - DNA, 301 bp, Artificial Sequence
  Crebbp.3_NTC.4
  crRNA array
  misc_feature (148)..(157): n is a, c, g, or t
cttggctttatatatcttgtggaaaggacgaaacaccgtaatttctactaagtgtagatggctccgccgcccgcccgcgtaatttctactaagtgtagatatacccgtcgcgaacgtgagtaatttctactaagtgtagatttttttnnnnnnnnnnaagcttggcgtggatccgatatcaactagatcttgagacaaatggcagtattcatccacaattttaaaagaaaaggggggattggggggtacagtgcaggggaaagaatagtagacataatagcaacagacatacaaactaaag

SEQ ID NO: 16765 - DNA, 301 bp, Artificial Sequence
  Crebbp.3_NTC.40
  crRNA array
  misc_feature (148)..(157): n is a, c, g, or t
cttggctttatatatcttgtggaaaggacgaaacaccgtaatttctactaagtgtagatggctccgccgcccgcccgcgtaatttctactaagtgtagatattcgcgaacccggccggaataatttctactaagtgtagatttttttnnnnnnnnnnaagcttggcgtggatccgatatcaactagatcttgagacaaatggcagtattcatccacaattttaaaagaaaaggggggattggggggtacagtgcaggggaaagaatagtagacataatagcaacagacatacaaactaaag

SEQ ID NO: 16766 - DNA, 301 bp, Artificial Sequence
  Crebbp.3_NTC.41
  crRNA array
  misc_feature (148)..(157): n is a, c, g, or t
cttggctttatatatcttgtggaaaggacgaaacaccgtaatttctactaagtgtagatggctccgccgcccgcccgcgtaatttctactaagtgtagatttgatggcgcgacgcgttattaatttctactaagtgtagatttttttnnnnnnnnnnaagcttggcgtggatccgatatcaactagatcttgagacaaatggcagtattcatccacaattttaaaagaaaaggggggattggggggtacagtgcaggggaaagaatagtagacataatagcaacagacatacaaactaaag

SEQ ID NO: 16767 - DNA, 301 bp, Artificial Sequence
  Crebbp.3_NTC.42
  crRNA array
  misc_feature (148)..(157): n is a, c, g, or t
cttggctttatatatcttgtggaaaggacgaaacaccgtaatttctactaagtgtagatggctccgccgcccgcccgcgtaatttctactaagtgtagatggtcaaatcgcggcgataactaatttctactaagtgtagatttttttnnnnnnnnnnaagcttggcgtggatccgatatcaactagatcttgagacaaatggcagtattcatccacaattttaaaagaaaaggggggattggggggtacagtgcaggggaaagaatagtagacataatagcaacagacatacaaactaaag

SEQ ID NO: 16768 - DNA, 301 bp, Artificial Sequence
  Crebbp.3_NTC.43
  crRNA array
  misc_feature (148)..(157): n is a, c, g, or t
cttggctttatatatcttgtggaaaggacgaaacaccgtaatttctactaagtgtagatggctccgccgcccgcccgcgtaatttctactaagtgtagatcgactcgcgcattgaactggtaatttctactaagtgtagatttttttnnnnnnnnnnaagcttggcgtggatccgatatcaactagatcttgagacaaatggcagtattcatccacaattttaaaagaaaaggggggattggggggtacagtgcaggggaaagaatagtagacataatagcaacagacatacaaactaaag

SEQ ID NO: 16769 - DNA, 301 bp, Artificial Sequence
  Crebbp.3_NTC.44
  crRNA array
  misc_feature (148)..(157): n is a, c, g, or t
cttggctttatatatcttgtggaaaggacgaaacaccgtaatttctactaagtgtagatggctccgccgcccgcccgcgtaatttctactaagtgtagatagcgtcgtacgatttatcgttaatttctactaagtgtagatttttttnnnnnnnnnnaagcttggcgtggatccgatatcaactagatcttgagacaaatggcagtattcatccacaattttaaaagaaaaggggggattggggggtacagtgcaggggaaagaatagtagacataatagcaacagacatacaaactaaag

SEQ ID NO: 16770 - DNA, 301 bp, Artificial Sequence
  Crebbp.3_NTC.45
  crRNA array
  misc_feature (148)..(157): n is a, c, g, or t
cttggctttatatatcttgtggaaaggacgaaacaccgtaatttctactaagtgtagatggctccgccgcccgcccgcgtaatttctactaagtgtagatcggaacgcgtgatactagggtaatttctactaagtgtagatttttttnnnnnnnnnnaagcttggcgtggatccgatatcaactagatcttgagacaaatggcagtattcatccacaattttaaaagaaaaggggggattggggggtacagtgcaggggaaagaatagtagacataatagcaacagacatacaaactaaag

SEQ ID NO: 16771 - DNA, 301 bp, Artificial Sequence
  Crebbp.3_NTC.46
  crRNA array
  misc_feature (148)..(157): n is a, c, g, or t
cttggctttatatatcttgtggaaaggacgaaacaccgtaatttctactaagtgtagatggctccgccgcccgcccgcgtaatttctactaagtgtagatagcgggtcgtagacgcgcggtaatttctactaagtgtagatttttttnnnnnnnnnnaagcttggcgtggatccgatatcaactagatcttgagacaaatggcagtattcatccacaattttaaaagaaaaggggggattggggggtacagtgcaggggaaagaatagtagacataatagcaacagacatacaaactaaag

SEQ ID NO: 16772 - DNA, 301 bp, Artificial Sequence
  Crebbp.3_NTC.47
  crRNA array
  misc_feature (148)..(157): n is a, c, g, or t
cttggctttatatatcttgtggaaaggacgaaacaccgtaatttctactaagtgtagatggctccgccgcccgcccgcgtaatttctactaagtgtagattctcgtatcgcgattgttaataatttctactaagtgtagatttttttnnnnnnnnnnaagcttggcgtggatccgatatcaactagatcttgagacaaatggcagtattcatccacaattttaaaagaaaaggggggattggggggtacagtgcaggggaaagaatagtagacataatagcaacagacatacaaactaaag

SEQ ID NO: 16773 - DNA, 301 bp, Artificial Sequence
  Crebbp.3_NTC.48
  crRNA array
  misc_feature (148)..(157): n is a, c, g, or t
cttggctttatatatcttgtggaaaggacgaaacaccgtaatttctactaagtgtagatggctccgccgcccgcccgcgtaatttctactaagtgtagatcggtcgactacggctgttagtaatttctactaagtgtagatttttttnnnnnnnnnnaagcttggcgtggatccgatatcaactagatcttgagacaaatggcagtattcatccacaattttaaaagaaaaggggggattggggggtacagtgcaggggaaagaatagtagacataatagcaacagacatacaaactaaag

SEQ ID NO: 16774 - DNA, 301 bp, Artificial Sequence
  Crebbp.3_NTC.49
  crRNA array
  misc_feature (148)..(157): n is a, c, g, or t
cttggctttatatatcttgtggaaaggacgaaacaccgtaatttctactaagtgtagatggctccgccgcccgcccgcgtaatttctactaagtgtagattcggggcgcgtcaactgaattaatttctactaagtgtagatttttttnnnnnnnnnnaagcttggcgtggatccgatatcaactagatcttgagacaaatggcagtattcatccacaattttaaaagaaaaggggggattggggggtacagtgcaggggaaagaatagtagacataatagcaacagacatacaaactaaag

SEQ ID NO: 16775 - DNA, 301 bp, Artificial Sequence
  Crebbp.3_NTC.5
  crRNA array
  misc_feature (148)..(157): n is a, c, g, or t
cttggctttatatatcttgtggaaaggacgaaacaccgtaatttctactaagtgtagatggctccgccgcccgcccgcgtaatttctactaagtgtagatgcttacgcgtcgcgaatgtataatttctactaagtgtagatttttttnnnnnnnnnnaagcttggcgtggatccgatatcaactagatcttgagacaaatggcagtattcatccacaattttaaaagaaaaggggggattggggggtacagtgcaggggaaagaatagtagacataatagcaacagacatacaaactaaag

SEQ ID NO: 16776 - DNA, 301 bp, Artificial Sequence
  Crebbp.3_NTC.50
  crRNA array
  misc_feature (148)..(157): n is a, c, g, or t
cttggctttatatatcttgtggaaaggacgaaacaccgtaatttctactaagtgtagatggctccgccgcccgcccgcgtaatttctactaagtgtagatattgccgctcgcgcaaaatctaatttctactaagtgtagatttttttnnnnnnnnnnaagcttggcgtggatccgatatcaactagatcttgagacaaatggcagtattcatccacaattttaaaagaaaaggggggattggggggtacagtgcaggggaaagaatagtagacataatagcaacagacatacaaactaaag

SEQ ID NO: 16777 - DNA, 301 bp, Artificial Sequence
  Crebbp.3_NTC.51
  crRNA array
  misc_feature (148)..(157): n is a, c, g, or t
cttggctttatatatcttgtggaaaggacgaaacaccgtaatttctactaagtgtagatggctccgccgcccgcccgcgtaatttctactaagtgtagattaacgcgcaacacgccaatgtaatttctactaagtgtagatttttttnnnnnnnnnnaagcttggcgtggatccgatatcaactagatcttgagacaaatggcagtattcatccacaattttaaaagaaaaggggggattggggggtacagtgcaggggaaagaatagtagacataatagcaacagacatacaaactaaag

SEQ ID NO: 16778 - DNA, 301 bp, Artificial Sequence
  Crebbp.3_NTC.6
  crRNA array
  misc_feature (148)..(157): n is a, c, g, or t
cttggctttatatatcttgtggaaaggacgaaacaccgtaatttctactaagtgtagatggctccgccgcccgcccgcgtaatttctactaagtgtagatcgaatcgcgcctacgggaattaatttctactaagtgtagatttttttnnnnnnnnnnaagcttggcgtggatccgatatcaactagatcttgagacaaatggcagtattcatccacaattttaaaagaaaaggggggattggggggtacagtgcaggggaaagaatagtagacataatagcaacagacatacaaactaaag

SEQ ID NO: 16779 - DNA, 301 bp, Artificial Sequence
  Crebbp.3_NTC.7
  crRNA array
  misc_feature (148)..(157): n is a, c, g, or t
cttggctttatatatcttgtggaaaggacgaaacaccgtaatttctactaagtgtagatggctccgccgcccgcccgcgtaatttctactaagtgtagatcgccgaacggataagactattaatttctactaagtgtagatttttttnnnnnnnnnnaagcttggcgtggatccgatatcaactagatcttgagacaaatggcagtattcatccacaattttaaaagaaaaggggggattggggggtacagtgcaggggaaagaatagtagacataatagcaacagacatacaaactaaag

SEQ ID NO: 16780 - DNA, 301 bp, Artificial Sequence
  Crebbp.3_NTC.8
  crRNA array
  misc_feature (148)..(157): n is a, c, g, or t
cttggctttatatatcttgtggaaaggacgaaacaccgtaatttctactaagtgtagatggctccgccgcccgcccgcgtaatttctactaagtgtagatcgaccgaggttacgctgggataatttctactaagtgtagatttttttnnnnnnnnnnaagcttggcgtggatccgatatcaactagatcttgagacaaatggcagtattcatccacaattttaaaagaaaaggggggattggggggtacagtgcaggggaaagaatagtagacataatagcaacagacatacaaactaaag

SEQ ID NO: 16781 - DNA, 301 bp, Artificial Sequence
  Crebbp.3_NTC.9
  crRNA array
  misc_feature (148)..(157): n is a, c, g, or t
cttggctttatatatcttgtggaaaggacgaaacaccgtaatttctactaagtgtagatggctccgccgcccgcccgcgtaatttctactaagtgtagatatcgccgtacggctatggcataatttctactaagtgtagatttttttnnnnnnnnnnaagcttggcgtggatccgatatcaactagatcttgagacaaatggcagtattcatccacaattttaaaagaaaaggggggattggggggtacagtgcaggggaaagaatagtagacataatagcaacagacatacaaactaaag

SEQ ID NO: 16782 - DNA, 301 bp, Artificial Sequence
  Crebbp.4_NTC.0
  crRNA array
  misc_feature (148)..(157): n is a, c, g, or t
cttggctttatatatcttgtggaaaggacgaaacaccgtaatttctactaagtgtagattggactagatgactccgtagtaatttctactaagtgtagattatagcgtcgcgcgctaatttaatttctactaagtgtagatttttttnnnnnnnnnnaagcttggcgtggatccgatatcaactagatcttgagacaaatggcagtattcatccacaattttaaaagaaaaggggggattggggggtacagtgcaggggaaagaatagtagacataatagcaacagacatacaaactaaag

SEQ ID NO: 16783 - DNA, 301 bp, Artificial Sequence
  Crebbp.4_NTC.1
  crRNA array
  misc_feature (148)..(157): n is a, c, g, or t
cttggctttatatatcttgtggaaaggacgaaacaccgtaatttctactaagtgtagattggactagatgactccgtagtaatttctactaagtgtagatcgcgtaaccgttccggctcctaatttctactaagtgtagatttttttnnnnnnnnnnaagcttggcgtggatccgatatcaactagatcttgagacaaatggcagtattcatccacaattttaaaagaaaaggggggattggggggtacagtgcaggggaaagaatagtagacataatagcaacagacatacaaactaaag

SEQ ID NO: 16784 - DNA, 301 bp, Artificial Sequence
  Crebbp.4_NTC.10
  crRNA array
  misc_feature (148)..(157): n is a, c, g, or t
cttggctttatatatcttgtggaaaggacgaaacaccgtaatttctactaagtgtagattggactagatgactccgtagtaatttctactaagtgtagatcgctaagttcgcgcgggccgtaatttctactaagtgtagatttttttnnnnnnnnnnaagcttggcgtggatccgatatcaactagatcttgagacaaatggcagtattcatccacaattttaaaagaaaaggggggattggggggtacagtgcaggggaaagaatagtagacataatagcaacagacatacaaactaaag

SEQ ID NO: 16785 - DNA, 301 bp, Artificial Sequence
  Crebbp.4_NTC.11
  crRNA array
  misc_feature (148)..(157): n is a, c, g, or t
cttggctttatatatcttgtggaaaggacgaaacaccgtaatttctactaagtgtagattggactagatgactccgtagtaatttctactaagtgtagatcgttcgtcgacgaagcaatctaatttctactaagtgtagatttttttnnnnnnnnnnaagcttggcgtggatccgatatcaactagatcttgagacaaatggcagtattcatccacaattttaaaagaaaaggggggattggggggtacagtgcaggggaaagaatagtagacataatagcaacagacatacaaactaaag

SEQ ID NO: 16786 - DNA, 301 bp, Artificial Sequence
  Crebbp.4_NTC.12
  crRNA array
  misc_feature (148)..(157): n is a, c, g, or t
cttggctttatatatcttgtggaaaggacgaaacaccgtaatttctactaagtgtagattggactagatgactccgtagtaatttctactaagtgtagatcgccgacgattaatcaatagtaatttctactaagtgtagatttttttnnnnnnnnnnaagcttggcgtggatccgatatcaactagatcttgagacaaatggcagtattcatccacaattttaaaagaaaaggggggattggggggtacagtgcaggggaaagaatagtagacataatagcaacagacatacaaactaaag

SEQ ID NO: 16787 - DNA, 301 bp, Artificial Sequence
  Crebbp.4_NTC.13
  crRNA array
  misc_feature (148)..(157): n is a, c, g, or t
cttggctttatatatcttgtggaaaggacgaaacaccgtaatttctactaagtgtagattggactagatgactccgtagtaatttctactaagtgtagatgaccgttgtatcgcgatcaataatttctactaagtgtagatttttttnnnnnnnnnnaagcttggcgtggatccgatatcaactagatcttgagacaaatggcagtattcatccacaattttaaaagaaaaggggggattggggggtacagtgcaggggaaagaatagtagacataatagcaacagacatacaaactaaag

SEQ ID NO: 16788 - DNA, 301 bp, Artificial Sequence
  Crebbp.4_NTC.14
  crRNA array
  misc_feature (148)..(157): n is a, c, g, or t
cttggctttatatatcttgtggaaaggacgaaacaccgtaatttctactaagtgtagattggactagatgactccgtagtaatttctactaagtgtagatccgttcgtgcgatagtgttttaatttctactaagtgtagatttttttnnnnnnnnnnaagcttggcgtggatccgatatcaactagatcttgagacaaatggcagtattcatccacaattttaaaagaaaaggggggattggggggtacagtgcaggggaaagaatagtagacataatagcaacagacatacaaactaaag

SEQ ID NO: 16789 - DNA, 301 bp, Artificial Sequence
  Crebbp.4_NTC.15
  crRNA array
  misc_feature (148)..(157): n is a, c, g, or t
cttggctttatatatcttgtggaaaggacgaaacaccgtaatttctactaagtgtagattggactagatgactccgtagtaatttctactaagtgtagatgttgtcgtgccgcgaatttataatttctactaagtgtagatttttttnnnnnnnnnnaagcttggcgtggatccgatatcaactagatcttgagacaaatggcagtattcatccacaattttaaaagaaaaggggggattggggggtacagtgcaggggaaagaatagtagacataatagcaacagacatacaaactaaag

SEQ ID NO: 16790 - DNA, 301 bp, Artificial Sequence
  Crebbp.4_NTC.16
  crRNA array
  misc_feature (148)..(157): n is a, c, g, or t
cttggctttatatatcttgtggaaaggacgaaacaccgtaatttctactaagtgtagattggactagatgactccgtagtaatttctactaagtgtagatcggtacgttagacgaaaatttaatttctactaagtgtagatttttttnnnnnnnnnnaagcttggcgtggatccgatatcaactagatcttgagacaaatggcagtattcatccacaattttaaaagaaaaggggggattggggggtacagtgcaggggaaagaatagtagacataatagcaacagacatacaaactaaag

SEQ ID NO: 16791 - DNA, 301 bp, Artificial Sequence
  Crebbp.4_NTC.17
  crRNA array
  misc_feature (148)..(157): n is a, c, g, or t
cttggctttatatatcttgtggaaaggacgaaacaccgtaatttctactaagtgtagattggactagatgactccgtagtaatttctactaagtgtagattatcgaacgctatcgaacgttaatttctactaagtgtagatttttttnnnnnnnnnnaagcttggcgtggatccgatatcaactagatcttgagacaaatggcagtattcatccacaattttaaaagaaaaggggggattggggggtacagtgcaggggaaagaatagtagacataatagcaacagacatacaaactaaag

SEQ ID NO: 16792 - DNA, 301 bp, Artificial Sequence
  Crebbp.4_NTC.18
  crRNA array
  misc_feature (148)..(157): n is a, c, g, or t
cttggctttatatatcttgtggaaaggacgaaacaccgtaatttctactaagtgtagattggactagatgactccgtagtaatttctactaagtgtagattccggttacgaccggcaaaataatttctactaagtgtagatttttttnnnnnnnnnnaagcttggcgtggatccgatatcaactagatcttgagacaaatggcagtattcatccacaattttaaaagaaaaggggggattggggggtacagtgcaggggaaagaatagtagacataatagcaacagacatacaaactaaag

SEQ ID NO: 16793 - DNA, 301 bp, Artificial Sequence
  Crebbp.4_NTC.19
  crRNA array
  misc_feature (148)..(157): n is a, c, g, or t
cttggctttatatatcttgtggaaaggacgaaacaccgtaatttctactaagtgtagattggactagatgactccgtagtaatttctactaagtgtagatcgtcgtagaacgatacccgataatttctactaagtgtagatttttttnnnnnnnnnnaagcttggcgtggatccgatatcaactagatcttgagacaaatggcagtattcatccacaattttaaaagaaaaggggggattggggggtacagtgcaggggaaagaatagtagacataatagcaacagacatacaaactaaag

SEQ ID NO: 16794 - DNA, 301 bp, Artificial Sequence
  Crebbp.4_NTC.2
  crRNA array
  misc_feature (148)..(157): n is a, c, g, or t
cttggctttatatatcttgtggaaaggacgaaacaccgtaatttctactaagtgtagattggactagatgactccgtagtaatttctactaagtgtagatttatgtcgcgccgcgacccgtaatttctactaagtgtagatttttttnnnnnnnnnnaagcttggcgtggatccgatatcaactagatcttgagacaaatggcagtattcatccacaattttaaaagaaaaggggggattggggggtacagtgcaggggaaagaatagtagacataatagcaacagacatacaaactaaag

SEQ ID NO: 16795 - DNA, 301 bp, Artificial Sequence
  Crebbp.4_NTC.20
  crRNA array
  misc_feature (148)..(157): n is a, c, g, or t
cttggctttatatatcttgtggaaaggacgaaacaccgtaatttctactaagtgtagattggactagatgactccgtagtaatttctactaagtgtagatattccggcgcgaccagaagataatttctactaagtgtagatttttttnnnnnnnnnnaagcttggcgtggatccgatatcaactagatcttgagacaaatggcagtattcatccacaattttaaaagaaaaggggggattggggggtacagtgcaggggaaagaatagtagacataatagcaacagacatacaaactaaag

SEQ ID NO: 16796 - DNA, 301 bp, Artificial Sequence
  Crebbp.4_NTC.21
  crRNA array
  misc_feature (148)..(157): n is a, c, g, or t
cttggctttatatatcttgtggaaaggacgaaacaccgtaatttctactaagtgtagattggactagatgactccgtagtaatttctactaagtgtagatgtataacttcgcgcggtccgtaatttctactaagtgtagatttttttnnnnnnnnnnaagcttggcgtggatccgatatcaactagatcttgagacaaatggcagtattcatccacaattttaaaagaaaaggggggattggggggtacagtgcaggggaaagaatagtagacataatagcaacagacatacaaactaaag

SEQ ID NO: 16797 - DNA, 301 bp, Artificial Sequence
  Crebbp.4_NTC.22
  crRNA array
  misc_feature (148)..(157): n is a, c, g, or t
cttggctttatatatcttgtggaaaggacgaaacaccgtaatttctactaagtgtagattggactagatgactccgtagtaatttctactaagtgtagatgcgcgtcaacgtaatgtgcctaatttctactaagtgtagatttttttnnnnnnnnnnaagcttggcgtggatccgatatcaactagatcttgagacaaatggcagtattcatccacaattttaaaagaaaaggggggattggggggtacagtgcaggggaaagaatagtagacataatagcaacagacatacaaactaaag

SEQ ID NO: 16798 - DNA, 301 bp, Artificial Sequence
  Crebbp.4_NTC.23
  crRNA array
  misc_feature (148)..(157): n is a, c, g, or t
cttggctttatatatcttgtggaaaggacgaaacaccgtaatttctactaagtgtagattggactagatgactccgtagtaatttctactaagtgtagatacgcgctattatcgtaggtgtaatttctactaagtgtagatttttttnnnnnnnnnnaagcttggcgtggatccgatatcaactagatcttgagacaaatggcagtattcatccacaattttaaaagaaaaggggggattggggggtacagtgcaggggaaagaatagtagacataatagcaacagacatacaaactaaag

SEQ ID NO: 16799 - DNA, 301 bp, Artificial Sequence
  Crebbp.4_NTC.24
  crRNA array
  misc_feature (148)..(157): n is a, c, g, or t
cttggctttatatatcttgtggaaaggacgaaacaccgtaatttctactaagtgtagattggactagatgactccgtagtaatttctactaagtgtagatactatcgacgttcgtcccggtaatttctactaagtgtagatttttttnnnnnnnnnnaagcttggcgtggatccgatatcaactagatcttgagacaaatggcagtattcatccacaattttaaaagaaaaggggggattggggggtacagtgcaggggaaagaatagtagacataatagcaacagacatacaaactaaag

SEQ ID NO: 16800 - DNA, 301 bp, Artificial Sequence
  Crebbp.4_NTC.25
  crRNA array
  misc_feature (148)..(157): n is a, c, g, or t
cttggctttatatatcttgtggaaaggacgaaacaccgtaatttctactaagtgtagattggactagatgactccgtagtaatttctactaagtgtagattcgcgttatcgtgccgtgcgtaatttctactaagtgtagatttttttnnnnnnnnnnaagcttggcgtggatccgatatcaactagatcttgagacaaatggcagtattcatccacaattttaaaagaaaaggggggattggggggtacagtgcaggggaaagaatagtagacataatagcaacagacatacaaactaaag

SEQ ID NO: 16801 - DNA, 301 bp, Artificial Sequence
  Crebbp.4_NTC.26
  crRNA array
  misc_feature (148)..(157): n is a, c, g, or t
cttggctttatatatcttgtggaaaggacgaaacaccgtaatttctactaagtgtagattggactagatgactccgtagtaatttctactaagtgtagatcgcgacggcggttttaacactaatttctactaagtgtagatttttttnnnnnnnnnnaagcttggcgtggatccgatatcaactagatcttgagacaaatggcagtattcatccacaattttaaaagaaaaggggggattggggggtacagtgcaggggaaagaatagtagacataatagcaacagacatacaaactaaag

SEQ ID NO: 16802 - DNA, 301 bp, Artificial Sequence
  Crebbp.4_NTC.27
  crRNA array
  misc_feature (148)..(157): n is a, c, g, or t
cttggctttatatatcttgtggaaaggacgaaacaccgtaatttctactaagtgtagattggactagatgactccgtagtaatttctactaagtgtagatgtcgcgttgcgaccggcgcttaatttctactaagtgtagatttttttnnnnnnnnnnaagcttggcgtggatccgatatcaactagatcttgagacaaatggcagtattcatccacaattttaaaagaaaaggggggattggggggtacagtgcaggggaaagaatagtagacataatagcaacagacatacaaactaaag

SEQ ID NO: 16803 - DNA, 301 bp, Artificial Sequence
  Crebbp.4_NTC.28
  crRNA array
  misc_feature (148)..(157): n is a, c, g, or t
cttggctttatatatcttgtggaaaggacgaaacaccgtaatttctactaagtgtagattggactagatgactccgtagtaatttctactaagtgtagataccgctaatcggcgtaaacttaatttctactaagtgtagatttttttnnnnnnnnnnaagcttggcgtggatccgatatcaactagatcttgagacaaatggcagtattcatccacaattttaaaagaaaaggggggattggggggtacagtgcaggggaaagaatagtagacataatagcaacagacatacaaactaaag

SEQ ID NO: 16804 - DNA, 301 bp, Artificial Sequence
  Crebbp.4_NTC.29
  crRNA array
  misc_feature (148)..(157): n is a, c, g, or t
cttggctttatatatcttgtggaaaggacgaaacaccgtaatttctactaagtgtagattggactagatgactccgtagtaatttctactaagtgtagatcgcgatctataccgtctatataatttctactaagtgtagatttttttnnnnnnnnnnaagcttggcgtggatccgatatcaactagatcttgagacaaatggcagtattcatccacaattttaaaagaaaaggggggattggggggtacagtgcaggggaaagaatagtagacataatagcaacagacatacaaactaaag

SEQ ID NO: 16805 - DNA, 301 bp, Artificial Sequence
  Crebbp.4_NTC.3
  crRNA array
  misc_feature (148)..(157): n is a, c, g, or t
cttggctttatatatcttgtggaaaggacgaaacaccgtaatttctactaagtgtagattggactagatgactccgtagtaatttctactaagtgtagattcgacgcgagacgacgtacataatttctactaagtgtagatttttttnnnnnnnnnnaagcttggcgtggatccgatatcaactagatcttgagacaaatggcagtattcatccacaattttaaaagaaaaggggggattggggggtacagtgcaggggaaagaatagtagacataatagcaacagacatacaaactaaag

SEQ ID NO: 16806 - DNA, 301 bp, Artificial Sequence
  Crebbp.4_NTC.30
  crRNA array
  misc_feature (148)..(157): n is a, c, g, or t
cttggctttatatatcttgtggaaaggacgaaacaccgtaatttctactaagtgtagattggactagatgactccgtagtaatttctactaagtgtagatcgatcgtacgggtgtcctaataatttctactaagtgtagatttttttnnnnnnnnnnaagcttggcgtggatccgatatcaactagatcttgagacaaatggcagtattcatccacaattttaaaagaaaaggggggattggggggtacagtgcaggggaaagaatagtagacataatagcaacagacatacaaactaaag

SEQ ID NO: 16807 - DNA, 301 bp, Artificial Sequence
  Crebbp.4_NTC.31
  crRNA array
  misc_feature (148)..(157): n is a, c, g, or t
cttggctttatatatcttgtggaaaggacgaaacaccgtaatttctactaagtgtagattggactagatgactccgtagtaatttctactaagtgtagatgccgaccgcgtgattgtaggtaatttctactaagtgtagatttttttnnnnnnnnnnaagcttggcgtggatccgatatcaactagatcttgagacaaatggcagtattcatccacaattttaaaagaaaaggggggattggggggtacagtgcaggggaaagaatagtagacataatagcaacagacatacaaactaaag

SEQ ID NO: 16808 - DNA, 301 bp, Artificial Sequence
  Crebbp.4_NTC.32
  crRNA array
  misc_feature (148)..(157): n is a, c, g, or t
cttggctttatatatcttgtggaaaggacgaaacaccgtaatttctactaagtgtagattggactagatgactccgtagtaatttctactaagtgtagatgcacgttacgcccgggtcactaatttctactaagtgtagatttttttnnnnnnnnnnaagcttggcgtggatccgatatcaactagatcttgagacaaatggcagtattcatccacaattttaaaagaaaaggggggattggggggtacagtgcaggggaaagaatagtagacataatagcaacagacatacaaactaaag

SEQ ID NO: 16809 - DNA, 301 bp, Artificial Sequence
  Crebbp.4_NTC.33
  crRNA array
  misc_feature (148)..(157): n is a, c, g, or t
cttggctttatatatcttgtggaaaggacgaaacaccgtaatttctactaagtgtagattggactagatgactccgtagtaatttctactaagtgtagattaagcgaccgacgcattcgctaatttctactaagtgtagatttttttnnnnnnnnnnaagcttggcgtggatccgatatcaactagatcttgagacaaatggcagtattcatccacaattttaaaagaaaaggggggattggggggtacagtgcaggggaaagaatagtagacataatagcaacagacatacaaactaaag

SEQ ID NO: 16810 - DNA, 301 bp, Artificial Sequence
  Crebbp.4_NTC.34
  crRNA array
  misc_feature (148)..(157): n is a, c, g, or t
cttggctttatatatcttgtggaaaggacgaaacaccgtaatttctactaagtgtagattggactagatgactccgtagtaatttctactaagtgtagattagcgttcgacacgtgaaactaatttctactaagtgtagatttttttnnnnnnnnnnaagcttggcgtggatccgatatcaactagatcttgagacaaatggcagtattcatccacaattttaaaagaaaaggggggattggggggtacagtgcaggggaaagaatagtagacataatagcaacagacatacaaactaaag

SEQ ID NO: 16811 - DNA, 301 bp, Artificial Sequence
  Crebbp.4_NTC.35
  crRNA array
  misc_feature (148)..(157): n is a, c, g, or t
cttggctttatatatcttgtggaaaggacgaaacaccgtaatttctactaagtgtagattggactagatgactccgtagtaatttctactaagtgtagattggcgcgtaatcgctattcgtaatttctactaagtgtagatttttttnnnnnnnnnnaagcttggcgtggatccgatatcaactagatcttgagacaaatggcagtattcatccacaattttaaaagaaaaggggggattggggggtacagtgcaggggaaagaatagtagacataatagcaacagacatacaaactaaag

SEQ ID NO: 16812 - DNA, 301 bp, Artificial Sequence
  Crebbp.4_NTC.36
  crRNA array
  misc_feature (148)..(157): n is a, c, g, or t
cttggctttatatatcttgtggaaaggacgaaacaccgtaatttctactaagtgtagattggactagatgactccgtagtaatttctactaagtgtagatcaacccgccgtagcgggccttaatttctactaagtgtagatttttttnnnnnnnnnnaagcttggcgtggatccgatatcaactagatcttgagacaaatggcagtattcatccacaattttaaaagaaaaggggggattggggggtacagtgcaggggaaagaatagtagacataatagcaacagacatacaaactaaag

SEQ ID NO: 16813 - DNA, 301 bp, Artificial Sequence
  Crebbp.4_NTC.37
  crRNA array
  misc_feature (148)..(157): n is a, c, g, or t
cttggctttatatatcttgtggaaaggacgaaacaccgtaatttctactaagtgtagattggactagatgactccgtagtaatttctactaagtgtagattttgcgttgacgcgattacttaatttctactaagtgtagatttttttnnnnnnnnnnaagcttggcgtggatccgatatcaactagatcttgagacaaatggcagtattcatccacaattttaaaagaaaaggggggattggggggtacagtgcaggggaaagaatagtagacataatagcaacagacatacaaactaaag

SEQ ID NO: 16814 - DNA, 301 bp, Artificial Sequence
  Crebbp.4_NTC.38
  crRNA array
  misc_feature (148)..(157): n is a, c, g, or t
cttggctttatatatcttgtggaaaggacgaaacaccgtaatttctactaagtgtagattggactagatgactccgtagtaatttctactaagtgtagataacggagcgcgatactaccataatttctactaagtgtagatttttttnnnnnnnnnnaagcttggcgtggatccgatatcaactagatcttgagacaaatggcagtattcatccacaattttaaaagaaaaggggggattggggggtacagtgcaggggaaagaatagtagacataatagcaacagacatacaaactaaag

SEQ ID NO: 16815 - DNA, 301 bp, Artificial Sequence
  Crebbp.4_NTC.39
  crRNA array
  misc_feature (148)..(157): n is a, c, g, or t
cttggctttatatatcttgtggaaaggacgaaacaccgtaatttctactaagtgtagattggactagatgactccgtagtaatttctactaagtgtagatccggacgttataacgtttcttaatttctactaagtgtagatttttttnnnnnnnnnnaagcttggcgtggatccgatatcaactagatcttgagacaaatggcagtattcatccacaattttaaaagaaaaggggggattggggggtacagtgcaggggaaagaatagtagacataatagcaacagacatacaaactaaag

SEQ ID NO: 16816 - DNA, 301 bp, Artificial Sequence
  Crebbp.4_NTC.4
  crRNA array
  misc_feature (148)..(157): n is a, c, g, or t
cttggctttatatatcttgtggaaaggacgaaacaccgtaatttctactaagtgtagattggactagatgactccgtagtaatttctactaagtgtagatatacccgtcgcgaacgtgagtaatttctactaagtgtagatttttttnnnnnnnnnnaagcttggcgtggatccgatatcaactagatcttgagacaaatggcagtattcatccacaattttaaaagaaaaggggggattggggggtacagtgcaggggaaagaatagtagacataatagcaacagacatacaaactaaag

SEQ ID NO: 16817 - DNA, 301 bp, Artificial Sequence
  Crebbp.4_NTC.40
  crRNA array
  misc_feature (148)..(157): n is a, c, g, or t
cttggctttatatatcttgtggaaaggacgaaacaccgtaatttctactaagtgtagattggactagatgactccgtagtaatttctactaagtgtagatattcgcgaacccggccggaataatttctactaagtgtagatttttttnnnnnnnnnnaagcttggcgtggatccgatatcaactagatcttgagacaaatggcagtattcatccacaattttaaaagaaaaggggggattggggggtacagtgcaggggaaagaatagtagacataatagcaacagacatacaaactaaag

SEQ ID NO: 16818 - DNA, 301 bp, Artificial Sequence
  Crebbp.4_NTC.41
  crRNA array
  misc_feature (148)..(157): n is a, c, g, or t
cttggctttatatatcttgtggaaaggacgaaacaccgtaatttctactaagtgtagattggactagatgactccgtagtaatttctactaagtgtagatttgatggcgcgacgcgttattaatttctactaagtgtagatttttttnnnnnnnnnnaagcttggcgtggatccgatatcaactagatcttgagacaaatggcagtattcatccacaattttaaaagaaaaggggggattggggggtacagtgcaggggaaagaatagtagacataatagcaacagacatacaaactaaag

SEQ ID NO: 16819 - DNA, 301 bp, Artificial Sequence
  Crebbp.4_NTC.42
  crRNA array
  misc_feature (148)..(157): n is a, c, g, or t
cttggctttatatatcttgtggaaaggacgaaacaccgtaatttctactaagtgtagattggactagatgactccgtagtaatttctactaagtgtagatggtcaaatcgcggcgataactaatttctactaagtgtagatttttttnnnnnnnnnnaagcttggcgtggatccgatatcaactagatcttgagacaaatggcagtattcatccacaattttaaaagaaaaggggggattggggggtacagtgcaggggaaagaatagtagacataatagcaacagacatacaaactaaag

SEQ ID NO: 16820 - DNA, 301 bp, Artificial Sequence
  Crebbp.4_NTC.43
  crRNA array
  misc_feature (148)..(157): n is a, c, g, or t
cttggctttatatatcttgtggaaaggacgaaacaccgtaatttctactaagtgtagattggactagatgactccgtagtaatttctactaagtgtagatcgactcgcgcattgaactggtaatttctactaagtgtagatttttttnnnnnnnnnnaagcttggcgtggatccgatatcaactagatcttgagacaaatggcagtattcatccacaattttaaaagaaaaggggggattggggggtacagtgcaggggaaagaatagtagacataatagcaacagacatacaaactaaag

SEQ ID NO: 16821 - DNA, 301 bp, Artificial Sequence
  Crebbp.4_NTC.44
  crRNA array
  misc_feature (148)..(157): n is a, c, g, or t
cttggctttatatatcttgtggaaaggacgaaacaccgtaatttctactaagtgtagattggactagatgactccgtagtaatttctactaagtgtagatagcgtcgtacgatttatcgttaatttctactaagtgtagatttttttnnnnnnnnnnaagcttggcgtggatccgatatcaactagatcttgagacaaatggcagtattcatccacaattttaaaagaaaaggggggattggggggtacagtgcaggggaaagaatagtagacataatagcaacagacatacaaactaaag

SEQ ID NO: 16822 - DNA, 301 bp, Artificial Sequence
  Crebbp.4_NTC.45
  crRNA array
  misc_feature (148)..(157): n is a, c, g, or t
cttggctttatatatcttgtggaaaggacgaaacaccgtaatttctactaagtgtagattggactagatgactccgtagtaatttctactaagtgtagatcggaacgcgtgatactagggtaatttctactaagtgtagatttttttnnnnnnnnnnaagcttggcgtggatccgatatcaactagatcttgagacaaatggcagtattcatccacaattttaaaagaaaaggggggattggggggtacagtgcaggggaaagaatagtagacataatagcaacagacatacaaactaaag

SEQ ID NO: 16823 - DNA, 301 bp, Artificial Sequence
  Crebbp.4_NTC.46
  crRNA array
  misc_feature (148)..(157): n is a, c, g, or t
cttggctttatatatcttgtggaaaggacgaaacaccgtaatttctactaagtgtagattggactagatgactccgtagtaatttctactaagtgtagatagcgggtcgtagacgcgcggtaatttctactaagtgtagatttttttnnnnnnnnnnaagcttggcgtggatccgatatcaactagatcttgagacaaatggcagtattcatccacaattttaaaagaaaaggggggattggggggtacagtgcaggggaaagaatagtagacataatagcaacagacatacaaactaaag

SEQ ID NO: 16824 - DNA, 301 bp, Artificial Sequence
  Crebbp.4_NTC.47
  crRNA array
  misc_feature (148)..(157): n is a, c, g, or t
cttggctttatatatcttgtggaaaggacgaaacaccgtaatttctactaagtgtagattggactagatgactccgtagtaatttctactaagtgtagattctcgtatcgcgattgttaataatttctactaagtgtagatttttttnnnnnnnnnnaagcttggcgtggatccgatatcaactagatcttgagacaaatggcagtattcatccacaattttaaaagaaaaggggggattggggggtacagtgcaggggaaagaatagtagacataatagcaacagacatacaaactaaag

SEQ ID NO: 16825 - DNA, 301 bp, Artificial Sequence
  Crebbp.4_NTC.48
  crRNA array
  misc_feature (148)..(157): n is a, c, g, or t
cttggctttatatatcttgtggaaaggacgaaacaccgtaatttctactaagtgtagattggactagatgactccgtagtaatttctactaagtgtagatcggtcgactacggctgttagtaatttctactaagtgtagatttttttnnnnnnnnnnaagcttggcgtggatccgatatcaactagatcttgagacaaatggcagtattcatccacaattttaaaagaaaaggggggattggggggtacagtgcaggggaaagaatagtagacataatagcaacagacatacaaactaaag

SEQ ID NO: 16826 - DNA, 301 bp, Artificial Sequence
  Crebbp.4_NTC.49
  crRNA array
  misc_feature (148)..(157): n is a, c, g, or t
cttggctttatatatcttgtggaaaggacgaaacaccgtaatttctactaagtgtagattggactagatgactccgtagtaatttctactaagtgtagattcggggcgcgtcaactgaattaatttctactaagtgtagatttttttnnnnnnnnnnaagcttggcgtggatccgatatcaactagatcttgagacaaatggcagtattcatccacaattttaaaagaaaaggggggattggggggtacagtgcaggggaaagaatagtagacataatagcaacagacatacaaactaaag

SEQ ID NO: 16827 - DNA, 301 bp, Artificial Sequence
  Crebbp.4_NTC.5
  crRNA array
  misc_feature (148)..(157): n is a, c, g, or t
cttggctttatatatcttgtggaaaggacgaaacaccgtaatttctactaagtgtagattggactagatgactccgtagtaatttctactaagtgtagatgcttacgcgtcgcgaatgtataatttctactaagtgtagatttttttnnnnnnnnnnaagcttggcgtggatccgatatcaactagatcttgagacaaatggcagtattcatccacaattttaaaagaaaaggggggattggggggtacagtgcaggggaaagaatagtagacataatagcaacagacatacaaactaaag

SEQ ID NO: 16828 - DNA, 301 bp, Artificial Sequence
  Crebbp.4_NTC.50
  crRNA array
  misc_feature (148)..(157): n is a, c, g, or t
cttggctttatatatcttgtggaaaggacgaaacaccgtaatttctactaagtgtagattggactagatgactccgtagtaatttctactaagtgtagatattgccgctcgcgcaaaatctaatttctactaagtgtagatttttttnnnnnnnnnnaagcttggcgtggatccgatatcaactagatcttgagacaaatggcagtattcatccacaattttaaaagaaaaggggggattggggggtacagtgcaggggaaagaatagtagacataatagcaacagacatacaaactaaag

SEQ ID NO: 16829 - DNA, 301 bp, Artificial Sequence
  Crebbp.4_NTC.51
  crRNA array
  misc_feature (148)..(157): n is a, c, g, or t
cttggctttatatatcttgtggaaaggacgaaacaccgtaatttctactaagtgtagattggactagatgactccgtagtaatttctactaagtgtagattaacgcgcaacacgccaatgtaatttctactaagtgtagatttttttnnnnnnnnnnaagcttggcgtggatccgatatcaactagatcttgagacaaatggcagtattcatccacaattttaaaagaaaaggggggattggggggtacagtgcaggggaaagaatagtagacataatagcaacagacatacaaactaaag

SEQ ID NO: 16830 - DNA, 301 bp, Artificial Sequence
  Crebbp.4_NTC.6
  crRNA array
  misc_feature (148)..(157): n is a, c, g, or t
cttggctttatatatcttgtggaaaggacgaaacaccgtaatttctactaagtgtagattggactagatgactccgtagtaatttctactaagtgtagatcgaatcgcgcctacgggaattaatttctactaagtgtagatttttttnnnnnnnnnnaagcttggcgtggatccgatatcaactagatcttgagacaaatggcagtattcatccacaattttaaaagaaaaggggggattggggggtacagtgcaggggaaagaatagtagacataatagcaacagacatacaaactaaag

SEQ ID NO: 16831 - DNA, 301 bp, Artificial Sequence
  Crebbp.4_NTC.7
  crRNA array
  misc_feature (148)..(157): n is a, c, g, or t
cttggctttatatatcttgtggaaaggacgaaacaccgtaatttctactaagtgtagattggactagatgactccgtagtaatttctactaagtgtagatcgccgaacggataagactattaatttctactaagtgtagatttttttnnnnnnnnnnaagcttggcgtggatccgatatcaactagatcttgagacaaatggcagtattcatccacaattttaaaagaaaaggggggattggggggtacagtgcaggggaaagaatagtagacataatagcaacagacatacaaactaaag

SEQ ID NO: 16832 - DNA, 301 bp, Artificial Sequence
  Crebbp.4_NTC.8
  crRNA array
  misc_feature (148)..(157): n is a, c, g, or t
cttggctttatatatcttgtggaaaggacgaaacaccgtaatttctactaagtgtagattggactagatgactccgtagtaatttctactaagtgtagatcgaccgaggttacgctgggataatttctactaagtgtagatttttttnnnnnnnnnnaagcttggcgtggatccgatatcaactagatcttgagacaaatggcagtattcatccacaattttaaaagaaaaggggggattggggggtacagtgcaggggaaagaatagtagacataatagcaacagacatacaaactaaag

SEQ ID NO: 16833 - DNA, 301 bp, Artificial Sequence
  Crebbp.4_NTC.9
  crRNA array
  misc_feature (148)..(157): n is a, c, g, or t
cttggctttatatatcttgtggaaaggacgaaacaccgtaatttctactaagtgtagattggactagatgactccgtagtaatttctactaagtgtagatatcgccgtacggctatggcataatttctactaagtgtagatttttttnnnnnnnnnnaagcttggcgtggatccgatatcaactagatcttgagacaaatggcagtattcatccacaattttaaaagaaaaggggggattggggggtacagtgcaggggaaagaatagtagacataatagcaacagacatacaaactaaag

SEQ ID NO: 16834 - DNA, 301 bp, Artificial Sequence
  Ercc5.1_NTC.0
  crRNA array
  misc_feature (148)..(157): n is a, c, g, or t
cttggctttatatatcttgtggaaaggacgaaacaccgtaatttctactaagtgtagatacggcacgagcaagagacactaatttctactaagtgtagattatagcgtcgcgcgctaatttaatttctactaagtgtagatttttttnnnnnnnnnnaagcttggcgtggatccgatatcaactagatcttgagacaaatggcagtattcatccacaattttaaaagaaaaggggggattggggggtacagtgcaggggaaagaatagtagacataatagcaacagacatacaaactaaag

SEQ ID NO: 16835 - DNA, 301 bp, Artificial Sequence
  Ercc5.1_NTC.1
  crRNA array
  misc_feature (148)..(157): n is a, c, g, or t
cttggctttatatatcttgtggaaaggacgaaacaccgtaatttctactaagtgtagatacggcacgagcaagagacactaatttctactaagtgtagatcgcgtaaccgttccggctcctaatttctactaagtgtagatttttttnnnnnnnnnnaagcttggcgtggatccgatatcaactagatcttgagacaaatggcagtattcatccacaattttaaaagaaaaggggggattggggggtacagtgcaggggaaagaatagtagacataatagcaacagacatacaaactaaag

SEQ ID NO: 16836 - DNA, 301 bp, Artificial Sequence
  Ercc5.1_NTC.10
  crRNA array
  misc_feature (148)..(157): n is a, c, g, or t
cttggctttatatatcttgtggaaaggacgaaacaccgtaatttctactaagtgtagatacggcacgagcaagagacactaatttctactaagtgtagatcgctaagttcgcgcgggccgtaatttctactaagtgtagatttttttnnnnnnnnnnaagcttggcgtggatccgatatcaactagatcttgagacaaatggcagtattcatccacaattttaaaagaaaaggggggattggggggtacagtgcaggggaaagaatagtagacataatagcaacagacatacaaactaaag

SEQ ID NO: 16837 - DNA, 301 bp, Artificial Sequence
  Ercc5.1_NTC.11
  crRNA array
  misc_feature (148)..(157): n is a, c, g, or t
cttggctttatatatcttgtggaaaggacgaaacaccgtaatttctactaagtgtagatacggcacgagcaagagacactaatttctactaagtgtagatcgttcgtcgacgaagcaatctaatttctactaagtgtagatttttttnnnnnnnnnnaagcttggcgtggatccgatatcaactagatcttgagacaaatggcagtattcatccacaattttaaaagaaaaggggggattggggggtacagtgcaggggaaagaatagtagacataatagcaacagacatacaaactaaag

SEQ ID NO: 16838 - DNA, 301 bp, Artificial Sequence
  Ercc5.1_NTC.12
  crRNA array
  misc_feature (148)..(157): n is a, c, g, or t
cttggctttatatatcttgtggaaaggacgaaacaccgtaatttctactaagtgtagatacggcacgagcaagagacactaatttctactaagtgtagatcgccgacgattaatcaatagtaatttctactaagtgtagatttttttnnnnnnnnnnaagcttggcgtggatccgatatcaactagatcttgagacaaatggcagtattcatccacaattttaaaagaaaaggggggattggggggtacagtgcaggggaaagaatagtagacataatagcaacagacatacaaactaaag

SEQ ID NO: 16839 - DNA, 301 bp, Artificial Sequence
  Ercc5.1_NTC.13
  crRNA array
  misc_feature (148)..(157): n is a, c, g, or t
cttggctttatatatcttgtggaaaggacgaaacaccgtaatttctactaagtgtagatacggcacgagcaagagacactaatttctactaagtgtagatgaccgttgtatcgcgatcaataatttctactaagtgtagatttttttnnnnnnnnnnaagcttggcgtggatccgatatcaactagatcttgagacaaatggcagtattcatccacaattttaaaagaaaaggggggattggggggtacagtgcaggggaaagaatagtagacataatagcaacagacatacaaactaaag

SEQ ID NO: 16840 - DNA, 301 bp, Artificial Sequence
  Ercc5.1_NTC.14
  crRNA array
  misc_feature (148)..(157): n is a, c, g, or t
cttggctttatatatcttgtggaaaggacgaaacaccgtaatttctactaagtgtagatacggcacgagcaagagacactaatttctactaagtgtagatccgttcgtgcgatagtgttttaatttctactaagtgtagatttttttnnnnnnnnnnaagcttggcgtggatccgatatcaactagatcttgagacaaatggcagtattcatccacaattttaaaagaaaaggggggattggggggtacagtgcaggggaaagaatagtagacataatagcaacagacatacaaactaaag

SEQ ID NO: 16841 - DNA, 301 bp, Artificial Sequence
  Ercc5.1_NTC.15
  crRNA array
  misc_feature (148)..(157): n is a, c, g, or t
cttggctttatatatcttgtggaaaggacgaaacaccgtaatttctactaagtgtagatacggcacgagcaagagacactaatttctactaagtgtagatgttgtcgtgccgcgaatttataatttctactaagtgtagatttttttnnnnnnnnnnaagcttggcgtggatccgatatcaactagatcttgagacaaatggcagtattcatccacaattttaaaagaaaaggggggattggggggtacagtgcaggggaaagaatagtagacataatagcaacagacatacaaactaaag

SEQ ID NO: 16842 - DNA, 301 bp, Artificial Sequence
  Ercc5.1_NTC.16
  crRNA array
  misc_feature (148)..(157): n is a, c, g, or t
cttggctttatatatcttgtggaaaggacgaaacaccgtaatttctactaagtgtagatacggcacgagcaagagacactaatttctactaagtgtagatcggtacgttagacgaaaatttaatttctactaagtgtagatttttttnnnnnnnnnnaagcttggcgtggatccgatatcaactagatcttgagacaaatggcagtattcatccacaattttaaaagaaaaggggggattggggggtacagtgcaggggaaagaatagtagacataatagcaacagacatacaaactaaag

SEQ ID NO: 16843 - DNA, 301 bp, Artificial Sequence
  Ercc5.1_NTC.17
  crRNA array
  misc_feature (148)..(157): n is a, c, g, or t
cttggctttatatatcttgtggaaaggacgaaacaccgtaatttctactaagtgtagatacggcacgagcaagagacactaatttctactaagtgtagattatcgaacgctatcgaacgttaatttctactaagtgtagatttttttnnnnnnnnnnaagcttggcgtggatccgatatcaactagatcttgagacaaatggcagtattcatccacaattttaaaagaaaaggggggattggggggtacagtgcaggggaaagaatagtagacataatagcaacagacatacaaactaaag

SEQ ID NO: 16844 - DNA, 301 bp, Artificial Sequence
  Ercc5.1_NTC.18
  crRNA array
  misc_feature (148)..(157): n is a, c, g, or t
cttggctttatatatcttgtggaaaggacgaaacaccgtaatttctactaagtgtagatacggcacgagcaagagacactaatttctactaagtgtagattccggttacgaccggcaaaataatttctactaagtgtagatttttttnnnnnnnnnnaagcttggcgtggatccgatatcaactagatcttgagacaaatggcagtattcatccacaattttaaaagaaaaggggggattggggggtacagtgcaggggaaagaatagtagacataatagcaacagacatacaaactaaag

SEQ ID NO: 16845 - DNA, 301 bp, Artificial Sequence
  Ercc5.1_NTC.19
  crRNA array
  misc_feature (148)..(157): n is a, c, g, or t
cttggctttatatatcttgtggaaaggacgaaacaccgtaatttctactaagtgtagatacggcacgagcaagagacactaatttctactaagtgtagatcgtcgtagaacgatacccgataatttctactaagtgtagatttttttnnnnnnnnnnaagcttggcgtggatccgatatcaactagatcttgagacaaatggcagtattcatccacaattttaaaagaaaaggggggattggggggtacagtgcaggggaaagaatagtagacataatagcaacagacatacaaactaaag

SEQ ID NO: 16846 - DNA, 301 bp, Artificial Sequence
  Ercc5.1_NTC.2
  crRNA array
  misc_feature (148)..(157): n is a, c, g, or t
cttggctttatatatcttgtggaaaggacgaaacaccgtaatttctactaagtgtagatacggcacgagcaagagacactaatttctactaagtgtagatttatgtcgcgccgcgacccgtaatttctactaagtgtagatttttttnnnnnnnnnnaagcttggcgtggatccgatatcaactagatcttgagacaaatggcagtattcatccacaattttaaaagaaaaggggggattggggggtacagtgcaggggaaagaatagtagacataatagcaacagacatacaaactaaag

SEQ ID NO: 16847 - DNA, 301 bp, Artificial Sequence
  Ercc5.1_NTC.20
  crRNA array
  misc_feature (148)..(157): n is a, c, g, or t
cttggctttatatatcttgtggaaaggacgaaacaccgtaatttctactaagtgtagatacggcacgagcaagagacactaatttctactaagtgtagatattccggcgcgaccagaagataatttctactaagtgtagatttttttnnnnnnnnnnaagcttggcgtggatccgatatcaactagatcttgagacaaatggcagtattcatccacaattttaaaagaaaaggggggattggggggtacagtgcaggggaaagaatagtagacataatagcaacagacatacaaactaaag

SEQ ID NO: 16848 - DNA, 301 bp, Artificial Sequence
  Ercc5.1_NTC.21
  crRNA array
  misc_feature (148)..(157): n is a, c, g, or t
cttggctttatatatcttgtggaaaggacgaaacaccgtaatttctactaagtgtagatacggcacgagcaagagacactaatttctactaagtgtagatgtataacttcgcgcggtccgtaatttctactaagtgtagatttttttnnnnnnnnnnaagcttggcgtggatccgatatcaactagatcttgagacaaatggcagtattcatccacaattttaaaagaaaaggggggattggggggtacagtgcaggggaaagaatagtagacataatagcaacagacatacaaactaaag

SEQ ID NO: 16849 - DNA, 301 bp, Artificial Sequence
  Ercc5.1_NTC.22
  crRNA array
  misc_feature (148)..(157): n is a, c, g, or t
cttggctttatatatcttgtggaaaggacgaaacaccgtaatttctactaagtgtagatacggcacgagcaagagacactaatttctactaagtgtagatgcgcgtcaacgtaatgtgcctaatttctactaagtgtagatttttttnnnnnnnnnnaagcttggcgtggatccgatatcaactagatcttgagacaaatggcagtattcatccacaattttaaaagaaaaggggggattggggggtacagtgcaggggaaagaatagtagacataatagcaacagacatacaaactaaag

SEQ ID NO: 16850 - DNA, 301 bp, Artificial Sequence
  Ercc5.1_NTC.23
  crRNA array
  misc_feature (148)..(157): n is a, c, g, or t
cttggctttatatatcttgtggaaaggacgaaacaccgtaatttctactaagtgtagatacggcacgagcaagagacactaatttctactaagtgtagatacgcgctattatcgtaggtgtaatttctactaagtgtagatttttttnnnnnnnnnnaagcttggcgtggatccgatatcaactagatcttgagacaaatggcagtattcatccacaattttaaaagaaaaggggggattggggggtacagtgcaggggaaagaatagtagacataatagcaacagacatacaaactaaag

SEQ ID NO: 16851 - DNA, 301 bp, Artificial Sequence
  Ercc5.1_NTC.24
  crRNA array
  misc_feature (148)..(157): n is a, c, g, or t
cttggctttatatatcttgtggaaaggacgaaacaccgtaatttctactaagtgtagatacggcacgagcaagagacactaatttctactaagtgtagatactatcgacgttcgtcccggtaatttctactaagtgtagatttttttnnnnnnnnnnaagcttggcgtggatccgatatcaactagatcttgagacaaatggcagtattcatccacaattttaaaagaaaaggggggattggggggtacagtgcaggggaaagaatagtagacataatagcaacagacatacaaactaaag

SEQ ID NO: 16852 - DNA, 301 bp, Artificial Sequence
  Ercc5.1_NTC.25
  crRNA array
  misc_feature (148)..(157): n is a, c, g, or t
cttggctttatatatcttgtggaaaggacgaaacaccgtaatttctactaagtgtagatacggcacgagcaagagacactaatttctactaagtgtagattcgcgttatcgtgccgtgcgtaatttctactaagtgtagatttttttnnnnnnnnnnaagcttggcgtggatccgatatcaactagatcttgagacaaatggcagtattcatccacaattttaaaagaaaaggggggattggggggtacagtgcaggggaaagaatagtagacataatagcaacagacatacaaactaaag

SEQ ID NO: 16853 - DNA, 301 bp, Artificial Sequence
  Ercc5.1_NTC.26
  crRNA array
  misc_feature (148)..(157): n is a, c, g, or t
cttggctttatatatcttgtggaaaggacgaaacaccgtaatttctactaagtgtagatacggcacgagcaagagacactaatttctactaagtgtagatcgcgacggcggttttaacactaatttctactaagtgtagatttttttnnnnnnnnnnaagcttggcgtggatccgatatcaactagatcttgagacaaatggcagtattcatccacaattttaaaagaaaaggggggattggggggtacagtgcaggggaaagaatagtagacataatagcaacagacatacaaactaaag

SEQ ID NO: 16854 - DNA, 301 bp, Artificial Sequence
  Ercc5.1_NTC.27
  crRNA array
  misc_feature (148)..(157): n is a, c, g, or t
cttggctttatatatcttgtggaaaggacgaaacaccgtaatttctactaagtgtagatacggcacgagcaagagacactaatttctactaagtgtagatgtcgcgttgcgaccggcgcttaatttctactaagtgtagatttttttnnnnnnnnnnaagcttggcgtggatccgatatcaactagatcttgagacaaatggcagtattcatccacaattttaaaagaaaaggggggattggggggtacagtgcaggggaaagaatagtagacataatagcaacagacatacaaactaaag

SEQ ID NO: 16855 - DNA, 301 bp, Artificial Sequence
  Ercc5.1_NTC.28
  crRNA array
  misc_feature (148)..(157): n is a, c, g, or t
cttggctttatatatcttgtggaaaggacgaaacaccgtaatttctactaagtgtagatacggcacgagcaagagacactaatttctactaagtgtagataccgctaatcggcgtaaacttaatttctactaagtgtagatttttttnnnnnnnnnnaagcttggcgtggatccgatatcaactagatcttgagacaaatggcagtattcatccacaattttaaaagaaaaggggggattggggggtacagtgcaggggaaagaatagtagacataatagcaacagacatacaaactaaag

SEQ ID NO: 16856 - DNA, 301 bp, Artificial Sequence
  Ercc5.1_NTC.29
  crRNA array
  misc_feature (148)..(157): n is a, c, g, or t
cttggctttatatatcttgtggaaaggacgaaacaccgtaatttctactaagtgtagatacggcacgagcaagagacactaatttctactaagtgtagatcgcgatctataccgtctatataatttctactaagtgtagatttttttnnnnnnnnnnaagcttggcgtggatccgatatcaactagatcttgagacaaatggcagtattcatccacaattttaaaagaaaaggggggattggggggtacagtgcaggggaaagaatagtagacataatagcaacagacatacaaactaaag

SEQ ID NO: 16857 - DNA, 301 bp, Artificial Sequence
  Ercc5.1_NTC.3
  crRNA array
  misc_feature (148)..(157): n is a, c, g, or t
cttggctttatatatcttgtggaaaggacgaaacaccgtaatttctactaagtgtagatacggcacgagcaagagacactaatttctactaagtgtagattcgacgcgagacgacgtacataatttctactaagtgtagatttttttnnnnnnnnnnaagcttggcgtggatccgatatcaactagatcttgagacaaatggcagtattcatccacaattttaaaagaaaaggggggattggggggtacagtgcaggggaaagaatagtagacataatagcaacagacatacaaactaaag

SEQ ID NO: 16858 - DNA, 301 bp, Artificial Sequence
  Ercc5.1_NTC.30
  crRNA array
  misc_feature (148)..(157): n is a, c, g, or t
cttggctttatatatcttgtggaaaggacgaaacaccgtaatttctactaagtgtagatacggcacgagcaagagacactaatttctactaagtgtagatcgatcgtacgggtgtcctaataatttctactaagtgtagatttttttnnnnnnnnnnaagcttggcgtggatccgatatcaactagatcttgagacaaatggcagtattcatccacaattttaaaagaaaaggggggattggggggtacagtgcaggggaaagaatagtagacataatagcaacagacatacaaactaaag

SEQ ID NO: 16859 - DNA, 301 bp, Artificial Sequence
  Ercc5.1_NTC.31
  crRNA array
  misc_feature (148)..(157): n is a, c, g, or t
cttggctttatatatcttgtggaaaggacgaaacaccgtaatttctactaagtgtagatacggcacgagcaagagacactaatttctactaagtgtagatgccgaccgcgtgattgtaggtaatttctactaagtgtagatttttttnnnnnnnnnnaagcttggcgtggatccgatatcaactagatcttgagacaaatggcagtattcatccacaattttaaaagaaaaggggggattggggggtacagtgcaggggaaagaatagtagacataatagcaacagacatacaaactaaag

SEQ ID NO: 16860 - DNA, 301 bp, Artificial Sequence
  Ercc5.1_NTC.32
  crRNA array
  misc_feature (148)..(157): n is a, c, g, or t
cttggctttatatatcttgtggaaaggacgaaacaccgtaatttctactaagtgtagatacggcacgagcaagagacactaatttctactaagtgtagatgcacgttacgcccgggtcactaatttctactaagtgtagatttttttnnnnnnnnnnaagcttggcgtggatccgatatcaactagatcttgagacaaatggcagtattcatccacaattttaaaagaaaaggggggattggggggtacagtgcaggggaaagaatagtagacataatagcaacagacatacaaactaaag

SEQ ID NO: 16861 - DNA, 301 bp, Artificial Sequence
  Ercc5.1_NTC.33
  crRNA array
  misc_feature (148)..(157): n is a, c, g, or t
cttggctttatatatcttgtggaaaggacgaaacaccgtaatttctactaagtgtagatacggcacgagcaagagacactaatttctactaagtgtagattaagcgaccgacgcattcgctaatttctactaagtgtagatttttttnnnnnnnnnnaagcttggcgtggatccgatatcaactagatcttgagacaaatggcagtattcatccacaattttaaaagaaaaggggggattggggggtacagtgcaggggaaagaatagtagacataatagcaacagacatacaaactaaag

SEQ ID NO: 16862 - DNA, 301 bp, Artificial Sequence
  Ercc5.1_NTC.34
  crRNA array
  misc_feature (148)..(157): n is a, c, g, or t
cttggctttatatatcttgtggaaaggacgaaacaccgtaatttctactaagtgtagatacggcacgagcaagagacactaatttctactaagtgtagattagcgttcgacacgtgaaactaatttctactaagtgtagatttttttnnnnnnnnnnaagcttggcgtggatccgatatcaactagatcttgagacaaatggcagtattcatccacaattttaaaagaaaaggggggattggggggtacagtgcaggggaaagaatagtagacataatagcaacagacatacaaactaaag

SEQ ID NO: 16863 - DNA, 301 bp, Artificial Sequence
  Ercc5.1_NTC.35
  crRNA array
  misc_feature (148)..(157): n is a, c, g, or t
cttggctttatatatcttgtggaaaggacgaaacaccgtaatttctactaagtgtagatacggcacgagcaagagacactaatttctactaagtgtagattggcgcgtaatcgctattcgtaatttctactaagtgtagatttttttnnnnnnnnnnaagcttggcgtggatccgatatcaactagatcttgagacaaatggcagtattcatccacaattttaaaagaaaaggggggattggggggtacagtgcaggggaaagaatagtagacataatagcaacagacatacaaactaaag

SEQ ID NO: 16864 - DNA, 301 bp, Artificial Sequence
  Ercc5.1_NTC.36
  crRNA array
  misc_feature (148)..(157): n is a, c, g, or t
cttggctttatatatcttgtggaaaggacgaaacaccgtaatttctactaagtgtagatacggcacgagcaagagacactaatttctactaagtgtagatcaacccgccgtagcgggccttaatttctactaagtgtagatttttttnnnnnnnnnnaagcttggcgtggatccgatatcaactagatcttgagacaaatggcagtattcatccacaattttaaaagaaaaggggggattggggggtacagtgcaggggaaagaatagtagacataatagcaacagacatacaaactaaag

SEQ ID NO: 16865 - DNA, 301 bp, Artificial Sequence
  Ercc5.1_NTC.37
  crRNA array
  misc_feature (148)..(157): n is a, c, g, or t
cttggctttatatatcttgtggaaaggacgaaacaccgtaatttctactaagtgtagatacggcacgagcaagagacactaatttctactaagtgtagattttgcgttgacgcgattacttaatttctactaagtgtagatttttttnnnnnnnnnnaagcttggcgtggatccgatatcaactagatcttgagacaaatggcagtattcatccacaattttaaaagaaaaggggggattggggggtacagtgcaggggaaagaatagtagacataatagcaacagacatacaaactaaag

SEQ ID NO: 16866 - DNA, 301 bp, Artificial Sequence
  Ercc5.1_NTC.38
  crRNA array
  misc_feature (148)..(157): n is a, c, g, or t
cttggctttatatatcttgtggaaaggacgaaacaccgtaatttctactaagtgtagatacggcacgagcaagagacactaatttctactaagtgtagataacggagcgcgatactaccataatttctactaagtgtagatttttttnnnnnnnnnnaagcttggcgtggatccgatatcaactagatcttgagacaaatggcagtattcatccacaattttaaaagaaaaggggggattggggggtacagtgcaggggaaagaatagtagacataatagcaacagacatacaaactaaag

SEQ ID NO: 16867 - DNA, 301 bp, Artificial Sequence
  Ercc5.1_NTC.39
  crRNA array
  misc_feature (148)..(157): n is a, c, g, or t
cttggctttatatatcttgtggaaaggacgaaacaccgtaatttctactaagtgtagatacggcacgagcaagagacactaatttctactaagtgtagatccggacgttataacgtttcttaatttctactaagtgtagatttttttnnnnnnnnnnaagcttggcgtggatccgatatcaactagatcttgagacaaatggcagtattcatccacaattttaaaagaaaaggggggattggggggtacagtgcaggggaaagaatagtagacataatagcaacagacatacaaactaaag

SEQ ID NO: 16868 - DNA, 301 bp, Artificial Sequence
  Ercc5.1_NTC.4
  crRNA array
  misc_feature (148)..(157): n is a, c, g, or t
cttggctttatatatcttgtggaaaggacgaaacaccgtaatttctactaagtgtagatacggcacgagcaagagacactaatttctactaagtgtagatatacccgtcgcgaacgtgagtaatttctactaagtgtagatttttttnnnnnnnnnnaagcttggcgtggatccgatatcaactagatcttgagacaaatggcagtattcatccacaattttaaaagaaaaggggggattggggggtacagtgcaggggaaagaatagtagacataatagcaacagacatacaaactaaag

SEQ ID NO: 16869 - DNA, 301 bp, Artificial Sequence
  Ercc5.1_NTC.40
  crRNA array
  misc_feature (148)..(157): n is a, c, g, or t
cttggctttatatatcttgtggaaaggacgaaacaccgtaatttctactaagtgtagatacggcacgagcaagagacactaatttctactaagtgtagatattcgcgaacccggccggaataatttctactaagtgtagatttttttnnnnnnnnnnaagcttggcgtggatccgatatcaactagatcttgagacaaatggcagtattcatccacaattttaaaagaaaaggggggattggggggtacagtgcaggggaaagaatagtagacataatagcaacagacatacaaactaaag

SEQ ID NO: 16870 - DNA, 301 bp, Artificial Sequence
  Ercc5.1_NTC.41
  crRNA array
  misc_feature (148)..(157): n is a, c, g, or t
cttggctttatatatcttgtggaaaggacgaaacaccgtaatttctactaagtgtagatacggcacgagcaagagacactaatttctactaagtgtagatttgatggcgcgacgcgttattaatttctactaagtgtagatttttttnnnnnnnnnnaagcttggcgtggatccgatatcaactagatcttgagacaaatggcagtattcatccacaattttaaaagaaaaggggggattggggggtacagtgcaggggaaagaatagtagacataatagcaacagacatacaaactaaag

SEQ ID NO: 16871 - DNA, 301 bp, Artificial Sequence
  Ercc5.1_NTC.42
  crRNA array
  misc_feature (148)..(157): n is a, c, g, or t
cttggctttatatatcttgtggaaaggacgaaacaccgtaatttctactaagtgtagatacggcacgagcaagagacactaatttctactaagtgtagatggtcaaatcgcggcgataactaatttctactaagtgtagatttttttnnnnnnnnnnaagcttggcgtggatccgatatcaactagatcttgagacaaatggcagtattcatccacaattttaaaagaaaaggggggattggggggtacagtgcaggggaaagaatagtagacataatagcaacagacatacaaactaaag

SEQ ID NO: 16872 - DNA, 301 bp, Artificial Sequence
  Ercc5.1_NTC.43
  crRNA array
  misc_feature (148)..(157): n is a, c, g, or t
cttggctttatatatcttgtggaaaggacgaaacaccgtaatttctactaagtgtagatacggcacgagcaagagacactaatttctactaagtgtagatcgactcgcgcattgaactggtaatttctactaagtgtagatttttttnnnnnnnnnnaagcttggcgtggatccgatatcaactagatcttgagacaaatggcagtattcatccacaattttaaaagaaaaggggggattggggggtacagtgcaggggaaagaatagtagacataatagcaacagacatacaaactaaag

SEQ ID NO: 16873 - DNA, 301 bp, Artificial Sequence
  Ercc5.1_NTC.44
  crRNA array
  misc_feature (148)..(157): n is a, c, g, or t
cttggctttatatatcttgtggaaaggacgaaacaccgtaatttctactaagtgtagatacggcacgagcaagagacactaatttctactaagtgtagatagcgtcgtacgatttatcgttaatttctactaagtgtagatttttttnnnnnnnnnnaagcttggcgtggatccgatatcaactagatcttgagacaaatggcagtattcatccacaattttaaaagaaaaggggggattggggggtacagtgcaggggaaagaatagtagacataatagcaacagacatacaaactaaag

SEQ ID NO: 16874 - DNA, 301 bp, Artificial Sequence
  Ercc5.1_NTC.45
  crRNA array
  misc_feature (148)..(157): n is a, c, g, or t
cttggctttatatatcttgtggaaaggacgaaacaccgtaatttctactaagtgtagatacggcacgagcaagagacactaatttctactaagtgtagatcggaacgcgtgatactagggtaatttctactaagtgtagatttttttnnnnnnnnnnaagcttggcgtggatccgatatcaactagatcttgagacaaatggcagtattcatccacaattttaaaagaaaaggggggattggggggtacagtgcaggggaaagaatagtagacataatagcaacagacatacaaactaaag

SEQ ID NO: 16875 - DNA, 301 bp, Artificial Sequence
  Ercc5.1_NTC.46
  crRNA array
  misc_feature (148)..(157): n is a, c, g, or t
cttggctttatatatcttgtggaaaggacgaaacaccgtaatttctactaagtgtagatacggcacgagcaagagacactaatttctactaagtgtagatagcgggtcgtagacgcgcggtaatttctactaagtgtagatttttttnnnnnnnnnnaagcttggcgtggatccgatatcaactagatcttgagacaaatggcagtattcatccacaattttaaaagaaaaggggggattggggggtacagtgcaggggaaagaatagtagacataatagcaacagacatacaaactaaag

SEQ ID NO: 16876 - DNA, 301 bp, Artificial Sequence
  Ercc5.1_NTC.47
  crRNA array
  misc_feature (148)..(157): n is a, c, g, or t
cttggctttatatatcttgtggaaaggacgaaacaccgtaatttctactaagtgtagatacggcacgagcaagagacactaatttctactaagtgtagattctcgtatcgcgattgttaataatttctactaagtgtagatttttttnnnnnnnnnnaagcttggcgtggatccgatatcaactagatcttgagacaaatggcagtattcatccacaattttaaaagaaaaggggggattggggggtacagtgcaggggaaagaatagtagacataatagcaacagacatacaaactaaag

SEQ ID NO: 16877 - DNA, 301 bp, Artificial Sequence
  Ercc5.1_NTC.48
  crRNA array
  misc_feature (148)..(157): n is a, c, g, or t
cttggctttatatatcttgtggaaaggacgaaacaccgtaatttctactaagtgtagatacggcacgagcaagagacactaatttctactaagtgtagatcggtcgactacggctgttagtaatttctactaagtgtagatttttttnnnnnnnnnnaagcttggcgtggatccgatatcaactagatcttgagacaaatggcagtattcatccacaattttaaaagaaaaggggggattggggggtacagtgcaggggaaagaatagtagacataatagcaacagacatacaaactaaag

SEQ ID NO: 16878 - DNA, 301 bp, Artificial Sequence
  Ercc5.1_NTC.49
  crRNA array
  misc_feature (148)..(157): n is a, c, g, or t
cttggctttatatatcttgtggaaaggacgaaacaccgtaatttctactaagtgtagatacggcacgagcaagagacactaatttctactaagtgtagattcggggcgcgtcaactgaattaatttctactaagtgtagatttttttnnnnnnnnnnaagcttggcgtggatccgatatcaactagatcttgagacaaatggcagtattcatccacaattttaaaagaaaaggggggattggggggtacagtgcaggggaaagaatagtagacataatagcaacagacatacaaactaaag

SEQ ID NO: 16879 - DNA, 301 bp, Artificial Sequence
  Ercc5.1_NTC.5
  crRNA array
  misc_feature (148)..(157): n is a, c, g, or t
cttggctttatatatcttgtggaaaggacgaaacaccgtaatttctactaagtgtagatacggcacgagcaagagacactaatttctactaagtgtagatgcttacgcgtcgcgaatgtataatttctactaagtgtagatttttttnnnnnnnnnnaagcttggcgtggatccgatatcaactagatcttgagacaaatggcagtattcatccacaattttaaaagaaaaggggggattggggggtacagtgcaggggaaagaatagtagacataatagcaacagacatacaaactaaag

SEQ ID NO: 16880 - DNA, 301 bp, Artificial Sequence
  Ercc5.1_NTC.50
  crRNA array
  misc_feature (148)..(157): n is a, c, g, or t
cttggctttatatatcttgtggaaaggacgaaacaccgtaatttctactaagtgtagatacggcacgagcaagagacactaatttctactaagtgtagatattgccgctcgcgcaaaatctaatttctactaagtgtagatttttttnnnnnnnnnnaagcttggcgtggatccgatatcaactagatcttgagacaaatggcagtattcatccacaattttaaaagaaaaggggggattggggggtacagtgcaggggaaagaatagtagacataatagcaacagacatacaaactaaag

SEQ ID NO: 16881 - DNA, 301 bp, Artificial Sequence
  Ercc5.1_NTC.51
  crRNA array
  misc_feature (148)..(157): n is a, c, g, or t
cttggctttatatatcttgtggaaaggacgaaacaccgtaatttctactaagtgtagatacggcacgagcaagagacactaatttctactaagtgtagattaacgcgcaacacgccaatgtaatttctactaagtgtagatttttttnnnnnnnnnnaagcttggcgtggatccgatatcaactagatcttgagacaaatggcagtattcatccacaattttaaaagaaaaggggggattggggggtacagtgcaggggaaagaatagtagacataatagcaacagacatacaaactaaag

SEQ ID NO: 16882 - DNA, 301 bp, Artificial Sequence
  Ercc5.1_NTC.6
  crRNA array
  misc_feature (148)..(157): n is a, c, g, or t
cttggctttatatatcttgtggaaaggacgaaacaccgtaatttctactaagtgtagatacggcacgagcaagagacactaatttctactaagtgtagatcgaatcgcgcctacgggaattaatttctactaagtgtagatttttttnnnnnnnnnnaagcttggcgtggatccgatatcaactagatcttgagacaaatggcagtattcatccacaattttaaaagaaaaggggggattggggggtacagtgcaggggaaagaatagtagacataatagcaacagacatacaaactaaag

SEQ ID NO: 16883 - DNA, 301 bp, Artificial Sequence
  Ercc5.1_NTC.7
  crRNA array
  misc_feature (148)..(157): n is a, c, g, or t
cttggctttatatatcttgtggaaaggacgaaacaccgtaatttctactaagtgtagatacggcacgagcaagagacactaatttctactaagtgtagatcgccgaacggataagactattaatttctactaagtgtagatttttttnnnnnnnnnnaagcttggcgtggatccgatatcaactagatcttgagacaaatggcagtattcatccacaattttaaaagaaaaggggggattggggggtacagtgcaggggaaagaatagtagacataatagcaacagacatacaaactaaag

SEQ ID NO: 16884 - DNA, 301 bp, Artificial Sequence
  Ercc5.1_NTC.8
  crRNA array
  misc_feature (148)..(157): n is a, c, g, or t
cttggctttatatatcttgtggaaaggacgaaacaccgtaatttctactaagtgtagatacggcacgagcaagagacactaatttctactaagtgtagatcgaccgaggttacgctgggataatttctactaagtgtagatttttttnnnnnnnnnnaagcttggcgtggatccgatatcaactagatcttgagacaaatggcagtattcatccacaattttaaaagaaaaggggggattggggggtacagtgcaggggaaagaatagtagacataatagcaacagacatacaaactaaag

SEQ ID NO: 16885 - DNA, 301 bp, Artificial Sequence
  Ercc5.1_NTC.9
  crRNA array
  misc_feature (148)..(157): n is a, c, g, or t
cttggctttatatatcttgtggaaaggacgaaacaccgtaatttctactaagtgtagatacggcacgagcaagagacactaatttctactaagtgtagatatcgccgtacggctatggcataatttctactaagtgtagatttttttnnnnnnnnnnaagcttggcgtggatccgatatcaactagatcttgagacaaatggcagtattcatccacaattttaaaagaaaaggggggattggggggtacagtgcaggggaaagaatagtagacataatagcaacagacatacaaactaaag

SEQ ID NO: 16886 - DNA, 301 bp, Artificial Sequence
  Ercc5.2_NTC.0
  crRNA array
  misc_feature (148)..(157): n is a, c, g, or t
cttggctttatatatcttgtggaaaggacgaaacaccgtaatttctactaagtgtagatgagtatcacatcggtgactctaatttctactaagtgtagattatagcgtcgcgcgctaatttaatttctactaagtgtagatttttttnnnnnnnnnnaagcttggcgtggatccgatatcaactagatcttgagacaaatggcagtattcatccacaattttaaaagaaaaggggggattggggggtacagtgcaggggaaagaatagtagacataatagcaacagacatacaaactaaag

SEQ ID NO: 16887 - DNA, 301 bp, Artificial Sequence
  Ercc5.2_NTC.1
  crRNA array
  misc_feature (148)..(157): n is a, c, g, or t
cttggctttatatatcttgtggaaaggacgaaacaccgtaatttctactaagtgtagatgagtatcacatcggtgactctaatttctactaagtgtagatcgcgtaaccgttccggctcctaatttctactaagtgtagatttttttnnnnnnnnnnaagcttggcgtggatccgatatcaactagatcttgagacaaatggcagtattcatccacaattttaaaagaaaaggggggattggggggtacagtgcaggggaaagaatagtagacataatagcaacagacatacaaactaaag

SEQ ID NO: 16888 - DNA, 301 bp, Artificial Sequence
  Ercc5.2_NTC.10
  crRNA array
  misc_feature (148)..(157): n is a, c, g, or t
cttggctttatatatcttgtggaaaggacgaaacaccgtaatttctactaagtgtagatgagtatcacatcggtgactctaatttctactaagtgtagatcgctaagttcgcgcgggccgtaatttctactaagtgtagatttttttnnnnnnnnnnaagcttggcgtggatccgatatcaactagatcttgagacaaatggcagtattcatccacaattttaaaagaaaaggggggattggggggtacagtgcaggggaaagaatagtagacataatagcaacagacatacaaactaaag

SEQ ID NO: 16889 - DNA, 301 bp, Artificial Sequence
  Ercc5.2_NTC.11
  crRNA array
  misc_feature (148)..(157): n is a, c, g, or t
cttggctttatatatcttgtggaaaggacgaaacaccgtaatttctactaagtgtagatgagtatcacatcggtgactctaatttctactaagtgtagatcgttcgtcgacgaagcaatctaatttctactaagtgtagatttttttnnnnnnnnnnaagcttggcgtggatccgatatcaactagatcttgagacaaatggcagtattcatccacaattttaaaagaaaaggggggattggggggtacagtgcaggggaaagaatagtagacataatagcaacagacatacaaactaaag

SEQ ID NO: 16890 - DNA, 301 bp, Artificial Sequence
  Ercc5.2_NTC.12
  crRNA array
  misc_feature (148)..(157): n is a, c, g, or t
cttggctttatatatcttgtggaaaggacgaaacaccgtaatttctactaagtgtagatgagtatcacatcggtgactctaatttctactaagtgtagatcgccgacgattaatcaatagtaatttctactaagtgtagatttttttnnnnnnnnnnaagcttggcgtggatccgatatcaactagatcttgagacaaatggcagtattcatccacaattttaaaagaaaaggggggattggggggtacagtgcaggggaaagaatagtagacataatagcaacagacatacaaactaaag

SEQ ID NO: 16891 - DNA, 301 bp, Artificial Sequence
  Ercc5.2_NTC.13
  crRNA array
  misc_feature (148)..(157): n is a, c, g, or t
cttggctttatatatcttgtggaaaggacgaaacaccgtaatttctactaagtgtagatgagtatcacatcggtgactctaatttctactaagtgtagatgaccgttgtatcgcgatcaataatttctactaagtgtagatttttttnnnnnnnnnnaagcttggcgtggatccgatatcaactagatcttgagacaaatggcagtattcatccacaattttaaaagaaaaggggggattggggggtacagtgcaggggaaagaatagtagacataatagcaacagacatacaaactaaag

SEQ ID NO: 16892 - DNA, 301 bp, Artificial Sequence
  Ercc5.2_NTC.14
  crRNA array
  misc_feature (148)..(157): n is a, c, g, or t
cttggctttatatatcttgtggaaaggacgaaacaccgtaatttctactaagtgtagatgagtatcacatcggtgactctaatttctactaagtgtagatccgttcgtgcgatagtgttttaatttctactaagtgtagatttttttnnnnnnnnnnaagcttggcgtggatccgatatcaactagatcttgagacaaatggcagtattcatccacaattttaaaagaaaaggggggattggggggtacagtgcaggggaaagaatagtagacataatagcaacagacatacaaactaaag

SEQ ID NO: 16893 - DNA, 301 bp, Artificial Sequence
  Ercc5.2_NTC.15
  crRNA array
  misc_feature (148)..(157): n is a, c, g, or t
cttggctttatatatcttgtggaaaggacgaaacaccgtaatttctactaagtgtagatgagtatcacatcggtgactctaatttctactaagtgtagatgttgtcgtgccgcgaatttataatttctactaagtgtagatttttttnnnnnnnnnnaagcttggcgtggatccgatatcaactagatcttgagacaaatggcagtattcatccacaattttaaaagaaaaggggggattggggggtacagtgcaggggaaagaatagtagacataatagcaacagacatacaaactaaag

SEQ ID NO: 16894 - DNA, 301 bp, Artificial Sequence
  Ercc5.2_NTC.16
  crRNA array
  misc_feature (148)..(157): n is a, c, g, or t
cttggctttatatatcttgtggaaaggacgaaacaccgtaatttctactaagtgtagatgagtatcacatcggtgactctaatttctactaagtgtagatcggtacgttagacgaaaatttaatttctactaagtgtagatttttttnnnnnnnnnnaagcttggcgtggatccgatatcaactagatcttgagacaaatggcagtattcatccacaattttaaaagaaaaggggggattggggggtacagtgcaggggaaagaatagtagacataatagcaacagacatacaaactaaag

SEQ ID NO: 16895 - DNA, 301 bp, Artificial Sequence
  Ercc5.2_NTC.17
  crRNA array
  misc_feature (148)..(157): n is a, c, g, or t
cttggctttatatatcttgtggaaaggacgaaacaccgtaatttctactaagtgtagatgagtatcacatcggtgactctaatttctactaagtgtagattatcgaacgctatcgaacgttaatttctactaagtgtagatttttttnnnnnnnnnnaagcttggcgtggatccgatatcaactagatcttgagacaaatggcagtattcatccacaattttaaaagaaaaggggggattggggggtacagtgcaggggaaagaatagtagacataatagcaacagacatacaaactaaag

SEQ ID NO: 16896 - DNA, 301 bp, Artificial Sequence
  Ercc5.2_NTC.18
  crRNA array
  misc_feature (148)..(157): n is a, c, g, or t
cttggctttatatatcttgtggaaaggacgaaacaccgtaatttctactaagtgtagatgagtatcacatcggtgactctaatttctactaagtgtagattccggttacgaccggcaaaataatttctactaagtgtagatttttttnnnnnnnnnnaagcttggcgtggatccgatatcaactagatcttgagacaaatggcagtattcatccacaattttaaaagaaaaggggggattggggggtacagtgcaggggaaagaatagtagacataatagcaacagacatacaaactaaag

SEQ ID NO: 16897 - DNA, 301 bp, Artificial Sequence
  Ercc5.2_NTC.19
  crRNA array
  misc_feature (148)..(157): n is a, c, g, or t
cttggctttatatatcttgtggaaaggacgaaacaccgtaatttctactaagtgtagatgagtatcacatcggtgactctaatttctactaagtgtagatcgtcgtagaacgatacccgataatttctactaagtgtagatttttttnnnnnnnnnnaagcttggcgtggatccgatatcaactagatcttgagacaaatggcagtattcatccacaattttaaaagaaaaggggggattggggggtacagtgcaggggaaagaatagtagacataatagcaacagacatacaaactaaag

SEQ ID NO: 16898 - DNA, 301 bp, Artificial Sequence
  Ercc5.2_NTC.2
  crRNA array
  misc_feature (148)..(157): n is a, c, g, or t
cttggctttatatatcttgtggaaaggacgaaacaccgtaatttctactaagtgtagatgagtatcacatcggtgactctaatttctactaagtgtagatttatgtcgcgccgcgacccgtaatttctactaagtgtagatttttttnnnnnnnnnnaagcttggcgtggatccgatatcaactagatcttgagacaaatggcagtattcatccacaattttaaaagaaaaggggggattggggggtacagtgcaggggaaagaatagtagacataatagcaacagacatacaaactaaag

SEQ ID NO: 16899 - DNA, 301 bp, Artificial Sequence
  Ercc5.2_NTC.20
  crRNA array
  misc_feature (148)..(157): n is a, c, g, or t
cttggctttatatatcttgtggaaaggacgaaacaccgtaatttctactaagtgtagatgagtatcacatcggtgactctaatttctactaagtgtagatattccggcgcgaccagaagataatttctactaagtgtagatttttttnnnnnnnnnnaagcttggcgtggatccgatatcaactagatcttgagacaaatggcagtattcatccacaattttaaaagaaaaggggggattggggggtacagtgcaggggaaagaatagtagacataatagcaacagacatacaaactaaag

SEQ ID NO: 16900 - DNA, 301 bp, Artificial Sequence
  Ercc5.2_NTC.21
  crRNA array
  misc_feature (148)..(157): n is a, c, g, or t
cttggctttatatatcttgtggaaaggacgaaacaccgtaatttctactaagtgtagatgagtatcacatcggtgactctaatttctactaagtgtagatgtataacttcgcgcggtccgtaatttctactaagtgtagatttttttnnnnnnnnnnaagcttggcgtggatccgatatcaactagatcttgagacaaatggcagtattcatccacaattttaaaagaaaaggggggattggggggtacagtgcaggggaaagaatagtagacataatagcaacagacatacaaactaaag

SEQ ID NO: 16901 - DNA, 301 bp, Artificial Sequence
  Ercc5.2_NTC.22
  crRNA array
  misc_feature (148)..(157): n is a, c, g, or t
cttggctttatatatcttgtggaaaggacgaaacaccgtaatttctactaagtgtagatgagtatcacatcggtgactctaatttctactaagtgtagatgcgcgtcaacgtaatgtgcctaatttctactaagtgtagatttttttnnnnnnnnnnaagcttggcgtggatccgatatcaactagatcttgagacaaatggcagtattcatccacaattttaaaagaaaaggggggattggggggtacagtgcaggggaaagaatagtagacataatagcaacagacatacaaactaaag

SEQ ID NO: 16902 - DNA, 301 bp, Artificial Sequence
  Ercc5.2_NTC.23
  crRNA array
  misc_feature (148)..(157): n is a, c, g, or t
cttggctttatatatcttgtggaaaggacgaaacaccgtaatttctactaagtgtagatgagtatcacatcggtgactctaatttctactaagtgtagatacgcgctattatcgtaggtgtaatttctactaagtgtagatttttttnnnnnnnnnnaagcttggcgtggatccgatatcaactagatcttgagacaaatggcagtattcatccacaattttaaaagaaaaggggggattggggggtacagtgcaggggaaagaatagtagacataatagcaacagacatacaaactaaag

SEQ ID NO: 16903 - DNA, 301 bp, Artificial Sequence
  Ercc5.2_NTC.24
  crRNA array
  misc_feature (148)..(157): n is a, c, g, or t
cttggctttatatatcttgtggaaaggacgaaacaccgtaatttctactaagtgtagatgagtatcacatcggtgactctaatttctactaagtgtagatactatcgacgttcgtcccggtaatttctactaagtgtagatttttttnnnnnnnnnnaagcttggcgtggatccgatatcaactagatcttgagacaaatggcagtattcatccacaattttaaaagaaaaggggggattggggggtacagtgcaggggaaagaatagtagacataatagcaacagacatacaaactaaag

SEQ ID NO: 16904 - DNA, 301 bp, Artificial Sequence
  Ercc5.2_NTC.25
  crRNA array
  misc_feature (148)..(157): n is a, c, g, or t
cttggctttatatatcttgtggaaaggacgaaacaccgtaatttctactaagtgtagatgagtatcacatcggtgactctaatttctactaagtgtagattcgcgttatcgtgccgtgcgtaatttctactaagtgtagatttttttnnnnnnnnnnaagcttggcgtggatccgatatcaactagatcttgagacaaatggcagtattcatccacaattttaaaagaaaaggggggattggggggtacagtgcaggggaaagaatagtagacataatagcaacagacatacaaactaaag

SEQ ID NO: 16905 - DNA, 301 bp, Artificial Sequence
  Ercc5.2_NTC.26
  crRNA array
  misc_feature (148)..(157): n is a, c, g, or t
cttggctttatatatcttgtggaaaggacgaaacaccgtaatttctactaagtgtagatgagtatcacatcggtgactctaatttctactaagtgtagatcgcgacggcggttttaacactaatttctactaagtgtagatttttttnnnnnnnnnnaagcttggcgtggatccgatatcaactagatcttgagacaaatggcagtattcatccacaattttaaaagaaaaggggggattggggggtacagtgcaggggaaagaatagtagacataatagcaacagacatacaaactaaag

SEQ ID NO: 16906 - DNA, 301 bp, Artificial Sequence
  Ercc5.2_NTC.27
  crRNA array
  misc_feature (148)..(157): n is a, c, g, or t
cttggctttatatatcttgtggaaaggacgaaacaccgtaatttctactaagtgtagatgagtatcacatcggtgactctaatttctactaagtgtagatgtcgcgttgcgaccggcgcttaatttctactaagtgtagatttttttnnnnnnnnnnaagcttggcgtggatccgatatcaactagatcttgagacaaatggcagtattcatccacaattttaaaagaaaaggggggattggggggtacagtgcaggggaaagaatagtagacataatagcaacagacatacaaactaaag

SEQ ID NO: 16907 - DNA, 301 bp, Artificial Sequence
  Ercc5.2_NTC.28
  crRNA array
  misc_feature (148)..(157): n is a, c, g, or t
cttggctttatatatcttgtggaaaggacgaaacaccgtaatttctactaagtgtagatgagtatcacatcggtgactctaatttctactaagtgtagataccgctaatcggcgtaaacttaatttctactaagtgtagatttttttnnnnnnnnnnaagcttggcgtggatccgatatcaactagatcttgagacaaatggcagtattcatccacaattttaaaagaaaaggggggattggggggtacagtgcaggggaaagaatagtagacataatagcaacagacatacaaactaaag

SEQ ID NO: 16908 - DNA, 301 bp, Artificial Sequence
  Ercc5.2_NTC.29
  crRNA array
  misc_feature (148)..(157): n is a, c, g, or t
cttggctttatatatcttgtggaaaggacgaaacaccgtaatttctactaagtgtagatgagtatcacatcggtgactctaatttctactaagtgtagatcgcgatctataccgtctatataatttctactaagtgtagatttttttnnnnnnnnnnaagcttggcgtggatccgatatcaactagatcttgagacaaatggcagtattcatccacaattttaaaagaaaaggggggattggggggtacagtgcaggggaaagaatagtagacataatagcaacagacatacaaactaaag

SEQ ID NO: 16909 - DNA, 301 bp, Artificial Sequence
  Ercc5.2_NTC.3
  crRNA array
  misc_feature (148)..(157): n is a, c, g, or t
cttggctttatatatcttgtggaaaggacgaaacaccgtaatttctactaagtgtagatgagtatcacatcggtgactctaatttctactaagtgtagattcgacgcgagacgacgtacataatttctactaagtgtagatttttttnnnnnnnnnnaagcttggcgtggatccgatatcaactagatcttgagacaaatggcagtattcatccacaattttaaaagaaaaggggggattggggggtacagtgcaggggaaagaatagtagacataatagcaacagacatacaaactaaag

SEQ ID NO: 16910 - DNA, 301 bp, Artificial Sequence
  Ercc5.2_NTC.30
  crRNA array
  misc_feature (148)..(157): n is a, c, g, or t
cttggctttatatatcttgtggaaaggacgaaacaccgtaatttctactaagtgtagatgagtatcacatcggtgactctaatttctactaagtgtagatcgatcgtacgggtgtcctaataatttctactaagtgtagatttttttnnnnnnnnnnaagcttggcgtggatccgatatcaactagatcttgagacaaatggcagtattcatccacaattttaaaagaaaaggggggattggggggtacagtgcaggggaaagaatagtagacataatagcaacagacatacaaactaaag

SEQ ID NO: 16911 - DNA, 301 bp, Artificial Sequence
  Ercc5.2_NTC.31
  crRNA array
  misc_feature (148)..(157): n is a, c, g, or t
cttggctttatatatcttgtggaaaggacgaaacaccgtaatttctactaagtgtagatgagtatcacatcggtgactctaatttctactaagtgtagatgccgaccgcgtgattgtaggtaatttctactaagtgtagatttttttnnnnnnnnnnaagcttggcgtggatccgatatcaactagatcttgagacaaatggcagtattcatccacaattttaaaagaaaaggggggattggggggtacagtgcaggggaaagaatagtagacataatagcaacagacatacaaactaaag

SEQ ID NO: 16912 - DNA, 301 bp, Artificial Sequence
  Ercc5.2_NTC.32
  crRNA array
  misc_feature (148)..(157): n is a, c, g, or t
cttggctttatatatcttgtggaaaggacgaaacaccgtaatttctactaagtgtagatgagtatcacatcggtgactctaatttctactaagtgtagatgcacgttacgcccgggtcactaatttctactaagtgtagatttttttnnnnnnnnnnaagcttggcgtggatccgatatcaactagatcttgagacaaatggcagtattcatccacaattttaaaagaaaaggggggattggggggtacagtgcaggggaaagaatagtagacataatagcaacagacatacaaactaaag

SEQ ID NO: 16913 - DNA, 301 bp, Artificial Sequence
  Ercc5.2_NTC.33
  crRNA array
  misc_feature (148)..(157): n is a, c, g, or t
cttggctttatatatcttgtggaaaggacgaaacaccgtaatttctactaagtgtagatgagtatcacatcggtgactctaatttctactaagtgtagattaagcgaccgacgcattcgctaatttctactaagtgtagatttttttnnnnnnnnnnaagcttggcgtggatccgatatcaactagatcttgagacaaatggcagtattcatccacaattttaaaagaaaaggggggattggggggtacagtgcaggggaaagaatagtagacataatagcaacagacatacaaactaaag

SEQ ID NO: 16914 - DNA, 301 bp, Artificial Sequence
  Ercc5.2_NTC.34
  crRNA array
  misc_feature (148)..(157): n is a, c, g, or t
cttggctttatatatcttgtggaaaggacgaaacaccgtaatttctactaagtgtagatgagtatcacatcggtgactctaatttctactaagtgtagattagcgttcgacacgtgaaactaatttctactaagtgtagatttttttnnnnnnnnnnaagcttggcgtggatccgatatcaactagatcttgagacaaatggcagtattcatccacaattttaaaagaaaaggggggattggggggtacagtgcaggggaaagaatagtagacataatagcaacagacatacaaactaaag

SEQ ID NO: 16915 - DNA, 301 bp, Artificial Sequence
  Ercc5.2_NTC.35
  crRNA array
  misc_feature (148)..(157): n is a, c, g, or t
cttggctttatatatcttgtggaaaggacgaaacaccgtaatttctactaagtgtagatgagtatcacatcggtgactctaatttctactaagtgtagattggcgcgtaatcgctattcgtaatttctactaagtgtagatttttttnnnnnnnnnnaagcttggcgtggatccgatatcaactagatcttgagacaaatggcagtattcatccacaattttaaaagaaaaggggggattggggggtacagtgcaggggaaagaatagtagacataatagcaacagacatacaaactaaag

SEQ ID NO: 16916 - DNA, 301 bp, Artificial Sequence
  Ercc5.2_NTC.36
  crRNA array
  misc_feature (148)..(157): n is a, c, g, or t
cttggctttatatatcttgtggaaaggacgaaacaccgtaatttctactaagtgtagatgagtatcacatcggtgactctaatttctactaagtgtagatcaacccgccgtagcgggccttaatttctactaagtgtagatttttttnnnnnnnnnnaagcttggcgtggatccgatatcaactagatcttgagacaaatggcagtattcatccacaattttaaaagaaaaggggggattggggggtacagtgcaggggaaagaatagtagacataatagcaacagacatacaaactaaag

SEQ ID NO: 16917 - DNA, 301 bp, Artificial Sequence
  Ercc5.2_NTC.37
  crRNA array
  misc_feature (148)..(157): n is a, c, g, or t
cttggctttatatatcttgtggaaaggacgaaacaccgtaatttctactaagtgtagatgagtatcacatcggtgactctaatttctactaagtgtagattttgcgttgacgcgattacttaatttctactaagtgtagatttttttnnnnnnnnnnaagcttggcgtggatccgatatcaactagatcttgagacaaatggcagtattcatccacaattttaaaagaaaaggggggattggggggtacagtgcaggggaaagaatagtagacataatagcaacagacatacaaactaaag

SEQ ID NO: 16918 - DNA, 301 bp, Artificial Sequence
  Ercc5.2_NTC.38
  crRNA array
  misc_feature (148)..(157): n is a, c, g, or t
cttggctttatatatcttgtggaaaggacgaaacaccgtaatttctactaagtgtagatgagtatcacatcggtgactctaatttctactaagtgtagataacggagcgcgatactaccataatttctactaagtgtagatttttttnnnnnnnnnnaagcttggcgtggatccgatatcaactagatcttgagacaaatggcagtattcatccacaattttaaaagaaaaggggggattggggggtacagtgcaggggaaagaatagtagacataatagcaacagacatacaaactaaag

SEQ ID NO: 16919 - DNA, 301 bp, Artificial Sequence
  Ercc5.2_NTC.39
  crRNA array
  misc_feature (148)..(157): n is a, c, g, or t
cttggctttatatatcttgtggaaaggacgaaacaccgtaatttctactaagtgtagatgagtatcacatcggtgactctaatttctactaagtgtagatccggacgttataacgtttcttaatttctactaagtgtagatttttttnnnnnnnnnnaagcttggcgtggatccgatatcaactagatcttgagacaaatggcagtattcatccacaattttaaaagaaaaggggggattggggggtacagtgcaggggaaagaatagtagacataatagcaacagacatacaaactaaag

SEQ ID NO: 16920 - DNA, 301 bp, Artificial Sequence
  Ercc5.2_NTC.4
  crRNA array
  misc_feature (148)..(157): n is a, c, g, or t
cttggctttatatatcttgtggaaaggacgaaacaccgtaatttctactaagtgtagatgagtatcacatcggtgactctaatttctactaagtgtagatatacccgtcgcgaacgtgagtaatttctactaagtgtagatttttttnnnnnnnnnnaagcttggcgtggatccgatatcaactagatcttgagacaaatggcagtattcatccacaattttaaaagaaaaggggggattggggggtacagtgcaggggaaagaatagtagacataatagcaacagacatacaaactaaag

SEQ ID NO: 16921 - DNA, 301 bp, Artificial Sequence
  Ercc5.2_NTC.40
  crRNA array
  misc_feature (148)..(157): n is a, c, g, or t
cttggctttatatatcttgtggaaaggacgaaacaccgtaatttctactaagtgtagatgagtatcacatcggtgactctaatttctactaagtgtagatattcgcgaacccggccggaataatttctactaagtgtagatttttttnnnnnnnnnnaagcttggcgtggatccgatatcaactagatcttgagacaaatggcagtattcatccacaattttaaaagaaaaggggggattggggggtacagtgcaggggaaagaatagtagacataatagcaacagacatacaaactaaag

SEQ ID NO: 16922 - DNA, 301 bp, Artificial Sequence
  Ercc5.2_NTC.41
  crRNA array
  misc_feature (148)..(157): n is a, c, g, or t
cttggctttatatatcttgtggaaaggacgaaacaccgtaatttctactaagtgtagatgagtatcacatcggtgactctaatttctactaagtgtagatttgatggcgcgacgcgttattaatttctactaagtgtagatttttttnnnnnnnnnnaagcttggcgtggatccgatatcaactagatcttgagacaaatggcagtattcatccacaattttaaaagaaaaggggggattggggggtacagtgcaggggaaagaatagtagacataatagcaacagacatacaaactaaag

SEQ ID NO: 16923 - DNA, 301 bp, Artificial Sequence
  Ercc5.2_NTC.42
  crRNA array
  misc_feature (148)..(157): n is a, c, g, or t
cttggctttatatatcttgtggaaaggacgaaacaccgtaatttctactaagtgtagatgagtatcacatcggtgactctaatttctactaagtgtagatggtcaaatcgcggcgataactaatttctactaagtgtagatttttttnnnnnnnnnnaagcttggcgtggatccgatatcaactagatcttgagacaaatggcagtattcatccacaattttaaaagaaaaggggggattggggggtacagtgcaggggaaagaatagtagacataatagcaacagacatacaaactaaag

SEQ ID NO: 16924 - DNA, 301 bp, Artificial Sequence
  Ercc5.2_NTC.43
  crRNA array
  misc_feature (148)..(157): n is a, c, g, or t
cttggctttatatatcttgtggaaaggacgaaacaccgtaatttctactaagtgtagatgagtatcacatcggtgactctaatttctactaagtgtagatcgactcgcgcattgaactggtaatttctactaagtgtagatttttttnnnnnnnnnnaagcttggcgtggatccgatatcaactagatcttgagacaaatggcagtattcatccacaattttaaaagaaaaggggggattggggggtacagtgcaggggaaagaatagtagacataatagcaacagacatacaaactaaag

SEQ ID NO: 16925 - DNA, 301 bp, Artificial Sequence
  Ercc5.2_NTC.44
  crRNA array
  misc_feature (148)..(157): n is a, c, g, or t
cttggctttatatatcttgtggaaaggacgaaacaccgtaatttctactaagtgtagatgagtatcacatcggtgactctaatttctactaagtgtagatagcgtcgtacgatttatcgttaatttctactaagtgtagatttttttnnnnnnnnnnaagcttggcgtggatccgatatcaactagatcttgagacaaatggcagtattcatccacaattttaaaagaaaaggggggattggggggtacagtgcaggggaaagaatagtagacataatagcaacagacatacaaactaaag

SEQ ID NO: 16926 - DNA, 301 bp, Artificial Sequence
  Ercc5.2_NTC.45
  crRNA array
  misc_feature (148)..(157): n is a, c, g, or t
cttggctttatatatcttgtggaaaggacgaaacaccgtaatttctactaagtgtagatgagtatcacatcggtgactctaatttctactaagtgtagatcggaacgcgtgatactagggtaatttctactaagtgtagatttttttnnnnnnnnnnaagcttggcgtggatccgatatcaactagatcttgagacaaatggcagtattcatccacaattttaaaagaaaaggggggattggggggtacagtgcaggggaaagaatagtagacataatagcaacagacatacaaactaaag

SEQ ID NO: 16927 - DNA, 301 bp, Artificial Sequence
  Ercc5.2_NTC.46
  crRNA array
  misc_feature (148)..(157): n is a, c, g, or t
cttggctttatatatcttgtggaaaggacgaaacaccgtaatttctactaagtgtagatgagtatcacatcggtgactctaatttctactaagtgtagatagcgggtcgtagacgcgcggtaatttctactaagtgtagatttttttnnnnnnnnnnaagcttggcgtggatccgatatcaactagatcttgagacaaatggcagtattcatccacaattttaaaagaaaaggggggattggggggtacagtgcaggggaaagaatagtagacataatagcaacagacatacaaactaaag

SEQ ID NO: 16928 - DNA, 301 bp, Artificial Sequence
  Ercc5.2_NTC.47
  crRNA array
  misc_feature (148)..(157): n is a, c, g, or t
cttggctttatatatcttgtggaaaggacgaaacaccgtaatttctactaagtgtagatgagtatcacatcggtgactctaatttctactaagtgtagattctcgtatcgcgattgttaataatttctactaagtgtagatttttttnnnnnnnnnnaagcttggcgtggatccgatatcaactagatcttgagacaaatggcagtattcatccacaattttaaaagaaaaggggggattggggggtacagtgcaggggaaagaatagtagacataatagcaacagacatacaaactaaag

SEQ ID NO: 16929 - DNA, 301 bp, Artificial Sequence
  Ercc5.2_NTC.48
  crRNA array
  misc_feature (148)..(157): n is a, c, g, or t
cttggctttatatatcttgtggaaaggacgaaacaccgtaatttctactaagtgtagatgagtatcacatcggtgactctaatttctactaagtgtagatcggtcgactacggctgttagtaatttctactaagtgtagatttttttnnnnnnnnnnaagcttggcgtggatccgatatcaactagatcttgagacaaatggcagtattcatccacaattttaaaagaaaaggggggattggggggtacagtgcaggggaaagaatagtagacataatagcaacagacatacaaactaaag

SEQ ID NO: 16930 - DNA, 301 bp, Artificial Sequence
  Ercc5.2_NTC.49
  crRNA array
  misc_feature (148)..(157): n is a, c, g, or t
cttggctttatatatcttgtggaaaggacgaaacaccgtaatttctactaagtgtagatgagtatcacatcggtgactctaatttctactaagtgtagattcggggcgcgtcaactgaattaatttctactaagtgtagatttttttnnnnnnnnnnaagcttggcgtggatccgatatcaactagatcttgagacaaatggcagtattcatccacaattttaaaagaaaaggggggattggggggtacagtgcaggggaaagaatagtagacataatagcaacagacatacaaactaaag

SEQ ID NO: 16931 - DNA, 301 bp, Artificial Sequence
  Ercc5.2_NTC.5
  crRNA array
  misc_feature (148)..(157): n is a, c, g, or t
cttggctttatatatcttgtggaaaggacgaaacaccgtaatttctactaagtgtagatgagtatcacatcggtgactctaatttctactaagtgtagatgcttacgcgtcgcgaatgtataatttctactaagtgtagatttttttnnnnnnnnnnaagcttggcgtggatccgatatcaactagatcttgagacaaatggcagtattcatccacaattttaaaagaaaaggggggattggggggtacagtgcaggggaaagaatagtagacataatagcaacagacatacaaactaaag

SEQ ID NO: 16932 - DNA, 301 bp, Artificial Sequence
  Ercc5.2_NTC.50
  crRNA array
  misc_feature (148)..(157): n is a, c, g, or t
cttggctttatatatcttgtggaaaggacgaaacaccgtaatttctactaagtgtagatgagtatcacatcggtgactctaatttctactaagtgtagatattgccgctcgcgcaaaatctaatttctactaagtgtagatttttttnnnnnnnnnnaagcttggcgtggatccgatatcaactagatcttgagacaaatggcagtattcatccacaattttaaaagaaaaggggggattggggggtacagtgcaggggaaagaatagtagacataatagcaacagacatacaaactaaag

SEQ ID NO: 16933 - DNA, 301 bp, Artificial Sequence
  Ercc5.2_NTC.51
  crRNA array
  misc_feature (148)..(157): n is a, c, g, or t
cttggctttatatatcttgtggaaaggacgaaacaccgtaatttctactaagtgtagatgagtatcacatcggtgactctaatttctactaagtgtagattaacgcgcaacacgccaatgtaatttctactaagtgtagatttttttnnnnnnnnnnaagcttggcgtggatccgatatcaactagatcttgagacaaatggcagtattcatccacaattttaaaagaaaaggggggattggggggtacagtgcaggggaaagaatagtagacataatagcaacagacatacaaactaaag

SEQ ID NO: 16934 - DNA, 301 bp, Artificial Sequence
  Ercc5.2_NTC.6
  crRNA array
  misc_feature (148)..(157): n is a, c, g, or t
cttggctttatatatcttgtggaaaggacgaaacaccgtaatttctactaagtgtagatgagtatcacatcggtgactctaatttctactaagtgtagatcgaatcgcgcctacgggaattaatttctactaagtgtagatttttttnnnnnnnnnnaagcttggcgtggatccgatatcaactagatcttgagacaaatggcagtattcatccacaattttaaaagaaaaggggggattggggggtacagtgcaggggaaagaatagtagacataatagcaacagacatacaaactaaag

SEQ ID NO: 16935 - DNA, 301 bp, Artificial Sequence
  Ercc5.2_NTC.7
  crRNA array
  misc_feature (148)..(157): n is a, c, g, or t
cttggctttatatatcttgtggaaaggacgaaacaccgtaatttctactaagtgtagatgagtatcacatcggtgactctaatttctactaagtgtagatcgccgaacggataagactattaatttctactaagtgtagatttttttnnnnnnnnnnaagcttggcgtggatccgatatcaactagatcttgagacaaatggcagtattcatccacaattttaaaagaaaaggggggattggggggtacagtgcaggggaaagaatagtagacataatagcaacagacatacaaactaaag

SEQ ID NO: 16936 - DNA, 301 bp, Artificial Sequence
  Ercc5.2_NTC.8
  crRNA array
  misc_feature (148)..(157): n is a, c, g, or t
cttggctttatatatcttgtggaaaggacgaaacaccgtaatttctactaagtgtagatgagtatcacatcggtgactctaatttctactaagtgtagatcgaccgaggttacgctgggataatttctactaagtgtagatttttttnnnnnnnnnnaagcttggcgtggatccgatatcaactagatcttgagacaaatggcagtattcatccacaattttaaaagaaaaggggggattggggggtacagtgcaggggaaagaatagtagacataatagcaacagacatacaaactaaag

SEQ ID NO: 16937 - DNA, 301 bp, Artificial Sequence
  Ercc5.2_NTC.9
  crRNA array
  misc_feature (148)..(157): n is a, c, g, or t
cttggctttatatatcttgtggaaaggacgaaacaccgtaatttctactaagtgtagatgagtatcacatcggtgactctaatttctactaagtgtagatatcgccgtacggctatggcataatttctactaagtgtagatttttttnnnnnnnnnnaagcttggcgtggatccgatatcaactagatcttgagacaaatggcagtattcatccacaattttaaaagaaaaggggggattggggggtacagtgcaggggaaagaatagtagacataatagcaacagacatacaaactaaag

SEQ ID NO: 16938 - DNA, 301 bp, Artificial Sequence
  Ercc5.3_NTC.0
  crRNA array
  misc_feature (148)..(157): n is a, c, g, or t
cttggctttatatatcttgtggaaaggacgaaacaccgtaatttctactaagtgtagatggagtgggtccaggcctcgttaatttctactaagtgtagattatagcgtcgcgcgctaatttaatttctactaagtgtagatttttttnnnnnnnnnnaagcttggcgtggatccgatatcaactagatcttgagacaaatggcagtattcatccacaattttaaaagaaaaggggggattggggggtacagtgcaggggaaagaatagtagacataatagcaacagacatacaaactaaag

SEQ ID NO: 16939 - DNA, 301 bp, Artificial Sequence
  Ercc5.3_NTC.1
  crRNA array
  misc_feature (148)..(157): n is a, c, g, or t
cttggctttatatatcttgtggaaaggacgaaacaccgtaatttctactaagtgtagatggagtgggtccaggcctcgttaatttctactaagtgtagatcgcgtaaccgttccggctcctaatttctactaagtgtagatttttttnnnnnnnnnnaagcttggcgtggatccgatatcaactagatcttgagacaaatggcagtattcatccacaattttaaaagaaaaggggggattggggggtacagtgcaggggaaagaatagtagacataatagcaacagacatacaaactaaag

SEQ ID NO: 16940 - DNA, 301 bp, Artificial Sequence
  Ercc5.3_NTC.10
  crRNA array
  misc_feature (148)..(157): n is a, c, g, or t
cttggctttatatatcttgtggaaaggacgaaacaccgtaatttctactaagtgtagatggagtgggtccaggcctcgttaatttctactaagtgtagatcgctaagttcgcgcgggccgtaatttctactaagtgtagatttttttnnnnnnnnnnaagcttggcgtggatccgatatcaactagatcttgagacaaatggcagtattcatccacaattttaaaagaaaaggggggattggggggtacagtgcaggggaaagaatagtagacataatagcaacagacatacaaactaaag

SEQ ID NO: 16941 - DNA, 301 bp, Artificial Sequence
  Ercc5.3_NTC.11
  crRNA array
  misc_feature (148)..(157): n is a, c, g, or t
cttggctttatatatcttgtggaaaggacgaaacaccgtaatttctactaagtgtagatggagtgggtccaggcctcgttaatttctactaagtgtagatcgttcgtcgacgaagcaatctaatttctactaagtgtagatttttttnnnnnnnnnnaagcttggcgtggatccgatatcaactagatcttgagacaaatggcagtattcatccacaattttaaaagaaaaggggggattggggggtacagtgcaggggaaagaatagtagacataatagcaacagacatacaaactaaag

SEQ ID NO: 16942 - DNA, 301 bp, Artificial Sequence
  Ercc5.3_NTC.12
  crRNA array
  misc_feature (148)..(157): n is a, c, g, or t
cttggctttatatatcttgtggaaaggacgaaacaccgtaatttctactaagtgtagatggagtgggtccaggcctcgttaatttctactaagtgtagatcgccgacgattaatcaatagtaatttctactaagtgtagatttttttnnnnnnnnnnaagcttggcgtggatccgatatcaactagatcttgagacaaatggcagtattcatccacaattttaaaagaaaaggggggattggggggtacagtgcaggggaaagaatagtagacataatagcaacagacatacaaactaaag

SEQ ID NO: 16943 - DNA, 301 bp, Artificial Sequence
  Ercc5.3_NTC.13
  crRNA array
  misc_feature (148)..(157): n is a, c, g, or t
cttggctttatatatcttgtggaaaggacgaaacaccgtaatttctactaagtgtagatggagtgggtccaggcctcgttaatttctactaagtgtagatgaccgttgtatcgcgatcaataatttctactaagtgtagatttttttnnnnnnnnnnaagcttggcgtggatccgatatcaactagatcttgagacaaatggcagtattcatccacaattttaaaagaaaaggggggattggggggtacagtgcaggggaaagaatagtagacataatagcaacagacatacaaactaaag

SEQ ID NO: 16944 - DNA, 301 bp, Artificial Sequence
  Ercc5.3_NTC.14
  crRNA array
  misc_feature (148)..(157): n is a, c, g, or t
cttggctttatatatcttgtggaaaggacgaaacaccgtaatttctactaagtgtagatggagtgggtccaggcctcgttaatttctactaagtgtagatccgttcgtgcgatagtgttttaatttctactaagtgtagatttttttnnnnnnnnnnaagcttggcgtggatccgatatcaactagatcttgagacaaatggcagtattcatccacaattttaaaagaaaaggggggattggggggtacagtgcaggggaaagaatagtagacataatagcaacagacatacaaactaaag

SEQ ID NO: 16945 - DNA, 301 bp, Artificial Sequence
  Ercc5.3_NTC.15
  crRNA array
  misc_feature (148)..(157): n is a, c, g, or t
cttggctttatatatcttgtggaaaggacgaaacaccgtaatttctactaagtgtagatggagtgggtccaggcctcgttaatttctactaagtgtagatgttgtcgtgccgcgaatttataatttctactaagtgtagatttttttnnnnnnnnnnaagcttggcgtggatccgatatcaactagatcttgagacaaatggcagtattcatccacaattttaaaagaaaaggggggattggggggtacagtgcaggggaaagaatagtagacataatagcaacagacatacaaactaaag

SEQ ID NO: 16946 - DNA, 301 bp, Artificial Sequence
  Ercc5.3_NTC.16
  crRNA array
  misc_feature (148)..(157): n is a, c, g, or t
cttggctttatatatcttgtggaaaggacgaaacaccgtaatttctactaagtgtagatggagtgggtccaggcctcgttaatttctactaagtgtagatcggtacgttagacgaaaatttaatttctactaagtgtagatttttttnnnnnnnnnnaagcttggcgtggatccgatatcaactagatcttgagacaaatggcagtattcatccacaattttaaaagaaaaggggggattggggggtacagtgcaggggaaagaatagtagacataatagcaacagacatacaaactaaag

SEQ ID NO: 16947 - DNA, 301 bp, Artificial Sequence
  Ercc5.3_NTC.17
  crRNA array
  misc_feature (148)..(157): n is a, c, g, or t
cttggctttatatatcttgtggaaaggacgaaacaccgtaatttctactaagtgtagatggagtgggtccaggcctcgttaatttctactaagtgtagattatcgaacgctatcgaacgttaatttctactaagtgtagatttttttnnnnnnnnnnaagcttggcgtggatccgatatcaactagatcttgagacaaatggcagtattcatccacaattttaaaagaaaaggggggattggggggtacagtgcaggggaaagaatagtagacataatagcaacagacatacaaactaaag

SEQ ID NO: 16948 - DNA, 301 bp, Artificial Sequence
  Ercc5.3_NTC.18
  crRNA array
  misc_feature (148)..(157): n is a, c, g, or t
cttggctttatatatcttgtggaaaggacgaaacaccgtaatttctactaagtgtagatggagtgggtccaggcctcgttaatttctactaagtgtagattccggttacgaccggcaaaataatttctactaagtgtagatttttttnnnnnnnnnnaagcttggcgtggatccgatatcaactagatcttgagacaaatggcagtattcatccacaattttaaaagaaaaggggggattggggggtacagtgcaggggaaagaatagtagacataatagcaacagacatacaaactaaag

SEQ ID NO: 16949 - DNA, 301 bp, Artificial Sequence
  Ercc5.3_NTC.19
  crRNA array
  misc_feature (148)..(157): n is a, c, g, or t
cttggctttatatatcttgtggaaaggacgaaacaccgtaatttctactaagtgtagatggagtgggtccaggcctcgttaatttctactaagtgtagatcgtcgtagaacgatacccgataatttctactaagtgtagatttttttnnnnnnnnnnaagcttggcgtggatccgatatcaactagatcttgagacaaatggcagtattcatccacaattttaaaagaaaaggggggattggggggtacagtgcaggggaaagaatagtagacataatagcaacagacatacaaactaaag

SEQ ID NO: 16950 - DNA, 301 bp, Artificial Sequence
  Ercc5.3_NTC.2
  crRNA array
  misc_feature (148)..(157): n is a, c, g, or t
cttggctttatatatcttgtggaaaggacgaaacaccgtaatttctactaagtgtagatggagtgggtccaggcctcgttaatttctactaagtgtagatttatgtcgcgccgcgacccgtaatttctactaagtgtagatttttttnnnnnnnnnnaagcttggcgtggatccgatatcaactagatcttgagacaaatggcagtattcatccacaattttaaaagaaaaggggggattggggggtacagtgcaggggaaagaatagtagacataatagcaacagacatacaaactaaag

SEQ ID NO: 16951 - DNA, 301 bp, Artificial Sequence
  Ercc5.3_NTC.20
  crRNA array
  misc_feature (148)..(157): n is a, c, g, or t
cttggctttatatatcttgtggaaaggacgaaacaccgtaatttctactaagtgtagatggagtgggtccaggcctcgttaatttctactaagtgtagatattccggcgcgaccagaagataatttctactaagtgtagatttttttnnnnnnnnnnaagcttggcgtggatccgatatcaactagatcttgagacaaatggcagtattcatccacaattttaaaagaaaaggggggattggggggtacagtgcaggggaaagaatagtagacataatagcaacagacatacaaactaaag

SEQ ID NO: 16952 - DNA, 301 bp, Artificial Sequence
  Ercc5.3_NTC.21
  crRNA array
  misc_feature (148)..(157): n is a, c, g, or t
cttggctttatatatcttgtggaaaggacgaaacaccgtaatttctactaagtgtagatggagtgggtccaggcctcgttaatttctactaagtgtagatgtataacttcgcgcggtccgtaatttctactaagtgtagatttttttnnnnnnnnnnaagcttggcgtggatccgatatcaactagatcttgagacaaatggcagtattcatccacaattttaaaagaaaaggggggattggggggtacagtgcaggggaaagaatagtagacataatagcaacagacatacaaactaaag

SEQ ID NO: 16953 - DNA, 301 bp, Artificial Sequence
  Ercc5.3_NTC.22
  crRNA array
  misc_feature (148)..(157): n is a, c, g, or t
cttggctttatatatcttgtggaaaggacgaaacaccgtaatttctactaagtgtagatggagtgggtccaggcctcgttaatttctactaagtgtagatgcgcgtcaacgtaatgtgcctaatttctactaagtgtagatttttttnnnnnnnnnnaagcttggcgtggatccgatatcaactagatcttgagacaaatggcagtattcatccacaattttaaaagaaaaggggggattggggggtacagtgcaggggaaagaatagtagacataatagcaacagacatacaaactaaag

SEQ ID NO: 16954 - DNA, 301 bp, Artificial Sequence
  Ercc5.3_NTC.23
  crRNA array
  misc_feature (148)..(157): n is a, c, g, or t
cttggctttatatatcttgtggaaaggacgaaacaccgtaatttctactaagtgtagatggagtgggtccaggcctcgttaatttctactaagtgtagatacgcgctattatcgtaggtgtaatttctactaagtgtagatttttttnnnnnnnnnnaagcttggcgtggatccgatatcaactagatcttgagacaaatggcagtattcatccacaattttaaaagaaaaggggggattggggggtacagtgcaggggaaagaatagtagacataatagcaacagacatacaaactaaag

SEQ ID NO: 16955 - DNA, 301 bp, Artificial Sequence
  Ercc5.3_NTC.24
  crRNA array
  misc_feature (148)..(157): n is a, c, g, or t
cttggctttatatatcttgtggaaaggacgaaacaccgtaatttctactaagtgtagatggagtgggtccaggcctcgttaatttctactaagtgtagatactatcgacgttcgtcccggtaatttctactaagtgtagatttttttnnnnnnnnnnaagcttggcgtggatccgatatcaactagatcttgagacaaatggcagtattcatccacaattttaaaagaaaaggggggattggggggtacagtgcaggggaaagaatagtagacataatagcaacagacatacaaactaaag

SEQ ID NO: 16956 - DNA, 301 bp, Artificial Sequence
  Ercc5.3_NTC.25
  crRNA array
  misc_feature (148)..(157): n is a, c, g, or t
cttggctttatatatcttgtggaaaggacgaaacaccgtaatttctactaagtgtagatggagtgggtccaggcctcgttaatttctactaagtgtagattcgcgttatcgtgccgtgcgtaatttctactaagtgtagatttttttnnnnnnnnnnaagcttggcgtggatccgatatcaactagatcttgagacaaatggcagtattcatccacaattttaaaagaaaaggggggattggggggtacagtgcaggggaaagaatagtagacataatagcaacagacatacaaactaaag

SEQ ID NO: 16957 - DNA, 301 bp, Artificial Sequence
  Ercc5.3_NTC.26
  crRNA array
  misc_feature (148)..(157): n is a, c, g, or t
cttggctttatatatcttgtggaaaggacgaaacaccgtaatttctactaagtgtagatggagtgggtccaggcctcgttaatttctactaagtgtagatcgcgacggcggttttaacactaatttctactaagtgtagatttttttnnnnnnnnnnaagcttggcgtggatccgatatcaactagatcttgagacaaatggcagtattcatccacaattttaaaagaaaaggggggattggggggtacagtgcaggggaaagaatagtagacataatagcaacagacatacaaactaaag

SEQ ID NO: 16958 - DNA, 301 bp, Artificial Sequence
  Ercc5.3_NTC.27
  crRNA array
  misc_feature (148)..(157): n is a, c, g, or t
cttggctttatatatcttgtggaaaggacgaaacaccgtaatttctactaagtgtagatggagtgggtccaggcctcgttaatttctactaagtgtagatgtcgcgttgcgaccggcgcttaatttctactaagtgtagatttttttnnnnnnnnnnaagcttggcgtggatccgatatcaactagatcttgagacaaatggcagtattcatccacaattttaaaagaaaaggggggattggggggtacagtgcaggggaaagaatagtagacataatagcaacagacatacaaactaaag

SEQ ID NO: 16959 - DNA, 301 bp, Artificial Sequence
  Ercc5.3_NTC.28
  crRNA array
  misc_feature (148)..(157): n is a, c, g, or t
cttggctttatatatcttgtggaaaggacgaaacaccgtaatttctactaagtgtagatggagtgggtccaggcctcgttaatttctactaagtgtagataccgctaatcggcgtaaacttaatttctactaagtgtagatttttttnnnnnnnnnnaagcttggcgtggatccgatatcaactagatcttgagacaaatggcagtattcatccacaattttaaaagaaaaggggggattggggggtacagtgcaggggaaagaatagtagacataatagcaacagacatacaaactaaag

SEQ ID NO: 16960 - DNA, 301 bp, Artificial Sequence
  Ercc5.3_NTC.29
  crRNA array
  misc_feature (148)..(157): n is a, c, g, or t
cttggctttatatatcttgtggaaaggacgaaacaccgtaatttctactaagtgtagatggagtgggtccaggcctcgttaatttctactaagtgtagatcgcgatctataccgtctatataatttctactaagtgtagatttttttnnnnnnnnnnaagcttggcgtggatccgatatcaactagatcttgagacaaatggcagtattcatccacaattttaaaagaaaaggggggattggggggtacagtgcaggggaaagaatagtagacataatagcaacagacatacaaactaaag

SEQ ID NO: 16961 - DNA, 301 bp, Artificial Sequence
  Ercc5.3_NTC.3
  crRNA array
  misc_feature (148)..(157): n is a, c, g, or t
cttggctttatatatcttgtggaaaggacgaaacaccgtaatttctactaagtgtagatggagtgggtccaggcctcgttaatttctactaagtgtagattcgacgcgagacgacgtacataatttctactaagtgtagatttttttnnnnnnnnnnaagcttggcgtggatccgatatcaactagatcttgagacaaatggcagtattcatccacaattttaaaagaaaaggggggattggggggtacagtgcaggggaaagaatagtagacataatagcaacagacatacaaactaaag

SEQ ID NO: 16962 - DNA, 301 bp, Artificial Sequence
  Ercc5.3_NTC.30
  crRNA array
  misc_feature (148)..(157): n is a, c, g, or t
cttggctttatatatcttgtggaaaggacgaaacaccgtaatttctactaagtgtagatggagtgggtccaggcctcgttaatttctactaagtgtagatcgatcgtacgggtgtcctaataatttctactaagtgtagatttttttnnnnnnnnnnaagcttggcgtggatccgatatcaactagatcttgagacaaatggcagtattcatccacaattttaaaagaaaaggggggattggggggtacagtgcaggggaaagaatagtagacataatagcaacagacatacaaactaaag

SEQ ID NO: 16963 - DNA, 301 bp, Artificial Sequence
  Ercc5.3_NTC.31
  crRNA array
  misc_feature (148)..(157): n is a, c, g, or t
cttggctttatatatcttgtggaaaggacgaaacaccgtaatttctactaagtgtagatggagtgggtccaggcctcgttaatttctactaagtgtagatgccgaccgcgtgattgtaggtaatttctactaagtgtagatttttttnnnnnnnnnnaagcttggcgtggatccgatatcaactagatcttgagacaaatggcagtattcatccacaattttaaaagaaaaggggggattggggggtacagtgcaggggaaagaatagtagacataatagcaacagacatacaaactaaag

SEQ ID NO: 16964 - DNA, 301 bp, Artificial Sequence
  Ercc5.3_NTC.32
  crRNA array
  misc_feature (148)..(157): n is a, c, g, or t
cttggctttatatatcttgtggaaaggacgaaacaccgtaatttctactaagtgtagatggagtgggtccaggcctcgttaatttctactaagtgtagatgcacgttacgcccgggtcactaatttctactaagtgtagatttttttnnnnnnnnnnaagcttggcgtggatccgatatcaactagatcttgagacaaatggcagtattcatccacaattttaaaagaaaaggggggattggggggtacagtgcaggggaaagaatagtagacataatagcaacagacatacaaactaaag

SEQ ID NO: 16965 - DNA, 301 bp, Artificial Sequence
  Ercc5.3_NTC.33
  crRNA array
  misc_feature (148)..(157): n is a, c, g, or t
cttggctttatatatcttgtggaaaggacgaaacaccgtaatttctactaagtgtagatggagtgggtccaggcctcgttaatttctactaagtgtagattaagcgaccgacgcattcgctaatttctactaagtgtagatttttttnnnnnnnnnnaagcttggcgtggatccgatatcaactagatcttgagacaaatggcagtattcatccacaattttaaaagaaaaggggggattggggggtacagtgcaggggaaagaatagtagacataatagcaacagacatacaaactaaag

SEQ ID NO: 16966 - DNA, 301 bp, Artificial Sequence
  Ercc5.3_NTC.34
  crRNA array
  misc_feature (148)..(157): n is a, c, g, or t
cttggctttatatatcttgtggaaaggacgaaacaccgtaatttctactaagtgtagatggagtgggtccaggcctcgttaatttctactaagtgtagattagcgttcgacacgtgaaactaatttctactaagtgtagatttttttnnnnnnnnnnaagcttggcgtggatccgatatcaactagatcttgagacaaatggcagtattcatccacaattttaaaagaaaaggggggattggggggtacagtgcaggggaaagaatagtagacataatagcaacagacatacaaactaaag

SEQ ID NO: 16967 - DNA, 301 bp, Artificial Sequence
  Ercc5.3_NTC.35
  crRNA array
  misc_feature (148)..(157): n is a, c, g, or t
cttggctttatatatcttgtggaaaggacgaaacaccgtaatttctactaagtgtagatggagtgggtccaggcctcgttaatttctactaagtgtagattggcgcgtaatcgctattcgtaatttctactaagtgtagatttttttnnnnnnnnnnaagcttggcgtggatccgatatcaactagatcttgagacaaatggcagtattcatccacaattttaaaagaaaaggggggattggggggtacagtgcaggggaaagaatagtagacataatagcaacagacatacaaactaaag

SEQ ID NO: 16968 - DNA, 301 bp, Artificial Sequence
  Ercc5.3_NTC.36
  crRNA array
  misc_feature (148)..(157): n is a, c, g, or t
cttggctttatatatcttgtggaaaggacgaaacaccgtaatttctactaagtgtagatggagtgggtccaggcctcgttaatttctactaagtgtagatcaacccgccgtagcgggccttaatttctactaagtgtagatttttttnnnnnnnnnnaagcttggcgtggatccgatatcaactagatcttgagacaaatggcagtattcatccacaattttaaaagaaaaggggggattggggggtacagtgcaggggaaagaatagtagacataatagcaacagacatacaaactaaag

SEQ ID NO: 16969 - DNA, 301 bp, Artificial Sequence
  Ercc5.3_NTC.37
  crRNA array
  misc_feature (148)..(157): n is a, c, g, or t
cttggctttatatatcttgtggaaaggacgaaacaccgtaatttctactaagtgtagatggagtgggtccaggcctcgttaatttctactaagtgtagattttgcgttgacgcgattacttaatttctactaagtgtagatttttttnnnnnnnnnnaagcttggcgtggatccgatatcaactagatcttgagacaaatggcagtattcatccacaattttaaaagaaaaggggggattggggggtacagtgcaggggaaagaatagtagacataatagcaacagacatacaaactaaag

SEQ ID NO: 16970 - DNA, 301 bp, Artificial Sequence
  Ercc5.3_NTC.38
  crRNA array
  misc_feature (148)..(157): n is a, c, g, or t
cttggctttatatatcttgtggaaaggacgaaacaccgtaatttctactaagtgtagatggagtgggtccaggcctcgttaatttctactaagtgtagataacggagcgcgatactaccataatttctactaagtgtagatttttttnnnnnnnnnnaagcttggcgtggatccgatatcaactagatcttgagacaaatggcagtattcatccacaattttaaaagaaaaggggggattggggggtacagtgcaggggaaagaatagtagacataatagcaacagacatacaaactaaag

SEQ ID NO: 16971 - DNA, 301 bp, Artificial Sequence
  Ercc5.3_NTC.39
  crRNA array
  misc_feature (148)..(157): n is a, c, g, or t
cttggctttatatatcttgtggaaaggacgaaacaccgtaatttctactaagtgtagatggagtgggtccaggcctcgttaatttctactaagtgtagatccggacgttataacgtttcttaatttctactaagtgtagatttttttnnnnnnnnnnaagcttggcgtggatccgatatcaactagatcttgagacaaatggcagtattcatccacaattttaaaagaaaaggggggattggggggtacagtgcaggggaaagaatagtagacataatagcaacagacatacaaactaaag

SEQ ID NO: 16972 - DNA, 301 bp, Artificial Sequence
  Ercc5.3_NTC.4
  crRNA array
  misc_feature (148)..(157): n is a, c, g, or t
cttggctttatatatcttgtggaaaggacgaaacaccgtaatttctactaagtgtagatggagtgggtccaggcctcgttaatttctactaagtgtagatatacccgtcgcgaacgtgagtaatttctactaagtgtagatttttttnnnnnnnnnnaagcttggcgtggatccgatatcaactagatcttgagacaaatggcagtattcatccacaattttaaaagaaaaggggggattggggggtacagtgcaggggaaagaatagtagacataatagcaacagacatacaaactaaag

SEQ ID NO: 16973 - DNA, 301 bp, Artificial Sequence
  Ercc5.3_NTC.40
  crRNA array
  misc_feature (148)..(157): n is a, c, g, or t
cttggctttatatatcttgtggaaaggacgaaacaccgtaatttctactaagtgtagatggagtgggtccaggcctcgttaatttctactaagtgtagatattcgcgaacccggccggaataatttctactaagtgtagatttttttnnnnnnnnnnaagcttggcgtggatccgatatcaactagatcttgagacaaatggcagtattcatccacaattttaaaagaaaaggggggattggggggtacagtgcaggggaaagaatagtagacataatagcaacagacatacaaactaaag

SEQ ID NO: 16974 - DNA, 301 bp, Artificial Sequence
  Ercc5.3_NTC.41
  crRNA array
  misc_feature (148)..(157): n is a, c, g, or t
cttggctttatatatcttgtggaaaggacgaaacaccgtaatttctactaagtgtagatggagtgggtccaggcctcgttaatttctactaagtgtagatttgatggcgcgacgcgttattaatttctactaagtgtagatttttttnnnnnnnnnnaagcttggcgtggatccgatatcaactagatcttgagacaaatggcagtattcatccacaattttaaaagaaaaggggggattggggggtacagtgcaggggaaagaatagtagacataatagcaacagacatacaaactaaag

SEQ ID NO: 16975 - DNA, 301 bp, Artificial Sequence
  Ercc5.3_NTC.42
  crRNA array
  misc_feature (148)..(157): n is a, c, g, or t
cttggctttatatatcttgtggaaaggacgaaacaccgtaatttctactaagtgtagatggagtgggtccaggcctcgttaatttctactaagtgtagatggtcaaatcgcggcgataactaatttctactaagtgtagatttttttnnnnnnnnnnaagcttggcgtggatccgatatcaactagatcttgagacaaatggcagtattcatccacaattttaaaagaaaaggggggattggggggtacagtgcaggggaaagaatagtagacataatagcaacagacatacaaactaaag

SEQ ID NO: 16976 - DNA, 301 bp, Artificial Sequence
  Ercc5.3_NTC.43
  crRNA array
  misc_feature (148)..(157): n is a, c, g, or t
cttggctttatatatcttgtggaaaggacgaaacaccgtaatttctactaagtgtagatggagtgggtccaggcctcgttaatttctactaagtgtagatcgactcgcgcattgaactggtaatttctactaagtgtagatttttttnnnnnnnnnnaagcttggcgtggatccgatatcaactagatcttgagacaaatggcagtattcatccacaattttaaaagaaaaggggggattggggggtacagtgcaggggaaagaatagtagacataatagcaacagacatacaaactaaag

SEQ ID NO: 16977 - DNA, 301 bp, Artificial Sequence
  Ercc5.3_NTC.44
  crRNA array
  misc_feature (148)..(157): n is a, c, g, or t
cttggctttatatatcttgtggaaaggacgaaacaccgtaatttctactaagtgtagatggagtgggtccaggcctcgttaatttctactaagtgtagatagcgtcgtacgatttatcgttaatttctactaagtgtagatttttttnnnnnnnnnnaagcttggcgtggatccgatatcaactagatcttgagacaaatggcagtattcatccacaattttaaaagaaaaggggggattggggggtacagtgcaggggaaagaatagtagacataatagcaacagacatacaaactaaag

SEQ ID NO: 16978 - DNA, 301 bp, Artificial Sequence
  Ercc5.3_NTC.45
  crRNA array
  misc_feature (148)..(157): n is a, c, g, or t
cttggctttatatatcttgtggaaaggacgaaacaccgtaatttctactaagtgtagatggagtgggtccaggcctcgttaatttctactaagtgtagatcggaacgcgtgatactagggtaatttctactaagtgtagatttttttnnnnnnnnnnaagcttggcgtggatccgatatcaactagatcttgagacaaatggcagtattcatccacaattttaaaagaaaaggggggattggggggtacagtgcaggggaaagaatagtagacataatagcaacagacatacaaactaaag

SEQ ID NO: 16979 - DNA, 301 bp, Artificial Sequence
  Ercc5.3_NTC.46
  crRNA array
  misc_feature (148)..(157): n is a, c, g, or t
cttggctttatatatcttgtggaaaggacgaaacaccgtaatttctactaagtgtagatggagtgggtccaggcctcgttaatttctactaagtgtagatagcgggtcgtagacgcgcggtaatttctactaagtgtagatttttttnnnnnnnnnnaagcttggcgtggatccgatatcaactagatcttgagacaaatggcagtattcatccacaattttaaaagaaaaggggggattggggggtacagtgcaggggaaagaatagtagacataatagcaacagacatacaaactaaag

SEQ ID NO: 16980 - DNA, 301 bp, Artificial Sequence
  Ercc5.3_NTC.47
  crRNA array
  misc_feature (148)..(157): n is a, c, g, or t
cttggctttatatatcttgtggaaaggacgaaacaccgtaatttctactaagtgtagatggagtgggtccaggcctcgttaatttctactaagtgtagattctcgtatcgcgattgttaataatttctactaagtgtagatttttttnnnnnnnnnnaagcttggcgtggatccgatatcaactagatcttgagacaaatggcagtattcatccacaattttaaaagaaaaggggggattggggggtacagtgcaggggaaagaatagtagacataatagcaacagacatacaaactaaag

SEQ ID NO: 16981 - DNA, 301 bp, Artificial Sequence
  Ercc5.3_NTC.48
  crRNA array
  misc_feature (148)..(157): n is a, c, g, or t
cttggctttatatatcttgtggaaaggacgaaacaccgtaatttctactaagtgtagatggagtgggtccaggcctcgttaatttctactaagtgtagatcggtcgactacggctgttagtaatttctactaagtgtagatttttttnnnnnnnnnnaagcttggcgtggatccgatatcaactagatcttgagacaaatggcagtattcatccacaattttaaaagaaaaggggggattggggggtacagtgcaggggaaagaatagtagacataatagcaacagacatacaaactaaag

SEQ ID NO: 16982 - DNA, 301 bp, Artificial Sequence
  Ercc5.3_NTC.49
  crRNA array
  misc_feature (148)..(157): n is a, c, g, or t
cttggctttatatatcttgtggaaaggacgaaacaccgtaatttctactaagtgtagatggagtgggtccaggcctcgttaatttctactaagtgtagattcggggcgcgtcaactgaattaatttctactaagtgtagatttttttnnnnnnnnnnaagcttggcgtggatccgatatcaactagatcttgagacaaatggcagtattcatccacaattttaaaagaaaaggggggattggggggtacagtgcaggggaaagaatagtagacataatagcaacagacatacaaactaaag

SEQ ID NO: 16983 - DNA, 301 bp, Artificial Sequence
  Ercc5.3_NTC.5
  crRNA array
  misc_feature (148)..(157): n is a, c, g, or t
cttggctttatatatcttgtggaaaggacgaaacaccgtaatttctactaagtgtagatggagtgggtccaggcctcgttaatttctactaagtgtagatgcttacgcgtcgcgaatgtataatttctactaagtgtagatttttttnnnnnnnnnnaagcttggcgtggatccgatatcaactagatcttgagacaaatggcagtattcatccacaattttaaaagaaaaggggggattggggggtacagtgcaggggaaagaatagtagacataatagcaacagacatacaaactaaag

SEQ ID NO: 16984 - DNA, 301 bp, Artificial Sequence
  Ercc5.3_NTC.50
  crRNA array
  misc_feature (148)..(157): n is a, c, g, or t
cttggctttatatatcttgtggaaaggacgaaacaccgtaatttctactaagtgtagatggagtgggtccaggcctcgttaatttctactaagtgtagatattgccgctcgcgcaaaatctaatttctactaagtgtagatttttttnnnnnnnnnnaagcttggcgtggatccgatatcaactagatcttgagacaaatggcagtattcatccacaattttaaaagaaaaggggggattggggggtacagtgcaggggaaagaatagtagacataatagcaacagacatacaaactaaag

SEQ ID NO: 16985 - DNA, 301 bp, Artificial Sequence
  Ercc5.3_NTC.51
  crRNA array
  misc_feature (148)..(157): n is a, c, g, or t
cttggctttatatatcttgtggaaaggacgaaacaccgtaatttctactaagtgtagatggagtgggtccaggcctcgttaatttctactaagtgtagattaacgcgcaacacgccaatgtaatttctactaagtgtagatttttttnnnnnnnnnnaagcttggcgtggatccgatatcaactagatcttgagacaaatggcagtattcatccacaattttaaaagaaaaggggggattggggggtacagtgcaggggaaagaatagtagacataatagcaacagacatacaaactaaag

SEQ ID NO: 16986 - DNA, 301 bp, Artificial Sequence
  Ercc5.3_NTC.6
  crRNA array
  misc_feature (148)..(157): n is a, c, g, or t
cttggctttatatatcttgtggaaaggacgaaacaccgtaatttctactaagtgtagatggagtgggtccaggcctcgttaatttctactaagtgtagatcgaatcgcgcctacgggaattaatttctactaagtgtagatttttttnnnnnnnnnnaagcttggcgtggatccgatatcaactagatcttgagacaaatggcagtattcatccacaattttaaaagaaaaggggggattggggggtacagtgcaggggaaagaatagtagacataatagcaacagacatacaaactaaag

SEQ ID NO: 16987 - DNA, 301 bp, Artificial Sequence
  Ercc5.3_NTC.7
  crRNA array
  misc_feature (148)..(157): n is a, c, g, or t
cttggctttatatatcttgtggaaaggacgaaacaccgtaatttctactaagtgtagatggagtgggtccaggcctcgttaatttctactaagtgtagatcgccgaacggataagactattaatttctactaagtgtagatttttttnnnnnnnnnnaagcttggcgtggatccgatatcaactagatcttgagacaaatggcagtattcatccacaattttaaaagaaaaggggggattggggggtacagtgcaggggaaagaatagtagacataatagcaacagacatacaaactaaag

SEQ ID NO: 16988 - DNA, 301 bp, Artificial Sequence
  Ercc5.3_NTC.8
  crRNA array
  misc_feature (148)..(157): n is a, c, g, or t
cttggctttatatatcttgtggaaaggacgaaacaccgtaatttctactaagtgtagatggagtgggtccaggcctcgttaatttctactaagtgtagatcgaccgaggttacgctgggataatttctactaagtgtagatttttttnnnnnnnnnnaagcttggcgtggatccgatatcaactagatcttgagacaaatggcagtattcatccacaattttaaaagaaaaggggggattggggggtacagtgcaggggaaagaatagtagacataatagcaacagacatacaaactaaag

SEQ ID NO: 16989 - DNA, 301 bp, Artificial Sequence
  Ercc5.3_NTC.9
  crRNA array
  misc_feature (148)..(157): n is a, c, g, or t
cttggctttatatatcttgtggaaaggacgaaacaccgtaatttctactaagtgtagatggagtgggtccaggcctcgttaatttctactaagtgtagatatcgccgtacggctatggcataatttctactaagtgtagatttttttnnnnnnnnnnaagcttggcgtggatccgatatcaactagatcttgagacaaatggcagtattcatccacaattttaaaagaaaaggggggattggggggtacagtgcaggggaaagaatagtagacataatagcaacagacatacaaactaaag

SEQ ID NO: 16990 - DNA, 301 bp, Artificial Sequence
  Ercc5.4_NTC.0
  crRNA array
  misc_feature (148)..(157): n is a, c, g, or t
cttggctttatatatcttgtggaaaggacgaaacaccgtaatttctactaagtgtagatcagagccggtggaataatgttaatttctactaagtgtagattatagcgtcgcgcgctaatttaatttctactaagtgtagatttttttnnnnnnnnnnaagcttggcgtggatccgatatcaactagatcttgagacaaatggcagtattcatccacaattttaaaagaaaaggggggattggggggtacagtgcaggggaaagaatagtagacataatagcaacagacatacaaactaaag

SEQ ID NO: 16991 - DNA, 301 bp, Artificial Sequence
  Ercc5.4_NTC.1
  crRNA array
  misc_feature (148)..(157): n is a, c, g, or t
cttggctttatatatcttgtggaaaggacgaaacaccgtaatttctactaagtgtagatcagagccggtggaataatgttaatttctactaagtgtagatcgcgtaaccgttccggctcctaatttctactaagtgtagatttttttnnnnnnnnnnaagcttggcgtggatccgatatcaactagatcttgagacaaatggcagtattcatccacaattttaaaagaaaaggggggattggggggtacagtgcaggggaaagaatagtagacataatagcaacagacatacaaactaaag

SEQ ID NO: 16992 - DNA, 301 bp, Artificial Sequence
  Ercc5.4_NTC.10
  crRNA array
  misc_feature (148)..(157): n is a, c, g, or t
cttggctttatatatcttgtggaaaggacgaaacaccgtaatttctactaagtgtagatcagagccggtggaataatgttaatttctactaagtgtagatcgctaagttcgcgcgggccgtaatttctactaagtgtagatttttttnnnnnnnnnnaagcttggcgtggatccgatatcaactagatcttgagacaaatggcagtattcatccacaattttaaaagaaaaggggggattggggggtacagtgcaggggaaagaatagtagacataatagcaacagacatacaaactaaag

SEQ ID NO: 16993 - DNA, 301 bp, Artificial Sequence
  Ercc5.4_NTC.11
  crRNA array
  misc_feature (148)..(157): n is a, c, g, or t
cttggctttatatatcttgtggaaaggacgaaacaccgtaatttctactaagtgtagatcagagccggtggaataatgttaatttctactaagtgtagatcgttcgtcgacgaagcaatctaatttctactaagtgtagatttttttnnnnnnnnnnaagcttggcgtggatccgatatcaactagatcttgagacaaatggcagtattcatccacaattttaaaagaaaaggggggattggggggtacagtgcaggggaaagaatagtagacataatagcaacagacatacaaactaaag

SEQ ID NO: 16994 - DNA, 301 bp, Artificial Sequence
  Ercc5.4_NTC.12
  crRNA array
  misc_feature (148)..(157): n is a, c, g, or t
cttggctttatatatcttgtggaaaggacgaaacaccgtaatttctactaagtgtagatcagagccggtggaataatgttaatttctactaagtgtagatcgccgacgattaatcaatagtaatttctactaagtgtagatttttttnnnnnnnnnnaagcttggcgtggatccgatatcaactagatcttgagacaaatggcagtattcatccacaattttaaaagaaaaggggggattggggggtacagtgcaggggaaagaatagtagacataatagcaacagacatacaaactaaag

SEQ ID NO: 16995 - DNA, 301 bp, Artificial Sequence
  Ercc5.4_NTC.13
  crRNA array
  misc_feature (148)..(157): n is a, c, g, or t
cttggctttatatatcttgtggaaaggacgaaacaccgtaatttctactaagtgtagatcagagccggtggaataatgttaatttctactaagtgtagatgaccgttgtatcgcgatcaataatttctactaagtgtagatttttttnnnnnnnnnnaagcttggcgtggatccgatatcaactagatcttgagacaaatggcagtattcatccacaattttaaaagaaaaggggggattggggggtacagtgcaggggaaagaatagtagacataatagcaacagacatacaaactaaag

SEQ ID NO: 16996 - DNA, 301 bp, Artificial Sequence
  Ercc5.4_NTC.14
  crRNA array
  misc_feature (148)..(157): n is a, c, g, or t
cttggctttatatatcttgtggaaaggacgaaacaccgtaatttctactaagtgtagatcagagccggtggaataatgttaatttctactaagtgtagatccgttcgtgcgatagtgttttaatttctactaagtgtagatttttttnnnnnnnnnnaagcttggcgtggatccgatatcaactagatcttgagacaaatggcagtattcatccacaattttaaaagaaaaggggggattggggggtacagtgcaggggaaagaatagtagacataatagcaacagacatacaaactaaag

SEQ ID NO: 16997 - DNA, 301 bp, Artificial Sequence
  Ercc5.4_NTC.15
  crRNA array
  misc_feature (148)..(157): n is a, c, g, or t
cttggctttatatatcttgtggaaaggacgaaacaccgtaatttctactaagtgtagatcagagccggtggaataatgttaatttctactaagtgtagatgttgtcgtgccgcgaatttataatttctactaagtgtagatttttttnnnnnnnnnnaagcttggcgtggatccgatatcaactagatcttgagacaaatggcagtattcatccacaattttaaaagaaaaggggggattggggggtacagtgcaggggaaagaatagtagacataatagcaacagacatacaaactaaag

SEQ ID NO: 16998 - DNA, 301 bp, Artificial Sequence
  Ercc5.4_NTC.16
  crRNA array
  misc_feature (148)..(157): n is a, c, g, or t
cttggctttatatatcttgtggaaaggacgaaacaccgtaatttctactaagtgtagatcagagccggtggaataatgttaatttctactaagtgtagatcggtacgttagacgaaaatttaatttctactaagtgtagatttttttnnnnnnnnnnaagcttggcgtggatccgatatcaactagatcttgagacaaatggcagtattcatccacaattttaaaagaaaaggggggattggggggtacagtgcaggggaaagaatagtagacataatagcaacagacatacaaactaaag

SEQ ID NO: 16999 - DNA, 301 bp, Artificial Sequence
  Ercc5.4_NTC.17
  crRNA array
  misc_feature (148)..(157): n is a, c, g, or t
cttggctttatatatcttgtggaaaggacgaaacaccgtaatttctactaagtgtagatcagagccggtggaataatgttaatttctactaagtgtagattatcgaacgctatcgaacgttaatttctactaagtgtagatttttttnnnnnnnnnnaagcttggcgtggatccgatatcaactagatcttgagacaaatggcagtattcatccacaattttaaaagaaaaggggggattggggggtacagtgcaggggaaagaatagtagacataatagcaacagacatacaaactaaag

SEQ ID NO: 17000 - DNA, 301 bp, Artificial Sequence
  Ercc5.4_NTC.18
  crRNA array
  misc_feature (148)..(157): n is a, c, g, or t
cttggctttatatatcttgtggaaaggacgaaacaccgtaatttctactaagtgtagatcagagccggtggaataatgttaatttctactaagtgtagattccggttacgaccggcaaaataatttctactaagtgtagatttttttnnnnnnnnnnaagcttggcgtggatccgatatcaactagatcttgagacaaatggcagtattcatccacaattttaaaagaaaaggggggattggggggtacagtgcaggggaaagaatagtagacataatagcaacagacatacaaactaaag

SEQ ID NO: 17001 - DNA, 301 bp, Artificial Sequence
  Ercc5.4_NTC.19
  crRNA array
  misc_feature (148)..(157): n is a, c, g, or t
cttggctttatatatcttgtggaaaggacgaaacaccgtaatttctactaagtgtagatcagagccggtggaataatgttaatttctactaagtgtagatcgtcgtagaacgatacccgataatttctactaagtgtagatttttttnnnnnnnnnnaagcttggcgtggatccgatatcaactagatcttgagacaaatggcagtattcatccacaattttaaaagaaaaggggggattggggggtacagtgcaggggaaagaatagtagacataatagcaacagacatacaaactaaag

SEQ ID NO: 17002 - DNA, 301 bp, Artificial Sequence
  Ercc5.4_NTC.2
  crRNA array
  misc_feature (148)..(157): n is a, c, g, or t
cttggctttatatatcttgtggaaaggacgaaacaccgtaatttctactaagtgtagatcagagccggtggaataatgttaatttctactaagtgtagatttatgtcgcgccgcgacccgtaatttctactaagtgtagatttttttnnnnnnnnnnaagcttggcgtggatccgatatcaactagatcttgagacaaatggcagtattcatccacaattttaaaagaaaaggggggattggggggtacagtgcaggggaaagaatagtagacataatagcaacagacatacaaactaaag

SEQ ID NO: 17003 - DNA, 301 bp, Artificial Sequence
  Ercc5.4_NTC.20
  crRNA array
  misc_feature (148)..(157): n is a, c, g, or t
cttggctttatatatcttgtggaaaggacgaaacaccgtaatttctactaagtgtagatcagagccggtggaataatgttaatttctactaagtgtagatattccggcgcgaccagaagataatttctactaagtgtagatttttttnnnnnnnnnnaagcttggcgtggatccgatatcaactagatcttgagacaaatggcagtattcatccacaattttaaaagaaaaggggggattggggggtacagtgcaggggaaagaatagtagacataatagcaacagacatacaaactaaag

SEQ ID NO: 17004 - DNA, 301 bp, Artificial Sequence
  Ercc5.4_NTC.21
  crRNA array
  misc_feature (148)..(157): n is a, c, g, or t
cttggctttatatatcttgtggaaaggacgaaacaccgtaatttctactaagtgtagatcagagccggtggaataatgttaatttctactaagtgtagatgtataacttcgcgcggtccgtaatttctactaagtgtagatttttttnnnnnnnnnnaagcttggcgtggatccgatatcaactagatcttgagacaaatggcagtattcatccacaattttaaaagaaaaggggggattggggggtacagtgcaggggaaagaatagtagacataatagcaacagacatacaaactaaag

SEQ ID NO: 17005 - DNA, 301 bp, Artificial Sequence
  Ercc5.4_NTC.22
  crRNA array
  misc_feature (148)..(157): n is a, c, g, or t
cttggctttatatatcttgtggaaaggacgaaacaccgtaatttctactaagtgtagatcagagccggtggaataatgttaatttctactaagtgtagatgcgcgtcaacgtaatgtgcctaatttctactaagtgtagatttttttnnnnnnnnnnaagcttggcgtggatccgatatcaactagatcttgagacaaatggcagtattcatccacaattttaaaagaaaaggggggattggggggtacagtgcaggggaaagaatagtagacataatagcaacagacatacaaactaaag

SEQ ID NO: 17006 - DNA, 301 bp, Artificial Sequence
  Ercc5.4_NTC.23
  crRNA array
  misc_feature (148)..(157): n is a, c, g, or t
cttggctttatatatcttgtggaaaggacgaaacaccgtaatttctactaagtgtagatcagagccggtggaataatgttaatttctactaagtgtagatacgcgctattatcgtaggtgtaatttctactaagtgtagatttttttnnnnnnnnnnaagcttggcgtggatccgatatcaactagatcttgagacaaatggcagtattcatccacaattttaaaagaaaaggggggattggggggtacagtgcaggggaaagaatagtagacataatagcaacagacatacaaactaaag

SEQ ID NO: 17007 - DNA, 301 bp, Artificial Sequence
  Ercc5.4_NTC.24
  crRNA array
  misc_feature (148)..(157): n is a, c, g, or t
cttggctttatatatcttgtggaaaggacgaaacaccgtaatttctactaagtgtagatcagagccggtggaataatgttaatttctactaagtgtagatactatcgacgttcgtcccggtaatttctactaagtgtagatttttttnnnnnnnnnnaagcttggcgtggatccgatatcaactagatcttgagacaaatggcagtattcatccacaattttaaaagaaaaggggggattggggggtacagtgcaggggaaagaatagtagacataatagcaacagacatacaaactaaag

SEQ ID NO: 17008 - DNA, 301 bp, Artificial Sequence
  Ercc5.4_NTC.25
  crRNA array
  misc_feature (148)..(157): n is a, c, g, or t
cttggctttatatatcttgtggaaaggacgaaacaccgtaatttctactaagtgtagatcagagccggtggaataatgttaatttctactaagtgtagattcgcgttatcgtgccgtgcgtaatttctactaagtgtagatttttttnnnnnnnnnnaagcttggcgtggatccgatatcaactagatcttgagacaaatggcagtattcatccacaattttaaaagaaaaggggggattggggggtacagtgcaggggaaagaatagtagacataatagcaacagacatacaaactaaag

SEQ ID NO: 17009 - DNA, 301 bp, Artificial Sequence
  Ercc5.4_NTC.26
  crRNA array
  misc_feature (148)..(157): n is a, c, g, or t
cttggctttatatatcttgtggaaaggacgaaacaccgtaatttctactaagtgtagatcagagccggtggaataatgttaatttctactaagtgtagatcgcgacggcggttttaacactaatttctactaagtgtagatttttttnnnnnnnnnnaagcttggcgtggatccgatatcaactagatcttgagacaaatggcagtattcatccacaattttaaaagaaaaggggggattggggggtacagtgcaggggaaagaatagtagacataatagcaacagacatacaaactaaag

SEQ ID NO: 17010 - DNA, 301 bp, Artificial Sequence
  Ercc5.4_NTC.27
  crRNA array
  misc_feature (148)..(157): n is a, c, g, or t
cttggctttatatatcttgtggaaaggacgaaacaccgtaatttctactaagtgtagatcagagccggtggaataatgttaatttctactaagtgtagatgtcgcgttgcgaccggcgcttaatttctactaagtgtagatttttttnnnnnnnnnnaagcttggcgtggatccgatatcaactagatcttgagacaaatggcagtattcatccacaattttaaaagaaaaggggggattggggggtacagtgcaggggaaagaatagtagacataatagcaacagacatacaaactaaag

SEQ ID NO: 17011 - DNA, 301 bp, Artificial Sequence
  Ercc5.4_NTC.28
  crRNA array
  misc_feature (148)..(157): n is a, c, g, or t
cttggctttatatatcttgtggaaaggacgaaacaccgtaatttctactaagtgtagatcagagccggtggaataatgttaatttctactaagtgtagataccgctaatcggcgtaaacttaatttctactaagtgtagatttttttnnnnnnnnnnaagcttggcgtggatccgatatcaactagatcttgagacaaatggcagtattcatccacaattttaaaagaaaaggggggattggggggtacagtgcaggggaaagaatagtagacataatagcaacagacatacaaactaaag

SEQ ID NO: 17012 - DNA, 301 bp, Artificial Sequence
  Ercc5.4_NTC.29
  crRNA array
  misc_feature (148)..(157): n is a, c, g, or t
cttggctttatatatcttgtggaaaggacgaaacaccgtaatttctactaagtgtagatcagagccggtggaataatgttaatttctactaagtgtagatcgcgatctataccgtctatataatttctactaagtgtagatttttttnnnnnnnnnnaagcttggcgtggatccgatatcaactagatcttgagacaaatggcagtattcatccacaattttaaaagaaaaggggggattggggggtacagtgcaggggaaagaatagtagacataatagcaacagacatacaaactaaag

SEQ ID NO: 17013 - DNA, 301 bp, Artificial Sequence
  Ercc5.4_NTC.3
  crRNA array
  misc_feature (148)..(157): n is a, c, g, or t
cttggctttatatatcttgtggaaaggacgaaacaccgtaatttctactaagtgtagatcagagccggtggaataatgttaatttctactaagtgtagattcgacgcgagacgacgtacataatttctactaagtgtagatttttttnnnnnnnnnnaagcttggcgtggatccgatatcaactagatcttgagacaaatggcagtattcatccacaattttaaaagaaaaggggggattggggggtacagtgcaggggaaagaatagtagacataatagcaacagacatacaaactaaag

SEQ ID NO: 17014 - DNA, 301 bp, Artificial Sequence
  Ercc5.4_NTC.30
  crRNA array
  misc_feature (148)..(157): n is a, c, g, or t
cttggctttatatatcttgtggaaaggacgaaacaccgtaatttctactaagtgtagatcagagccggtggaataatgttaatttctactaagtgtagatcgatcgtacgggtgtcctaataatttctactaagtgtagatttttttnnnnnnnnnnaagcttggcgtggatccgatatcaactagatcttgagacaaatggcagtattcatccacaattttaaaagaaaaggggggattggggggtacagtgcaggggaaagaatagtagacataatagcaacagacatacaaactaaag

SEQ ID NO: 17015 - DNA, 301 bp, Artificial Sequence
  Ercc5.4_NTC.31
  crRNA array
  misc_feature (148)..(157): n is a, c, g, or t
cttggctttatatatcttgtggaaaggacgaaacaccgtaatttctactaagtgtagatcagagccggtggaataatgttaatttctactaagtgtagatgccgaccgcgtgattgtaggtaatttctactaagtgtagatttttttnnnnnnnnnnaagcttggcgtggatccgatatcaactagatcttgagacaaatggcagtattcatccacaattttaaaagaaaaggggggattggggggtacagtgcaggggaaagaatagtagacataatagcaacagacatacaaactaaag

SEQ ID NO: 17016 - DNA, 301 bp, Artificial Sequence
  Ercc5.4_NTC.32
  crRNA array
  misc_feature (148)..(157): n is a, c, g, or t
cttggctttatatatcttgtggaaaggacgaaacaccgtaatttctactaagtgtagatcagagccggtggaataatgttaatttctactaagtgtagatgcacgttacgcccgggtcactaatttctactaagtgtagatttttttnnnnnnnnnnaagcttggcgtggatccgatatcaactagatcttgagacaaatggcagtattcatccacaattttaaaagaaaaggggggattggggggtacagtgcaggggaaagaatagtagacataatagcaacagacatacaaactaaag

SEQ ID NO: 17017 - DNA, 301 bp, Artificial Sequence
  Ercc5.4_NTC.33
  crRNA array
  misc_feature (148)..(157): n is a, c, g, or t
cttggctttatatatcttgtggaaaggacgaaacaccgtaatttctactaagtgtagatcagagccggtggaataatgttaatttctactaagtgtagattaagcgaccgacgcattcgctaatttctactaagtgtagatttttttnnnnnnnnnnaagcttggcgtggatccgatatcaactagatcttgagacaaatggcagtattcatccacaattttaaaagaaaaggggggattggggggtacagtgcaggggaaagaatagtagacataatagcaacagacatacaaactaaag

SEQ ID NO: 17018 - DNA, 301 bp, Artificial Sequence
  Ercc5.4_NTC.34
  crRNA array
  misc_feature (148)..(157): n is a, c, g, or t
cttggctttatatatcttgtggaaaggacgaaacaccgtaatttctactaagtgtagatcagagccggtggaataatgttaatttctactaagtgtagattagcgttcgacacgtgaaactaatttctactaagtgtagatttttttnnnnnnnnnnaagcttggcgtggatccgatatcaactagatcttgagacaaatggcagtattcatccacaattttaaaagaaaaggggggattggggggtacagtgcaggggaaagaatagtagacataatagcaacagacatacaaactaaag

SEQ ID NO: 17019 - DNA, 301 bp, Artificial Sequence
  Ercc5.4_NTC.35
  crRNA array
  misc_feature (148)..(157): n is a, c, g, or t
cttggctttatatatcttgtggaaaggacgaaacaccgtaatttctactaagtgtagatcagagccggtggaataatgttaatttctactaagtgtagattggcgcgtaatcgctattcgtaatttctactaagtgtagatttttttnnnnnnnnnnaagcttggcgtggatccgatatcaactagatcttgagacaaatggcagtattcatccacaattttaaaagaaaaggggggattggggggtacagtgcaggggaaagaatagtagacataatagcaacagacatacaaactaaag

SEQ ID NO: 17020 - DNA, 301 bp, Artificial Sequence
  Ercc5.4_NTC.36
  crRNA array
  misc_feature (148)..(157): n is a, c, g, or t
cttggctttatatatcttgtggaaaggacgaaacaccgtaatttctactaagtgtagatcagagccggtggaataatgttaatttctactaagtgtagatcaacccgccgtagcgggccttaatttctactaagtgtagatttttttnnnnnnnnnnaagcttggcgtggatccgatatcaactagatcttgagacaaatggcagtattcatccacaattttaaaagaaaaggggggattggggggtacagtgcaggggaaagaatagtagacataatagcaacagacatacaaactaaag

SEQ ID NO: 17021 - DNA, 301 bp, Artificial Sequence
  Ercc5.4_NTC.37
  crRNA array
  misc_feature (148)..(157): n is a, c, g, or t
cttggctttatatatcttgtggaaaggacgaaacaccgtaatttctactaagtgtagatcagagccggtggaataatgttaatttctactaagtgtagattttgcgttgacgcgattacttaatttctactaagtgtagatttttttnnnnnnnnnnaagcttggcgtggatccgatatcaactagatcttgagacaaatggcagtattcatccacaattttaaaagaaaaggggggattggggggtacagtgcaggggaaagaatagtagacataatagcaacagacatacaaactaaag

SEQ ID NO: 17022 - DNA, 301 bp, Artificial Sequence
  Ercc5.4_NTC.38
  crRNA array
  misc_feature (148)..(157): n is a, c, g, or t
cttggctttatatatcttgtggaaaggacgaaacaccgtaatttctactaagtgtagatcagagccggtggaataatgttaatttctactaagtgtagataacggagcgcgatactaccataatttctactaagtgtagatttttttnnnnnnnnnnaagcttggcgtggatccgatatcaactagatcttgagacaaatggcagtattcatccacaattttaaaagaaaaggggggattggggggtacagtgcaggggaaagaatagtagacataatagcaacagacatacaaactaaag

SEQ ID NO: 17023 - DNA, 301 bp, Artificial Sequence
  Ercc5.4_NTC.39
  crRNA array
  misc_feature (148)..(157): n is a, c, g, or t
cttggctttatatatcttgtggaaaggacgaaacaccgtaatttctactaagtgtagatcagagccggtggaataatgttaatttctactaagtgtagatccggacgttataacgtttcttaatttctactaagtgtagatttttttnnnnnnnnnnaagcttggcgtggatccgatatcaactagatcttgagacaaatggcagtattcatccacaattttaaaagaaaaggggggattggggggtacagtgcaggggaaagaatagtagacataatagcaacagacatacaaactaaag

SEQ ID NO: 17024 - DNA, 301 bp, Artificial Sequence
  Ercc5.4_NTC.4
  crRNA array
  misc_feature (148)..(157): n is a, c, g, or t
cttggctttatatatcttgtggaaaggacgaaacaccgtaatttctactaagtgtagatcagagccggtggaataatgttaatttctactaagtgtagatatacccgtcgcgaacgtgagtaatttctactaagtgtagatttttttnnnnnnnnnnaagcttggcgtggatccgatatcaactagatcttgagacaaatggcagtattcatccacaattttaaaagaaaaggggggattggggggtacagtgcaggggaaagaatagtagacataatagcaacagacatacaaactaaag

SEQ ID NO: 17025 - DNA, 301 bp, Artificial Sequence
  Ercc5.4_NTC.40
  crRNA array
  misc_feature (148)..(157): n is a, c, g, or t
cttggctttatatatcttgtggaaaggacgaaacaccgtaatttctactaagtgtagatcagagccggtggaataatgttaatttctactaagtgtagatattcgcgaacccggccggaataatttctactaagtgtagatttttttnnnnnnnnnnaagcttggcgtggatccgatatcaactagatcttgagacaaatggcagtattcatccacaattttaaaagaaaaggggggattggggggtacagtgcaggggaaagaatagtagacataatagcaacagacatacaaactaaag

SEQ ID NO: 17026 - DNA, 301 bp, Artificial Sequence
  Ercc5.4_NTC.41
  crRNA array
  misc_feature (148)..(157): n is a, c, g, or t
cttggctttatatatcttgtggaaaggacgaaacaccgtaatttctactaagtgtagatcagagccggtggaataatgttaatttctactaagtgtagatttgatggcgcgacgcgttattaatttctactaagtgtagatttttttnnnnnnnnnnaagcttggcgtggatccgatatcaactagatcttgagacaaatggcagtattcatccacaattttaaaagaaaaggggggattggggggtacagtgcaggggaaagaatagtagacataatagcaacagacatacaaactaaag

SEQ ID NO: 17027 - DNA, 301 bp, Artificial Sequence
  Ercc5.4_NTC.42
  crRNA array
  misc_feature (148)..(157): n is a, c, g, or t
cttggctttatatatcttgtggaaaggacgaaacaccgtaatttctactaagtgtagatcagagccggtggaataatgttaatttctactaagtgtagatggtcaaatcgcggcgataactaatttctactaagtgtagatttttttnnnnnnnnnnaagcttggcgtggatccgatatcaactagatcttgagacaaatggcagtattcatccacaattttaaaagaaaaggggggattggggggtacagtgcaggggaaagaatagtagacataatagcaacagacatacaaactaaag

SEQ ID NO: 17028 - DNA, 301 bp, Artificial Sequence
  Ercc5.4_NTC.43
  crRNA array
  misc_feature (148)..(157): n is a, c, g, or t
cttggctttatatatcttgtggaaaggacgaaacaccgtaatttctactaagtgtagatcagagccggtggaataatgttaatttctactaagtgtagatcgactcgcgcattgaactggtaatttctactaagtgtagatttttttnnnnnnnnnnaagcttggcgtggatccgatatcaactagatcttgagacaaatggcagtattcatccacaattttaaaagaaaaggggggattggggggtacagtgcaggggaaagaatagtagacataatagcaacagacatacaaactaaag

SEQ ID NO: 17029 - DNA, 301 bp, Artificial Sequence
  Ercc5.4_NTC.44
  crRNA array
  misc_feature (148)..(157): n is a, c, g, or t
cttggctttatatatcttgtggaaaggacgaaacaccgtaatttctactaagtgtagatcagagccggtggaataatgttaatttctactaagtgtagatagcgtcgtacgatttatcgttaatttctactaagtgtagatttttttnnnnnnnnnnaagcttggcgtggatccgatatcaactagatcttgagacaaatggcagtattcatccacaattttaaaagaaaaggggggattggggggtacagtgcaggggaaagaatagtagacataatagcaacagacatacaaactaaag

SEQ ID NO: 17030 - DNA, 301 bp, Artificial Sequence
  Ercc5.4_NTC.45
  crRNA array
  misc_feature (148)..(157): n is a, c, g, or t
cttggctttatatatcttgtggaaaggacgaaacaccgtaatttctactaagtgtagatcagagccggtggaataatgttaatttctactaagtgtagatcggaacgcgtgatactagggtaatttctactaagtgtagatttttttnnnnnnnnnnaagcttggcgtggatccgatatcaactagatcttgagacaaatggcagtattcatccacaattttaaaagaaaaggggggattggggggtacagtgcaggggaaagaatagtagacataatagcaacagacatacaaactaaag

SEQ ID NO: 17031 - DNA, 301 bp, Artificial Sequence
  Ercc5.4_NTC.46
  crRNA array
  misc_feature (148)..(157): n is a, c, g, or t
cttggctttatatatcttgtggaaaggacgaaacaccgtaatttctactaagtgtagatcagagccggtggaataatgttaatttctactaagtgtagatagcgggtcgtagacgcgcggtaatttctactaagtgtagatttttttnnnnnnnnnnaagcttggcgtggatccgatatcaactagatcttgagacaaatggcagtattcatccacaattttaaaagaaaaggggggattggggggtacagtgcaggggaaagaatagtagacataatagcaacagacatacaaactaaag

SEQ ID NO: 17032 - DNA, 301 bp, Artificial Sequence
  Ercc5.4_NTC.47
  crRNA array
  misc_feature (148)..(157): n is a, c, g, or t
cttggctttatatatcttgtggaaaggacgaaacaccgtaatttctactaagtgtagatcagagccggtggaataatgttaatttctactaagtgtagattctcgtatcgcgattgttaataatttctactaagtgtagatttttttnnnnnnnnnnaagcttggcgtggatccgatatcaactagatcttgagacaaatggcagtattcatccacaattttaaaagaaaaggggggattggggggtacagtgcaggggaaagaatagtagacataatagcaacagacatacaaactaaag

SEQ ID NO: 17033 - DNA, 301 bp, Artificial Sequence
  Ercc5.4_NTC.48
  crRNA array
  misc_feature (148)..(157): n is a, c, g, or t
cttggctttatatatcttgtggaaaggacgaaacaccgtaatttctactaagtgtagatcagagccggtggaataatgttaatttctactaagtgtagatcggtcgactacggctgttagtaatttctactaagtgtagatttttttnnnnnnnnnnaagcttggcgtggatccgatatcaactagatcttgagacaaatggcagtattcatccacaattttaaaagaaaaggggggattggggggtacagtgcaggggaaagaatagtagacataatagcaacagacatacaaactaaag

SEQ ID NO: 17034 - DNA, 301 bp, Artificial Sequence
  Ercc5.4_NTC.49
  crRNA array
  misc_feature (148)..(157): n is a, c, g, or t
cttggctttatatatcttgtggaaaggacgaaacaccgtaatttctactaagtgtagatcagagccggtggaataatgttaatttctactaagtgtagattcggggcgcgtcaactgaattaatttctactaagtgtagatttttttnnnnnnnnnnaagcttggcgtggatccgatatcaactagatcttgagacaaatggcagtattcatccacaattttaaaagaaaaggggggattggggggtacagtgcaggggaaagaatagtagacataatagcaacagacatacaaactaaag

SEQ ID NO: 17035 - DNA, 301 bp, Artificial Sequence
  Ercc5.4_NTC.5
  crRNA array
  misc_feature (148)..(157): n is a, c, g, or t
cttggctttatatatcttgtggaaaggacgaaacaccgtaatttctactaagtgtagatcagagccggtggaataatgttaatttctactaagtgtagatgcttacgcgtcgcgaatgtataatttctactaagtgtagatttttttnnnnnnnnnnaagcttggcgtggatccgatatcaactagatcttgagacaaatggcagtattcatccacaattttaaaagaaaaggggggattggggggtacagtgcaggggaaagaatagtagacataatagcaacagacatacaaactaaag

SEQ ID NO: 17036 - DNA, 301 bp, Artificial Sequence
  Ercc5.4_NTC.50
  crRNA array
  misc_feature (148)..(157): n is a, c, g, or t
cttggctttatatatcttgtggaaaggacgaaacaccgtaatttctactaagtgtagatcagagccggtggaataatgttaatttctactaagtgtagatattgccgctcgcgcaaaatctaatttctactaagtgtagatttttttnnnnnnnnnnaagcttggcgtggatccgatatcaactagatcttgagacaaatggcagtattcatccacaattttaaaagaaaaggggggattggggggtacagtgcaggggaaagaatagtagacataatagcaacagacatacaaactaaag

SEQ ID NO: 17037 - DNA, 301 bp, Artificial Sequence
  Ercc5.4_NTC.51
  crRNA array
  misc_feature (148)..(157): n is a, c, g, or t
cttggctttatatatcttgtggaaaggacgaaacaccgtaatttctactaagtgtagatcagagccggtggaataatgttaatttctactaagtgtagattaacgcgcaacacgccaatgtaatttctactaagtgtagatttttttnnnnnnnnnnaagcttggcgtggatccgatatcaactagatcttgagacaaatggcagtattcatccacaattttaaaagaaaaggggggattggggggtacagtgcaggggaaagaatagtagacataatagcaacagacatacaaactaaag

SEQ ID NO: 17038 - DNA, 301 bp, Artificial Sequence
  Ercc5.4_NTC.6
  crRNA array
  misc_feature (148)..(157): n is a, c, g, or t
cttggctttatatatcttgtggaaaggacgaaacaccgtaatttctactaagtgtagatcagagccggtggaataatgttaatttctactaagtgtagatcgaatcgcgcctacgggaattaatttctactaagtgtagatttttttnnnnnnnnnnaagcttggcgtggatccgatatcaactagatcttgagacaaatggcagtattcatccacaattttaaaagaaaaggggggattggggggtacagtgcaggggaaagaatagtagacataatagcaacagacatacaaactaaag

SEQ ID NO: 17039 - DNA, 301 bp, Artificial Sequence
  Ercc5.4_NTC.7
  crRNA array
  misc_feature (148)..(157): n is a, c, g, or t
cttggctttatatatcttgtggaaaggacgaaacaccgtaatttctactaagtgtagatcagagccggtggaataatgttaatttctactaagtgtagatcgccgaacggataagactattaatttctactaagtgtagatttttttnnnnnnnnnnaagcttggcgtggatccgatatcaactagatcttgagacaaatggcagtattcatccacaattttaaaagaaaaggggggattggggggtacagtgcaggggaaagaatagtagacataatagcaacagacatacaaactaaag

SEQ ID NO: 17040 - DNA, 301 bp, Artificial Sequence
  Ercc5.4_NTC.8
  crRNA array
  misc_feature (148)..(157): n is a, c, g, or t
cttggctttatatatcttgtggaaaggacgaaacaccgtaatttctactaagtgtagatcagagccggtggaataatgttaatttctactaagtgtagatcgaccgaggttacgctgggataatttctactaagtgtagatttttttnnnnnnnnnnaagcttggcgtggatccgatatcaactagatcttgagacaaatggcagtattcatccacaattttaaaagaaaaggggggattggggggtacagtgcaggggaaagaatagtagacataatagcaacagacatacaaactaaag

SEQ ID NO: 17041 - DNA, 301 bp, Artificial Sequence
  Ercc5.4_NTC.9
  crRNA array
  misc_feature (148)..(157): n is a, c, g, or t
cttggctttatatatcttgtggaaaggacgaaacaccgtaatttctactaagtgtagatcagagccggtggaataatgttaatttctactaagtgtagatatcgccgtacggctatggcataatttctactaagtgtagatttttttnnnnnnnnnnaagcttggcgtggatccgatatcaactagatcttgagacaaatggcagtattcatccacaattttaaaagaaaaggggggattggggggtacagtgcaggggaaagaatagtagacataatagcaacagacatacaaactaaag

SEQ ID NO: 17042 - DNA, 301 bp, Artificial Sequence
  Fanca.1_NTC.0
  crRNA array
  misc_feature (148)..(157): n is a, c, g, or t
cttggctttatatatcttgtggaaaggacgaaacaccgtaatttctactaagtgtagatggaggccccggggcccaccataatttctactaagtgtagattatagcgtcgcgcgctaatttaatttctactaagtgtagatttttttnnnnnnnnnnaagcttggcgtggatccgatatcaactagatcttgagacaaatggcagtattcatccacaattttaaaagaaaaggggggattggggggtacagtgcaggggaaagaatagtagacataatagcaacagacatacaaactaaag

SEQ ID NO: 17043 - DNA, 301 bp, Artificial Sequence
  Fanca.1_NTC.1
  crRNA array
  misc_feature (148)..(157): n is a, c, g, or t
cttggctttatatatcttgtggaaaggacgaaacaccgtaatttctactaagtgtagatggaggccccggggcccaccataatttctactaagtgtagatcgcgtaaccgttccggctcctaatttctactaagtgtagatttttttnnnnnnnnnnaagcttggcgtggatccgatatcaactagatcttgagacaaatggcagtattcatccacaattttaaaagaaaaggggggattggggggtacagtgcaggggaaagaatagtagacataatagcaacagacatacaaactaaag

SEQ ID NO: 17044 - DNA, 301 bp, Artificial Sequence
  Fanca.1_NTC.10
  crRNA array
  misc_feature (148)..(157): n is a, c, g, or t
cttggctttatatatcttgtggaaaggacgaaacaccgtaatttctactaagtgtagatggaggccccggggcccaccataatttctactaagtgtagatcgctaagttcgcgcgggccgtaatttctactaagtgtagatttttttnnnnnnnnnnaagcttggcgtggatccgatatcaactagatcttgagacaaatggcagtattcatccacaattttaaaagaaaaggggggattggggggtacagtgcaggggaaagaatagtagacataatagcaacagacatacaaactaaag

SEQ ID NO: 17045 - DNA, 301 bp, Artificial Sequence
  Fanca.1_NTC.11
  crRNA array
  misc_feature (148)..(157): n is a, c, g, or t
cttggctttatatatcttgtggaaaggacgaaacaccgtaatttctactaagtgtagatggaggccccggggcccaccataatttctactaagtgtagatcgttcgtcgacgaagcaatctaatttctactaagtgtagatttttttnnnnnnnnnnaagcttggcgtggatccgatatcaactagatcttgagacaaatggcagtattcatccacaattttaaaagaaaaggggggattggggggtacagtgcaggggaaagaatagtagacataatagcaacagacatacaaactaaag

SEQ ID NO: 17046 - DNA, 301 bp, Artificial Sequence
  Fanca.1_NTC.12
  crRNA array
  misc_feature (148)..(157): n is a, c, g, or t
cttggctttatatatcttgtggaaaggacgaaacaccgtaatttctactaagtgtagatggaggccccggggcccaccataatttctactaagtgtagatcgccgacgattaatcaatagtaatttctactaagtgtagatttttttnnnnnnnnnnaagcttggcgtggatccgatatcaactagatcttgagacaaatggcagtattcatccacaattttaaaagaaaaggggggattggggggtacagtgcaggggaaagaatagtagacataatagcaacagacatacaaactaaag

SEQ ID NO: 17047 - DNA, 301 bp, Artificial Sequence
  Fanca.1_NTC.13
  crRNA array
  misc_feature (148)..(157): n is a, c, g, or t
cttggctttatatatcttgtggaaaggacgaaacaccgtaatttctactaagtgtagatggaggccccggggcccaccataatttctactaagtgtagatgaccgttgtatcgcgatcaataatttctactaagtgtagatttttttnnnnnnnnnnaagcttggcgtggatccgatatcaactagatcttgagacaaatggcagtattcatccacaattttaaaagaaaaggggggattggggggtacagtgcaggggaaagaatagtagacataatagcaacagacatacaaactaaag

SEQ ID NO: 17048 - DNA, 301 bp, Artificial Sequence
  Fanca.1_NTC.14
  crRNA array
  misc_feature (148)..(157): n is a, c, g, or t
cttggctttatatatcttgtggaaaggacgaaacaccgtaatttctactaagtgtagatggaggccccggggcccaccataatttctactaagtgtagatccgttcgtgcgatagtgttttaatttctactaagtgtagatttttttnnnnnnnnnnaagcttggcgtggatccgatatcaactagatcttgagacaaatggcagtattcatccacaattttaaaagaaaaggggggattggggggtacagtgcaggggaaagaatagtagacataatagcaacagacatacaaactaaag

SEQ ID NO: 17049 - DNA, 301 bp, Artificial Sequence
  Fanca.1_NTC.15
  crRNA array
  misc_feature (148)..(157): n is a, c, g, or t
cttggctttatatatcttgtggaaaggacgaaacaccgtaatttctactaagtgtagatggaggccccggggcccaccataatttctactaagtgtagatgttgtcgtgccgcgaatttataatttctactaagtgtagatttttttnnnnnnnnnnaagcttggcgtggatccgatatcaactagatcttgagacaaatggcagtattcatccacaattttaaaagaaaaggggggattggggggtacagtgcaggggaaagaatagtagacataatagcaacagacatacaaactaaag

SEQ ID NO: 17050 - DNA, 301 bp, Artificial Sequence
  Fanca.1_NTC.16
  crRNA array
  misc_feature (148)..(157): n is a, c, g, or t
cttggctttatatatcttgtggaaaggacgaaacaccgtaatttctactaagtgtagatggaggccccggggcccaccataatttctactaagtgtagatcggtacgttagacgaaaatttaatttctactaagtgtagatttttttnnnnnnnnnnaagcttggcgtggatccgatatcaactagatcttgagacaaatggcagtattcatccacaattttaaaagaaaaggggggattggggggtacagtgcaggggaaagaatagtagacataatagcaacagacatacaaactaaag

SEQ ID NO: 17051 - DNA, 301 bp, Artificial Sequence
  Fanca.1_NTC.17
  crRNA array
  misc_feature (148)..(157): n is a, c, g, or t
cttggctttatatatcttgtggaaaggacgaaacaccgtaatttctactaagtgtagatggaggccccggggcccaccataatttctactaagtgtagattatcgaacgctatcgaacgttaatttctactaagtgtagatttttttnnnnnnnnnnaagcttggcgtggatccgatatcaactagatcttgagacaaatggcagtattcatccacaattttaaaagaaaaggggggattggggggtacagtgcaggggaaagaatagtagacataatagcaacagacatacaaactaaag

SEQ ID NO: 17052 - DNA, 301 bp, Artificial Sequence
  Fanca.1_NTC.18
  crRNA array
  misc_feature (148)..(157): n is a, c, g, or t
cttggctttatatatcttgtggaaaggacgaaacaccgtaatttctactaagtgtagatggaggccccggggcccaccataatttctactaagtgtagattccggttacgaccggcaaaataatttctactaagtgtagatttttttnnnnnnnnnnaagcttggcgtggatccgatatcaactagatcttgagacaaatggcagtattcatccacaattttaaaagaaaaggggggattggggggtacagtgcaggggaaagaatagtagacataatagcaacagacatacaaactaaag

SEQ ID NO: 17053 - DNA, 301 bp, Artificial Sequence
  Fanca.1_NTC.19
  crRNA array
  misc_feature (148)..(157): n is a, c, g, or t
cttggctttatatatcttgtggaaaggacgaaacaccgtaatttctactaagtgtagatggaggccccggggcccaccataatttctactaagtgtagatcgtcgtagaacgatacccgataatttctactaagtgtagatttttttnnnnnnnnnnaagcttggcgtggatccgatatcaactagatcttgagacaaatggcagtattcatccacaattttaaaagaaaaggggggattggggggtacagtgcaggggaaagaatagtagacataatagcaacagacatacaaactaaag

SEQ ID NO: 17054 - DNA, 301 bp, Artificial Sequence
  Fanca.1_NTC.2
  crRNA array
  misc_feature (148)..(157): n is a, c, g, or t
cttggctttatatatcttgtggaaaggacgaaacaccgtaatttctactaagtgtagatggaggccccggggcccaccataatttctactaagtgtagatttatgtcgcgccgcgacccgtaatttctactaagtgtagatttttttnnnnnnnnnnaagcttggcgtggatccgatatcaactagatcttgagacaaatggcagtattcatccacaattttaaaagaaaaggggggattggggggtacagtgcaggggaaagaatagtagacataatagcaacagacatacaaactaaag

SEQ ID NO: 17055 - DNA, 301 bp, Artificial Sequence
  Fanca.1_NTC.20
  crRNA array
  misc_feature (148)..(157): n is a, c, g, or t
cttggctttatatatcttgtggaaaggacgaaacaccgtaatttctactaagtgtagatggaggccccggggcccaccataatttctactaagtgtagatattccggcgcgaccagaagataatttctactaagtgtagatttttttnnnnnnnnnnaagcttggcgtggatccgatatcaactagatcttgagacaaatggcagtattcatccacaattttaaaagaaaaggggggattggggggtacagtgcaggggaaagaatagtagacataatagcaacagacatacaaactaaag

SEQ ID NO: 17056 - DNA, 301 bp, Artificial Sequence
  Fanca.1_NTC.21
  crRNA array
  misc_feature (148)..(157): n is a, c, g, or t
cttggctttatatatcttgtggaaaggacgaaacaccgtaatttctactaagtgtagatggaggccccggggcccaccataatttctactaagtgtagatgtataacttcgcgcggtccgtaatttctactaagtgtagatttttttnnnnnnnnnnaagcttggcgtggatccgatatcaactagatcttgagacaaatggcagtattcatccacaattttaaaagaaaaggggggattggggggtacagtgcaggggaaagaatagtagacataatagcaacagacatacaaactaaag

SEQ ID NO: 17057 - DNA, 301 bp, Artificial Sequence
  Fanca.1_NTC.22
  crRNA array
  misc_feature (148)..(157): n is a, c, g, or t
cttggctttatatatcttgtggaaaggacgaaacaccgtaatttctactaagtgtagatggaggccccggggcccaccataatttctactaagtgtagatgcgcgtcaacgtaatgtgcctaatttctactaagtgtagatttttttnnnnnnnnnnaagcttggcgtggatccgatatcaactagatcttgagacaaatggcagtattcatccacaattttaaaagaaaaggggggattggggggtacagtgcaggggaaagaatagtagacataatagcaacagacatacaaactaaag

SEQ ID NO: 17058 - DNA, 301 bp, Artificial Sequence
  Fanca.1_NTC.23
  crRNA array
  misc_feature (148)..(157): n is a, c, g, or t
cttggctttatatatcttgtggaaaggacgaaacaccgtaatttctactaagtgtagatggaggccccggggcccaccataatttctactaagtgtagatacgcgctattatcgtaggtgtaatttctactaagtgtagatttttttnnnnnnnnnnaagcttggcgtggatccgatatcaactagatcttgagacaaatggcagtattcatccacaattttaaaagaaaaggggggattggggggtacagtgcaggggaaagaatagtagacataatagcaacagacatacaaactaaag

SEQ ID NO: 17059 - DNA, 301 bp, Artificial Sequence
  Fanca.1_NTC.24
  crRNA array
  misc_feature (148)..(157): n is a, c, g, or t
cttggctttatatatcttgtggaaaggacgaaacaccgtaatttctactaagtgtagatggaggccccggggcccaccataatttctactaagtgtagatactatcgacgttcgtcccggtaatttctactaagtgtagatttttttnnnnnnnnnnaagcttggcgtggatccgatatcaactagatcttgagacaaatggcagtattcatccacaattttaaaagaaaaggggggattggggggtacagtgcaggggaaagaatagtagacataatagcaacagacatacaaactaaag

SEQ ID NO: 17060 - DNA, 301 bp, Artificial Sequence
  Fanca.1_NTC.25
  crRNA array
  misc_feature (148)..(157): n is a, c, g, or t
cttggctttatatatcttgtggaaaggacgaaacaccgtaatttctactaagtgtagatggaggccccggggcccaccataatttctactaagtgtagattcgcgttatcgtgccgtgcgtaatttctactaagtgtagatttttttnnnnnnnnnnaagcttggcgtggatccgatatcaactagatcttgagacaaatggcagtattcatccacaattttaaaagaaaaggggggattggggggtacagtgcaggggaaagaatagtagacataatagcaacagacatacaaactaaag

SEQ ID NO: 17061 - DNA, 301 bp, Artificial Sequence
  Fanca.1_NTC.26
  crRNA array
  misc_feature (148)..(157): n is a, c, g, or t
cttggctttatatatcttgtggaaaggacgaaacaccgtaatttctactaagtgtagatggaggccccggggcccaccataatttctactaagtgtagatcgcgacggcggttttaacactaatttctactaagtgtagatttttttnnnnnnnnnnaagcttggcgtggatccgatatcaactagatcttgagacaaatggcagtattcatccacaattttaaaagaaaaggggggattggggggtacagtgcaggggaaagaatagtagacataatagcaacagacatacaaactaaag

SEQ ID NO: 17062 - DNA, 301 bp, Artificial Sequence
  Fanca.1_NTC.27
  crRNA array
  misc_feature (148)..(157): n is a, c, g, or t
cttggctttatatatcttgtggaaaggacgaaacaccgtaatttctactaagtgtagatggaggccccggggcccaccataatttctactaagtgtagatgtcgcgttgcgaccggcgcttaatttctactaagtgtagatttttttnnnnnnnnnnaagcttggcgtggatccgatatcaactagatcttgagacaaatggcagtattcatccacaattttaaaagaaaaggggggattggggggtacagtgcaggggaaagaatagtagacataatagcaacagacatacaaactaaag

SEQ ID NO: 17063 - DNA, 301 bp, Artificial Sequence
  Fanca.1_NTC.28
  crRNA array
  misc_feature (148)..(157): n is a, c, g, or t
cttggctttatatatcttgtggaaaggacgaaacaccgtaatttctactaagtgtagatggaggccccggggcccaccataatttctactaagtgtagataccgctaatcggcgtaaacttaatttctactaagtgtagatttttttnnnnnnnnnnaagcttggcgtggatccgatatcaactagatcttgagacaaatggcagtattcatccacaattttaaaagaaaaggggggattggggggtacagtgcaggggaaagaatagtagacataatagcaacagacatacaaactaaag

SEQ ID NO: 17064 - DNA, 301 bp, Artificial Sequence
  Fanca.1_NTC.29
  crRNA array
  misc_feature (148)..(157): n is a, c, g, or t
cttggctttatatatcttgtggaaaggacgaaacaccgtaatttctactaagtgtagatggaggccccggggcccaccataatttctactaagtgtagatcgcgatctataccgtctatataatttctactaagtgtagatttttttnnnnnnnnnnaagcttggcgtggatccgatatcaactagatcttgagacaaatggcagtattcatccacaattttaaaagaaaaggggggattggggggtacagtgcaggggaaagaatagtagacataatagcaacagacatacaaactaaag

SEQ ID NO: 17065 - DNA, 301 bp, Artificial Sequence
  Fanca.1_NTC.3
  crRNA array
  misc_feature (148)..(157): n is a, c, g, or t
cttggctttatatatcttgtggaaaggacgaaacaccgtaatttctactaagtgtagatggaggccccggggcccaccataatttctactaagtgtagattcgacgcgagacgacgtacataatttctactaagtgtagatttttttnnnnnnnnnnaagcttggcgtggatccgatatcaactagatcttgagacaaatggcagtattcatccacaattttaaaagaaaaggggggattggggggtacagtgcaggggaaagaatagtagacataatagcaacagacatacaaactaaag

SEQ ID NO: 17066 - DNA, 301 bp, Artificial Sequence
  Fanca.1_NTC.30
  crRNA array
  misc_feature (148)..(157): n is a, c, g, or t
cttggctttatatatcttgtggaaaggacgaaacaccgtaatttctactaagtgtagatggaggccccggggcccaccataatttctactaagtgtagatcgatcgtacgggtgtcctaataatttctactaagtgtagatttttttnnnnnnnnnnaagcttggcgtggatccgatatcaactagatcttgagacaaatggcagtattcatccacaattttaaaagaaaaggggggattggggggtacagtgcaggggaaagaatagtagacataatagcaacagacatacaaactaaag

SEQ ID NO: 17067 - DNA, 301 bp, Artificial Sequence
  Fanca.1_NTC.31
  crRNA array
  misc_feature (148)..(157): n is a, c, g, or t
cttggctttatatatcttgtggaaaggacgaaacaccgtaatttctactaagtgtagatggaggccccggggcccaccataatttctactaagtgtagatgccgaccgcgtgattgtaggtaatttctactaagtgtagatttttttnnnnnnnnnnaagcttggcgtggatccgatatcaactagatcttgagacaaatggcagtattcatccacaattttaaaagaaaaggggggattggggggtacagtgcaggggaaagaatagtagacataatagcaacagacatacaaactaaag

SEQ ID NO: 17068 - DNA, 301 bp, Artificial Sequence
  Fanca.1_NTC.32
  crRNA array
  misc_feature (148)..(157): n is a, c, g, or t
cttggctttatatatcttgtggaaaggacgaaacaccgtaatttctactaagtgtagatggaggccccggggcccaccataatttctactaagtgtagatgcacgttacgcccgggtcactaatttctactaagtgtagatttttttnnnnnnnnnnaagcttggcgtggatccgatatcaactagatcttgagacaaatggcagtattcatccacaattttaaaagaaaaggggggattggggggtacagtgcaggggaaagaatagtagacataatagcaacagacatacaaactaaag

SEQ ID NO: 17069 - DNA, 301 bp, Artificial Sequence
  Fanca.1_NTC.33
  crRNA array
  misc_feature (148)..(157): n is a, c, g, or t
cttggctttatatatcttgtggaaaggacgaaacaccgtaatttctactaagtgtagatggaggccccggggcccaccataatttctactaagtgtagattaagcgaccgacgcattcgctaatttctactaagtgtagatttttttnnnnnnnnnnaagcttggcgtggatccgatatcaactagatcttgagacaaatggcagtattcatccacaattttaaaagaaaaggggggattggggggtacagtgcaggggaaagaatagtagacataatagcaacagacatacaaactaaag

SEQ ID NO: 17070 - DNA, 301 bp, Artificial Sequence
  Fanca.1_NTC.34
  crRNA array
  misc_feature (148)..(157): n is a, c, g, or t
cttggctttatatatcttgtggaaaggacgaaacaccgtaatttctactaagtgtagatggaggccccggggcccaccataatttctactaagtgtagattagcgttcgacacgtgaaactaatttctactaagtgtagatttttttnnnnnnnnnnaagcttggcgtggatccgatatcaactagatcttgagacaaatggcagtattcatccacaattttaaaagaaaaggggggattggggggtacagtgcaggggaaagaatagtagacataatagcaacagacatacaaactaaag

SEQ ID NO: 17071 - DNA, 301 bp, Artificial Sequence
  Fanca.1_NTC.35
  crRNA array
  misc_feature (148)..(157): n is a, c, g, or t
cttggctttatatatcttgtggaaaggacgaaacaccgtaatttctactaagtgtagatggaggccccggggcccaccataatttctactaagtgtagattggcgcgtaatcgctattcgtaatttctactaagtgtagatttttttnnnnnnnnnnaagcttggcgtggatccgatatcaactagatcttgagacaaatggcagtattcatccacaattttaaaagaaaaggggggattggggggtacagtgcaggggaaagaatagtagacataatagcaacagacatacaaactaaag

SEQ ID NO: 17072 - DNA, 301 bp, Artificial Sequence
  Fanca.1_NTC.36
  crRNA array
  misc_feature (148)..(157): n is a, c, g, or t
cttggctttatatatcttgtggaaaggacgaaacaccgtaatttctactaagtgtagatggaggccccggggcccaccataatttctactaagtgtagatcaacccgccgtagcgggccttaatttctactaagtgtagatttttttnnnnnnnnnnaagcttggcgtggatccgatatcaactagatcttgagacaaatggcagtattcatccacaattttaaaagaaaaggggggattggggggtacagtgcaggggaaagaatagtagacataatagcaacagacatacaaactaaag

SEQ ID NO: 17073 - DNA, 301 bp, Artificial Sequence
  Fanca.1_NTC.37
  crRNA array
  misc_feature (148)..(157): n is a, c, g, or t
cttggctttatatatcttgtggaaaggacgaaacaccgtaatttctactaagtgtagatggaggccccggggcccaccataatttctactaagtgtagattttgcgttgacgcgattacttaatttctactaagtgtagatttttttnnnnnnnnnnaagcttggcgtggatccgatatcaactagatcttgagacaaatggcagtattcatccacaattttaaaagaaaaggggggattggggggtacagtgcaggggaaagaatagtagacataatagcaacagacatacaaactaaag

SEQ ID NO: 17074 - DNA, 301 bp, Artificial Sequence
  Fanca.1_NTC.38
  crRNA array
  misc_feature (148)..(157): n is a, c, g, or t
cttggctttatatatcttgtggaaaggacgaaacaccgtaatttctactaagtgtagatggaggccccggggcccaccataatttctactaagtgtagataacggagcgcgatactaccataatttctactaagtgtagatttttttnnnnnnnnnnaagcttggcgtggatccgatatcaactagatcttgagacaaatggcagtattcatccacaattttaaaagaaaaggggggattggggggtacagtgcaggggaaagaatagtagacataatagcaacagacatacaaactaaag

SEQ ID NO: 17075 - DNA, 301 bp, Artificial Sequence
  Fanca.1_NTC.39
  crRNA array
  misc_feature (148)..(157): n is a, c, g, or t
cttggctttatatatcttgtggaaaggacgaaacaccgtaatttctactaagtgtagatggaggccccggggcccaccataatttctactaagtgtagatccggacgttataacgtttcttaatttctactaagtgtagatttttttnnnnnnnnnnaagcttggcgtggatccgatatcaactagatcttgagacaaatggcagtattcatccacaattttaaaagaaaaggggggattggggggtacagtgcaggggaaagaatagtagacataatagcaacagacatacaaactaaag

SEQ ID NO: 17076 - DNA, 301 bp, Artificial Sequence
  Fanca.1_NTC.4
  crRNA array
  misc_feature (148)..(157): n is a, c, g, or t
cttggctttatatatcttgtggaaaggacgaaacaccgtaatttctactaagtgtagatggaggccccggggcccaccataatttctactaagtgtagatatacccgtcgcgaacgtgagtaatttctactaagtgtagatttttttnnnnnnnnnnaagcttggcgtggatccgatatcaactagatcttgagacaaatggcagtattcatccacaattttaaaagaaaaggggggattggggggtacagtgcaggggaaagaatagtagacataatagcaacagacatacaaactaaag

SEQ ID NO: 17077 - DNA, 301 bp, Artificial Sequence
  Fanca.1_NTC.40
  crRNA array
  misc_feature (148)..(157): n is a, c, g, or t
cttggctttatatatcttgtggaaaggacgaaacaccgtaatttctactaagtgtagatggaggccccggggcccaccataatttctactaagtgtagatattcgcgaacccggccggaataatttctactaagtgtagatttttttnnnnnnnnnnaagcttggcgtggatccgatatcaactagatcttgagacaaatggcagtattcatccacaattttaaaagaaaaggggggattggggggtacagtgcaggggaaagaatagtagacataatagcaacagacatacaaactaaag

SEQ ID NO: 17078 - DNA, 301 bp, Artificial Sequence
  Fanca.1_NTC.41
  crRNA array
  misc_feature (148)..(157): n is a, c, g, or t
cttggctttatatatcttgtggaaaggacgaaacaccgtaatttctactaagtgtagatggaggccccggggcccaccataatttctactaagtgtagatttgatggcgcgacgcgttattaatttctactaagtgtagatttttttnnnnnnnnnnaagcttggcgtggatccgatatcaactagatcttgagacaaatggcagtattcatccacaattttaaaagaaaaggggggattggggggtacagtgcaggggaaagaatagtagacataatagcaacagacatacaaactaaag

SEQ ID NO: 17079 - DNA, 301 bp, Artificial Sequence
  Fanca.1_NTC.42
  crRNA array
  misc_feature (148)..(157): n is a, c, g, or t
cttggctttatatatcttgtggaaaggacgaaacaccgtaatttctactaagtgtagatggaggccccggggcccaccataatttctactaagtgtagatggtcaaatcgcggcgataactaatttctactaagtgtagatttttttnnnnnnnnnnaagcttggcgtggatccgatatcaactagatcttgagacaaatggcagtattcatccacaattttaaaagaaaaggggggattggggggtacagtgcaggggaaagaatagtagacataatagcaacagacatacaaactaaag

SEQ ID NO: 17080 - DNA, 301 bp, Artificial Sequence
  Fanca.1_NTC.43
  crRNA array
  misc_feature (148)..(157): n is a, c, g, or t
cttggctttatatatcttgtggaaaggacgaaacaccgtaatttctactaagtgtagatggaggccccggggcccaccataatttctactaagtgtagatcgactcgcgcattgaactggtaatttctactaagtgtagatttttttnnnnnnnnnnaagcttggcgtggatccgatatcaactagatcttgagacaaatggcagtattcatccacaattttaaaagaaaaggggggattggggggtacagtgcaggggaaagaatagtagacataatagcaacagacatacaaactaaag

SEQ ID NO: 17081 - DNA, 301 bp, Artificial Sequence
  Fanca.1_NTC.44
  crRNA array
  misc_feature (148)..(157): n is a, c, g, or t
cttggctttatatatcttgtggaaaggacgaaacaccgtaatttctactaagtgtagatggaggccccggggcccaccataatttctactaagtgtagatagcgtcgtacgatttatcgttaatttctactaagtgtagatttttttnnnnnnnnnnaagcttggcgtggatccgatatcaactagatcttgagacaaatggcagtattcatccacaattttaaaagaaaaggggggattggggggtacagtgcaggggaaagaatagtagacataatagcaacagacatacaaactaaag

SEQ ID NO: 17082 - DNA, 301 bp, Artificial Sequence
  Fanca.1_NTC.45
  crRNA array
  misc_feature (148)..(157): n is a, c, g, or t
cttggctttatatatcttgtggaaaggacgaaacaccgtaatttctactaagtgtagatggaggccccggggcccaccataatttctactaagtgtagatcggaacgcgtgatactagggtaatttctactaagtgtagatttttttnnnnnnnnnnaagcttggcgtggatccgatatcaactagatcttgagacaaatggcagtattcatccacaattttaaaagaaaaggggggattggggggtacagtgcaggggaaagaatagtagacataatagcaacagacatacaaactaaag

SEQ ID NO: 17083 - DNA, 301 bp, Artificial Sequence
  Fanca.1_NTC.46
  crRNA array
  misc_feature (148)..(157): n is a, c, g, or t
cttggctttatatatcttgtggaaaggacgaaacaccgtaatttctactaagtgtagatggaggccccggggcccaccataatttctactaagtgtagatagcgggtcgtagacgcgcggtaatttctactaagtgtagatttttttnnnnnnnnnnaagcttggcgtggatccgatatcaactagatcttgagacaaatggcagtattcatccacaattttaaaagaaaaggggggattggggggtacagtgcaggggaaagaatagtagacataatagcaacagacatacaaactaaag

SEQ ID NO: 17084 - DNA, 301 bp, Artificial Sequence
  Fanca.1_NTC.47
  crRNA array
  misc_feature (148)..(157): n is a, c, g, or t
cttggctttatatatcttgtggaaaggacgaaacaccgtaatttctactaagtgtagatggaggccccggggcccaccataatttctactaagtgtagattctcgtatcgcgattgttaataatttctactaagtgtagatttttttnnnnnnnnnnaagcttggcgtggatccgatatcaactagatcttgagacaaatggcagtattcatccacaattttaaaagaaaaggggggattggggggtacagtgcaggggaaagaatagtagacataatagcaacagacatacaaactaaag

SEQ ID NO: 17085 - DNA, 301 bp, Artificial Sequence
  Fanca.1_NTC.48
  crRNA array
  misc_feature (148)..(157): n is a, c, g, or t
cttggctttatatatcttgtggaaaggacgaaacaccgtaatttctactaagtgtagatggaggccccggggcccaccataatttctactaagtgtagatcggtcgactacggctgttagtaatttctactaagtgtagatttttttnnnnnnnnnnaagcttggcgtggatccgatatcaactagatcttgagacaaatggcagtattcatccacaattttaaaagaaaaggggggattggggggtacagtgcaggggaaagaatagtagacataatagcaacagacatacaaactaaag

SEQ ID NO: 17086 - DNA, 301 bp, Artificial Sequence
  Fanca.1_NTC.49
  crRNA array
  misc_feature (148)..(157): n is a, c, g, or t
cttggctttatatatcttgtggaaaggacgaaacaccgtaatttctactaagtgtagatggaggccccggggcccaccataatttctactaagtgtagattcggggcgcgtcaactgaattaatttctactaagtgtagatttttttnnnnnnnnnnaagcttggcgtggatccgatatcaactagatcttgagacaaatggcagtattcatccacaattttaaaagaaaaggggggattggggggtacagtgcaggggaaagaatagtagacataatagcaacagacatacaaactaaag

SEQ ID NO: 17087 - DNA, 301 bp, Artificial Sequence
  Fanca.1_NTC.5
  crRNA array
  misc_feature (148)..(157): n is a, c, g, or t
cttggctttatatatcttgtggaaaggacgaaacaccgtaatttctactaagtgtagatggaggccccggggcccaccataatttctactaagtgtagatgcttacgcgtcgcgaatgtataatttctactaagtgtagatttttttnnnnnnnnnnaagcttggcgtggatccgatatcaactagatcttgagacaaatggcagtattcatccacaattttaaaagaaaaggggggattggggggtacagtgcaggggaaagaatagtagacataatagcaacagacatacaaactaaag

SEQ ID NO: 17088 - DNA, 301 bp, Artificial Sequence
  Fanca.1_NTC.50
  crRNA array
  misc_feature (148)..(157): n is a, c, g, or t
cttggctttatatatcttgtggaaaggacgaaacaccgtaatttctactaagtgtagatggaggccccggggcccaccataatttctactaagtgtagatattgccgctcgcgcaaaatctaatttctactaagtgtagatttttttnnnnnnnnnnaagcttggcgtggatccgatatcaactagatcttgagacaaatggcagtattcatccacaattttaaaagaaaaggggggattggggggtacagtgcaggggaaagaatagtagacataatagcaacagacatacaaactaaag

SEQ ID NO: 17089 - DNA, 301 bp, Artificial Sequence
  Fanca.1_NTC.51
  crRNA array
  misc_feature (148)..(157): n is a, c, g, or t
cttggctttatatatcttgtggaaaggacgaaacaccgtaatttctactaagtgtagatggaggccccggggcccaccataatttctactaagtgtagattaacgcgcaacacgccaatgtaatttctactaagtgtagatttttttnnnnnnnnnnaagcttggcgtggatccgatatcaactagatcttgagacaaatggcagtattcatccacaattttaaaagaaaaggggggattggggggtacagtgcaggggaaagaatagtagacataatagcaacagacatacaaactaaag

SEQ ID NO: 17090 - DNA, 301 bp, Artificial Sequence
  Fanca.1_NTC.6
  crRNA array
  misc_feature (148)..(157): n is a, c, g, or t
cttggctttatatatcttgtggaaaggacgaaacaccgtaatttctactaagtgtagatggaggccccggggcccaccataatttctactaagtgtagatcgaatcgcgcctacgggaattaatttctactaagtgtagatttttttnnnnnnnnnnaagcttggcgtggatccgatatcaactagatcttgagacaaatggcagtattcatccacaattttaaaagaaaaggggggattggggggtacagtgcaggggaaagaatagtagacataatagcaacagacatacaaactaaag

SEQ ID NO: 17091 - DNA, 301 bp, Artificial Sequence
  Fanca.1_NTC.7
  crRNA array
  misc_feature (148)..(157): n is a, c, g, or t
cttggctttatatatcttgtggaaaggacgaaacaccgtaatttctactaagtgtagatggaggccccggggcccaccataatttctactaagtgtagatcgccgaacggataagactattaatttctactaagtgtagatttttttnnnnnnnnnnaagcttggcgtggatccgatatcaactagatcttgagacaaatggcagtattcatccacaattttaaaagaaaaggggggattggggggtacagtgcaggggaaagaatagtagacataatagcaacagacatacaaactaaag

SEQ ID NO: 17092 - DNA, 301 bp, Artificial Sequence
  Fanca.1_NTC.8
  crRNA array
  misc_feature (148)..(157): n is a, c, g, or t
cttggctttatatatcttgtggaaaggacgaaacaccgtaatttctactaagtgtagatggaggccccggggcccaccataatttctactaagtgtagatcgaccgaggttacgctgggataatttctactaagtgtagatttttttnnnnnnnnnnaagcttggcgtggatccgatatcaactagatcttgagacaaatggcagtattcatccacaattttaaaagaaaaggggggattggggggtacagtgcaggggaaagaatagtagacataatagcaacagacatacaaactaaag

SEQ ID NO: 17093 - DNA, 301 bp, Artificial Sequence
  Fanca.1_NTC.9
  crRNA array
  misc_feature (148)..(157): n is a, c, g, or t
cttggctttatatatcttgtggaaaggacgaaacaccgtaatttctactaagtgtagatggaggccccggggcccaccataatttctactaagtgtagatatcgccgtacggctatggcataatttctactaagtgtagatttttttnnnnnnnnnnaagcttggcgtggatccgatatcaactagatcttgagacaaatggcagtattcatccacaattttaaaagaaaaggggggattggggggtacagtgcaggggaaagaatagtagacataatagcaacagacatacaaactaaag

SEQ ID NO: 17094 - DNA, 301 bp, Artificial Sequence
  Fanca.2_NTC.0
  crRNA array
  misc_feature (148)..(157): n is a, c, g, or t
cttggctttatatatcttgtggaaaggacgaaacaccgtaatttctactaagtgtagatagagctaccacctagacagctaatttctactaagtgtagattatagcgtcgcgcgctaatttaatttctactaagtgtagatttttttnnnnnnnnnnaagcttggcgtggatccgatatcaactagatcttgagacaaatggcagtattcatccacaattttaaaagaaaaggggggattggggggtacagtgcaggggaaagaatagtagacataatagcaacagacatacaaactaaag

SEQ ID NO: 17095 - DNA, 301 bp, Artificial Sequence
  Fanca.2_NTC.1
  crRNA array
  misc_feature (148)..(157): n is a, c, g, or t
cttggctttatatatcttgtggaaaggacgaaacaccgtaatttctactaagtgtagatagagctaccacctagacagctaatttctactaagtgtagatcgcgtaaccgttccggctcctaatttctactaagtgtagatttttttnnnnnnnnnnaagcttggcgtggatccgatatcaactagatcttgagacaaatggcagtattcatccacaattttaaaagaaaaggggggattggggggtacagtgcaggggaaagaatagtagacataatagcaacagacatacaaactaaag

SEQ ID NO: 17096 - DNA, 301 bp, Artificial Sequence
  Fanca.2_NTC.10
  crRNA array
  misc_feature (148)..(157): n is a, c, g, or t
cttggctttatatatcttgtggaaaggacgaaacaccgtaatttctactaagtgtagatagagctaccacctagacagctaatttctactaagtgtagatcgctaagttcgcgcgggccgtaatttctactaagtgtagatttttttnnnnnnnnnnaagcttggcgtggatccgatatcaactagatcttgagacaaatggcagtattcatccacaattttaaaagaaaaggggggattggggggtacagtgcaggggaaagaatagtagacataatagcaacagacatacaaactaaag

SEQ ID NO: 17097 - DNA, 301 bp, Artificial Sequence
  Fanca.2_NTC.11
  crRNA array
  misc_feature (148)..(157): n is a, c, g, or t
cttggctttatatatcttgtggaaaggacgaaacaccgtaatttctactaagtgtagatagagctaccacctagacagctaatttctactaagtgtagatcgttcgtcgacgaagcaatctaatttctactaagtgtagatttttttnnnnnnnnnnaagcttggcgtggatccgatatcaactagatcttgagacaaatggcagtattcatccacaattttaaaagaaaaggggggattggggggtacagtgcaggggaaagaatagtagacataatagcaacagacatacaaactaaag

SEQ ID NO: 17098 - DNA, 301 bp, Artificial Sequence
  Fanca.2_NTC.12
  crRNA array
  misc_feature (148)..(157): n is a, c, g, or t
cttggctttatatatcttgtggaaaggacgaaacaccgtaatttctactaagtgtagatagagctaccacctagacagctaatttctactaagtgtagatcgccgacgattaatcaatagtaatttctactaagtgtagatttttttnnnnnnnnnnaagcttggcgtggatccgatatcaactagatcttgagacaaatggcagtattcatccacaattttaaaagaaaaggggggattggggggtacagtgcaggggaaagaatagtagacataatagcaacagacatacaaactaaag

SEQ ID NO: 17099 - DNA, 301 bp, Artificial Sequence
  Fanca.2_NTC.13
  crRNA array
  misc_feature (148)..(157): n is a, c, g, or t
cttggctttatatatcttgtggaaaggacgaaacaccgtaatttctactaagtgtagatagagctaccacctagacagctaatttctactaagtgtagatgaccgttgtatcgcgatcaataatttctactaagtgtagatttttttnnnnnnnnnnaagcttggcgtggatccgatatcaactagatcttgagacaaatggcagtattcatccacaattttaaaagaaaaggggggattggggggtacagtgcaggggaaagaatagtagacataatagcaacagacatacaaactaaag

SEQ ID NO: 17100 - DNA, 301 bp, Artificial Sequence
  Fanca.2_NTC.14
  crRNA array
  misc_feature (148)..(157): n is a, c, g, or t
cttggctttatatatcttgtggaaaggacgaaacaccgtaatttctactaagtgtagatagagctaccacctagacagctaatttctactaagtgtagatccgttcgtgcgatagtgttttaatttctactaagtgtagatttttttnnnnnnnnnnaagcttggcgtggatccgatatcaactagatcttgagacaaatggcagtattcatccacaattttaaaagaaaaggggggattggggggtacagtgcaggggaaagaatagtagacataatagcaacagacatacaaactaaag

SEQ ID NO: 17101 - DNA, 301 bp, Artificial Sequence
  Fanca.2_NTC.15
  crRNA array
  misc_feature (148)..(157): n is a, c, g, or t
cttggctttatatatcttgtggaaaggacgaaacaccgtaatttctactaagtgtagatagagctaccacctagacagctaatttctactaagtgtagatgttgtcgtgccgcgaatttataatttctactaagtgtagatttttttnnnnnnnnnnaagcttggcgtggatccgatatcaactagatcttgagacaaatggcagtattcatccacaattttaaaagaaaaggggggattggggggtacagtgcaggggaaagaatagtagacataatagcaacagacatacaaactaaag

SEQ ID NO: 17102 - DNA, 301 bp, Artificial Sequence
  Fanca.2_NTC.16
  crRNA array
  misc_feature (148)..(157): n is a, c, g, or t
cttggctttatatatcttgtggaaaggacgaaacaccgtaatttctactaagtgtagatagagctaccacctagacagctaatttctactaagtgtagatcggtacgttagacgaaaatttaatttctactaagtgtagatttttttnnnnnnnnnnaagcttggcgtggatccgatatcaactagatcttgagacaaatggcagtattcatccacaattttaaaagaaaaggggggattggggggtacagtgcaggggaaagaatagtagacataatagcaacagacatacaaactaaag

SEQ ID NO: 17103 - DNA, 301 bp, Artificial Sequence
  Fanca.2_NTC.17
  crRNA array
  misc_feature (148)..(157): n is a, c, g, or t
cttggctttatatatcttgtggaaaggacgaaacaccgtaatttctactaagtgtagatagagctaccacctagacagctaatttctactaagtgtagattatcgaacgctatcgaacgttaatttctactaagtgtagatttttttnnnnnnnnnnaagcttggcgtggatccgatatcaactagatcttgagacaaatggcagtattcatccacaattttaaaagaaaaggggggattggggggtacagtgcaggggaaagaatagtagacataatagcaacagacatacaaactaaag

SEQ ID NO: 17104 - DNA, 301 bp, Artificial Sequence
  Fanca.2_NTC.18
  crRNA array
  misc_feature (148)..(157): n is a, c, g, or t
cttggctttatatatcttgtggaaaggacgaaacaccgtaatttctactaagtgtagatagagctaccacctagacagctaatttctactaagtgtagattccggttacgaccggcaaaataatttctactaagtgtagatttttttnnnnnnnnnnaagcttggcgtggatccgatatcaactagatcttgagacaaatggcagtattcatccacaattttaaaagaaaaggggggattggggggtacagtgcaggggaaagaatagtagacataatagcaacagacatacaaactaaag

SEQ ID NO: 17105 - DNA, 301 bp, Artificial Sequence
  Fanca.2_NTC.19
  crRNA array
  misc_feature (148)..(157): n is a, c, g, or t
cttggctttatatatcttgtggaaaggacgaaacaccgtaatttctactaagtgtagatagagctaccacctagacagctaatttctactaagtgtagatcgtcgtagaacgatacccgataatttctactaagtgtagatttttttnnnnnnnnnnaagcttggcgtggatccgatatcaactagatcttgagacaaatggcagtattcatccacaattttaaaagaaaaggggggattggggggtacagtgcaggggaaagaatagtagacataatagcaacagacatacaaactaaag

SEQ ID NO: 17106 - DNA, 301 bp, Artificial Sequence
  Fanca.2_NTC.2
  crRNA array
  misc_feature (148)..(157): n is a, c, g, or t
cttggctttatatatcttgtggaaaggacgaaacaccgtaatttctactaagtgtagatagagctaccacctagacagctaatttctactaagtgtagatttatgtcgcgccgcgacccgtaatttctactaagtgtagatttttttnnnnnnnnnnaagcttggcgtggatccgatatcaactagatcttgagacaaatggcagtattcatccacaattttaaaagaaaaggggggattggggggtacagtgcaggggaaagaatagtagacataatagcaacagacatacaaactaaag

SEQ ID NO: 17107 - DNA, 301 bp, Artificial Sequence
  Fanca.2_NTC.20
  crRNA array
  misc_feature (148)..(157): n is a, c, g, or t
cttggctttatatatcttgtggaaaggacgaaacaccgtaatttctactaagtgtagatagagctaccacctagacagctaatttctactaagtgtagatattccggcgcgaccagaagataatttctactaagtgtagatttttttnnnnnnnnnnaagcttggcgtggatccgatatcaactagatcttgagacaaatggcagtattcatccacaattttaaaagaaaaggggggattggggggtacagtgcaggggaaagaatagtagacataatagcaacagacatacaaactaaag

SEQ ID NO: 17108 - DNA, 301 bp, Artificial Sequence
  Fanca.2_NTC.21
  crRNA array
  misc_feature (148)..(157): n is a, c, g, or t
cttggctttatatatcttgtggaaaggacgaaacaccgtaatttctactaagtgtagatagagctaccacctagacagctaatttctactaagtgtagatgtataacttcgcgcggtccgtaatttctactaagtgtagatttttttnnnnnnnnnnaagcttggcgtggatccgatatcaactagatcttgagacaaatggcagtattcatccacaattttaaaagaaaaggggggattggggggtacagtgcaggggaaagaatagtagacataatagcaacagacatacaaactaaag

SEQ ID NO: 17109 - DNA, 301 bp, Artificial Sequence
  Fanca.2_NTC.22
  crRNA array
  misc_feature (148)..(157): n is a, c, g, or t
cttggctttatatatcttgtggaaaggacgaaacaccgtaatttctactaagtgtagatagagctaccacctagacagctaatttctactaagtgtagatgcgcgtcaacgtaatgtgcctaatttctactaagtgtagatttttttnnnnnnnnnnaagcttggcgtggatccgatatcaactagatcttgagacaaatggcagtattcatccacaattttaaaagaaaaggggggattggggggtacagtgcaggggaaagaatagtagacataatagcaacagacatacaaactaaag

SEQ ID NO: 17110 - DNA, 301 bp, Artificial Sequence
  Fanca.2_NTC.23
  crRNA array
  misc_feature (148)..(157): n is a, c, g, or t
cttggctttatatatcttgtggaaaggacgaaacaccgtaatttctactaagtgtagatagagctaccacctagacagctaatttctactaagtgtagatacgcgctattatcgtaggtgtaatttctactaagtgtagatttttttnnnnnnnnnnaagcttggcgtggatccgatatcaactagatcttgagacaaatggcagtattcatccacaattttaaaagaaaaggggggattggggggtacagtgcaggggaaagaatagtagacataatagcaacagacatacaaactaaag

SEQ ID NO: 17111 - DNA, 301 bp, Artificial Sequence
  Fanca.2_NTC.24
  crRNA array
  misc_feature (148)..(157): n is a, c, g, or t
cttggctttatatatcttgtggaaaggacgaaacaccgtaatttctactaagtgtagatagagctaccacctagacagctaatttctactaagtgtagatactatcgacgttcgtcccggtaatttctactaagtgtagatttttttnnnnnnnnnnaagcttggcgtggatccgatatcaactagatcttgagacaaatggcagtattcatccacaattttaaaagaaaaggggggattggggggtacagtgcaggggaaagaatagtagacataatagcaacagacatacaaactaaag

SEQ ID NO: 17112 - DNA, 301 bp, Artificial Sequence
  Fanca.2_NTC.25
  crRNA array
  misc_feature (148)..(157): n is a, c, g, or t
cttggctttatatatcttgtggaaaggacgaaacaccgtaatttctactaagtgtagatagagctaccacctagacagctaatttctactaagtgtagattcgcgttatcgtgccgtgcgtaatttctactaagtgtagatttttttnnnnnnnnnnaagcttggcgtggatccgatatcaactagatcttgagacaaatggcagtattcatccacaattttaaaagaaaaggggggattggggggtacagtgcaggggaaagaatagtagacataatagcaacagacatacaaactaaag

SEQ ID NO: 17113 - DNA, 301 bp, Artificial Sequence
  Fanca.2_NTC.26
  crRNA array
  misc_feature (148)..(157): n is a, c, g, or t
cttggctttatatatcttgtggaaaggacgaaacaccgtaatttctactaagtgtagatagagctaccacctagacagctaatttctactaagtgtagatcgcgacggcggttttaacactaatttctactaagtgtagatttttttnnnnnnnnnnaagcttggcgtggatccgatatcaactagatcttgagacaaatggcagtattcatccacaattttaaaagaaaaggggggattggggggtacagtgcaggggaaagaatagtagacataatagcaacagacatacaaactaaag

SEQ ID NO: 17114 - DNA, 301 bp, Artificial Sequence
  Fanca.2_NTC.27
  crRNA array
  misc_feature (148)..(157): n is a, c, g, or t
cttggctttatatatcttgtggaaaggacgaaacaccgtaatttctactaagtgtagatagagctaccacctagacagctaatttctactaagtgtagatgtcgcgttgcgaccggcgcttaatttctactaagtgtagatttttttnnnnnnnnnnaagcttggcgtggatccgatatcaactagatcttgagacaaatggcagtattcatccacaattttaaaagaaaaggggggattggggggtacagtgcaggggaaagaatagtagacataatagcaacagacatacaaactaaag

SEQ ID NO: 17115 - DNA, 301 bp, Artificial Sequence
  Fanca.2_NTC.28
  crRNA array
  misc_feature (148)..(157): n is a, c, g, or t
cttggctttatatatcttgtggaaaggacgaaacaccgtaatttctactaagtgtagatagagctaccacctagacagctaatttctactaagtgtagataccgctaatcggcgtaaacttaatttctactaagtgtagatttttttnnnnnnnnnnaagcttggcgtggatccgatatcaactagatcttgagacaaatggcagtattcatccacaattttaaaagaaaaggggggattggggggtacagtgcaggggaaagaatagtagacataatagcaacagacatacaaactaaag

SEQ ID NO: 17116 - DNA, 301 bp, Artificial Sequence
  Fanca.2_NTC.29
  crRNA array
  misc_feature (148)..(157): n is a, c, g, or t
cttggctttatatatcttgtggaaaggacgaaacaccgtaatttctactaagtgtagatagagctaccacctagacagctaatttctactaagtgtagatcgcgatctataccgtctatataatttctactaagtgtagatttttttnnnnnnnnnnaagcttggcgtggatccgatatcaactagatcttgagacaaatggcagtattcatccacaattttaaaagaaaaggggggattggggggtacagtgcaggggaaagaatagtagacataatagcaacagacatacaaactaaag

SEQ ID NO: 17117 - DNA, 301 bp, Artificial Sequence
  Fanca.2_NTC.3
  crRNA array
  misc_feature (148)..(157): n is a, c, g, or t
cttggctttatatatcttgtggaaaggacgaaacaccgtaatttctactaagtgtagatagagctaccacctagacagctaatttctactaagtgtagattcgacgcgagacgacgtacataatttctactaagtgtagatttttttnnnnnnnnnnaagcttggcgtggatccgatatcaactagatcttgagacaaatggcagtattcatccacaattttaaaagaaaaggggggattggggggtacagtgcaggggaaagaatagtagacataatagcaacagacatacaaactaaag

SEQ ID NO: 17118 - DNA, 301 bp, Artificial Sequence
  Fanca.2_NTC.30
  crRNA array
  misc_feature (148)..(157): n is a, c, g, or t
cttggctttatatatcttgtggaaaggacgaaacaccgtaatttctactaagtgtagatagagctaccacctagacagctaatttctactaagtgtagatcgatcgtacgggtgtcctaataatttctactaagtgtagatttttttnnnnnnnnnnaagcttggcgtggatccgatatcaactagatcttgagacaaatggcagtattcatccacaattttaaaagaaaaggggggattggggggtacagtgcaggggaaagaatagtagacataatagcaacagacatacaaactaaag

SEQ ID NO: 17119 - DNA, 301 bp, Artificial Sequence
  Fanca.2_NTC.31
  crRNA array
  misc_feature (148)..(157): n is a, c, g, or t
cttggctttatatatcttgtggaaaggacgaaacaccgtaatttctactaagtgtagatagagctaccacctagacagctaatttctactaagtgtagatgccgaccgcgtgattgtaggtaatttctactaagtgtagatttttttnnnnnnnnnnaagcttggcgtggatccgatatcaactagatcttgagacaaatggcagtattcatccacaattttaaaagaaaaggggggattggggggtacagtgcaggggaaagaatagtagacataatagcaacagacatacaaactaaag

SEQ ID NO: 17120 - DNA, 301 bp, Artificial Sequence
  Fanca.2_NTC.32
  crRNA array
  misc_feature (148)..(157): n is a, c, g, or t
cttggctttatatatcttgtggaaaggacgaaacaccgtaatttctactaagtgtagatagagctaccacctagacagctaatttctactaagtgtagatgcacgttacgcccgggtcactaatttctactaagtgtagatttttttnnnnnnnnnnaagcttggcgtggatccgatatcaactagatcttgagacaaatggcagtattcatccacaattttaaaagaaaaggggggattggggggtacagtgcaggggaaagaatagtagacataatagcaacagacatacaaactaaag

SEQ ID NO: 17121 - DNA, 301 bp, Artificial Sequence
  Fanca.2_NTC.33
  crRNA array
  misc_feature (148)..(157): n is a, c, g, or t
cttggctttatatatcttgtggaaaggacgaaacaccgtaatttctactaagtgtagatagagctaccacctagacagctaatttctactaagtgtagattaagcgaccgacgcattcgctaatttctactaagtgtagatttttttnnnnnnnnnnaagcttggcgtggatccgatatcaactagatcttgagacaaatggcagtattcatccacaattttaaaagaaaaggggggattggggggtacagtgcaggggaaagaatagtagacataatagcaacagacatacaaactaaag

SEQ ID NO: 17122 - DNA, 301 bp, Artificial Sequence
  Fanca.2_NTC.34
  crRNA array
  misc_feature (148)..(157): n is a, c, g, or t
cttggctttatatatcttgtggaaaggacgaaacaccgtaatttctactaagtgtagatagagctaccacctagacagctaatttctactaagtgtagattagcgttcgacacgtgaaactaatttctactaagtgtagatttttttnnnnnnnnnnaagcttggcgtggatccgatatcaactagatcttgagacaaatggcagtattcatccacaattttaaaagaaaaggggggattggggggtacagtgcaggggaaagaatagtagacataatagcaacagacatacaaactaaag

SEQ ID NO: 17123 - DNA, 301 bp, Artificial Sequence
  Fanca.2_NTC.35
  crRNA array
  misc_feature (148)..(157): n is a, c, g, or t
cttggctttatatatcttgtggaaaggacgaaacaccgtaatttctactaagtgtagatagagctaccacctagacagctaatttctactaagtgtagattggcgcgtaatcgctattcgtaatttctactaagtgtagatttttttnnnnnnnnnnaagcttggcgtggatccgatatcaactagatcttgagacaaatggcagtattcatccacaattttaaaagaaaaggggggattggggggtacagtgcaggggaaagaatagtagacataatagcaacagacatacaaactaaag

SEQ ID NO: 17124 - DNA, 301 bp, Artificial Sequence
  Fanca.2_NTC.36
  crRNA array
  misc_feature (148)..(157): n is a, c, g, or t
cttggctttatatatcttgtggaaaggacgaaacaccgtaatttctactaagtgtagatagagctaccacctagacagctaatttctactaagtgtagatcaacccgccgtagcgggccttaatttctactaagtgtagatttttttnnnnnnnnnnaagcttggcgtggatccgatatcaactagatcttgagacaaatggcagtattcatccacaattttaaaagaaaaggggggattggggggtacagtgcaggggaaagaatagtagacataatagcaacagacatacaaactaaag

SEQ ID NO: 17125 - DNA, 301 bp, Artificial Sequence
  Fanca.2_NTC.37
  crRNA array
  misc_feature (148)..(157): n is a, c, g, or t
cttggctttatatatcttgtggaaaggacgaaacaccgtaatttctactaagtgtagatagagctaccacctagacagctaatttctactaagtgtagattttgcgttgacgcgattacttaatttctactaagtgtagatttttttnnnnnnnnnnaagcttggcgtggatccgatatcaactagatcttgagacaaatggcagtattcatccacaattttaaaagaaaaggggggattggggggtacagtgcaggggaaagaatagtagacataatagcaacagacatacaaactaaag

SEQ ID NO: 17126 - DNA, 301 bp, Artificial Sequence
  Fanca.2_NTC.38
  crRNA array
  misc_feature (148)..(157): n is a, c, g, or t
cttggctttatatatcttgtggaaaggacgaaacaccgtaatttctactaagtgtagatagagctaccacctagacagctaatttctactaagtgtagataacggagcgcgatactaccataatttctactaagtgtagatttttttnnnnnnnnnnaagcttggcgtggatccgatatcaactagatcttgagacaaatggcagtattcatccacaattttaaaagaaaaggggggattggggggtacagtgcaggggaaagaatagtagacataatagcaacagacatacaaactaaag

SEQ ID NO: 17127 - DNA, 301 bp, Artificial Sequence
  Fanca.2_NTC.39
  crRNA array
  misc_feature (148)..(157): n is a, c, g, or t
cttggctttatatatcttgtggaaaggacgaaacaccgtaatttctactaagtgtagatagagctaccacctagacagctaatttctactaagtgtagatccggacgttataacgtttcttaatttctactaagtgtagatttttttnnnnnnnnnnaagcttggcgtggatccgatatcaactagatcttgagacaaatggcagtattcatccacaattttaaaagaaaaggggggattggggggtacagtgcaggggaaagaatagtagacataatagcaacagacatacaaactaaag

SEQ ID NO: 17128 - DNA, 301 bp, Artificial Sequence
  Fanca.2_NTC.4
  crRNA array
  misc_feature (148)..(157): n is a, c, g, or t
cttggctttatatatcttgtggaaaggacgaaacaccgtaatttctactaagtgtagatagagctaccacctagacagctaatttctactaagtgtagatatacccgtcgcgaacgtgagtaatttctactaagtgtagatttttttnnnnnnnnnnaagcttggcgtggatccgatatcaactagatcttgagacaaatggcagtattcatccacaattttaaaagaaaaggggggattggggggtacagtgcaggggaaagaatagtagacataatagcaacagacatacaaactaaag

SEQ ID NO: 17129 - DNA, 301 bp, Artificial Sequence
  Fanca.2_NTC.40
  crRNA array
  misc_feature (148)..(157): n is a, c, g, or t
cttggctttatatatcttgtggaaaggacgaaacaccgtaatttctactaagtgtagatagagctaccacctagacagctaatttctactaagtgtagatattcgcgaacccggccggaataatttctactaagtgtagatttttttnnnnnnnnnnaagcttggcgtggatccgatatcaactagatcttgagacaaatggcagtattcatccacaattttaaaagaaaaggggggattggggggtacagtgcaggggaaagaatagtagacataatagcaacagacatacaaactaaag

SEQ ID NO: 17130 - DNA, 301 bp, Artificial Sequence
  Fanca.2_NTC.41
  crRNA array
  misc_feature (148)..(157): n is a, c, g, or t
cttggctttatatatcttgtggaaaggacgaaacaccgtaatttctactaagtgtagatagagctaccacctagacagctaatttctactaagtgtagatttgatggcgcgacgcgttattaatttctactaagtgtagatttttttnnnnnnnnnnaagcttggcgtggatccgatatcaactagatcttgagacaaatggcagtattcatccacaattttaaaagaaaaggggggattggggggtacagtgcaggggaaagaatagtagacataatagcaacagacatacaaactaaag

SEQ ID NO: 17131 - DNA, 301 bp, Artificial Sequence
  Fanca.2_NTC.42
  crRNA array
  misc_feature (148)..(157): n is a, c, g, or t
cttggctttatatatcttgtggaaaggacgaaacaccgtaatttctactaagtgtagatagagctaccacctagacagctaatttctactaagtgtagatggtcaaatcgcggcgataactaatttctactaagtgtagatttttttnnnnnnnnnnaagcttggcgtggatccgatatcaactagatcttgagacaaatggcagtattcatccacaattttaaaagaaaaggggggattggggggtacagtgcaggggaaagaatagtagacataatagcaacagacatacaaactaaag

SEQ ID NO: 17132 - DNA, 301 bp, Artificial Sequence
  Fanca.2_NTC.43
  crRNA array
  misc_feature (148)..(157): n is a, c, g, or t
cttggctttatatatcttgtggaaaggacgaaacaccgtaatttctactaagtgtagatagagctaccacctagacagctaatttctactaagtgtagatcgactcgcgcattgaactggtaatttctactaagtgtagatttttttnnnnnnnnnnaagcttggcgtggatccgatatcaactagatcttgagacaaatggcagtattcatccacaattttaaaagaaaaggggggattggggggtacagtgcaggggaaagaatagtagacataatagcaacagacatacaaactaaag

SEQ ID NO: 17133 - DNA, 301 bp, Artificial Sequence
  Fanca.2_NTC.44
  crRNA array
  misc_feature (148)..(157): n is a, c, g, or t
cttggctttatatatcttgtggaaaggacgaaacaccgtaatttctactaagtgtagatagagctaccacctagacagctaatttctactaagtgtagatagcgtcgtacgatttatcgttaatttctactaagtgtagatttttttnnnnnnnnnnaagcttggcgtggatccgatatcaactagatcttgagacaaatggcagtattcatccacaattttaaaagaaaaggggggattggggggtacagtgcaggggaaagaatagtagacataatagcaacagacatacaaactaaag

SEQ ID NO: 17134 - DNA, 301 bp, Artificial Sequence
  Fanca.2_NTC.45
  crRNA array
  misc_feature (148)..(157): n is a, c, g, or t
cttggctttatatatcttgtggaaaggacgaaacaccgtaatttctactaagtgtagatagagctaccacctagacagctaatttctactaagtgtagatcggaacgcgtgatactagggtaatttctactaagtgtagatttttttnnnnnnnnnnaagcttggcgtggatccgatatcaactagatcttgagacaaatggcagtattcatccacaattttaaaagaaaaggggggattggggggtacagtgcaggggaaagaatagtagacataatagcaacagacatacaaactaaag

SEQ ID NO: 17135 - DNA, 301 bp, Artificial Sequence
  Fanca.2_NTC.46
  crRNA array
  misc_feature (148)..(157): n is a, c, g, or t
cttggctttatatatcttgtggaaaggacgaaacaccgtaatttctactaagtgtagatagagctaccacctagacagctaatttctactaagtgtagatagcgggtcgtagacgcgcggtaatttctactaagtgtagatttttttnnnnnnnnnnaagcttggcgtggatccgatatcaactagatcttgagacaaatggcagtattcatccacaattttaaaagaaaaggggggattggggggtacagtgcaggggaaagaatagtagacataatagcaacagacatacaaactaaag

SEQ ID NO: 17136 - DNA, 301 bp, Artificial Sequence
  Fanca.2_NTC.47
  crRNA array
  misc_feature (148)..(157): n is a, c, g, or t
cttggctttatatatcttgtggaaaggacgaaacaccgtaatttctactaagtgtagatagagctaccacctagacagctaatttctactaagtgtagattctcgtatcgcgattgttaataatttctactaagtgtagatttttttnnnnnnnnnnaagcttggcgtggatccgatatcaactagatcttgagacaaatggcagtattcatccacaattttaaaagaaaaggggggattggggggtacagtgcaggggaaagaatagtagacataatagcaacagacatacaaactaaag

SEQ ID NO: 17137 - DNA, 301 bp, Artificial Sequence
  Fanca.2_NTC.48
  crRNA array
  misc_feature (148)..(157): n is a, c, g, or t
cttggctttatatatcttgtggaaaggacgaaacaccgtaatttctactaagtgtagatagagctaccacctagacagctaatttctactaagtgtagatcggtcgactacggctgttagtaatttctactaagtgtagatttttttnnnnnnnnnnaagcttggcgtggatccgatatcaactagatcttgagacaaatggcagtattcatccacaattttaaaagaaaaggggggattggggggtacagtgcaggggaaagaatagtagacataatagcaacagacatacaaactaaag

SEQ ID NO: 17138 - DNA, 301 bp, Artificial Sequence
  Fanca.2_NTC.49
  crRNA array
  misc_feature (148)..(157): n is a, c, g, or t
cttggctttatatatcttgtggaaaggacgaaacaccgtaatttctactaagtgtagatagagctaccacctagacagctaatttctactaagtgtagattcggggcgcgtcaactgaattaatttctactaagtgtagatttttttnnnnnnnnnnaagcttggcgtggatccgatatcaactagatcttgagacaaatggcagtattcatccacaattttaaaagaaaaggggggattggggggtacagtgcaggggaaagaatagtagacataatagcaacagacatacaaactaaag

SEQ ID NO: 17139 - DNA, 301 bp, Artificial Sequence
  Fanca.2_NTC.5
  crRNA array
  misc_feature (148)..(157): n is a, c, g, or t
cttggctttatatatcttgtggaaaggacgaaacaccgtaatttctactaagtgtagatagagctaccacctagacagctaatttctactaagtgtagatgcttacgcgtcgcgaatgtataatttctactaagtgtagatttttttnnnnnnnnnnaagcttggcgtggatccgatatcaactagatcttgagacaaatggcagtattcatccacaattttaaaagaaaaggggggattggggggtacagtgcaggggaaagaatagtagacataatagcaacagacatacaaactaaag

SEQ ID NO: 17140 - DNA, 301 bp, Artificial Sequence
  Fanca.2_NTC.50
  crRNA array
  misc_feature (148)..(157): n is a, c, g, or t
cttggctttatatatcttgtggaaaggacgaaacaccgtaatttctactaagtgtagatagagctaccacctagacagctaatttctactaagtgtagatattgccgctcgcgcaaaatctaatttctactaagtgtagatttttttnnnnnnnnnnaagcttggcgtggatccgatatcaactagatcttgagacaaatggcagtattcatccacaattttaaaagaaaaggggggattggggggtacagtgcaggggaaagaatagtagacataatagcaacagacatacaaactaaag

SEQ ID NO: 17141 - DNA, 301 bp, Artificial Sequence
  Fanca.2_NTC.51
  crRNA array
  misc_feature (148)..(157): n is a, c, g, or t
cttggctttatatatcttgtggaaaggacgaaacaccgtaatttctactaagtgtagatagagctaccacctagacagctaatttctactaagtgtagattaacgcgcaacacgccaatgtaatttctactaagtgtagatttttttnnnnnnnnnnaagcttggcgtggatccgatatcaactagatcttgagacaaatggcagtattcatccacaattttaaaagaaaaggggggattggggggtacagtgcaggggaaagaatagtagacataatagcaacagacatacaaactaaag

SEQ ID NO: 17142 - DNA, 301 bp, Artificial Sequence
  Fanca.2_NTC.6
  crRNA array
  misc_feature (148)..(157): n is a, c, g, or t
cttggctttatatatcttgtggaaaggacgaaacaccgtaatttctactaagtgtagatagagctaccacctagacagctaatttctactaagtgtagatcgaatcgcgcctacgggaattaatttctactaagtgtagatttttttnnnnnnnnnnaagcttggcgtggatccgatatcaactagatcttgagacaaatggcagtattcatccacaattttaaaagaaaaggggggattggggggtacagtgcaggggaaagaatagtagacataatagcaacagacatacaaactaaag

SEQ ID NO: 17143 - DNA, 301 bp, Artificial Sequence
  Fanca.2_NTC.7
  crRNA array
  misc_feature (148)..(157): n is a, c, g, or t
cttggctttatatatcttgtggaaaggacgaaacaccgtaatttctactaagtgtagatagagctaccacctagacagctaatttctactaagtgtagatcgccgaacggataagactattaatttctactaagtgtagatttttttnnnnnnnnnnaagcttggcgtggatccgatatcaactagatcttgagacaaatggcagtattcatccacaattttaaaagaaaaggggggattggggggtacagtgcaggggaaagaatagtagacataatagcaacagacatacaaactaaag

SEQ ID NO: 17144 - DNA, 301 bp, Artificial Sequence
  Fanca.2_NTC.8
  crRNA array
  misc_feature (148)..(157): n is a, c, g, or t
cttggctttatatatcttgtggaaaggacgaaacaccgtaatttctactaagtgtagatagagctaccacctagacagctaatttctactaagtgtagatcgaccgaggttacgctgggataatttctactaagtgtagatttttttnnnnnnnnnnaagcttggcgtggatccgatatcaactagatcttgagacaaatggcagtattcatccacaattttaaaagaaaaggggggattggggggtacagtgcaggggaaagaatagtagacataatagcaacagacatacaaactaaag

SEQ ID NO: 17145 - DNA, 301 bp, Artificial Sequence
  Fanca.2_NTC.9
  crRNA array
  misc_feature (148)..(157): n is a, c, g, or t
cttggctttatatatcttgtggaaaggacgaaacaccgtaatttctactaagtgtagatagagctaccacctagacagctaatttctactaagtgtagatatcgccgtacggctatggcataatttctactaagtgtagatttttttnnnnnnnnnnaagcttggcgtggatccgatatcaactagatcttgagacaaatggcagtattcatccacaattttaaaagaaaaggggggattggggggtacagtgcaggggaaagaatagtagacataatagcaacagacatacaaactaaag

SEQ ID NO: 17146 - DNA, 301 bp, Artificial Sequence
  Fanca.3_NTC.0
  crRNA array
  misc_feature (148)..(157): n is a, c, g, or t
cttggctttatatatcttgtggaaaggacgaaacaccgtaatttctactaagtgtagataccaactgctgtgcctcgggtaatttctactaagtgtagattatagcgtcgcgcgctaatttaatttctactaagtgtagatttttttnnnnnnnnnnaagcttggcgtggatccgatatcaactagatcttgagacaaatggcagtattcatccacaattttaaaagaaaaggggggattggggggtacagtgcaggggaaagaatagtagacataatagcaacagacatacaaactaaag

SEQ ID NO: 17147 - DNA, 301 bp, Artificial Sequence
  Fanca.3_NTC.1
  crRNA array
  misc_feature (148)..(157): n is a, c, g, or t
cttggctttatatatcttgtggaaaggacgaaacaccgtaatttctactaagtgtagataccaactgctgtgcctcgggtaatttctactaagtgtagatcgcgtaaccgttccggctcctaatttctactaagtgtagatttttttnnnnnnnnnnaagcttggcgtggatccgatatcaactagatcttgagacaaatggcagtattcatccacaattttaaaagaaaaggggggattggggggtacagtgcaggggaaagaatagtagacataatagcaacagacatacaaactaaag

SEQ ID NO: 17148 - DNA, 301 bp, Artificial Sequence
  Fanca.3_NTC.10
  crRNA array
  misc_feature (148)..(157): n is a, c, g, or t
cttggctttatatatcttgtggaaaggacgaaacaccgtaatttctactaagtgtagataccaactgctgtgcctcgggtaatttctactaagtgtagatcgctaagttcgcgcgggccgtaatttctactaagtgtagatttttttnnnnnnnnnnaagcttggcgtggatccgatatcaactagatcttgagacaaatggcagtattcatccacaattttaaaagaaaaggggggattggggggtacagtgcaggggaaagaatagtagacataatagcaacagacatacaaactaaag

SEQ ID NO: 17149 - DNA, 301 bp, Artificial Sequence
  Fanca.3_NTC.11
  crRNA array
  misc_feature (148)..(157): n is a, c, g, or t
cttggctttatatatcttgtggaaaggacgaaacaccgtaatttctactaagtgtagataccaactgctgtgcctcgggtaatttctactaagtgtagatcgttcgtcgacgaagcaatctaatttctactaagtgtagatttttttnnnnnnnnnnaagcttggcgtggatccgatatcaactagatcttgagacaaatggcagtattcatccacaattttaaaagaaaaggggggattggggggtacagtgcaggggaaagaatagtagacataatagcaacagacatacaaactaaag

SEQ ID NO: 17150 - DNA, 301 bp, Artificial Sequence
  Fanca.3_NTC.12
  crRNA array
  misc_feature (148)..(157): n is a, c, g, or t
cttggctttatatatcttgtggaaaggacgaaacaccgtaatttctactaagtgtagataccaactgctgtgcctcgggtaatttctactaagtgtagatcgccgacgattaatcaatagtaatttctactaagtgtagatttttttnnnnnnnnnnaagcttggcgtggatccgatatcaactagatcttgagacaaatggcagtattcatccacaattttaaaagaaaaggggggattggggggtacagtgcaggggaaagaatagtagacataatagcaacagacatacaaactaaag

SEQ ID NO: 17151 - DNA, 301 bp, Artificial Sequence
  Fanca.3_NTC.13
  crRNA array
  misc_feature (148)..(157): n is a, c, g, or t
cttggctttatatatcttgtggaaaggacgaaacaccgtaatttctactaagtgtagataccaactgctgtgcctcgggtaatttctactaagtgtagatgaccgttgtatcgcgatcaataatttctactaagtgtagatttttttnnnnnnnnnnaagcttggcgtggatccgatatcaactagatcttgagacaaatggcagtattcatccacaattttaaaagaaaaggggggattggggggtacagtgcaggggaaagaatagtagacataatagcaacagacatacaaactaaag

SEQ ID NO: 17152 - DNA, 301 bp, Artificial Sequence
  Fanca.3_NTC.14
  crRNA array
  misc_feature (148)..(157): n is a, c, g, or t
cttggctttatatatcttgtggaaaggacgaaacaccgtaatttctactaagtgtagataccaactgctgtgcctcgggtaatttctactaagtgtagatccgttcgtgcgatagtgttttaatttctactaagtgtagatttttttnnnnnnnnnnaagcttggcgtggatccgatatcaactagatcttgagacaaatggcagtattcatccacaattttaaaagaaaaggggggattggggggtacagtgcaggggaaagaatagtagacataatagcaacagacatacaaactaaag

SEQ ID NO: 17153 - DNA, 301 bp, Artificial Sequence
  Fanca.3_NTC.15
  crRNA array
  misc_feature (148)..(157): n is a, c, g, or t
cttggctttatatatcttgtggaaaggacgaaacaccgtaatttctactaagtgtagataccaactgctgtgcctcgggtaatttctactaagtgtagatgttgtcgtgccgcgaatttataatttctactaagtgtagatttttttnnnnnnnnnnaagcttggcgtggatccgatatcaactagatcttgagacaaatggcagtattcatccacaattttaaaagaaaaggggggattggggggtacagtgcaggggaaagaatagtagacataatagcaacagacatacaaactaaag

SEQ ID NO: 17154 - DNA, 301 bp, Artificial Sequence
  Fanca.3_NTC.16
  crRNA array
  misc_feature (148)..(157): n is a, c, g, or t
cttggctttatatatcttgtggaaaggacgaaacaccgtaatttctactaagtgtagataccaactgctgtgcctcgggtaatttctactaagtgtagatcggtacgttagacgaaaatttaatttctactaagtgtagatttttttnnnnnnnnnnaagcttggcgtggatccgatatcaactagatcttgagacaaatggcagtattcatccacaattttaaaagaaaaggggggattggggggtacagtgcaggggaaagaatagtagacataatagcaacagacatacaaactaaag

SEQ ID NO: 17155 - DNA, 301 bp, Artificial Sequence
  Fanca.3_NTC.17
  crRNA array
  misc_feature (148)..(157): n is a, c, g, or t
cttggctttatatatcttgtggaaaggacgaaacaccgtaatttctactaagtgtagataccaactgctgtgcctcgggtaatttctactaagtgtagattatcgaacgctatcgaacgttaatttctactaagtgtagatttttttnnnnnnnnnnaagcttggcgtggatccgatatcaactagatcttgagacaaatggcagtattcatccacaattttaaaagaaaaggggggattggggggtacagtgcaggggaaagaatagtagacataatagcaacagacatacaaactaaag

SEQ ID NO: 17156 - DNA, 301 bp, Artificial Sequence
  Fanca.3_NTC.18
  crRNA array
  misc_feature (148)..(157): n is a, c, g, or t
cttggctttatatatcttgtggaaaggacgaaacaccgtaatttctactaagtgtagataccaactgctgtgcctcgggtaatttctactaagtgtagattccggttacgaccggcaaaataatttctactaagtgtagatttttttnnnnnnnnnnaagcttggcgtggatccgatatcaactagatcttgagacaaatggcagtattcatccacaattttaaaagaaaaggggggattggggggtacagtgcaggggaaagaatagtagacataatagcaacagacatacaaactaaag

SEQ ID NO: 17157 - DNA, 301 bp, Artificial Sequence
  Fanca.3_NTC.19
  crRNA array
  misc_feature (148)..(157): n is a, c, g, or t
cttggctttatatatcttgtggaaaggacgaaacaccgtaatttctactaagtgtagataccaactgctgtgcctcgggtaatttctactaagtgtagatcgtcgtagaacgatacccgataatttctactaagtgtagatttttttnnnnnnnnnnaagcttggcgtggatccgatatcaactagatcttgagacaaatggcagtattcatccacaattttaaaagaaaaggggggattggggggtacagtgcaggggaaagaatagtagacataatagcaacagacatacaaactaaag

SEQ ID NO: 17158 - DNA, 301 bp, Artificial Sequence
  Fanca.3_NTC.2
  crRNA array
  misc_feature (148)..(157): n is a, c, g, or t
cttggctttatatatcttgtggaaaggacgaaacaccgtaatttctactaagtgtagataccaactgctgtgcctcgggtaatttctactaagtgtagatttatgtcgcgccgcgacccgtaatttctactaagtgtagatttttttnnnnnnnnnnaagcttggcgtggatccgatatcaactagatcttgagacaaatggcagtattcatccacaattttaaaagaaaaggggggattggggggtacagtgcaggggaaagaatagtagacataatagcaacagacatacaaactaaag

SEQ ID NO: 17159 - DNA, 301 bp, Artificial Sequence
  Fanca.3_NTC.20
  crRNA array
  misc_feature (148)..(157): n is a, c, g, or t
cttggctttatatatcttgtggaaaggacgaaacaccgtaatttctactaagtgtagataccaactgctgtgcctcgggtaatttctactaagtgtagatattccggcgcgaccagaagataatttctactaagtgtagatttttttnnnnnnnnnnaagcttggcgtggatccgatatcaactagatcttgagacaaatggcagtattcatccacaattttaaaagaaaaggggggattggggggtacagtgcaggggaaagaatagtagacataatagcaacagacatacaaactaaag

SEQ ID NO: 17160 - DNA, 301 bp, Artificial Sequence
  Fanca.3_NTC.21
  crRNA array
  misc_feature (148)..(157): n is a, c, g, or t
cttggctttatatatcttgtggaaaggacgaaacaccgtaatttctactaagtgtagataccaactgctgtgcctcgggtaatttctactaagtgtagatgtataacttcgcgcggtccgtaatttctactaagtgtagatttttttnnnnnnnnnnaagcttggcgtggatccgatatcaactagatcttgagacaaatggcagtattcatccacaattttaaaagaaaaggggggattggggggtacagtgcaggggaaagaatagtagacataatagcaacagacatacaaactaaag

SEQ ID NO: 17161 - DNA, 301 bp, Artificial Sequence
  Fanca.3_NTC.22
  crRNA array
  misc_feature (148)..(157): n is a, c, g, or t
cttggctttatatatcttgtggaaaggacgaaacaccgtaatttctactaagtgtagataccaactgctgtgcctcgggtaatttctactaagtgtagatgcgcgtcaacgtaatgtgcctaatttctactaagtgtagatttttttnnnnnnnnnnaagcttggcgtggatccgatatcaactagatcttgagacaaatggcagtattcatccacaattttaaaagaaaaggggggattggggggtacagtgcaggggaaagaatagtagacataatagcaacagacatacaaactaaag

SEQ ID NO: 17162 - DNA, 301 bp, Artificial Sequence
  Fanca.3_NTC.23
  crRNA array
  misc_feature (148)..(157): n is a, c, g, or t
cttggctttatatatcttgtggaaaggacgaaacaccgtaatttctactaagtgtagataccaactgctgtgcctcgggtaatttctactaagtgtagatacgcgctattatcgtaggtgtaatttctactaagtgtagatttttttnnnnnnnnnnaagcttggcgtggatccgatatcaactagatcttgagacaaatggcagtattcatccacaattttaaaagaaaaggggggattggggggtacagtgcaggggaaagaatagtagacataatagcaacagacatacaaactaaag

SEQ ID NO: 17163 - DNA, 301 bp, Artificial Sequence
  Fanca.3_NTC.24
  crRNA array
  misc_feature (148)..(157): n is a, c, g, or t
cttggctttatatatcttgtggaaaggacgaaacaccgtaatttctactaagtgtagataccaactgctgtgcctcgggtaatttctactaagtgtagatactatcgacgttcgtcccggtaatttctactaagtgtagatttttttnnnnnnnnnnaagcttggcgtggatccgatatcaactagatcttgagacaaatggcagtattcatccacaattttaaaagaaaaggggggattggggggtacagtgcaggggaaagaatagtagacataatagcaacagacatacaaactaaag

SEQ ID NO: 17164 - DNA, 301 bp, Artificial Sequence
  Fanca.3_NTC.25
  crRNA array
  misc_feature (148)..(157): n is a, c, g, or t
cttggctttatatatcttgtggaaaggacgaaacaccgtaatttctactaagtgtagataccaactgctgtgcctcgggtaatttctactaagtgtagattcgcgttatcgtgccgtgcgtaatttctactaagtgtagatttttttnnnnnnnnnnaagcttggcgtggatccgatatcaactagatcttgagacaaatggcagtattcatccacaattttaaaagaaaaggggggattggggggtacagtgcaggggaaagaatagtagacataatagcaacagacatacaaactaaag

SEQ ID NO: 17165 - DNA, 301 bp, Artificial Sequence
  Fanca.3_NTC.26
  crRNA array
  misc_feature (148)..(157): n is a, c, g, or t
cttggctttatatatcttgtggaaaggacgaaacaccgtaatttctactaagtgtagataccaactgctgtgcctcgggtaatttctactaagtgtagatcgcgacggcggttttaacactaatttctactaagtgtagatttttttnnnnnnnnnnaagcttggcgtggatccgatatcaactagatcttgagacaaatggcagtattcatccacaattttaaaagaaaaggggggattggggggtacagtgcaggggaaagaatagtagacataatagcaacagacatacaaactaaag

SEQ ID NO: 17166 - DNA, 301 bp, Artificial Sequence
  Fanca.3_NTC.27
  crRNA array
  misc_feature (148)..(157): n is a, c, g, or t
cttggctttatatatcttgtggaaaggacgaaacaccgtaatttctactaagtgtagataccaactgctgtgcctcgggtaatttctactaagtgtagatgtcgcgttgcgaccggcgcttaatttctactaagtgtagatttttttnnnnnnnnnnaagcttggcgtggatccgatatcaactagatcttgagacaaatggcagtattcatccacaattttaaaagaaaaggggggattggggggtacagtgcaggggaaagaatagtagacataatagcaacagacatacaaactaaag

SEQ ID NO: 17167 - DNA, 301 bp, Artificial Sequence
  Fanca.3_NTC.28
  crRNA array
  misc_feature (148)..(157): n is a, c, g, or t
cttggctttatatatcttgtggaaaggacgaaacaccgtaatttctactaagtgtagataccaactgctgtgcctcgggtaatttctactaagtgtagataccgctaatcggcgtaaacttaatttctactaagtgtagatttttttnnnnnnnnnnaagcttggcgtggatccgatatcaactagatcttgagacaaatggcagtattcatccacaattttaaaagaaaaggggggattggggggtacagtgcaggggaaagaatagtagacataatagcaacagacatacaaactaaag

SEQ ID NO: 17168 - DNA, 301 bp, Artificial Sequence
  Fanca.3_NTC.29
  crRNA array
  misc_feature (148)..(157): n is a, c, g, or t
cttggctttatatatcttgtggaaaggacgaaacaccgtaatttctactaagtgtagataccaactgctgtgcctcgggtaatttctactaagtgtagatcgcgatctataccgtctatataatttctactaagtgtagatttttttnnnnnnnnnnaagcttggcgtggatccgatatcaactagatcttgagacaaatggcagtattcatccacaattttaaaagaaaaggggggattggggggtacagtgcaggggaaagaatagtagacataatagcaacagacatacaaactaaag

SEQ ID NO: 17169 - DNA, 301 bp, Artificial Sequence
  Fanca.3_NTC.3
  crRNA array
  misc_feature (148)..(157): n is a, c, g, or t
cttggctttatatatcttgtggaaaggacgaaacaccgtaatttctactaagtgtagataccaactgctgtgcctcgggtaatttctactaagtgtagattcgacgcgagacgacgtacataatttctactaagtgtagatttttttnnnnnnnnnnaagcttggcgtggatccgatatcaactagatcttgagacaaatggcagtattcatccacaattttaaaagaaaaggggggattggggggtacagtgcaggggaaagaatagtagacataatagcaacagacatacaaactaaag

SEQ ID NO: 17170 - DNA, 301 bp, Artificial Sequence
  Fanca.3_NTC.30
  crRNA array
  misc_feature (148)..(157): n is a, c, g, or t
cttggctttatatatcttgtggaaaggacgaaacaccgtaatttctactaagtgtagataccaactgctgtgcctcgggtaatttctactaagtgtagatcgatcgtacgggtgtcctaataatttctactaagtgtagatttttttnnnnnnnnnnaagcttggcgtggatccgatatcaactagatcttgagacaaatggcagtattcatccacaattttaaaagaaaaggggggattggggggtacagtgcaggggaaagaatagtagacataatagcaacagacatacaaactaaag

SEQ ID NO: 17171 - DNA, 301 bp, Artificial Sequence
  Fanca.3_NTC.31
  crRNA array
  misc_feature (148)..(157): n is a, c, g, or t
cttggctttatatatcttgtggaaaggacgaaacaccgtaatttctactaagtgtagataccaactgctgtgcctcgggtaatttctactaagtgtagatgccgaccgcgtgattgtaggtaatttctactaagtgtagatttttttnnnnnnnnnnaagcttggcgtggatccgatatcaactagatcttgagacaaatggcagtattcatccacaattttaaaagaaaaggggggattggggggtacagtgcaggggaaagaatagtagacataatagcaacagacatacaaactaaag

SEQ ID NO: 17172 - DNA, 301 bp, Artificial Sequence
  Fanca.3_NTC.32
  crRNA array
  misc_feature (148)..(157): n is a, c, g, or t
cttggctttatatatcttgtggaaaggacgaaacaccgtaatttctactaagtgtagataccaactgctgtgcctcgggtaatttctactaagtgtagatgcacgttacgcccgggtcactaatttctactaagtgtagatttttttnnnnnnnnnnaagcttggcgtggatccgatatcaactagatcttgagacaaatggcagtattcatccacaattttaaaagaaaaggggggattggggggtacagtgcaggggaaagaatagtagacataatagcaacagacatacaaactaaag

SEQ ID NO: 17173 - DNA, 301 bp, Artificial Sequence
  Fanca.3_NTC.33
  crRNA array
  misc_feature (148)..(157): n is a, c, g, or t
cttggctttatatatcttgtggaaaggacgaaacaccgtaatttctactaagtgtagataccaactgctgtgcctcgggtaatttctactaagtgtagattaagcgaccgacgcattcgctaatttctactaagtgtagatttttttnnnnnnnnnnaagcttggcgtggatccgatatcaactagatcttgagacaaatggcagtattcatccacaattttaaaagaaaaggggggattggggggtacagtgcaggggaaagaatagtagacataatagcaacagacatacaaactaaag

SEQ ID NO: 17174 - DNA, 301 bp, Artificial Sequence
  Fanca.3_NTC.34
  crRNA array
  misc_feature (148)..(157): n is a, c, g, or t
cttggctttatatatcttgtggaaaggacgaaacaccgtaatttctactaagtgtagataccaactgctgtgcctcgggtaatttctactaagtgtagattagcgttcgacacgtgaaactaatttctactaagtgtagatttttttnnnnnnnnnnaagcttggcgtggatccgatatcaactagatcttgagacaaatggcagtattcatccacaattttaaaagaaaaggggggattggggggtacagtgcaggggaaagaatagtagacataatagcaacagacatacaaactaaag

SEQ ID NO: 17175 - DNA, 301 bp, Artificial Sequence
  Fanca.3_NTC.35
  crRNA array
  misc_feature (148)..(157): n is a, c, g, or t
cttggctttatatatcttgtggaaaggacgaaacaccgtaatttctactaagtgtagataccaactgctgtgcctcgggtaatttctactaagtgtagattggcgcgtaatcgctattcgtaatttctactaagtgtagatttttttnnnnnnnnnnaagcttggcgtggatccgatatcaactagatcttgagacaaatggcagtattcatccacaattttaaaagaaaaggggggattggggggtacagtgcaggggaaagaatagtagacataatagcaacagacatacaaactaaag

SEQ ID NO: 17176 - DNA, 301 bp, Artificial Sequence
  Fanca.3_NTC.36
  crRNA array
  misc_feature (148)..(157): n is a, c, g, or t
cttggctttatatatcttgtggaaaggacgaaacaccgtaatttctactaagtgtagataccaactgctgtgcctcgggtaatttctactaagtgtagatcaacccgccgtagcgggccttaatttctactaagtgtagatttttttnnnnnnnnnnaagcttggcgtggatccgatatcaactagatcttgagacaaatggcagtattcatccacaattttaaaagaaaaggggggattggggggtacagtgcaggggaaagaatagtagacataatagcaacagacatacaaactaaag

SEQ ID NO: 17177 - DNA, 301 bp, Artificial Sequence
  Fanca.3_NTC.37
  crRNA array
  misc_feature (148)..(157): n is a, c, g, or t
cttggctttatatatcttgtggaaaggacgaaacaccgtaatttctactaagtgtagataccaactgctgtgcctcgggtaatttctactaagtgtagattttgcgttgacgcgattacttaatttctactaagtgtagatttttttnnnnnnnnnnaagcttggcgtggatccgatatcaactagatcttgagacaaatggcagtattcatccacaattttaaaagaaaaggggggattggggggtacagtgcaggggaaagaatagtagacataatagcaacagacatacaaactaaag

SEQ ID NO: 17178 - DNA, 301 bp, Artificial Sequence
  Fanca.3_NTC.38
  crRNA array
  misc_feature (148)..(157): n is a, c, g, or t
cttggctttatatatcttgtggaaaggacgaaacaccgtaatttctactaagtgtagataccaactgctgtgcctcgggtaatttctactaagtgtagataacggagcgcgatactaccataatttctactaagtgtagatttttttnnnnnnnnnnaagcttggcgtggatccgatatcaactagatcttgagacaaatggcagtattcatccacaattttaaaagaaaaggggggattggggggtacagtgcaggggaaagaatagtagacataatagcaacagacatacaaactaaag

SEQ ID NO: 17179 - DNA, 301 bp, Artificial Sequence
  Fanca.3_NTC.39
  crRNA array
  misc_feature (148)..(157): n is a, c, g, or t
cttggctttatatatcttgtggaaaggacgaaacaccgtaatttctactaagtgtagataccaactgctgtgcctcgggtaatttctactaagtgtagatccggacgttataacgtttcttaatttctactaagtgtagatttttttnnnnnnnnnnaagcttggcgtggatccgatatcaactagatcttgagacaaatggcagtattcatccacaattttaaaagaaaaggggggattggggggtacagtgcaggggaaagaatagtagacataatagcaacagacatacaaactaaag

SEQ ID NO: 17180 - DNA, 301 bp, Artificial Sequence
  Fanca.3_NTC.4
  crRNA array
  misc_feature (148)..(157): n is a, c, g, or t
cttggctttatatatcttgtggaaaggacgaaacaccgtaatttctactaagtgtagataccaactgctgtgcctcgggtaatttctactaagtgtagatatacccgtcgcgaacgtgagtaatttctactaagtgtagatttttttnnnnnnnnnnaagcttggcgtggatccgatatcaactagatcttgagacaaatggcagtattcatccacaattttaaaagaaaaggggggattggggggtacagtgcaggggaaagaatagtagacataatagcaacagacatacaaactaaag

SEQ ID NO: 17181 - DNA, 301 bp, Artificial Sequence
  Fanca.3_NTC.40
  crRNA array
  misc_feature (148)..(157): n is a, c, g, or t
cttggctttatatatcttgtggaaaggacgaaacaccgtaatttctactaagtgtagataccaactgctgtgcctcgggtaatttctactaagtgtagatattcgcgaacccggccggaataatttctactaagtgtagatttttttnnnnnnnnnnaagcttggcgtggatccgatatcaactagatcttgagacaaatggcagtattcatccacaattttaaaagaaaaggggggattggggggtacagtgcaggggaaagaatagtagacataatagcaacagacatacaaactaaag

SEQ ID NO: 17182 - DNA, 301 bp, Artificial Sequence
  Fanca.3_NTC.41
  crRNA array
  misc_feature (148)..(157): n is a, c, g, or t
cttggctttatatatcttgtggaaaggacgaaacaccgtaatttctactaagtgtagataccaactgctgtgcctcgggtaatttctactaagtgtagatttgatggcgcgacgcgttattaatttctactaagtgtagatttttttnnnnnnnnnnaagcttggcgtggatccgatatcaactagatcttgagacaaatggcagtattcatccacaattttaaaagaaaaggggggattggggggtacagtgcaggggaaagaatagtagacataatagcaacagacatacaaactaaag

SEQ ID NO: 17183 - DNA, 301 bp, Artificial Sequence
  Fanca.3_NTC.42
  crRNA array
  misc_feature (148)..(157): n is a, c, g, or t
cttggctttatatatcttgtggaaaggacgaaacaccgtaatttctactaagtgtagataccaactgctgtgcctcgggtaatttctactaagtgtagatggtcaaatcgcggcgataactaatttctactaagtgtagatttttttnnnnnnnnnnaagcttggcgtggatccgatatcaactagatcttgagacaaatggcagtattcatccacaattttaaaagaaaaggggggattggggggtacagtgcaggggaaagaatagtagacataatagcaacagacatacaaactaaag

SEQ ID NO: 17184 - DNA, 301 bp, Artificial Sequence
  Fanca.3_NTC.43
  crRNA array
  misc_feature (148)..(157): n is a, c, g, or t
cttggctttatatatcttgtggaaaggacgaaacaccgtaatttctactaagtgtagataccaactgctgtgcctcgggtaatttctactaagtgtagatcgactcgcgcattgaactggtaatttctactaagtgtagatttttttnnnnnnnnnnaagcttggcgtggatccgatatcaactagatcttgagacaaatggcagtattcatccacaattttaaaagaaaaggggggattggggggtacagtgcaggggaaagaatagtagacataatagcaacagacatacaaactaaag

SEQ ID NO: 17185 - DNA, 301 bp, Artificial Sequence
  Fanca.3_NTC.44
  crRNA array
  misc_feature (148)..(157): n is a, c, g, or t
cttggctttatatatcttgtggaaaggacgaaacaccgtaatttctactaagtgtagataccaactgctgtgcctcgggtaatttctactaagtgtagatagcgtcgtacgatttatcgttaatttctactaagtgtagatttttttnnnnnnnnnnaagcttggcgtggatccgatatcaactagatcttgagacaaatggcagtattcatccacaattttaaaagaaaaggggggattggggggtacagtgcaggggaaagaatagtagacataatagcaacagacatacaaactaaag

SEQ ID NO: 17186 - DNA, 301 bp, Artificial Sequence
  Fanca.3_NTC.45
  crRNA array
  misc_feature (148)..(157): n is a, c, g, or t
cttggctttatatatcttgtggaaaggacgaaacaccgtaatttctactaagtgtagataccaactgctgtgcctcgggtaatttctactaagtgtagatcggaacgcgtgatactagggtaatttctactaagtgtagatttttttnnnnnnnnnnaagcttggcgtggatccgatatcaactagatcttgagacaaatggcagtattcatccacaattttaaaagaaaaggggggattggggggtacagtgcaggggaaagaatagtagacataatagcaacagacatacaaactaaag

SEQ ID NO: 17187 - DNA, 301 bp, Artificial Sequence
  Fanca.3_NTC.46
  crRNA array
  misc_feature (148)..(157): n is a, c, g, or t
cttggctttatatatcttgtggaaaggacgaaacaccgtaatttctactaagtgtagataccaactgctgtgcctcgggtaatttctactaagtgtagatagcgggtcgtagacgcgcggtaatttctactaagtgtagatttttttnnnnnnnnnnaagcttggcgtggatccgatatcaactagatcttgagacaaatggcagtattcatccacaattttaaaagaaaaggggggattggggggtacagtgcaggggaaagaatagtagacataatagcaacagacatacaaactaaag

SEQ ID NO: 17188 - DNA, 301 bp, Artificial Sequence
  Fanca.3_NTC.47
  crRNA array
  misc_feature (148)..(157): n is a, c, g, or t
cttggctttatatatcttgtggaaaggacgaaacaccgtaatttctactaagtgtagataccaactgctgtgcctcgggtaatttctactaagtgtagattctcgtatcgcgattgttaataatttctactaagtgtagatttttttnnnnnnnnnnaagcttggcgtggatccgatatcaactagatcttgagacaaatggcagtattcatccacaattttaaaagaaaaggggggattggggggtacagtgcaggggaaagaatagtagacataatagcaacagacatacaaactaaag

SEQ ID NO: 17189 - DNA, 301 bp, Artificial Sequence
  Fanca.3_NTC.48
  crRNA array
  misc_feature (148)..(157): n is a, c, g, or t
cttggctttatatatcttgtggaaaggacgaaacaccgtaatttctactaagtgtagataccaactgctgtgcctcgggtaatttctactaagtgtagatcggtcgactacggctgttagtaatttctactaagtgtagatttttttnnnnnnnnnnaagcttggcgtggatccgatatcaactagatcttgagacaaatggcagtattcatccacaattttaaaagaaaaggggggattggggggtacagtgcaggggaaagaatagtagacataatagcaacagacatacaaactaaag

SEQ ID NO: 17190 - DNA, 301 bp, Artificial Sequence
  Fanca.3_NTC.49
  crRNA array
  misc_feature (148)..(157): n is a, c, g, or t
cttggctttatatatcttgtggaaaggacgaaacaccgtaatttctactaagtgtagataccaactgctgtgcctcgggtaatttctactaagtgtagattcggggcgcgtcaactgaattaatttctactaagtgtagatttttttnnnnnnnnnnaagcttggcgtggatccgatatcaactagatcttgagacaaatggcagtattcatccacaattttaaaagaaaaggggggattggggggtacagtgcaggggaaagaatagtagacataatagcaacagacatacaaactaaag

SEQ ID NO: 17191 - DNA, 301 bp, Artificial Sequence
  Fanca.3_NTC.5
  crRNA array
  misc_feature (148)..(157): n is a, c, g, or t
cttggctttatatatcttgtggaaaggacgaaacaccgtaatttctactaagtgtagataccaactgctgtgcctcgggtaatttctactaagtgtagatgcttacgcgtcgcgaatgtataatttctactaagtgtagatttttttnnnnnnnnnnaagcttggcgtggatccgatatcaactagatcttgagacaaatggcagtattcatccacaattttaaaagaaaaggggggattggggggtacagtgcaggggaaagaatagtagacataatagcaacagacatacaaactaaag

SEQ ID NO: 17192 - DNA, 301 bp, Artificial Sequence
  Fanca.3_NTC.50
  crRNA array
  misc_feature (148)..(157): n is a, c, g, or t
cttggctttatatatcttgtggaaaggacgaaacaccgtaatttctactaagtgtagataccaactgctgtgcctcgggtaatttctactaagtgtagatattgccgctcgcgcaaaatctaatttctactaagtgtagatttttttnnnnnnnnnnaagcttggcgtggatccgatatcaactagatcttgagacaaatggcagtattcatccacaattttaaaagaaaaggggggattggggggtacagtgcaggggaaagaatagtagacataatagcaacagacatacaaactaaag

SEQ ID NO: 17193 - DNA, 301 bp, Artificial Sequence
  Fanca.3_NTC.51
  crRNA array
  misc_feature (148)..(157): n is a, c, g, or t
cttggctttatatatcttgtggaaaggacgaaacaccgtaatttctactaagtgtagataccaactgctgtgcctcgggtaatttctactaagtgtagattaacgcgcaacacgccaatgtaatttctactaagtgtagatttttttnnnnnnnnnnaagcttggcgtggatccgatatcaactagatcttgagacaaatggcagtattcatccacaattttaaaagaaaaggggggattggggggtacagtgcaggggaaagaatagtagacataatagcaacagacatacaaactaaag

SEQ ID NO: 17194 - DNA, 301 bp, Artificial Sequence
  Fanca.3_NTC.6
  crRNA array
  misc_feature (148)..(157): n is a, c, g, or t
cttggctttatatatcttgtggaaaggacgaaacaccgtaatttctactaagtgtagataccaactgctgtgcctcgggtaatttctactaagtgtagatcgaatcgcgcctacgggaattaatttctactaagtgtagatttttttnnnnnnnnnnaagcttggcgtggatccgatatcaactagatcttgagacaaatggcagtattcatccacaattttaaaagaaaaggggggattggggggtacagtgcaggggaaagaatagtagacataatagcaacagacatacaaactaaag

SEQ ID NO: 17195 - DNA, 301 bp, Artificial Sequence
  Fanca.3_NTC.7
  crRNA array
  misc_feature (148)..(157): n is a, c, g, or t
cttggctttatatatcttgtggaaaggacgaaacaccgtaatttctactaagtgtagataccaactgctgtgcctcgggtaatttctactaagtgtagatcgccgaacggataagactattaatttctactaagtgtagatttttttnnnnnnnnnnaagcttggcgtggatccgatatcaactagatcttgagacaaatggcagtattcatccacaattttaaaagaaaaggggggattggggggtacagtgcaggggaaagaatagtagacataatagcaacagacatacaaactaaag

SEQ ID NO: 17196 - DNA, 301 bp, Artificial Sequence
  Fanca.3_NTC.8
  crRNA array
  misc_feature (148)..(157): n is a, c, g, or t
cttggctttatatatcttgtggaaaggacgaaacaccgtaatttctactaagtgtagataccaactgctgtgcctcgggtaatttctactaagtgtagatcgaccgaggttacgctgggataatttctactaagtgtagatttttttnnnnnnnnnnaagcttggcgtggatccgatatcaactagatcttgagacaaatggcagtattcatccacaattttaaaagaaaaggggggattggggggtacagtgcaggggaaagaatagtagacataatagcaacagacatacaaactaaag

SEQ ID NO: 17197 - DNA, 301 bp, Artificial Sequence
  Fanca.3_NTC.9
  crRNA array
  misc_feature (148)..(157): n is a, c, g, or t
cttggctttatatatcttgtggaaaggacgaaacaccgtaatttctactaagtgtagataccaactgctgtgcctcgggtaatttctactaagtgtagatatcgccgtacggctatggcataatttctactaagtgtagatttttttnnnnnnnnnnaagcttggcgtggatccgatatcaactagatcttgagacaaatggcagtattcatccacaattttaaaagaaaaggggggattggggggtacagtgcaggggaaagaatagtagacataatagcaacagacatacaaactaaag

SEQ ID NO: 17198 - DNA, 301 bp, Artificial Sequence
  Fanca.4_NTC.0
  crRNA array
  misc_feature (148)..(157): n is a, c, g, or t
cttggctttatatatcttgtggaaaggacgaaacaccgtaatttctactaagtgtagatcacccacccctggtgccaagtaatttctactaagtgtagattatagcgtcgcgcgctaatttaatttctactaagtgtagatttttttnnnnnnnnnnaagcttggcgtggatccgatatcaactagatcttgagacaaatggcagtattcatccacaattttaaaagaaaaggggggattggggggtacagtgcaggggaaagaatagtagacataatagcaacagacatacaaactaaag

SEQ ID NO: 17199 - DNA, 301 bp, Artificial Sequence
  Fanca.4_NTC.1
  crRNA array
  misc_feature (148)..(157): n is a, c, g, or t
cttggctttatatatcttgtggaaaggacgaaacaccgtaatttctactaagtgtagatcacccacccctggtgccaagtaatttctactaagtgtagatcgcgtaaccgttccggctcctaatttctactaagtgtagatttttttnnnnnnnnnnaagcttggcgtggatccgatatcaactagatcttgagacaaatggcagtattcatccacaattttaaaagaaaaggggggattggggggtacagtgcaggggaaagaatagtagacataatagcaacagacatacaaactaaag

SEQ ID NO: 17200 - DNA, 301 bp, Artificial Sequence
  Fanca.4_NTC.10
  crRNA array
  misc_feature (148)..(157): n is a, c, g, or t
cttggctttatatatcttgtggaaaggacgaaacaccgtaatttctactaagtgtagatcacccacccctggtgccaagtaatttctactaagtgtagatcgctaagttcgcgcgggccgtaatttctactaagtgtagatttttttnnnnnnnnnnaagcttggcgtggatccgatatcaactagatcttgagacaaatggcagtattcatccacaattttaaaagaaaaggggggattggggggtacagtgcaggggaaagaatagtagacataatagcaacagacatacaaactaaag

SEQ ID NO: 17201 - DNA, 301 bp, Artificial Sequence
  Fanca.4_NTC.11
  crRNA array
  misc_feature (148)..(157): n is a, c, g, or t
cttggctttatatatcttgtggaaaggacgaaacaccgtaatttctactaagtgtagatcacccacccctggtgccaagtaatttctactaagtgtagatcgttcgtcgacgaagcaatctaatttctactaagtgtagatttttttnnnnnnnnnnaagcttggcgtggatccgatatcaactagatcttgagacaaatggcagtattcatccacaattttaaaagaaaaggggggattggggggtacagtgcaggggaaagaatagtagacataatagcaacagacatacaaactaaag

SEQ ID NO: 17202 - DNA, 301 bp, Artificial Sequence
  Fanca.4_NTC.12
  crRNA array
  misc_feature (148)..(157): n is a, c, g, or t
cttggctttatatatcttgtggaaaggacgaaacaccgtaatttctactaagtgtagatcacccacccctggtgccaagtaatttctactaagtgtagatcgccgacgattaatcaatagtaatttctactaagtgtagatttttttnnnnnnnnnnaagcttggcgtggatccgatatcaactagatcttgagacaaatggcagtattcatccacaattttaaaagaaaaggggggattggggggtacagtgcaggggaaagaatagtagacataatagcaacagacatacaaactaaag

SEQ ID NO: 17203 - DNA, 301 bp, Artificial Sequence
  Fanca.4_NTC.13
  crRNA array
  misc_feature (148)..(157): n is a, c, g, or t
cttggctttatatatcttgtggaaaggacgaaacaccgtaatttctactaagtgtagatcacccacccctggtgccaagtaatttctactaagtgtagatgaccgttgtatcgcgatcaataatttctactaagtgtagatttttttnnnnnnnnnnaagcttggcgtggatccgatatcaactagatcttgagacaaatggcagtattcatccacaattttaaaagaaaaggggggattggggggtacagtgcaggggaaagaatagtagacataatagcaacagacatacaaactaaag

SEQ ID NO: 17204 - DNA, 301 bp, Artificial Sequence
  Fanca.4_NTC.14
  crRNA array
  misc_feature (148)..(157): n is a, c, g, or t
cttggctttatatatcttgtggaaaggacgaaacaccgtaatttctactaagtgtagatcacccacccctggtgccaagtaatttctactaagtgtagatccgttcgtgcgatagtgttttaatttctactaagtgtagatttttttnnnnnnnnnnaagcttggcgtggatccgatatcaactagatcttgagacaaatggcagtattcatccacaattttaaaagaaaaggggggattggggggtacagtgcaggggaaagaatagtagacataatagcaacagacatacaaactaaag

SEQ ID NO: 17205 - DNA, 301 bp, Artificial Sequence
  Fanca.4_NTC.15
  crRNA array
  misc_feature (148)..(157): n is a, c, g, or t
cttggctttatatatcttgtggaaaggacgaaacaccgtaatttctactaagtgtagatcacccacccctggtgccaagtaatttctactaagtgtagatgttgtcgtgccgcgaatttataatttctactaagtgtagatttttttnnnnnnnnnnaagcttggcgtggatccgatatcaactagatcttgagacaaatggcagtattcatccacaattttaaaagaaaaggggggattggggggtacagtgcaggggaaagaatagtagacataatagcaacagacatacaaactaaag

SEQ ID NO: 17206 - DNA, 301 bp, Artificial Sequence
  Fanca.4_NTC.16
  crRNA array
  misc_feature (148)..(157): n is a, c, g, or t
cttggctttatatatcttgtggaaaggacgaaacaccgtaatttctactaagtgtagatcacccacccctggtgccaagtaatttctactaagtgtagatcggtacgttagacgaaaatttaatttctactaagtgtagatttttttnnnnnnnnnnaagcttggcgtggatccgatatcaactagatcttgagacaaatggcagtattcatccacaattttaaaagaaaaggggggattggggggtacagtgcaggggaaagaatagtagacataatagcaacagacatacaaactaaag

SEQ ID NO: 17207 - DNA, 301 bp, Artificial Sequence
  Fanca.4_NTC.17
  crRNA array
  misc_feature (148)..(157): n is a, c, g, or t
cttggctttatatatcttgtggaaaggacgaaacaccgtaatttctactaagtgtagatcacccacccctggtgccaagtaatttctactaagtgtagattatcgaacgctatcgaacgttaatttctactaagtgtagatttttttnnnnnnnnnnaagcttggcgtggatccgatatcaactagatcttgagacaaatggcagtattcatccacaattttaaaagaaaaggggggattggggggtacagtgcaggggaaagaatagtagacataatagcaacagacatacaaactaaag

SEQ ID NO: 17208 - DNA, 301 bp, Artificial Sequence
  Fanca.4_NTC.18
  crRNA array
  misc_feature (148)..(157): n is a, c, g, or t
cttggctttatatatcttgtggaaaggacgaaacaccgtaatttctactaagtgtagatcacccacccctggtgccaagtaatttctactaagtgtagattccggttacgaccggcaaaataatttctactaagtgtagatttttttnnnnnnnnnnaagcttggcgtggatccgatatcaactagatcttgagacaaatggcagtattcatccacaattttaaaagaaaaggggggattggggggtacagtgcaggggaaagaatagtagacataatagcaacagacatacaaactaaag

SEQ ID NO: 17209 - DNA, 301 bp, Artificial Sequence
  Fanca.4_NTC.19
  crRNA array
  misc_feature (148)..(157): n is a, c, g, or t
cttggctttatatatcttgtggaaaggacgaaacaccgtaatttctactaagtgtagatcacccacccctggtgccaagtaatttctactaagtgtagatcgtcgtagaacgatacccgataatttctactaagtgtagatttttttnnnnnnnnnnaagcttggcgtggatccgatatcaactagatcttgagacaaatggcagtattcatccacaattttaaaagaaaaggggggattggggggtacagtgcaggggaaagaatagtagacataatagcaacagacatacaaactaaag

SEQ ID NO: 17210 - DNA, 301 bp, Artificial Sequence
  Fanca.4_NTC.2
  crRNA array
  misc_feature (148)..(157): n is a, c, g, or t
cttggctttatatatcttgtggaaaggacgaaacaccgtaatttctactaagtgtagatcacccacccctggtgccaagtaatttctactaagtgtagatttatgtcgcgccgcgacccgtaatttctactaagtgtagatttttttnnnnnnnnnnaagcttggcgtggatccgatatcaactagatcttgagacaaatggcagtattcatccacaattttaaaagaaaaggggggattggggggtacagtgcaggggaaagaatagtagacataatagcaacagacatacaaactaaag

SEQ ID NO: 17211 - DNA, 301 bp, Artificial Sequence
  Fanca.4_NTC.20
  crRNA array
  misc_feature (148)..(157): n is a, c, g, or t
cttggctttatatatcttgtggaaaggacgaaacaccgtaatttctactaagtgtagatcacccacccctggtgccaagtaatttctactaagtgtagatattccggcgcgaccagaagataatttctactaagtgtagatttttttnnnnnnnnnnaagcttggcgtggatccgatatcaactagatcttgagacaaatggcagtattcatccacaattttaaaagaaaaggggggattggggggtacagtgcaggggaaagaatagtagacataatagcaacagacatacaaactaaag

SEQ ID NO: 17212 - DNA, 301 bp, Artificial Sequence
  Fanca.4_NTC.21
  crRNA array
  misc_feature (148)..(157): n is a, c, g, or t
cttggctttatatatcttgtggaaaggacgaaacaccgtaatttctactaagtgtagatcacccacccctggtgccaagtaatttctactaagtgtagatgtataacttcgcgcggtccgtaatttctactaagtgtagatttttttnnnnnnnnnnaagcttggcgtggatccgatatcaactagatcttgagacaaatggcagtattcatccacaattttaaaagaaaaggggggattggggggtacagtgcaggggaaagaatagtagacataatagcaacagacatacaaactaaag

SEQ ID NO: 17213 - DNA, 301 bp, Artificial Sequence
  Fanca.4_NTC.22
  crRNA array
  misc_feature (148)..(157): n is a, c, g, or t
cttggctttatatatcttgtggaaaggacgaaacaccgtaatttctactaagtgtagatcacccacccctggtgccaagtaatttctactaagtgtagatgcgcgtcaacgtaatgtgcctaatttctactaagtgtagatttttttnnnnnnnnnnaagcttggcgtggatccgatatcaactagatcttgagacaaatggcagtattcatccacaattttaaaagaaaaggggggattggggggtacagtgcaggggaaagaatagtagacataatagcaacagacatacaaactaaag

SEQ ID NO: 17214 - DNA, 301 bp, Artificial Sequence
  Fanca.4_NTC.23
  crRNA array
  misc_feature (148)..(157): n is a, c, g, or t
cttggctttatatatcttgtggaaaggacgaaacaccgtaatttctactaagtgtagatcacccacccctggtgccaagtaatttctactaagtgtagatacgcgctattatcgtaggtgtaatttctactaagtgtagatttttttnnnnnnnnnnaagcttggcgtggatccgatatcaactagatcttgagacaaatggcagtattcatccacaattttaaaagaaaaggggggattggggggtacagtgcaggggaaagaatagtagacataatagcaacagacatacaaactaaag

SEQ ID NO: 17215 - DNA, 301 bp, Artificial Sequence
  Fanca.4_NTC.24
  crRNA array
  misc_feature (148)..(157): n is a, c, g, or t
cttggctttatatatcttgtggaaaggacgaaacaccgtaatttctactaagtgtagatcacccacccctggtgccaagtaatttctactaagtgtagatactatcgacgttcgtcccggtaatttctactaagtgtagatttttttnnnnnnnnnnaagcttggcgtggatccgatatcaactagatcttgagacaaatggcagtattcatccacaattttaaaagaaaaggggggattggggggtacagtgcaggggaaagaatagtagacataatagcaacagacatacaaactaaag

SEQ ID NO: 17216 - DNA, 301 bp, Artificial Sequence
  Fanca.4_NTC.25
  crRNA array
  misc_feature (148)..(157): n is a, c, g, or t
cttggctttatatatcttgtggaaaggacgaaacaccgtaatttctactaagtgtagatcacccacccctggtgccaagtaatttctactaagtgtagattcgcgttatcgtgccgtgcgtaatttctactaagtgtagatttttttnnnnnnnnnnaagcttggcgtggatccgatatcaactagatcttgagacaaatggcagtattcatccacaattttaaaagaaaaggggggattggggggtacagtgcaggggaaagaatagtagacataatagcaacagacatacaaactaaag

SEQ ID NO: 17217 - DNA, 301 bp, Artificial Sequence
  Fanca.4_NTC.26
  crRNA array
  misc_feature (148)..(157): n is a, c, g, or t
cttggctttatatatcttgtggaaaggacgaaacaccgtaatttctactaagtgtagatcacccacccctggtgccaagtaatttctactaagtgtagatcgcgacggcggttttaacactaatttctactaagtgtagatttttttnnnnnnnnnnaagcttggcgtggatccgatatcaactagatcttgagacaaatggcagtattcatccacaattttaaaagaaaaggggggattggggggtacagtgcaggggaaagaatagtagacataatagcaacagacatacaaactaaag

SEQ ID NO: 17218 - DNA, 301 bp, Artificial Sequence
  Fanca.4_NTC.27
  crRNA array
  misc_feature (148)..(157): n is a, c, g, or t
cttggctttatatatcttgtggaaaggacgaaacaccgtaatttctactaagtgtagatcacccacccctggtgccaagtaatttctactaagtgtagatgtcgcgttgcgaccggcgcttaatttctactaagtgtagatttttttnnnnnnnnnnaagcttggcgtggatccgatatcaactagatcttgagacaaatggcagtattcatccacaattttaaaagaaaaggggggattggggggtacagtgcaggggaaagaatagtagacataatagcaacagacatacaaactaaag

SEQ ID NO: 17219 - DNA, 301 bp, Artificial Sequence
  Fanca.4_NTC.28
  crRNA array
  misc_feature (148)..(157): n is a, c, g, or t
cttggctttatatatcttgtggaaaggacgaaacaccgtaatttctactaagtgtagatcacccacccctggtgccaagtaatttctactaagtgtagataccgctaatcggcgtaaacttaatttctactaagtgtagatttttttnnnnnnnnnnaagcttggcgtggatccgatatcaactagatcttgagacaaatggcagtattcatccacaattttaaaagaaaaggggggattggggggtacagtgcaggggaaagaatagtagacataatagcaacagacatacaaactaaag

SEQ ID NO: 17220 - DNA, 301 bp, Artificial Sequence
  Fanca.4_NTC.29
  crRNA array
  misc_feature (148)..(157): n is a, c, g, or t
cttggctttatatatcttgtggaaaggacgaaacaccgtaatttctactaagtgtagatcacccacccctggtgccaagtaatttctactaagtgtagatcgcgatctataccgtctatataatttctactaagtgtagatttttttnnnnnnnnnnaagcttggcgtggatccgatatcaactagatcttgagacaaatggcagtattcatccacaattttaaaagaaaaggggggattggggggtacagtgcaggggaaagaatagtagacataatagcaacagacatacaaactaaag

SEQ ID NO: 17221 - DNA, 301 bp, Artificial Sequence
  Fanca.4_NTC.3
  crRNA array
  misc_feature (148)..(157): n is a, c, g, or t
cttggctttatatatcttgtggaaaggacgaaacaccgtaatttctactaagtgtagatcacccacccctggtgccaagtaatttctactaagtgtagattcgacgcgagacgacgtacataatttctactaagtgtagatttttttnnnnnnnnnnaagcttggcgtggatccgatatcaactagatcttgagacaaatggcagtattcatccacaattttaaaagaaaaggggggattggggggtacagtgcaggggaaagaatagtagacataatagcaacagacatacaaactaaag

SEQ ID NO: 17222 - DNA, 301 bp, Artificial Sequence
  Fanca.4_NTC.30
  crRNA array
  misc_feature (148)..(157): n is a, c, g, or t
cttggctttatatatcttgtggaaaggacgaaacaccgtaatttctactaagtgtagatcacccacccctggtgccaagtaatttctactaagtgtagatcgatcgtacgggtgtcctaataatttctactaagtgtagatttttttnnnnnnnnnnaagcttggcgtggatccgatatcaactagatcttgagacaaatggcagtattcatccacaattttaaaagaaaaggggggattggggggtacagtgcaggggaaagaatagtagacataatagcaacagacatacaaactaaag

SEQ ID NO: 17223 - DNA, 301 bp, Artificial Sequence
  Fanca.4_NTC.31
  crRNA array
  misc_feature (148)..(157): n is a, c, g, or t
cttggctttatatatcttgtggaaaggacgaaacaccgtaatttctactaagtgtagatcacccacccctggtgccaagtaatttctactaagtgtagatgccgaccgcgtgattgtaggtaatttctactaagtgtagatttttttnnnnnnnnnnaagcttggcgtggatccgatatcaactagatcttgagacaaatggcagtattcatccacaattttaaaagaaaaggggggattggggggtacagtgcaggggaaagaatagtagacataatagcaacagacatacaaactaaag

SEQ ID NO: 17224 - DNA, 301 bp, Artificial Sequence
  Fanca.4_NTC.32
  crRNA array
  misc_feature (148)..(157): n is a, c, g, or t
cttggctttatatatcttgtggaaaggacgaaacaccgtaatttctactaagtgtagatcacccacccctggtgccaagtaatttctactaagtgtagatgcacgttacgcccgggtcactaatttctactaagtgtagatttttttnnnnnnnnnnaagcttggcgtggatccgatatcaactagatcttgagacaaatggcagtattcatccacaattttaaaagaaaaggggggattggggggtacagtgcaggggaaagaatagtagacataatagcaacagacatacaaactaaag

SEQ ID NO: 17225 - DNA, 301 bp, Artificial Sequence
  Fanca.4_NTC.33
  crRNA array
  misc_feature (148)..(157): n is a, c, g, or t
cttggctttatatatcttgtggaaaggacgaaacaccgtaatttctactaagtgtagatcacccacccctggtgccaagtaatttctactaagtgtagattaagcgaccgacgcattcgctaatttctactaagtgtagatttttttnnnnnnnnnnaagcttggcgtggatccgatatcaactagatcttgagacaaatggcagtattcatccacaattttaaaagaaaaggggggattggggggtacagtgcaggggaaagaatagtagacataatagcaacagacatacaaactaaag

SEQ ID NO: 17226 - DNA, 301 bp, Artificial Sequence
  Fanca.4_NTC.34
  crRNA array
  misc_feature (148)..(157): n is a, c, g, or t
cttggctttatatatcttgtggaaaggacgaaacaccgtaatttctactaagtgtagatcacccacccctggtgccaagtaatttctactaagtgtagattagcgttcgacacgtgaaactaatttctactaagtgtagatttttttnnnnnnnnnnaagcttggcgtggatccgatatcaactagatcttgagacaaatggcagtattcatccacaattttaaaagaaaaggggggattggggggtacagtgcaggggaaagaatagtagacataatagcaacagacatacaaactaaag

SEQ ID NO: 17227 - DNA, 301 bp, Artificial Sequence
  Fanca.4_NTC.35
  crRNA array
  misc_feature (148)..(157): n is a, c, g, or t
cttggctttatatatcttgtggaaaggacgaaacaccgtaatttctactaagtgtagatcacccacccctggtgccaagtaatttctactaagtgtagattggcgcgtaatcgctattcgtaatttctactaagtgtagatttttttnnnnnnnnnnaagcttggcgtggatccgatatcaactagatcttgagacaaatggcagtattcatccacaattttaaaagaaaaggggggattggggggtacagtgcaggggaaagaatagtagacataatagcaacagacatacaaactaaag

SEQ ID NO: 17228 - DNA, 301 bp, Artificial Sequence
  Fanca.4_NTC.36
  crRNA array
  misc_feature (148)..(157): n is a, c, g, or t
cttggctttatatatcttgtggaaaggacgaaacaccgtaatttctactaagtgtagatcacccacccctggtgccaagtaatttctactaagtgtagatcaacccgccgtagcgggccttaatttctactaagtgtagatttttttnnnnnnnnnnaagcttggcgtggatccgatatcaactagatcttgagacaaatggcagtattcatccacaattttaaaagaaaaggggggattggggggtacagtgcaggggaaagaatagtagacataatagcaacagacatacaaactaaag

SEQ ID NO: 17229 - DNA, 301 bp, Artificial Sequence
  Fanca.4_NTC.37
  crRNA array
  misc_feature (148)..(157): n is a, c, g, or t
cttggctttatatatcttgtggaaaggacgaaacaccgtaatttctactaagtgtagatcacccacccctggtgccaagtaatttctactaagtgtagattttgcgttgacgcgattacttaatttctactaagtgtagatttttttnnnnnnnnnnaagcttggcgtggatccgatatcaactagatcttgagacaaatggcagtattcatccacaattttaaaagaaaaggggggattggggggtacagtgcaggggaaagaatagtagacataatagcaacagacatacaaactaaag

SEQ ID NO: 17230 - DNA, 301 bp, Artificial Sequence
  Fanca.4_NTC.38
  crRNA array
  misc_feature (148)..(157): n is a, c, g, or t
cttggctttatatatcttgtggaaaggacgaaacaccgtaatttctactaagtgtagatcacccacccctggtgccaagtaatttctactaagtgtagataacggagcgcgatactaccataatttctactaagtgtagatttttttnnnnnnnnnnaagcttggcgtggatccgatatcaactagatcttgagacaaatggcagtattcatccacaattttaaaagaaaaggggggattggggggtacagtgcaggggaaagaatagtagacataatagcaacagacatacaaactaaag

SEQ ID NO: 17231 - DNA, 301 bp, Artificial Sequence
  Fanca.4_NTC.39
  crRNA array
  misc_feature (148)..(157): n is a, c, g, or t
cttggctttatatatcttgtggaaaggacgaaacaccgtaatttctactaagtgtagatcacccacccctggtgccaagtaatttctactaagtgtagatccggacgttataacgtttcttaatttctactaagtgtagatttttttnnnnnnnnnnaagcttggcgtggatccgatatcaactagatcttgagacaaatggcagtattcatccacaattttaaaagaaaaggggggattggggggtacagtgcaggggaaagaatagtagacataatagcaacagacatacaaactaaag

SEQ ID NO: 17232 - DNA, 301 bp, Artificial Sequence
  Fanca.4_NTC.4
  crRNA array
  misc_feature (148)..(157): n is a, c, g, or t
cttggctttatatatcttgtggaaaggacgaaacaccgtaatttctactaagtgtagatcacccacccctggtgccaagtaatttctactaagtgtagatatacccgtcgcgaacgtgagtaatttctactaagtgtagatttttttnnnnnnnnnnaagcttggcgtggatccgatatcaactagatcttgagacaaatggcagtattcatccacaattttaaaagaaaaggggggattggggggtacagtgcaggggaaagaatagtagacataatagcaacagacatacaaactaaag

SEQ ID NO: 17233 - DNA, 301 bp, Artificial Sequence
  Fanca.4_NTC.40
  crRNA array
  misc_feature (148)..(157): n is a, c, g, or t
cttggctttatatatcttgtggaaaggacgaaacaccgtaatttctactaagtgtagatcacccacccctggtgccaagtaatttctactaagtgtagatattcgcgaacccggccggaataatttctactaagtgtagatttttttnnnnnnnnnnaagcttggcgtggatccgatatcaactagatcttgagacaaatggcagtattcatccacaattttaaaagaaaaggggggattggggggtacagtgcaggggaaagaatagtagacataatagcaacagacatacaaactaaag

SEQ ID NO: 17234 - DNA, 301 bp, Artificial Sequence
  Fanca.4_NTC.41
  crRNA array
  misc_feature (148)..(157): n is a, c, g, or t
cttggctttatatatcttgtggaaaggacgaaacaccgtaatttctactaagtgtagatcacccacccctggtgccaagtaatttctactaagtgtagatttgatggcgcgacgcgttattaatttctactaagtgtagatttttttnnnnnnnnnnaagcttggcgtggatccgatatcaactagatcttgagacaaatggcagtattcatccacaattttaaaagaaaaggggggattggggggtacagtgcaggggaaagaatagtagacataatagcaacagacatacaaactaaag

SEQ ID NO: 17235 - DNA, 301 bp, Artificial Sequence
  Fanca.4_NTC.42
  crRNA array
  misc_feature (148)..(157): n is a, c, g, or t
cttggctttatatatcttgtggaaaggacgaaacaccgtaatttctactaagtgtagatcacccacccctggtgccaagtaatttctactaagtgtagatggtcaaatcgcggcgataactaatttctactaagtgtagatttttttnnnnnnnnnnaagcttggcgtggatccgatatcaactagatcttgagacaaatggcagtattcatccacaattttaaaagaaaaggggggattggggggtacagtgcaggggaaagaatagtagacataatagcaacagacatacaaactaaag

SEQ ID NO: 17236 - DNA, 301 bp, Artificial Sequence
  Fanca.4_NTC.43
  crRNA array
  misc_feature (148)..(157): n is a, c, g, or t
cttggctttatatatcttgtggaaaggacgaaacaccgtaatttctactaagtgtagatcacccacccctggtgccaagtaatttctactaagtgtagatcgactcgcgcattgaactggtaatttctactaagtgtagatttttttnnnnnnnnnnaagcttggcgtggatccgatatcaactagatcttgagacaaatggcagtattcatccacaattttaaaagaaaaggggggattggggggtacagtgcaggggaaagaatagtagacataatagcaacagacatacaaactaaag

SEQ ID NO: 17237 - DNA, 301 bp, Artificial Sequence
  Fanca.4_NTC.44
  crRNA array
  misc_feature (148)..(157): n is a, c, g, or t
cttggctttatatatcttgtggaaaggacgaaacaccgtaatttctactaagtgtagatcacccacccctggtgccaagtaatttctactaagtgtagatagcgtcgtacgatttatcgttaatttctactaagtgtagatttttttnnnnnnnnnnaagcttggcgtggatccgatatcaactagatcttgagacaaatggcagtattcatccacaattttaaaagaaaaggggggattggggggtacagtgcaggggaaagaatagtagacataatagcaacagacatacaaactaaag

SEQ ID NO: 17238 - DNA, 301 bp, Artificial Sequence
  Fanca.4_NTC.45
  crRNA array
  misc_feature (148)..(157): n is a, c, g, or t
cttggctttatatatcttgtggaaaggacgaaacaccgtaatttctactaagtgtagatcacccacccctggtgccaagtaatttctactaagtgtagatcggaacgcgtgatactagggtaatttctactaagtgtagatttttttnnnnnnnnnnaagcttggcgtggatccgatatcaactagatcttgagacaaatggcagtattcatccacaattttaaaagaaaaggggggattggggggtacagtgcaggggaaagaatagtagacataatagcaacagacatacaaactaaag

SEQ ID NO: 17239 - DNA, 301 bp, Artificial Sequence
  Fanca.4_NTC.46
  crRNA array
  misc_feature (148)..(157): n is a, c, g, or t
cttggctttatatatcttgtggaaaggacgaaacaccgtaatttctactaagtgtagatcacccacccctggtgccaagtaatttctactaagtgtagatagcgggtcgtagacgcgcggtaatttctactaagtgtagatttttttnnnnnnnnnnaagcttggcgtggatccgatatcaactagatcttgagacaaatggcagtattcatccacaattttaaaagaaaaggggggattggggggtacagtgcaggggaaagaatagtagacataatagcaacagacatacaaactaaag

SEQ ID NO: 17240 - DNA, 301 bp, Artificial Sequence
  Fanca.4_NTC.47
  crRNA array
  misc_feature (148)..(157): n is a, c, g, or t
cttggctttatatatcttgtggaaaggacgaaacaccgtaatttctactaagtgtagatcacccacccctggtgccaagtaatttctactaagtgtagattctcgtatcgcgattgttaataatttctactaagtgtagatttttttnnnnnnnnnnaagcttggcgtggatccgatatcaactagatcttgagacaaatggcagtattcatccacaattttaaaagaaaaggggggattggggggtacagtgcaggggaaagaatagtagacataatagcaacagacatacaaactaaag

SEQ ID NO: 17241 - DNA, 301 bp, Artificial Sequence
  Fanca.4_NTC.48
  crRNA array
  misc_feature (148)..(157): n is a, c, g, or t
cttggctttatatatcttgtggaaaggacgaaacaccgtaatttctactaagtgtagatcacccacccctggtgccaagtaatttctactaagtgtagatcggtcgactacggctgttagtaatttctactaagtgtagatttttttnnnnnnnnnnaagcttggcgtggatccgatatcaactagatcttgagacaaatggcagtattcatccacaattttaaaagaaaaggggggattggggggtacagtgcaggggaaagaatagtagacataatagcaacagacatacaaactaaag

SEQ ID NO: 17242 - DNA, 301 bp, Artificial Sequence
  Fanca.4_NTC.49
  crRNA array
  misc_feature (148)..(157): n is a, c, g, or t
cttggctttatatatcttgtggaaaggacgaaacaccgtaatttctactaagtgtagatcacccacccctggtgccaagtaatttctactaagtgtagattcggggcgcgtcaactgaattaatttctactaagtgtagatttttttnnnnnnnnnnaagcttggcgtggatccgatatcaactagatcttgagacaaatggcagtattcatccacaattttaaaagaaaaggggggattggggggtacagtgcaggggaaagaatagtagacataatagcaacagacatacaaactaaag

SEQ ID NO: 17243 - DNA, 301 bp, Artificial Sequence
  Fanca.4_NTC.5
  crRNA array
  misc_feature (148)..(157): n is a, c, g, or t
cttggctttatatatcttgtggaaaggacgaaacaccgtaatttctactaagtgtagatcacccacccctggtgccaagtaatttctactaagtgtagatgcttacgcgtcgcgaatgtataatttctactaagtgtagatttttttnnnnnnnnnnaagcttggcgtggatccgatatcaactagatcttgagacaaatggcagtattcatccacaattttaaaagaaaaggggggattggggggtacagtgcaggggaaagaatagtagacataatagcaacagacatacaaactaaag

SEQ ID NO: 17244 - DNA, 301 bp, Artificial Sequence
  Fanca.4_NTC.50
  crRNA array
  misc_feature (148)..(157): n is a, c, g, or t
cttggctttatatatcttgtggaaaggacgaaacaccgtaatttctactaagtgtagatcacccacccctggtgccaagtaatttctactaagtgtagatattgccgctcgcgcaaaatctaatttctactaagtgtagatttttttnnnnnnnnnnaagcttggcgtggatccgatatcaactagatcttgagacaaatggcagtattcatccacaattttaaaagaaaaggggggattggggggtacagtgcaggggaaagaatagtagacataatagcaacagacatacaaactaaag

SEQ ID NO: 17245 - DNA, 301 bp, Artificial Sequence
  Fanca.4_NTC.51
  crRNA array
  misc_feature (148)..(157): n is a, c, g, or t
cttggctttatatatcttgtggaaaggacgaaacaccgtaatttctactaagtgtagatcacccacccctggtgccaagtaatttctactaagtgtagattaacgcgcaacacgccaatgtaatttctactaagtgtagatttttttnnnnnnnnnnaagcttggcgtggatccgatatcaactagatcttgagacaaatggcagtattcatccacaattttaaaagaaaaggggggattggggggtacagtgcaggggaaagaatagtagacataatagcaacagacatacaaactaaag

SEQ ID NO: 17246 - DNA, 301 bp, Artificial Sequence
  Fanca.4_NTC.6
  crRNA array
  misc_feature (148)..(157): n is a, c, g, or t
cttggctttatatatcttgtggaaaggacgaaacaccgtaatttctactaagtgtagatcacccacccctggtgccaagtaatttctactaagtgtagatcgaatcgcgcctacgggaattaatttctactaagtgtagatttttttnnnnnnnnnnaagcttggcgtggatccgatatcaactagatcttgagacaaatggcagtattcatccacaattttaaaagaaaaggggggattggggggtacagtgcaggggaaagaatagtagacataatagcaacagacatacaaactaaag

SEQ ID NO: 17247 - DNA, 301 bp, Artificial Sequence
  Fanca.4_NTC.7
  crRNA array
  misc_feature (148)..(157): n is a, c, g, or t
cttggctttatatatcttgtggaaaggacgaaacaccgtaatttctactaagtgtagatcacccacccctggtgccaagtaatttctactaagtgtagatcgccgaacggataagactattaatttctactaagtgtagatttttttnnnnnnnnnnaagcttggcgtggatccgatatcaactagatcttgagacaaatggcagtattcatccacaattttaaaagaaaaggggggattggggggtacagtgcaggggaaagaatagtagacataatagcaacagacatacaaactaaag

SEQ ID NO: 17248 - DNA, 301 bp, Artificial Sequence
  Fanca.4_NTC.8
  crRNA array
  misc_feature (148)..(157): n is a, c, g, or t
cttggctttatatatcttgtggaaaggacgaaacaccgtaatttctactaagtgtagatcacccacccctggtgccaagtaatttctactaagtgtagatcgaccgaggttacgctgggataatttctactaagtgtagatttttttnnnnnnnnnnaagcttggcgtggatccgatatcaactagatcttgagacaaatggcagtattcatccacaattttaaaagaaaaggggggattggggggtacagtgcaggggaaagaatagtagacataatagcaacagacatacaaactaaag

SEQ ID NO: 17249 - DNA, 301 bp, Artificial Sequence
  Fanca.4_NTC.9
  crRNA array
  misc_feature (148)..(157): n is a, c, g, or t
cttggctttatatatcttgtggaaaggacgaaacaccgtaatttctactaagtgtagatcacccacccctggtgccaagtaatttctactaagtgtagatatcgccgtacggctatggcataatttctactaagtgtagatttttttnnnnnnnnnnaagcttggcgtggatccgatatcaactagatcttgagacaaatggcagtattcatccacaattttaaaagaaaaggggggattggggggtacagtgcaggggaaagaatagtagacataatagcaacagacatacaaactaaag

SEQ ID NO: 17250 - DNA, 301 bp, Artificial Sequence
  Jak1.1_NTC.0
  crRNA array
  misc_feature (148)..(157): n is a, c, g, or t
cttggctttatatatcttgtggaaaggacgaaacaccgtaatttctactaagtgtagatgagcgcaggccgccgcagcctaatttctactaagtgtagattatagcgtcgcgcgctaatttaatttctactaagtgtagatttttttnnnnnnnnnnaagcttggcgtggatccgatatcaactagatcttgagacaaatggcagtattcatccacaattttaaaagaaaaggggggattggggggtacagtgcaggggaaagaatagtagacataatagcaacagacatacaaactaaag

SEQ ID NO: 17251 - DNA, 301 bp, Artificial Sequence
  Jak1.1_NTC.1
  crRNA array
  misc_feature (148)..(157): n is a, c, g, or t
cttggctttatatatcttgtggaaaggacgaaacaccgtaatttctactaagtgtagatgagcgcaggccgccgcagcctaatttctactaagtgtagatcgcgtaaccgttccggctcctaatttctactaagtgtagatttttttnnnnnnnnnnaagcttggcgtggatccgatatcaactagatcttgagacaaatggcagtattcatccacaattttaaaagaaaaggggggattggggggtacagtgcaggggaaagaatagtagacataatagcaacagacatacaaactaaag

SEQ ID NO: 17252 - DNA, 301 bp, Artificial Sequence
  Jak1.1_NTC.10
  crRNA array
  misc_feature (148)..(157): n is a, c, g, or t
cttggctttatatatcttgtggaaaggacgaaacaccgtaatttctactaagtgtagatgagcgcaggccgccgcagcctaatttctactaagtgtagatcgctaagttcgcgcgggccgtaatttctactaagtgtagatttttttnnnnnnnnnnaagcttggcgtggatccgatatcaactagatcttgagacaaatggcagtattcatccacaattttaaaagaaaaggggggattggggggtacagtgcaggggaaagaatagtagacataatagcaacagacatacaaactaaag

SEQ ID NO: 17253 - DNA, 301 bp, Artificial Sequence
  Jak1.1_NTC.11
  crRNA array
  misc_feature (148)..(157): n is a, c, g, or t
cttggctttatatatcttgtggaaaggacgaaacaccgtaatttctactaagtgtagatgagcgcaggccgccgcagcctaatttctactaagtgtagatcgttcgtcgacgaagcaatctaatttctactaagtgtagatttttttnnnnnnnnnnaagcttggcgtggatccgatatcaactagatcttgagacaaatggcagtattcatccacaattttaaaagaaaaggggggattggggggtacagtgcaggggaaagaatagtagacataatagcaacagacatacaaactaaag

SEQ ID NO: 17254 - DNA, 301 bp, Artificial Sequence
  Jak1.1_NTC.12
  crRNA array
  misc_feature (148)..(157): n is a, c, g, or t
cttggctttatatatcttgtggaaaggacgaaacaccgtaatttctactaagtgtagatgagcgcaggccgccgcagcctaatttctactaagtgtagatcgccgacgattaatcaatagtaatttctactaagtgtagatttttttnnnnnnnnnnaagcttggcgtggatccgatatcaactagatcttgagacaaatggcagtattcatccacaattttaaaagaaaaggggggattggggggtacagtgcaggggaaagaatagtagacataatagcaacagacatacaaactaaag

SEQ ID NO: 17255 - DNA, 301 bp, Artificial Sequence
  Jak1.1_NTC.13
  crRNA array
  misc_feature (148)..(157): n is a, c, g, or t
cttggctttatatatcttgtggaaaggacgaaacaccgtaatttctactaagtgtagatgagcgcaggccgccgcagcctaatttctactaagtgtagatgaccgttgtatcgcgatcaataatttctactaagtgtagatttttttnnnnnnnnnnaagcttggcgtggatccgatatcaactagatcttgagacaaatggcagtattcatccacaattttaaaagaaaaggggggattggggggtacagtgcaggggaaagaatagtagacataatagcaacagacatacaaactaaag

SEQ ID NO: 17256 - DNA, 301 bp, Artificial Sequence
  Jak1.1_NTC.14
  crRNA array
  misc_feature (148)..(157): n is a, c, g, or t
cttggctttatatatcttgtggaaaggacgaaacaccgtaatttctactaagtgtagatgagcgcaggccgccgcagcctaatttctactaagtgtagatccgttcgtgcgatagtgttttaatttctactaagtgtagatttttttnnnnnnnnnnaagcttggcgtggatccgatatcaactagatcttgagacaaatggcagtattcatccacaattttaaaagaaaaggggggattggggggtacagtgcaggggaaagaatagtagacataatagcaacagacatacaaactaaag

SEQ ID NO: 17257 - DNA, 301 bp, Artificial Sequence
  Jak1.1_NTC.15
  crRNA array
  misc_feature (148)..(157): n is a, c, g, or t
cttggctttatatatcttgtggaaaggacgaaacaccgtaatttctactaagtgtagatgagcgcaggccgccgcagcctaatttctactaagtgtagatgttgtcgtgccgcgaatttataatttctactaagtgtagatttttttnnnnnnnnnnaagcttggcgtggatccgatatcaactagatcttgagacaaatggcagtattcatccacaattttaaaagaaaaggggggattggggggtacagtgcaggggaaagaatagtagacataatagcaacagacatacaaactaaag

SEQ ID NO: 17258 - DNA, 301 bp, Artificial Sequence
  Jak1.1_NTC.16
  crRNA array
  misc_feature (148)..(157): n is a, c, g, or t
cttggctttatatatcttgtggaaaggacgaaacaccgtaatttctactaagtgtagatgagcgcaggccgccgcagcctaatttctactaagtgtagatcggtacgttagacgaaaatttaatttctactaagtgtagatttttttnnnnnnnnnnaagcttggcgtggatccgatatcaactagatcttgagacaaatggcagtattcatccacaattttaaaagaaaaggggggattggggggtacagtgcaggggaaagaatagtagacataatagcaacagacatacaaactaaag

SEQ ID NO: 17259 - DNA, 301 bp, Artificial Sequence
  Jak1.1_NTC.17
  crRNA array
  misc_feature (148)..(157): n is a, c, g, or t
cttggctttatatatcttgtggaaaggacgaaacaccgtaatttctactaagtgtagatgagcgcaggccgccgcagcctaatttctactaagtgtagattatcgaacgctatcgaacgttaatttctactaagtgtagatttttttnnnnnnnnnnaagcttggcgtggatccgatatcaactagatcttgagacaaatggcagtattcatccacaattttaaaagaaaaggggggattggggggtacagtgcaggggaaagaatagtagacataatagcaacagacatacaaactaaag

SEQ ID NO: 17260 - DNA, 301 bp, Artificial Sequence
  Jak1.1_NTC.18
  crRNA array
  misc_feature (148)..(157): n is a, c, g, or t
cttggctttatatatcttgtggaaaggacgaaacaccgtaatttctactaagtgtagatgagcgcaggccgccgcagcctaatttctactaagtgtagattccggttacgaccggcaaaataatttctactaagtgtagatttttttnnnnnnnnnnaagcttggcgtggatccgatatcaactagatcttgagacaaatggcagtattcatccacaattttaaaagaaaaggggggattggggggtacagtgcaggggaaagaatagtagacataatagcaacagacatacaaactaaag

SEQ ID NO: 17261 - DNA, 301 bp, Artificial Sequence
  Jak1.1_NTC.19
  crRNA array
  misc_feature (148)..(157): n is a, c, g, or t
cttggctttatatatcttgtggaaaggacgaaacaccgtaatttctactaagtgtagatgagcgcaggccgccgcagcctaatttctactaagtgtagatcgtcgtagaacgatacccgataatttctactaagtgtagatttttttnnnnnnnnnnaagcttggcgtggatccgatatcaactagatcttgagacaaatggcagtattcatccacaattttaaaagaaaaggggggattggggggtacagtgcaggggaaagaatagtagacataatagcaacagacatacaaactaaag

SEQ ID NO: 17262 - DNA, 301 bp, Artificial Sequence
  Jak1.1_NTC.2
  crRNA array
  misc_feature (148)..(157): n is a, c, g, or t
cttggctttatatatcttgtggaaaggacgaaacaccgtaatttctactaagtgtagatgagcgcaggccgccgcagcctaatttctactaagtgtagatttatgtcgcgccgcgacccgtaatttctactaagtgtagatttttttnnnnnnnnnnaagcttggcgtggatccgatatcaactagatcttgagacaaatggcagtattcatccacaattttaaaagaaaaggggggattggggggtacagtgcaggggaaagaatagtagacataatagcaacagacatacaaactaaag

SEQ ID NO: 17263 - DNA, 301 bp, Artificial Sequence
  Jak1.1_NTC.20
  crRNA array
  misc_feature (148)..(157): n is a, c, g, or t
cttggctttatatatcttgtggaaaggacgaaacaccgtaatttctactaagtgtagatgagcgcaggccgccgcagcctaatttctactaagtgtagatattccggcgcgaccagaagataatttctactaagtgtagatttttttnnnnnnnnnnaagcttggcgtggatccgatatcaactagatcttgagacaaatggcagtattcatccacaattttaaaagaaaaggggggattggggggtacagtgcaggggaaagaatagtagacataatagcaacagacatacaaactaaag

SEQ ID NO: 17264 - DNA, 301 bp, Artificial Sequence
  Jak1.1_NTC.21
  crRNA array
  misc_feature (148)..(157): n is a, c, g, or t
cttggctttatatatcttgtggaaaggacgaaacaccgtaatttctactaagtgtagatgagcgcaggccgccgcagcctaatttctactaagtgtagatgtataacttcgcgcggtccgtaatttctactaagtgtagatttttttnnnnnnnnnnaagcttggcgtggatccgatatcaactagatcttgagacaaatggcagtattcatccacaattttaaaagaaaaggggggattggggggtacagtgcaggggaaagaatagtagacataatagcaacagacatacaaactaaag

SEQ ID NO: 17265 - DNA, 301 bp, Artificial Sequence
  Jak1.1_NTC.22
  crRNA array
  misc_feature (148)..(157): n is a, c, g, or t
cttggctttatatatcttgtggaaaggacgaaacaccgtaatttctactaagtgtagatgagcgcaggccgccgcagcctaatttctactaagtgtagatgcgcgtcaacgtaatgtgcctaatttctactaagtgtagatttttttnnnnnnnnnnaagcttggcgtggatccgatatcaactagatcttgagacaaatggcagtattcatccacaattttaaaagaaaaggggggattggggggtacagtgcaggggaaagaatagtagacataatagcaacagacatacaaactaaag

SEQ ID NO: 17266 - DNA, 301 bp, Artificial Sequence
  Jak1.1_NTC.23
  crRNA array
  misc_feature (148)..(157): n is a, c, g, or t
cttggctttatatatcttgtggaaaggacgaaacaccgtaatttctactaagtgtagatgagcgcaggccgccgcagcctaatttctactaagtgtagatacgcgctattatcgtaggtgtaatttctactaagtgtagatttttttnnnnnnnnnnaagcttggcgtggatccgatatcaactagatcttgagacaaatggcagtattcatccacaattttaaaagaaaaggggggattggggggtacagtgcaggggaaagaatagtagacataatagcaacagacatacaaactaaag

SEQ ID NO: 17267 - DNA, 301 bp, Artificial Sequence
  Jak1.1_NTC.24
  crRNA array
  misc_feature (148)..(157): n is a, c, g, or t
cttggctttatatatcttgtggaaaggacgaaacaccgtaatttctactaagtgtagatgagcgcaggccgccgcagcctaatttctactaagtgtagatactatcgacgttcgtcccggtaatttctactaagtgtagatttttttnnnnnnnnnnaagcttggcgtggatccgatatcaactagatcttgagacaaatggcagtattcatccacaattttaaaagaaaaggggggattggggggtacagtgcaggggaaagaatagtagacataatagcaacagacatacaaactaaag

SEQ ID NO: 17268 - DNA, 301 bp, Artificial Sequence
  Jak1.1_NTC.25
  crRNA array
  misc_feature (148)..(157): n is a, c, g, or t
cttggctttatatatcttgtggaaaggacgaaacaccgtaatttctactaagtgtagatgagcgcaggccgccgcagcctaatttctactaagtgtagattcgcgttatcgtgccgtgcgtaatttctactaagtgtagatttttttnnnnnnnnnnaagcttggcgtggatccgatatcaactagatcttgagacaaatggcagtattcatccacaattttaaaagaaaaggggggattggggggtacagtgcaggggaaagaatagtagacataatagcaacagacatacaaactaaag

SEQ ID NO: 17269 - DNA, 301 bp, Artificial Sequence
  Jak1.1_NTC.26
  crRNA array
  misc_feature (148)..(157): n is a, c, g, or t
cttggctttatatatcttgtggaaaggacgaaacaccgtaatttctactaagtgtagatgagcgcaggccgccgcagcctaatttctactaagtgtagatcgcgacggcggttttaacactaatttctactaagtgtagatttttttnnnnnnnnnnaagcttggcgtggatccgatatcaactagatcttgagacaaatggcagtattcatccacaattttaaaagaaaaggggggattggggggtacagtgcaggggaaagaatagtagacataatagcaacagacatacaaactaaag

SEQ ID NO: 17270 - DNA, 301 bp, Artificial Sequence
  Jak1.1_NTC.27
  crRNA array
  misc_feature (148)..(157): n is a, c, g, or t
cttggctttatatatcttgtggaaaggacgaaacaccgtaatttctactaagtgtagatgagcgcaggccgccgcagcctaatttctactaagtgtagatgtcgcgttgcgaccggcgcttaatttctactaagtgtagatttttttnnnnnnnnnnaagcttggcgtggatccgatatcaactagatcttgagacaaatggcagtattcatccacaattttaaaagaaaaggggggattggggggtacagtgcaggggaaagaatagtagacataatagcaacagacatacaaactaaag

SEQ ID NO: 17271 - DNA, 301 bp, Artificial Sequence
  Jak1.1_NTC.28
  crRNA array
  misc_feature (148)..(157): n is a, c, g, or t
cttggctttatatatcttgtggaaaggacgaaacaccgtaatttctactaagtgtagatgagcgcaggccgccgcagcctaatttctactaagtgtagataccgctaatcggcgtaaacttaatttctactaagtgtagatttttttnnnnnnnnnnaagcttggcgtggatccgatatcaactagatcttgagacaaatggcagtattcatccacaattttaaaagaaaaggggggattggggggtacagtgcaggggaaagaatagtagacataatagcaacagacatacaaactaaag

SEQ ID NO: 17272 - DNA, 301 bp, Artificial Sequence
  Jak1.1_NTC.29
  crRNA array
  misc_feature (148)..(157): n is a, c, g, or t
cttggctttatatatcttgtggaaaggacgaaacaccgtaatttctactaagtgtagatgagcgcaggccgccgcagcctaatttctactaagtgtagatcgcgatctataccgtctatataatttctactaagtgtagatttttttnnnnnnnnnnaagcttggcgtggatccgatatcaactagatcttgagacaaatggcagtattcatccacaattttaaaagaaaaggggggattggggggtacagtgcaggggaaagaatagtagacataatagcaacagacatacaaactaaag

SEQ ID NO: 17273 - DNA, 301 bp, Artificial Sequence
  Jak1.1_NTC.3
  crRNA array
  misc_feature (148)..(157): n is a, c, g, or t
cttggctttatatatcttgtggaaaggacgaaacaccgtaatttctactaagtgtagatgagcgcaggccgccgcagcctaatttctactaagtgtagattcgacgcgagacgacgtacataatttctactaagtgtagatttttttnnnnnnnnnnaagcttggcgtggatccgatatcaactagatcttgagacaaatggcagtattcatccacaattttaaaagaaaaggggggattggggggtacagtgcaggggaaagaatagtagacataatagcaacagacatacaaactaaag

SEQ ID NO: 17274 - DNA, 301 bp, Artificial Sequence
  Jak1.1_NTC.30
  crRNA array
  misc_feature (148)..(157): n is a, c, g, or t
cttggctttatatatcttgtggaaaggacgaaacaccgtaatttctactaagtgtagatgagcgcaggccgccgcagcctaatttctactaagtgtagatcgatcgtacgggtgtcctaataatttctactaagtgtagatttttttnnnnnnnnnnaagcttggcgtggatccgatatcaactagatcttgagacaaatggcagtattcatccacaattttaaaagaaaaggggggattggggggtacagtgcaggggaaagaatagtagacataatagcaacagacatacaaactaaag

SEQ ID NO: 17275 - DNA, 301 bp, Artificial Sequence
  Jak1.1_NTC.31
  crRNA array
  misc_feature (148)..(157): n is a, c, g, or t
cttggctttatatatcttgtggaaaggacgaaacaccgtaatttctactaagtgtagatgagcgcaggccgccgcagcctaatttctactaagtgtagatgccgaccgcgtgattgtaggtaatttctactaagtgtagatttttttnnnnnnnnnnaagcttggcgtggatccgatatcaactagatcttgagacaaatggcagtattcatccacaattttaaaagaaaaggggggattggggggtacagtgcaggggaaagaatagtagacataatagcaacagacatacaaactaaag

SEQ ID NO: 17276 - DNA, 301 bp, Artificial Sequence
  Jak1.1_NTC.32
  crRNA array
  misc_feature (148)..(157): n is a, c, g, or t
cttggctttatatatcttgtggaaaggacgaaacaccgtaatttctactaagtgtagatgagcgcaggccgccgcagcctaatttctactaagtgtagatgcacgttacgcccgggtcactaatttctactaagtgtagatttttttnnnnnnnnnnaagcttggcgtggatccgatatcaactagatcttgagacaaatggcagtattcatccacaattttaaaagaaaaggggggattggggggtacagtgcaggggaaagaatagtagacataatagcaacagacatacaaactaaag

SEQ ID NO: 17277 - DNA, 301 bp, Artificial Sequence
  Jak1.1_NTC.33
  crRNA array
  misc_feature (148)..(157): n is a, c, g, or t
cttggctttatatatcttgtggaaaggacgaaacaccgtaatttctactaagtgtagatgagcgcaggccgccgcagcctaatttctactaagtgtagattaagcgaccgacgcattcgctaatttctactaagtgtagatttttttnnnnnnnnnnaagcttggcgtggatccgatatcaactagatcttgagacaaatggcagtattcatccacaattttaaaagaaaaggggggattggggggtacagtgcaggggaaagaatagtagacataatagcaacagacatacaaactaaag

SEQ ID NO: 17278 - DNA, 301 bp, Artificial Sequence
  Jak1.1_NTC.34
  crRNA array
  misc_feature (148)..(157): n is a, c, g, or t
cttggctttatatatcttgtggaaaggacgaaacaccgtaatttctactaagtgtagatgagcgcaggccgccgcagcctaatttctactaagtgtagattagcgttcgacacgtgaaactaatttctactaagtgtagatttttttnnnnnnnnnnaagcttggcgtggatccgatatcaactagatcttgagacaaatggcagtattcatccacaattttaaaagaaaaggggggattggggggtacagtgcaggggaaagaatagtagacataatagcaacagacatacaaactaaag

SEQ ID NO: 17279 - DNA, 301 bp, Artificial Sequence
  Jak1.1_NTC.35
  crRNA array
  misc_feature (148)..(157): n is a, c, g, or t
cttggctttatatatcttgtggaaaggacgaaacaccgtaatttctactaagtgtagatgagcgcaggccgccgcagcctaatttctactaagtgtagattggcgcgtaatcgctattcgtaatttctactaagtgtagatttttttnnnnnnnnnnaagcttggcgtggatccgatatcaactagatcttgagacaaatggcagtattcatccacaattttaaaagaaaaggggggattggggggtacagtgcaggggaaagaatagtagacataatagcaacagacatacaaactaaag

SEQ ID NO: 17280 - DNA, 301 bp, Artificial Sequence
  Jak1.1_NTC.36
  crRNA array
  misc_feature (148)..(157): n is a, c, g, or t
cttggctttatatatcttgtggaaaggacgaaacaccgtaatttctactaagtgtagatgagcgcaggccgccgcagcctaatttctactaagtgtagatcaacccgccgtagcgggccttaatttctactaagtgtagatttttttnnnnnnnnnnaagcttggcgtggatccgatatcaactagatcttgagacaaatggcagtattcatccacaattttaaaagaaaaggggggattggggggtacagtgcaggggaaagaatagtagacataatagcaacagacatacaaactaaag

SEQ ID NO: 17281 - DNA, 301 bp, Artificial Sequence
  Jak1.1_NTC.37
  crRNA array
  misc_feature (148)..(157): n is a, c, g, or t
cttggctttatatatcttgtggaaaggacgaaacaccgtaatttctactaagtgtagatgagcgcaggccgccgcagcctaatttctactaagtgtagattttgcgttgacgcgattacttaatttctactaagtgtagatttttttnnnnnnnnnnaagcttggcgtggatccgatatcaactagatcttgagacaaatggcagtattcatccacaattttaaaagaaaaggggggattggggggtacagtgcaggggaaagaatagtagacataatagcaacagacatacaaactaaag

SEQ ID NO: 17282 - DNA, 301 bp, Artificial Sequence
  Jak1.1_NTC.38
  crRNA array
  misc_feature (148)..(157): n is a, c, g, or t
cttggctttatatatcttgtggaaaggacgaaacaccgtaatttctactaagtgtagatgagcgcaggccgccgcagcctaatttctactaagtgtagataacggagcgcgatactaccataatttctactaagtgtagatttttttnnnnnnnnnnaagcttggcgtggatccgatatcaactagatcttgagacaaatggcagtattcatccacaattttaaaagaaaaggggggattggggggtacagtgcaggggaaagaatagtagacataatagcaacagacatacaaactaaag

SEQ ID NO: 17283 - DNA, 301 bp, Artificial Sequence
  Jak1.1_NTC.39
  crRNA array
  misc_feature (148)..(157): n is a, c, g, or t
cttggctttatatatcttgtggaaaggacgaaacaccgtaatttctactaagtgtagatgagcgcaggccgccgcagcctaatttctactaagtgtagatccggacgttataacgtttcttaatttctactaagtgtagatttttttnnnnnnnnnnaagcttggcgtggatccgatatcaactagatcttgagacaaatggcagtattcatccacaattttaaaagaaaaggggggattggggggtacagtgcaggggaaagaatagtagacataatagcaacagacatacaaactaaag

SEQ ID NO: 17284 - DNA, 301 bp, Artificial Sequence
  Jak1.1_NTC.4
  crRNA array
  misc_feature (148)..(157): n is a, c, g, or t
cttggctttatatatcttgtggaaaggacgaaacaccgtaatttctactaagtgtagatgagcgcaggccgccgcagcctaatttctactaagtgtagatatacccgtcgcgaacgtgagtaatttctactaagtgtagatttttttnnnnnnnnnnaagcttggcgtggatccgatatcaactagatcttgagacaaatggcagtattcatccacaattttaaaagaaaaggggggattggggggtacagtgcaggggaaagaatagtagacataatagcaacagacatacaaactaaag

SEQ ID NO: 17285 - DNA, 301 bp, Artificial Sequence
  Jak1.1_NTC.40
  crRNA array
  misc_feature (148)..(157): n is a, c, g, or t
cttggctttatatatcttgtggaaaggacgaaacaccgtaatttctactaagtgtagatgagcgcaggccgccgcagcctaatttctactaagtgtagatattcgcgaacccggccggaataatttctactaagtgtagatttttttnnnnnnnnnnaagcttggcgtggatccgatatcaactagatcttgagacaaatggcagtattcatccacaattttaaaagaaaaggggggattggggggtacagtgcaggggaaagaatagtagacataatagcaacagacatacaaactaaag

SEQ ID NO: 17286 - DNA, 301 bp, Artificial Sequence
  Jak1.1_NTC.41
  crRNA array
  misc_feature (148)..(157): n is a, c, g, or t
cttggctttatatatcttgtggaaaggacgaaacaccgtaatttctactaagtgtagatgagcgcaggccgccgcagcctaatttctactaagtgtagatttgatggcgcgacgcgttattaatttctactaagtgtagatttttttnnnnnnnnnnaagcttggcgtggatccgatatcaactagatcttgagacaaatggcagtattcatccacaattttaaaagaaaaggggggattggggggtacagtgcaggggaaagaatagtagacataatagcaacagacatacaaactaaag

SEQ ID NO: 17287 - DNA, 301 bp, Artificial Sequence
  Jak1.1_NTC.42
  crRNA array
  misc_feature (148)..(157): n is a, c, g, or t
cttggctttatatatcttgtggaaaggacgaaacaccgtaatttctactaagtgtagatgagcgcaggccgccgcagcctaatttctactaagtgtagatggtcaaatcgcggcgataactaatttctactaagtgtagatttttttnnnnnnnnnnaagcttggcgtggatccgatatcaactagatcttgagacaaatggcagtattcatccacaattttaaaagaaaaggggggattggggggtacagtgcaggggaaagaatagtagacataatagcaacagacatacaaactaaag

SEQ ID NO: 17288 - DNA, 301 bp, Artificial Sequence
  Jak1.1_NTC.43
  crRNA array
  misc_feature (148)..(157): n is a, c, g, or t
cttggctttatatatcttgtggaaaggacgaaacaccgtaatttctactaagtgtagatgagcgcaggccgccgcagcctaatttctactaagtgtagatcgactcgcgcattgaactggtaatttctactaagtgtagatttttttnnnnnnnnnnaagcttggcgtggatccgatatcaactagatcttgagacaaatggcagtattcatccacaattttaaaagaaaaggggggattggggggtacagtgcaggggaaagaatagtagacataatagcaacagacatacaaactaaag

SEQ ID NO: 17289 - DNA, 301 bp, Artificial Sequence
  Jak1.1_NTC.44
  crRNA array
  misc_feature (148)..(157): n is a, c, g, or t
cttggctttatatatcttgtggaaaggacgaaacaccgtaatttctactaagtgtagatgagcgcaggccgccgcagcctaatttctactaagtgtagatagcgtcgtacgatttatcgttaatttctactaagtgtagatttttttnnnnnnnnnnaagcttggcgtggatccgatatcaactagatcttgagacaaatggcagtattcatccacaattttaaaagaaaaggggggattggggggtacagtgcaggggaaagaatagtagacataatagcaacagacatacaaactaaag

SEQ ID NO: 17290 - DNA, 301 bp, Artificial Sequence
  Jak1.1_NTC.45
  crRNA array
  misc_feature (148)..(157): n is a, c, g, or t
cttggctttatatatcttgtggaaaggacgaaacaccgtaatttctactaagtgtagatgagcgcaggccgccgcagcctaatttctactaagtgtagatcggaacgcgtgatactagggtaatttctactaagtgtagatttttttnnnnnnnnnnaagcttggcgtggatccgatatcaactagatcttgagacaaatggcagtattcatccacaattttaaaagaaaaggggggattggggggtacagtgcaggggaaagaatagtagacataatagcaacagacatacaaactaaag

SEQ ID NO: 17291 - DNA, 301 bp, Artificial Sequence
  Jak1.1_NTC.46
  crRNA array
  misc_feature (148)..(157): n is a, c, g, or t
cttggctttatatatcttgtggaaaggacgaaacaccgtaatttctactaagtgtagatgagcgcaggccgccgcagcctaatttctactaagtgtagatagcgggtcgtagacgcgcggtaatttctactaagtgtagatttttttnnnnnnnnnnaagcttggcgtggatccgatatcaactagatcttgagacaaatggcagtattcatccacaattttaaaagaaaaggggggattggggggtacagtgcaggggaaagaatagtagacataatagcaacagacatacaaactaaag

SEQ ID NO: 17292 - DNA, 301 bp, Artificial Sequence
  Jak1.1_NTC.47
  crRNA array
  misc_feature (148)..(157): n is a, c, g, or t
cttggctttatatatcttgtggaaaggacgaaacaccgtaatttctactaagtgtagatgagcgcaggccgccgcagcctaatttctactaagtgtagattctcgtatcgcgattgttaataatttctactaagtgtagatttttttnnnnnnnnnnaagcttggcgtggatccgatatcaactagatcttgagacaaatggcagtattcatccacaattttaaaagaaaaggggggattggggggtacagtgcaggggaaagaatagtagacataatagcaacagacatacaaactaaag

SEQ ID NO: 17293 - DNA, 301 bp, Artificial Sequence
  Jak1.1_NTC.48
  crRNA array
  misc_feature (148)..(157): n is a, c, g, or t
cttggctttatatatcttgtggaaaggacgaaacaccgtaatttctactaagtgtagatgagcgcaggccgccgcagcctaatttctactaagtgtagatcggtcgactacggctgttagtaatttctactaagtgtagatttttttnnnnnnnnnnaagcttggcgtggatccgatatcaactagatcttgagacaaatggcagtattcatccacaattttaaaagaaaaggggggattggggggtacagtgcaggggaaagaatagtagacataatagcaacagacatacaaactaaag

SEQ ID NO: 17294 - DNA, 301 bp, Artificial Sequence
  Jak1.1_NTC.49
  crRNA array
  misc_feature (148)..(157): n is a, c, g, or t
cttggctttatatatcttgtggaaaggacgaaacaccgtaatttctactaagtgtagatgagcgcaggccgccgcagcctaatttctactaagtgtagattcggggcgcgtcaactgaattaatttctactaagtgtagatttttttnnnnnnnnnnaagcttggcgtggatccgatatcaactagatcttgagacaaatggcagtattcatccacaattttaaaagaaaaggggggattggggggtacagtgcaggggaaagaatagtagacataatagcaacagacatacaaactaaag

SEQ ID NO: 17295 - DNA, 301 bp, Artificial Sequence
  Jak1.1_NTC.5
  crRNA array
  misc_feature (148)..(157): n is a, c, g, or t
cttggctttatatatcttgtggaaaggacgaaacaccgtaatttctactaagtgtagatgagcgcaggccgccgcagcctaatttctactaagtgtagatgcttacgcgtcgcgaatgtataatttctactaagtgtagatttttttnnnnnnnnnnaagcttggcgtggatccgatatcaactagatcttgagacaaatggcagtattcatccacaattttaaaagaaaaggggggattggggggtacagtgcaggggaaagaatagtagacataatagcaacagacatacaaactaaag

SEQ ID NO: 17296 - DNA, 301 bp, Artificial Sequence
  Jak1.1_NTC.50
  crRNA array
  misc_feature (148)..(157): n is a, c, g, or t
cttggctttatatatcttgtggaaaggacgaaacaccgtaatttctactaagtgtagatgagcgcaggccgccgcagcctaatttctactaagtgtagatattgccgctcgcgcaaaatctaatttctactaagtgtagatttttttnnnnnnnnnnaagcttggcgtggatccgatatcaactagatcttgagacaaatggcagtattcatccacaattttaaaagaaaaggggggattggggggtacagtgcaggggaaagaatagtagacataatagcaacagacatacaaactaaag

SEQ ID NO: 17297 - DNA, 301 bp, Artificial Sequence
  Jak1.1_NTC.51
  crRNA array
  misc_feature (148)..(157): n is a, c, g, or t
cttggctttatatatcttgtggaaaggacgaaacaccgtaatttctactaagtgtagatgagcgcaggccgccgcagcctaatttctactaagtgtagattaacgcgcaacacgccaatgtaatttctactaagtgtagatttttttnnnnnnnnnnaagcttggcgtggatccgatatcaactagatcttgagacaaatggcagtattcatccacaattttaaaagaaaaggggggattggggggtacagtgcaggggaaagaatagtagacataatagcaacagacatacaaactaaag

SEQ ID NO: 17298 - DNA, 301 bp, Artificial Sequence
  Jak1.1_NTC.6
  crRNA array
  misc_feature (148)..(157): n is a, c, g, or t
cttggctttatatatcttgtggaaaggacgaaacaccgtaatttctactaagtgtagatgagcgcaggccgccgcagcctaatttctactaagtgtagatcgaatcgcgcctacgggaattaatttctactaagtgtagatttttttnnnnnnnnnnaagcttggcgtggatccgatatcaactagatcttgagacaaatggcagtattcatccacaattttaaaagaaaaggggggattggggggtacagtgcaggggaaagaatagtagacataatagcaacagacatacaaactaaag

SEQ ID NO: 17299 - DNA, 301 bp, Artificial Sequence
  Jak1.1_NTC.7
  crRNA array
  misc_feature (148)..(157): n is a, c, g, or t
cttggctttatatatcttgtggaaaggacgaaacaccgtaatttctactaagtgtagatgagcgcaggccgccgcagcctaatttctactaagtgtagatcgccgaacggataagactattaatttctactaagtgtagatttttttnnnnnnnnnnaagcttggcgtggatccgatatcaactagatcttgagacaaatggcagtattcatccacaattttaaaagaaaaggggggattggggggtacagtgcaggggaaagaatagtagacataatagcaacagacatacaaactaaag

SEQ ID NO: 17300 - DNA, 301 bp, Artificial Sequence
  Jak1.1_NTC.8
  crRNA array
  misc_feature (148)..(157): n is a, c, g, or t
cttggctttatatatcttgtggaaaggacgaaacaccgtaatttctactaagtgtagatgagcgcaggccgccgcagcctaatttctactaagtgtagatcgaccgaggttacgctgggataatttctactaagtgtagatttttttnnnnnnnnnnaagcttggcgtggatccgatatcaactagatcttgagacaaatggcagtattcatccacaattttaaaagaaaaggggggattggggggtacagtgcaggggaaagaatagtagacataatagcaacagacatacaaactaaag

SEQ ID NO: 17301 - DNA, 301 bp, Artificial Sequence
  Jak1.1_NTC.9
  crRNA array
  misc_feature (148)..(157): n is a, c, g, or t
cttggctttatatatcttgtggaaaggacgaaacaccgtaatttctactaagtgtagatgagcgcaggccgccgcagcctaatttctactaagtgtagatatcgccgtacggctatggcataatttctactaagtgtagatttttttnnnnnnnnnnaagcttggcgtggatccgatatcaactagatcttgagacaaatggcagtattcatccacaattttaaaagaaaaggggggattggggggtacagtgcaggggaaagaatagtagacataatagcaacagacatacaaactaaag

SEQ ID NO: 17302 - DNA, 301 bp, Artificial Sequence
  Jak1.2_NTC.0
  crRNA array
  misc_feature (148)..(157): n is a, c, g, or t
cttggctttatatatcttgtggaaaggacgaaacaccgtaatttctactaagtgtagatagggacactggacaaccgaataatttctactaagtgtagattatagcgtcgcgcgctaatttaatttctactaagtgtagatttttttnnnnnnnnnnaagcttggcgtggatccgatatcaactagatcttgagacaaatggcagtattcatccacaattttaaaagaaaaggggggattggggggtacagtgcaggggaaagaatagtagacataatagcaacagacatacaaactaaag

SEQ ID NO: 17303 - DNA, 301 bp, Artificial Sequence
  Jak1.2_NTC.1
  crRNA array
  misc_feature (148)..(157): n is a, c, g, or t
cttggctttatatatcttgtggaaaggacgaaacaccgtaatttctactaagtgtagatagggacactggacaaccgaataatttctactaagtgtagatcgcgtaaccgttccggctcctaatttctactaagtgtagatttttttnnnnnnnnnnaagcttggcgtggatccgatatcaactagatcttgagacaaatggcagtattcatccacaattttaaaagaaaaggggggattggggggtacagtgcaggggaaagaatagtagacataatagcaacagacatacaaactaaag

SEQ ID NO: 17304 - DNA, 301 bp, Artificial Sequence
  Jak1.2_NTC.10
  crRNA array
  misc_feature (148)..(157): n is a, c, g, or t
cttggctttatatatcttgtggaaaggacgaaacaccgtaatttctactaagtgtagatagggacactggacaaccgaataatttctactaagtgtagatcgctaagttcgcgcgggccgtaatttctactaagtgtagatttttttnnnnnnnnnnaagcttggcgtggatccgatatcaactagatcttgagacaaatggcagtattcatccacaattttaaaagaaaaggggggattggggggtacagtgcaggggaaagaatagtagacataatagcaacagacatacaaactaaag

SEQ ID NO: 17305 - DNA, 301 bp, Artificial Sequence
  Jak1.2_NTC.11
  crRNA array
  misc_feature (148)..(157): n is a, c, g, or t
cttggctttatatatcttgtggaaaggacgaaacaccgtaatttctactaagtgtagatagggacactggacaaccgaataatttctactaagtgtagatcgttcgtcgacgaagcaatctaatttctactaagtgtagatttttttnnnnnnnnnnaagcttggcgtggatccgatatcaactagatcttgagacaaatggcagtattcatccacaattttaaaagaaaaggggggattggggggtacagtgcaggggaaagaatagtagacataatagcaacagacatacaaactaaag

SEQ ID NO: 17306 - DNA, 301 bp, Artificial Sequence
  Jak1.2_NTC.12
  crRNA array
  misc_feature (148)..(157): n is a, c, g, or t
cttggctttatatatcttgtggaaaggacgaaacaccgtaatttctactaagtgtagatagggacactggacaaccgaataatttctactaagtgtagatcgccgacgattaatcaatagtaatttctactaagtgtagatttttttnnnnnnnnnnaagcttggcgtggatccgatatcaactagatcttgagacaaatggcagtattcatccacaattttaaaagaaaaggggggattggggggtacagtgcaggggaaagaatagtagacataatagcaacagacatacaaactaaag

SEQ ID NO: 17307 - DNA, 301 bp, Artificial Sequence
  Jak1.2_NTC.13
  crRNA array
  misc_feature (148)..(157): n is a, c, g, or t
cttggctttatatatcttgtggaaaggacgaaacaccgtaatttctactaagtgtagatagggacactggacaaccgaataatttctactaagtgtagatgaccgttgtatcgcgatcaataatttctactaagtgtagatttttttnnnnnnnnnnaagcttggcgtggatccgatatcaactagatcttgagacaaatggcagtattcatccacaattttaaaagaaaaggggggattggggggtacagtgcaggggaaagaatagtagacataatagcaacagacatacaaactaaag

SEQ ID NO: 17308 - DNA, 301 bp, Artificial Sequence
  Jak1.2_NTC.14
  crRNA array
  misc_feature (148)..(157): n is a, c, g, or t
cttggctttatatatcttgtggaaaggacgaaacaccgtaatttctactaagtgtagatagggacactggacaaccgaataatttctactaagtgtagatccgttcgtgcgatagtgttttaatttctactaagtgtagatttttttnnnnnnnnnnaagcttggcgtggatccgatatcaactagatcttgagacaaatggcagtattcatccacaattttaaaagaaaaggggggattggggggtacagtgcaggggaaagaatagtagacataatagcaacagacatacaaactaaag

SEQ ID NO: 17309 - DNA, 301 bp, Artificial Sequence
  Jak1.2_NTC.15
  crRNA array
  misc_feature (148)..(157): n is a, c, g, or t
cttggctttatatatcttgtggaaaggacgaaacaccgtaatttctactaagtgtagatagggacactggacaaccgaataatttctactaagtgtagatgttgtcgtgccgcgaatttataatttctactaagtgtagatttttttnnnnnnnnnnaagcttggcgtggatccgatatcaactagatcttgagacaaatggcagtattcatccacaattttaaaagaaaaggggggattggggggtacagtgcaggggaaagaatagtagacataatagcaacagacatacaaactaaag

SEQ ID NO: 17310 - DNA, 301 bp, Artificial Sequence
  Jak1.2_NTC.16
  crRNA array
  misc_feature (148)..(157): n is a, c, g, or t
cttggctttatatatcttgtggaaaggacgaaacaccgtaatttctactaagtgtagatagggacactggacaaccgaataatttctactaagtgtagatcggtacgttagacgaaaatttaatttctactaagtgtagatttttttnnnnnnnnnnaagcttggcgtggatccgatatcaactagatcttgagacaaatggcagtattcatccacaattttaaaagaaaaggggggattggggggtacagtgcaggggaaagaatagtagacataatagcaacagacatacaaactaaag

SEQ ID NO: 17311 - DNA, 301 bp, Artificial Sequence
  Jak1.2_NTC.17
  crRNA array
  misc_feature (148)..(157): n is a, c, g, or t
cttggctttatatatcttgtggaaaggacgaaacaccgtaatttctactaagtgtagatagggacactggacaaccgaataatttctactaagtgtagattatcgaacgctatcgaacgttaatttctactaagtgtagatttttttnnnnnnnnnnaagcttggcgtggatccgatatcaactagatcttgagacaaatggcagtattcatccacaattttaaaagaaaaggggggattggggggtacagtgcaggggaaagaatagtagacataatagcaacagacatacaaactaaag

SEQ ID NO: 17312 - DNA, 301 bp, Artificial Sequence
  Jak1.2_NTC.18
  crRNA array
  misc_feature (148)..(157): n is a, c, g, or t
cttggctttatatatcttgtggaaaggacgaaacaccgtaatttctactaagtgtagatagggacactggacaaccgaataatttctactaagtgtagattccggttacgaccggcaaaataatttctactaagtgtagatttttttnnnnnnnnnnaagcttggcgtggatccgatatcaactagatcttgagacaaatggcagtattcatccacaattttaaaagaaaaggggggattggggggtacagtgcaggggaaagaatagtagacataatagcaacagacatacaaactaaag

SEQ ID NO: 17313 - DNA, 301 bp, Artificial Sequence
  Jak1.2_NTC.19
  crRNA array
  misc_feature (148)..(157): n is a, c, g, or t
cttggctttatatatcttgtggaaaggacgaaacaccgtaatttctactaagtgtagatagggacactggacaaccgaataatttctactaagtgtagatcgtcgtagaacgatacccgataatttctactaagtgtagatttttttnnnnnnnnnnaagcttggcgtggatccgatatcaactagatcttgagacaaatggcagtattcatccacaattttaaaagaaaaggggggattggggggtacagtgcaggggaaagaatagtagacataatagcaacagacatacaaactaaag

SEQ ID NO: 17314 - DNA, 301 bp, Artificial Sequence
  Jak1.2_NTC.2
  crRNA array
  misc_feature (148)..(157): n is a, c, g, or t
cttggctttatatatcttgtggaaaggacgaaacaccgtaatttctactaagtgtagatagggacactggacaaccgaataatttctactaagtgtagatttatgtcgcgccgcgacccgtaatttctactaagtgtagatttttttnnnnnnnnnnaagcttggcgtggatccgatatcaactagatcttgagacaaatggcagtattcatccacaattttaaaagaaaaggggggattggggggtacagtgcaggggaaagaatagtagacataatagcaacagacatacaaactaaag

SEQ ID NO: 17315 - DNA, 301 bp, Artificial Sequence
  Jak1.2_NTC.20
  crRNA array
  misc_feature (148)..(157): n is a, c, g, or t
cttggctttatatatcttgtggaaaggacgaaacaccgtaatttctactaagtgtagatagggacactggacaaccgaataatttctactaagtgtagatattccggcgcgaccagaagataatttctactaagtgtagatttttttnnnnnnnnnnaagcttggcgtggatccgatatcaactagatcttgagacaaatggcagtattcatccacaattttaaaagaaaaggggggattggggggtacagtgcaggggaaagaatagtagacataatagcaacagacatacaaactaaag

SEQ ID NO: 17316 - DNA, 301 bp, Artificial Sequence
  Jak1.2_NTC.21
  crRNA array
  misc_feature (148)..(157): n is a, c, g, or t
cttggctttatatatcttgtggaaaggacgaaacaccgtaatttctactaagtgtagatagggacactggacaaccgaataatttctactaagtgtagatgtataacttcgcgcggtccgtaatttctactaagtgtagatttttttnnnnnnnnnnaagcttggcgtggatccgatatcaactagatcttgagacaaatggcagtattcatccacaattttaaaagaaaaggggggattggggggtacagtgcaggggaaagaatagtagacataatagcaacagacatacaaactaaag

SEQ ID NO: 17317 - DNA, 301 bp, Artificial Sequence
  Jak1.2_NTC.22
  crRNA array
  misc_feature (148)..(157): n is a, c, g, or t
cttggctttatatatcttgtggaaaggacgaaacaccgtaatttctactaagtgtagatagggacactggacaaccgaataatttctactaagtgtagatgcgcgtcaacgtaatgtgcctaatttctactaagtgtagatttttttnnnnnnnnnnaagcttggcgtggatccgatatcaactagatcttgagacaaatggcagtattcatccacaattttaaaagaaaaggggggattggggggtacagtgcaggggaaagaatagtagacataatagcaacagacatacaaactaaag

SEQ ID NO: 17318 - DNA, 301 bp, Artificial Sequence
  Jak1.2_NTC.23
  crRNA array
  misc_feature (148)..(157): n is a, c, g, or t
cttggctttatatatcttgtggaaaggacgaaacaccgtaatttctactaagtgtagatagggacactggacaaccgaataatttctactaagtgtagatacgcgctattatcgtaggtgtaatttctactaagtgtagatttttttnnnnnnnnnnaagcttggcgtggatccgatatcaactagatcttgagacaaatggcagtattcatccacaattttaaaagaaaaggggggattggggggtacagtgcaggggaaagaatagtagacataatagcaacagacatacaaactaaag

SEQ ID NO: 17319 - DNA, 301 bp, Artificial Sequence
  Jak1.2_NTC.24
  crRNA array
  misc_feature (148)..(157): n is a, c, g, or t
cttggctttatatatcttgtggaaaggacgaaacaccgtaatttctactaagtgtagatagggacactggacaaccgaataatttctactaagtgtagatactatcgacgttcgtcccggtaatttctactaagtgtagatttttttnnnnnnnnnnaagcttggcgtggatccgatatcaactagatcttgagacaaatggcagtattcatccacaattttaaaagaaaaggggggattggggggtacagtgcaggggaaagaatagtagacataatagcaacagacatacaaactaaag

SEQ ID NO: 17320 - DNA, 301 bp, Artificial Sequence
  Jak1.2_NTC.25
  crRNA array
  misc_feature (148)..(157): n is a, c, g, or t
cttggctttatatatcttgtggaaaggacgaaacaccgtaatttctactaagtgtagatagggacactggacaaccgaataatttctactaagtgtagattcgcgttatcgtgccgtgcgtaatttctactaagtgtagatttttttnnnnnnnnnnaagcttggcgtggatccgatatcaactagatcttgagacaaatggcagtattcatccacaattttaaaagaaaaggggggattggggggtacagtgcaggggaaagaatagtagacataatagcaacagacatacaaactaaag

SEQ ID NO: 17321 - DNA, 301 bp, Artificial Sequence
  Jak1.2_NTC.26
  crRNA array
  misc_feature (148)..(157): n is a, c, g, or t
cttggctttatatatcttgtggaaaggacgaaacaccgtaatttctactaagtgtagatagggacactggacaaccgaataatttctactaagtgtagatcgcgacggcggttttaacactaatttctactaagtgtagatttttttnnnnnnnnnnaagcttggcgtggatccgatatcaactagatcttgagacaaatggcagtattcatccacaattttaaaagaaaaggggggattggggggtacagtgcaggggaaagaatagtagacataatagcaacagacatacaaactaaag

SEQ ID NO: 17322 - DNA, 301 bp, Artificial Sequence
  Jak1.2_NTC.27
  crRNA array
  misc_feature (148)..(157): n is a, c, g, or t
cttggctttatatatcttgtggaaaggacgaaacaccgtaatttctactaagtgtagatagggacactggacaaccgaataatttctactaagtgtagatgtcgcgttgcgaccggcgcttaatttctactaagtgtagatttttttnnnnnnnnnnaagcttggcgtggatccgatatcaactagatcttgagacaaatggcagtattcatccacaattttaaaagaaaaggggggattggggggtacagtgcaggggaaagaatagtagacataatagcaacagacatacaaactaaag

SEQ ID NO: 17323 - DNA, 301 bp, Artificial Sequence
  Jak1.2_NTC.28
  crRNA array
  misc_feature (148)..(157): n is a, c, g, or t
cttggctttatatatcttgtggaaaggacgaaacaccgtaatttctactaagtgtagatagggacactggacaaccgaataatttctactaagtgtagataccgctaatcggcgtaaacttaatttctactaagtgtagatttttttnnnnnnnnnnaagcttggcgtggatccgatatcaactagatcttgagacaaatggcagtattcatccacaattttaaaagaaaaggggggattggggggtacagtgcaggggaaagaatagtagacataatagcaacagacatacaaactaaag

SEQ ID NO: 17324 - DNA, 301 bp, Artificial Sequence
  Jak1.2_NTC.29
  crRNA array
  misc_feature (148)..(157): n is a, c, g, or t
cttggctttatatatcttgtggaaaggacgaaacaccgtaatttctactaagtgtagatagggacactggacaaccgaataatttctactaagtgtagatcgcgatctataccgtctatataatttctactaagtgtagatttttttnnnnnnnnnnaagcttggcgtggatccgatatcaactagatcttgagacaaatggcagtattcatccacaattttaaaagaaaaggggggattggggggtacagtgcaggggaaagaatagtagacataatagcaacagacatacaaactaaag

SEQ ID NO: 17325 - DNA, 301 bp, Artificial Sequence
  Jak1.2_NTC.3
  crRNA array
  misc_feature (148)..(157): n is a, c, g, or t
cttggctttatatatcttgtggaaaggacgaaacaccgtaatttctactaagtgtagatagggacactggacaaccgaataatttctactaagtgtagattcgacgcgagacgacgtacataatttctactaagtgtagatttttttnnnnnnnnnnaagcttggcgtggatccgatatcaactagatcttgagacaaatggcagtattcatccacaattttaaaagaaaaggggggattggggggtacagtgcaggggaaagaatagtagacataatagcaacagacatacaaactaaag

SEQ ID NO: 17326 - DNA, 301 bp, Artificial Sequence
  Jak1.2_NTC.30
  crRNA array
  misc_feature (148)..(157): n is a, c, g, or t
cttggctttatatatcttgtggaaaggacgaaacaccgtaatttctactaagtgtagatagggacactggacaaccgaataatttctactaagtgtagatcgatcgtacgggtgtcctaataatttctactaagtgtagatttttttnnnnnnnnnnaagcttggcgtggatccgatatcaactagatcttgagacaaatggcagtattcatccacaattttaaaagaaaaggggggattggggggtacagtgcaggggaaagaatagtagacataatagcaacagacatacaaactaaag

SEQ ID NO: 17327 - DNA, 301 bp, Artificial Sequence
  Jak1.2_NTC.31
  crRNA array
  misc_feature (148)..(157): n is a, c, g, or t
cttggctttatatatcttgtggaaaggacgaaacaccgtaatttctactaagtgtagatagggacactggacaaccgaataatttctactaagtgtagatgccgaccgcgtgattgtaggtaatttctactaagtgtagatttttttnnnnnnnnnnaagcttggcgtggatccgatatcaactagatcttgagacaaatggcagtattcatccacaattttaaaagaaaaggggggattggggggtacagtgcaggggaaagaatagtagacataatagcaacagacatacaaactaaag

SEQ ID NO: 17328 - DNA, 301 bp, Artificial Sequence
  Jak1.2_NTC.32
  crRNA array
  misc_feature (148)..(157): n is a, c, g, or t
cttggctttatatatcttgtggaaaggacgaaacaccgtaatttctactaagtgtagatagggacactggacaaccgaataatttctactaagtgtagatgcacgttacgcccgggtcactaatttctactaagtgtagatttttttnnnnnnnnnnaagcttggcgtggatccgatatcaactagatcttgagacaaatggcagtattcatccacaattttaaaagaaaaggggggattggggggtacagtgcaggggaaagaatagtagacataatagcaacagacatacaaactaaag

SEQ ID NO: 17329 - DNA, 301 bp, Artificial Sequence
  Jak1.2_NTC.33
  crRNA array
  misc_feature (148)..(157): n is a, c, g, or t
cttggctttatatatcttgtggaaaggacgaaacaccgtaatttctactaagtgtagatagggacactggacaaccgaataatttctactaagtgtagattaagcgaccgacgcattcgctaatttctactaagtgtagatttttttnnnnnnnnnnaagcttggcgtggatccgatatcaactagatcttgagacaaatggcagtattcatccacaattttaaaagaaaaggggggattggggggtacagtgcaggggaaagaatagtagacataatagcaacagacatacaaactaaag

SEQ ID NO: 17330 - DNA, 301 bp, Artificial Sequence
  Jak1.2_NTC.34
  crRNA array
  misc_feature (148)..(157): n is a, c, g, or t
cttggctttatatatcttgtggaaaggacgaaacaccgtaatttctactaagtgtagatagggacactggacaaccgaataatttctactaagtgtagattagcgttcgacacgtgaaactaatttctactaagtgtagatttttttnnnnnnnnnnaagcttggcgtggatccgatatcaactagatcttgagacaaatggcagtattcatccacaattttaaaagaaaaggggggattggggggtacagtgcaggggaaagaatagtagacataatagcaacagacatacaaactaaag

SEQ ID NO: 17331 - DNA, 301 bp, Artificial Sequence
  Jak1.2_NTC.35
  crRNA array
  misc_feature (148)..(157): n is a, c, g, or t
cttggctttatatatcttgtggaaaggacgaaacaccgtaatttctactaagtgtagatagggacactggacaaccgaataatttctactaagtgtagattggcgcgtaatcgctattcgtaatttctactaagtgtagatttttttnnnnnnnnnnaagcttggcgtggatccgatatcaactagatcttgagacaaatggcagtattcatccacaattttaaaagaaaaggggggattggggggtacagtgcaggggaaagaatagtagacataatagcaacagacatacaaactaaag

SEQ ID NO: 17332 - DNA, 301 bp, Artificial Sequence
  Jak1.2_NTC.36
  crRNA array
  misc_feature (148)..(157): n is a, c, g, or t
cttggctttatatatcttgtggaaaggacgaaacaccgtaatttctactaagtgtagatagggacactggacaaccgaataatttctactaagtgtagatcaacccgccgtagcgggccttaatttctactaagtgtagatttttttnnnnnnnnnnaagcttggcgtggatccgatatcaactagatcttgagacaaatggcagtattcatccacaattttaaaagaaaaggggggattggggggtacagtgcaggggaaagaatagtagacataatagcaacagacatacaaactaaag

SEQ ID NO: 17333 - DNA, 301 bp, Artificial Sequence
  Jak1.2_NTC.37
  crRNA array
  misc_feature (148)..(157): n is a, c, g, or t
cttggctttatatatcttgtggaaaggacgaaacaccgtaatttctactaagtgtagatagggacactggacaaccgaataatttctactaagtgtagattttgcgttgacgcgattacttaatttctactaagtgtagatttttttnnnnnnnnnnaagcttggcgtggatccgatatcaactagatcttgagacaaatggcagtattcatccacaattttaaaagaaaaggggggattggggggtacagtgcaggggaaagaatagtagacataatagcaacagacatacaaactaaag

SEQ ID NO: 17334 - DNA, 301 bp, Artificial Sequence
  Jak1.2_NTC.38
  crRNA array
  misc_feature (148)..(157): n is a, c, g, or t
cttggctttatatatcttgtggaaaggacgaaacaccgtaatttctactaagtgtagatagggacactggacaaccgaataatttctactaagtgtagataacggagcgcgatactaccataatttctactaagtgtagatttttttnnnnnnnnnnaagcttggcgtggatccgatatcaactagatcttgagacaaatggcagtattcatccacaattttaaaagaaaaggggggattggggggtacagtgcaggggaaagaatagtagacataatagcaacagacatacaaactaaag

SEQ ID NO: 17335 - DNA, 301 bp, Artificial Sequence
  Jak1.2_NTC.39
  crRNA array
  misc_feature (148)..(157): n is a, c, g, or t
cttggctttatatatcttgtggaaaggacgaaacaccgtaatttctactaagtgtagatagggacactggacaaccgaataatttctactaagtgtagatccggacgttataacgtttcttaatttctactaagtgtagatttttttnnnnnnnnnnaagcttggcgtggatccgatatcaactagatcttgagacaaatggcagtattcatccacaattttaaaagaaaaggggggattggggggtacagtgcaggggaaagaatagtagacataatagcaacagacatacaaactaaag

SEQ ID NO: 17336 - DNA, 301 bp, Artificial Sequence
  Jak1.2_NTC.4
  crRNA array
  misc_feature (148)..(157): n is a, c, g, or t
cttggctttatatatcttgtggaaaggacgaaacaccgtaatttctactaagtgtagatagggacactggacaaccgaataatttctactaagtgtagatatacccgtcgcgaacgtgagtaatttctactaagtgtagatttttttnnnnnnnnnnaagcttggcgtggatccgatatcaactagatcttgagacaaatggcagtattcatccacaattttaaaagaaaaggggggattggggggtacagtgcaggggaaagaatagtagacataatagcaacagacatacaaactaaag

SEQ ID NO: 17337 - DNA, 301 bp, Artificial Sequence
  Jak1.2_NTC.40
  crRNA array
  misc_feature (148)..(157): n is a, c, g, or t
cttggctttatatatcttgtggaaaggacgaaacaccgtaatttctactaagtgtagatagggacactggacaaccgaataatttctactaagtgtagatattcgcgaacccggccggaataatttctactaagtgtagatttttttnnnnnnnnnnaagcttggcgtggatccgatatcaactagatcttgagacaaatggcagtattcatccacaattttaaaagaaaaggggggattggggggtacagtgcaggggaaagaatagtagacataatagcaacagacatacaaactaaag

SEQ ID NO: 17338 - DNA, 301 bp, Artificial Sequence
  Jak1.2_NTC.41
  crRNA array
  misc_feature (148)..(157): n is a, c, g, or t
cttggctttatatatcttgtggaaaggacgaaacaccgtaatttctactaagtgtagatagggacactggacaaccgaataatttctactaagtgtagatttgatggcgcgacgcgttattaatttctactaagtgtagatttttttnnnnnnnnnnaagcttggcgtggatccgatatcaactagatcttgagacaaatggcagtattcatccacaattttaaaagaaaaggggggattggggggtacagtgcaggggaaagaatagtagacataatagcaacagacatacaaactaaag

SEQ ID NO: 17339 - DNA, 301 bp, Artificial Sequence
  Jak1.2_NTC.42
  crRNA array
  misc_feature (148)..(157): n is a, c, g, or t
cttggctttatatatcttgtggaaaggacgaaacaccgtaatttctactaagtgtagatagggacactggacaaccgaataatttctactaagtgtagatggtcaaatcgcggcgataactaatttctactaagtgtagatttttttnnnnnnnnnnaagcttggcgtggatccgatatcaactagatcttgagacaaatggcagtattcatccacaattttaaaagaaaaggggggattggggggtacagtgcaggggaaagaatagtagacataatagcaacagacatacaaactaaag

SEQ ID NO: 17340 - DNA, 301 bp, Artificial Sequence
  Jak1.2_NTC.43
  crRNA array
  misc_feature (148)..(157): n is a, c, g, or t
cttggctttatatatcttgtggaaaggacgaaacaccgtaatttctactaagtgtagatagggacactggacaaccgaataatttctactaagtgtagatcgactcgcgcattgaactggtaatttctactaagtgtagatttttttnnnnnnnnnnaagcttggcgtggatccgatatcaactagatcttgagacaaatggcagtattcatccacaattttaaaagaaaaggggggattggggggtacagtgcaggggaaagaatagtagacataatagcaacagacatacaaactaaag

SEQ ID NO: 17341 - DNA, 301 bp, Artificial Sequence
  Jak1.2_NTC.44
  crRNA array
  misc_feature (148)..(157): n is a, c, g, or t
cttggctttatatatcttgtggaaaggacgaaacaccgtaatttctactaagtgtagatagggacactggacaaccgaataatttctactaagtgtagatagcgtcgtacgatttatcgttaatttctactaagtgtagatttttttnnnnnnnnnnaagcttggcgtggatccgatatcaactagatcttgagacaaatggcagtattcatccacaattttaaaagaaaaggggggattggggggtacagtgcaggggaaagaatagtagacataatagcaacagacatacaaactaaag

SEQ ID NO: 17342 - DNA, 301 bp, Artificial Sequence
  Jak1.2_NTC.45
  crRNA array
  misc_feature (148)..(157): n is a, c, g, or t
cttggctttatatatcttgtggaaaggacgaaacaccgtaatttctactaagtgtagatagggacactggacaaccgaataatttctactaagtgtagatcggaacgcgtgatactagggtaatttctactaagtgtagatttttttnnnnnnnnnnaagcttggcgtggatccgatatcaactagatcttgagacaaatggcagtattcatccacaattttaaaagaaaaggggggattggggggtacagtgcaggggaaagaatagtagacataatagcaacagacatacaaactaaag

SEQ ID NO: 17343 - DNA, 301 bp, Artificial Sequence
  Jak1.2_NTC.46
  crRNA array
  misc_feature (148)..(157): n is a, c, g, or t
cttggctttatatatcttgtggaaaggacgaaacaccgtaatttctactaagtgtagatagggacactggacaaccgaataatttctactaagtgtagatagcgggtcgtagacgcgcggtaatttctactaagtgtagatttttttnnnnnnnnnnaagcttggcgtggatccgatatcaactagatcttgagacaaatggcagtattcatccacaattttaaaagaaaaggggggattggggggtacagtgcaggggaaagaatagtagacataatagcaacagacatacaaactaaag

SEQ ID NO: 17344 - DNA, 301 bp, Artificial Sequence
  Jak1.2_NTC.47
  crRNA array
  misc_feature (148)..(157): n is a, c, g, or t
cttggctttatatatcttgtggaaaggacgaaacaccgtaatttctactaagtgtagatagggacactggacaaccgaataatttctactaagtgtagattctcgtatcgcgattgttaataatttctactaagtgtagatttttttnnnnnnnnnnaagcttggcgtggatccgatatcaactagatcttgagacaaatggcagtattcatccacaattttaaaagaaaaggggggattggggggtacagtgcaggggaaagaatagtagacataatagcaacagacatacaaactaaag

SEQ ID NO: 17345 - DNA, 301 bp, Artificial Sequence
  Jak1.2_NTC.48
  crRNA array
  misc_feature (148)..(157): n is a, c, g, or t
cttggctttatatatcttgtggaaaggacgaaacaccgtaatttctactaagtgtagatagggacactggacaaccgaataatttctactaagtgtagatcggtcgactacggctgttagtaatttctactaagtgtagatttttttnnnnnnnnnnaagcttggcgtggatccgatatcaactagatcttgagacaaatggcagtattcatccacaattttaaaagaaaaggggggattggggggtacagtgcaggggaaagaatagtagacataatagcaacagacatacaaactaaag

SEQ ID NO: 17346 - DNA, 301 bp, Artificial Sequence
  Jak1.2_NTC.49
  crRNA array
  misc_feature (148)..(157): n is a, c, g, or t
cttggctttatatatcttgtggaaaggacgaaacaccgtaatttctactaagtgtagatagggacactggacaaccgaataatttctactaagtgtagattcggggcgcgtcaactgaattaatttctactaagtgtagatttttttnnnnnnnnnnaagcttggcgtggatccgatatcaactagatcttgagacaaatggcagtattcatccacaattttaaaagaaaaggggggattggggggtacagtgcaggggaaagaatagtagacataatagcaacagacatacaaactaaag

SEQ ID NO: 17347 - DNA, 301 bp, Artificial Sequence
  Jak1.2_NTC.5
  crRNA array
  misc_feature (148)..(157): n is a, c, g, or t
cttggctttatatatcttgtggaaaggacgaaacaccgtaatttctactaagtgtagatagggacactggacaaccgaataatttctactaagtgtagatgcttacgcgtcgcgaatgtataatttctactaagtgtagatttttttnnnnnnnnnnaagcttggcgtggatccgatatcaactagatcttgagacaaatggcagtattcatccacaattttaaaagaaaaggggggattggggggtacagtgcaggggaaagaatagtagacataatagcaacagacatacaaactaaag

SEQ ID NO: 17348 - DNA, 301 bp, Artificial Sequence
  Jak1.2_NTC.50
  crRNA array
  misc_feature (148)..(157): n is a, c, g, or t
cttggctttatatatcttgtggaaaggacgaaacaccgtaatttctactaagtgtagatagggacactggacaaccgaataatttctactaagtgtagatattgccgctcgcgcaaaatctaatttctactaagtgtagatttttttnnnnnnnnnnaagcttggcgtggatccgatatcaactagatcttgagacaaatggcagtattcatccacaattttaaaagaaaaggggggattggggggtacagtgcaggggaaagaatagtagacataatagcaacagacatacaaactaaag

SEQ ID NO: 17349 - DNA, 301 bp, Artificial Sequence
  Jak1.2_NTC.51
  crRNA array
  misc_feature (148)..(157): n is a, c, g, or t
cttggctttatatatcttgtggaaaggacgaaacaccgtaatttctactaagtgtagatagggacactggacaaccgaataatttctactaagtgtagattaacgcgcaacacgccaatgtaatttctactaagtgtagatttttttnnnnnnnnnnaagcttggcgtggatccgatatcaactagatcttgagacaaatggcagtattcatccacaattttaaaagaaaaggggggattggggggtacagtgcaggggaaagaatagtagacataatagcaacagacatacaaactaaag

SEQ ID NO: 17350 - DNA, 301 bp, Artificial Sequence
  Jak1.2_NTC.6
  crRNA array
  misc_feature (148)..(157): n is a, c, g, or t
cttggctttatatatcttgtggaaaggacgaaacaccgtaatttctactaagtgtagatagggacactggacaaccgaataatttctactaagtgtagatcgaatcgcgcctacgggaattaatttctactaagtgtagatttttttnnnnnnnnnnaagcttggcgtggatccgatatcaactagatcttgagacaaatggcagtattcatccacaattttaaaagaaaaggggggattggggggtacagtgcaggggaaagaatagtagacataatagcaacagacatacaaactaaag

SEQ ID NO: 17351 - DNA, 301 bp, Artificial Sequence
  Jak1.2_NTC.7
  crRNA array
  misc_feature (148)..(157): n is a, c, g, or t
cttggctttatatatcttgtggaaaggacgaaacaccgtaatttctactaagtgtagatagggacactggacaaccgaataatttctactaagtgtagatcgccgaacggataagactattaatttctactaagtgtagatttttttnnnnnnnnnnaagcttggcgtggatccgatatcaactagatcttgagacaaatggcagtattcatccacaattttaaaagaaaaggggggattggggggtacagtgcaggggaaagaatagtagacataatagcaacagacatacaaactaaag

SEQ ID NO: 17352 - DNA, 301 bp, Artificial Sequence
  Jak1.2_NTC.8
  crRNA array
  misc_feature (148)..(157): n is a, c, g, or t
cttggctttatatatcttgtggaaaggacgaaacaccgtaatttctactaagtgtagatagggacactggacaaccgaataatttctactaagtgtagatcgaccgaggttacgctgggataatttctactaagtgtagatttttttnnnnnnnnnnaagcttggcgtggatccgatatcaactagatcttgagacaaatggcagtattcatccacaattttaaaagaaaaggggggattggggggtacagtgcaggggaaagaatagtagacataatagcaacagacatacaaactaaag

SEQ ID NO: 17353 - DNA, 301 bp, Artificial Sequence
  Jak1.2_NTC.9
  crRNA array
  misc_feature (148)..(157): n is a, c, g, or t
cttggctttatatatcttgtggaaaggacgaaacaccgtaatttctactaagtgtagatagggacactggacaaccgaataatttctactaagtgtagatatcgccgtacggctatggcataatttctactaagtgtagatttttttnnnnnnnnnnaagcttggcgtggatccgatatcaactagatcttgagacaaatggcagtattcatccacaattttaaaagaaaaggggggattggggggtacagtgcaggggaaagaatagtagacataatagcaacagacatacaaactaaag

SEQ ID NO: 17354 - DNA, 301 bp, Artificial Sequence
  Jak1.3_NTC.0
  crRNA array
  misc_feature (148)..(157): n is a, c, g, or t
cttggctttatatatcttgtggaaaggacgaaacaccgtaatttctactaagtgtagatgcacagaacgccatggcatttaatttctactaagtgtagattatagcgtcgcgcgctaatttaatttctactaagtgtagatttttttnnnnnnnnnnaagcttggcgtggatccgatatcaactagatcttgagacaaatggcagtattcatccacaattttaaaagaaaaggggggattggggggtacagtgcaggggaaagaatagtagacataatagcaacagacatacaaactaaag

SEQ ID NO: 17355 - DNA, 301 bp, Artificial Sequence
  Jak1.3_NTC.1
  crRNA array
  misc_feature (148)..(157): n is a, c, g, or t
cttggctttatatatcttgtggaaaggacgaaacaccgtaatttctactaagtgtagatgcacagaacgccatggcatttaatttctactaagtgtagatcgcgtaaccgttccggctcctaatttctactaagtgtagatttttttnnnnnnnnnnaagcttggcgtggatccgatatcaactagatcttgagacaaatggcagtattcatccacaattttaaaagaaaaggggggattggggggtacagtgcaggggaaagaatagtagacataatagcaacagacatacaaactaaag

SEQ ID NO: 17356 - DNA, 301 bp, Artificial Sequence
  Jak1.3_NTC.10
  crRNA array
  misc_feature (148)..(157): n is a, c, g, or t
cttggctttatatatcttgtggaaaggacgaaacaccgtaatttctactaagtgtagatgcacagaacgccatggcatttaatttctactaagtgtagatcgctaagttcgcgcgggccgtaatttctactaagtgtagatttttttnnnnnnnnnnaagcttggcgtggatccgatatcaactagatcttgagacaaatggcagtattcatccacaattttaaaagaaaaggggggattggggggtacagtgcaggggaaagaatagtagacataatagcaacagacatacaaactaaag

SEQ ID NO: 17357 - DNA, 301 bp, Artificial Sequence
  Jak1.3_NTC.11
  crRNA array
  misc_feature (148)..(157): n is a, c, g, or t
cttggctttatatatcttgtggaaaggacgaaacaccgtaatttctactaagtgtagatgcacagaacgccatggcatttaatttctactaagtgtagatcgttcgtcgacgaagcaatctaatttctactaagtgtagatttttttnnnnnnnnnnaagcttggcgtggatccgatatcaactagatcttgagacaaatggcagtattcatccacaattttaaaagaaaaggggggattggggggtacagtgcaggggaaagaatagtagacataatagcaacagacatacaaactaaag

SEQ ID NO: 17358 - DNA, 301 bp, Artificial Sequence
  Jak1.3_NTC.12
  crRNA array
  misc_feature (148)..(157): n is a, c, g, or t
cttggctttatatatcttgtggaaaggacgaaacaccgtaatttctactaagtgtagatgcacagaacgccatggcatttaatttctactaagtgtagatcgccgacgattaatcaatagtaatttctactaagtgtagatttttttnnnnnnnnnnaagcttggcgtggatccgatatcaactagatcttgagacaaatggcagtattcatccacaattttaaaagaaaaggggggattggggggtacagtgcaggggaaagaatagtagacataatagcaacagacatacaaactaaag

SEQ ID NO: 17359 - DNA, 301 bp, Artificial Sequence
  Jak1.3_NTC.13
  crRNA array
  misc_feature (148)..(157): n is a, c, g, or t
cttggctttatatatcttgtggaaaggacgaaacaccgtaatttctactaagtgtagatgcacagaacgccatggcatttaatttctactaagtgtagatgaccgttgtatcgcgatcaataatttctactaagtgtagatttttttnnnnnnnnnnaagcttggcgtggatccgatatcaactagatcttgagacaaatggcagtattcatccacaattttaaaagaaaaggggggattggggggtacagtgcaggggaaagaatagtagacataatagcaacagacatacaaactaaag

SEQ ID NO: 17360 - DNA, 301 bp, Artificial Sequence
  Jak1.3_NTC.14
  crRNA array
  misc_feature (148)..(157): n is a, c, g, or t
cttggctttatatatcttgtggaaaggacgaaacaccgtaatttctactaagtgtagatgcacagaacgccatggcatttaatttctactaagtgtagatccgttcgtgcgatagtgttttaatttctactaagtgtagatttttttnnnnnnnnnnaagcttggcgtggatccgatatcaactagatcttgagacaaatggcagtattcatccacaattttaaaagaaaaggggggattggggggtacagtgcaggggaaagaatagtagacataatagcaacagacatacaaactaaag

SEQ ID NO: 17361 - DNA, 301 bp, Artificial Sequence
  Jak1.3_NTC.15
  crRNA array
  misc_feature (148)..(157): n is a, c, g, or t
cttggctttatatatcttgtggaaaggacgaaacaccgtaatttctactaagtgtagatgcacagaacgccatggcatttaatttctactaagtgtagatgttgtcgtgccgcgaatttataatttctactaagtgtagatttttttnnnnnnnnnnaagcttggcgtggatccgatatcaactagatcttgagacaaatggcagtattcatccacaattttaaaagaaaaggggggattggggggtacagtgcaggggaaagaatagtagacataatagcaacagacatacaaactaaag

SEQ ID NO: 17362 - DNA, 301 bp, Artificial Sequence
  Jak1.3_NTC.16
  crRNA array
  misc_feature (148)..(157): n is a, c, g, or t
cttggctttatatatcttgtggaaaggacgaaacaccgtaatttctactaagtgtagatgcacagaacgccatggcatttaatttctactaagtgtagatcggtacgttagacgaaaatttaatttctactaagtgtagatttttttnnnnnnnnnnaagcttggcgtggatccgatatcaactagatcttgagacaaatggcagtattcatccacaattttaaaagaaaaggggggattggggggtacagtgcaggggaaagaatagtagacataatagcaacagacatacaaactaaag

SEQ ID NO: 17363 - DNA, 301 bp, Artificial Sequence
  Jak1.3_NTC.17
  crRNA array
  misc_feature (148)..(157): n is a, c, g, or t
cttggctttatatatcttgtggaaaggacgaaacaccgtaatttctactaagtgtagatgcacagaacgccatggcatttaatttctactaagtgtagattatcgaacgctatcgaacgttaatttctactaagtgtagatttttttnnnnnnnnnnaagcttggcgtggatccgatatcaactagatcttgagacaaatggcagtattcatccacaattttaaaagaaaaggggggattggggggtacagtgcaggggaaagaatagtagacataatagcaacagacatacaaactaaag

SEQ ID NO: 17364 - DNA, 301 bp, Artificial Sequence
  Jak1.3_NTC.18
  crRNA array
  misc_feature (148)..(157): n is a, c, g, or t
cttggctttatatatcttgtggaaaggacgaaacaccgtaatttctactaagtgtagatgcacagaacgccatggcatttaatttctactaagtgtagattccggttacgaccggcaaaataatttctactaagtgtagatttttttnnnnnnnnnnaagcttggcgtggatccgatatcaactagatcttgagacaaatggcagtattcatccacaattttaaaagaaaaggggggattggggggtacagtgcaggggaaagaatagtagacataatagcaacagacatacaaactaaag

SEQ ID NO: 17365 - DNA, 301 bp, Artificial Sequence
  Jak1.3_NTC.19
  crRNA array
  misc_feature (148)..(157): n is a, c, g, or t
cttggctttatatatcttgtggaaaggacgaaacaccgtaatttctactaagtgtagatgcacagaacgccatggcatttaatttctactaagtgtagatcgtcgtagaacgatacccgataatttctactaagtgtagatttttttnnnnnnnnnnaagcttggcgtggatccgatatcaactagatcttgagacaaatggcagtattcatccacaattttaaaagaaaaggggggattggggggtacagtgcaggggaaagaatagtagacataatagcaacagacatacaaactaaag

SEQ ID NO: 17366 - DNA, 301 bp, Artificial Sequence
  Jak1.3_NTC.2
  crRNA array
  misc_feature (148)..(157): n is a, c, g, or t
cttggctttatatatcttgtggaaaggacgaaacaccgtaatttctactaagtgtagatgcacagaacgccatggcatttaatttctactaagtgtagatttatgtcgcgccgcgacccgtaatttctactaagtgtagatttttttnnnnnnnnnnaagcttggcgtggatccgatatcaactagatcttgagacaaatggcagtattcatccacaattttaaaagaaaaggggggattggggggtacagtgcaggggaaagaatagtagacataatagcaacagacatacaaactaaag

SEQ ID NO: 17367 - DNA, 301 bp, Artificial Sequence
  Jak1.3_NTC.20
  crRNA array
  misc_feature (148)..(157): n is a, c, g, or t
cttggctttatatatcttgtggaaaggacgaaacaccgtaatttctactaagtgtagatgcacagaacgccatggcatttaatttctactaagtgtagatattccggcgcgaccagaagataatttctactaagtgtagatttttttnnnnnnnnnnaagcttggcgtggatccgatatcaactagatcttgagacaaatggcagtattcatccacaattttaaaagaaaaggggggattggggggtacagtgcaggggaaagaatagtagacataatagcaacagacatacaaactaaag

SEQ ID NO: 17368 - DNA, 301 bp, Artificial Sequence
  Jak1.3_NTC.21
  crRNA array
  misc_feature (148)..(157): n is a, c, g, or t
cttggctttatatatcttgtggaaaggacgaaacaccgtaatttctactaagtgtagatgcacagaacgccatggcatttaatttctactaagtgtagatgtataacttcgcgcggtccgtaatttctactaagtgtagatttttttnnnnnnnnnnaagcttggcgtggatccgatatcaactagatcttgagacaaatggcagtattcatccacaattttaaaagaaaaggggggattggggggtacagtgcaggggaaagaatagtagacataatagcaacagacatacaaactaaag

SEQ ID NO: 17369 - DNA, 301 bp, Artificial Sequence
  Jak1.3_NTC.22
  crRNA array
  misc_feature (148)..(157): n is a, c, g, or t
cttggctttatatatcttgtggaaaggacgaaacaccgtaatttctactaagtgtagatgcacagaacgccatggcatttaatttctactaagtgtagatgcgcgtcaacgtaatgtgcctaatttctactaagtgtagatttttttnnnnnnnnnnaagcttggcgtggatccgatatcaactagatcttgagacaaatggcagtattcatccacaattttaaaagaaaaggggggattggggggtacagtgcaggggaaagaatagtagacataatagcaacagacatacaaactaaag

SEQ ID NO: 17370 - DNA, 301 bp, Artificial Sequence
  Jak1.3_NTC.23
  crRNA array
  misc_feature (148)..(157): n is a, c, g, or t
cttggctttatatatcttgtggaaaggacgaaacaccgtaatttctactaagtgtagatgcacagaacgccatggcatttaatttctactaagtgtagatacgcgctattatcgtaggtgtaatttctactaagtgtagatttttttnnnnnnnnnnaagcttggcgtggatccgatatcaactagatcttgagacaaatggcagtattcatccacaattttaaaagaaaaggggggattggggggtacagtgcaggggaaagaatagtagacataatagcaacagacatacaaactaaag

SEQ ID NO: 17371 - DNA, 301 bp, Artificial Sequence
  Jak1.3_NTC.24
  crRNA array
  misc_feature (148)..(157): n is a, c, g, or t
cttggctttatatatcttgtggaaaggacgaaacaccgtaatttctactaagtgtagatgcacagaacgccatggcatttaatttctactaagtgtagatactatcgacgttcgtcccggtaatttctactaagtgtagatttttttnnnnnnnnnnaagcttggcgtggatccgatatcaactagatcttgagacaaatggcagtattcatccacaattttaaaagaaaaggggggattggggggtacagtgcaggggaaagaatagtagacataatagcaacagacatacaaactaaag

SEQ ID NO: 17372 - DNA, 301 bp, Artificial Sequence
  Jak1.3_NTC.25
  crRNA array
  misc_feature (148)..(157): n is a, c, g, or t
cttggctttatatatcttgtggaaaggacgaaacaccgtaatttctactaagtgtagatgcacagaacgccatggcatttaatttctactaagtgtagattcgcgttatcgtgccgtgcgtaatttctactaagtgtagatttttttnnnnnnnnnnaagcttggcgtggatccgatatcaactagatcttgagacaaatggcagtattcatccacaattttaaaagaaaaggggggattggggggtacagtgcaggggaaagaatagtagacataatagcaacagacatacaaactaaag

SEQ ID NO: 17373 - DNA, 301 bp, Artificial Sequence
  Jak1.3_NTC.26
  crRNA array
  misc_feature (148)..(157): n is a, c, g, or t
cttggctttatatatcttgtggaaaggacgaaacaccgtaatttctactaagtgtagatgcacagaacgccatggcatttaatttctactaagtgtagatcgcgacggcggttttaacactaatttctactaagtgtagatttttttnnnnnnnnnnaagcttggcgtggatccgatatcaactagatcttgagacaaatggcagtattcatccacaattttaaaagaaaaggggggattggggggtacagtgcaggggaaagaatagtagacataatagcaacagacatacaaactaaag

SEQ ID NO: 17374 - DNA, 301 bp, Artificial Sequence
  Jak1.3_NTC.27
  crRNA array
  misc_feature (148)..(157): n is a, c, g, or t
cttggctttatatatcttgtggaaaggacgaaacaccgtaatttctactaagtgtagatgcacagaacgccatggcatttaatttctactaagtgtagatgtcgcgttgcgaccggcgcttaatttctactaagtgtagatttttttnnnnnnnnnnaagcttggcgtggatccgatatcaactagatcttgagacaaatggcagtattcatccacaattttaaaagaaaaggggggattggggggtacagtgcaggggaaagaatagtagacataatagcaacagacatacaaactaaag

SEQ ID NO: 17375 - DNA, 301 bp, Artificial Sequence
  Jak1.3_NTC.28
  crRNA array
  misc_feature (148)..(157): n is a, c, g, or t
cttggctttatatatcttgtggaaaggacgaaacaccgtaatttctactaagtgtagatgcacagaacgccatggcatttaatttctactaagtgtagataccgctaatcggcgtaaacttaatttctactaagtgtagatttttttnnnnnnnnnnaagcttggcgtggatccgatatcaactagatcttgagacaaatggcagtattcatccacaattttaaaagaaaaggggggattggggggtacagtgcaggggaaagaatagtagacataatagcaacagacatacaaactaaag

SEQ ID NO: 17376 - DNA, 301 bp, Artificial Sequence
  Jak1.3_NTC.29
  crRNA array
  misc_feature (148)..(157): n is a, c, g, or t
cttggctttatatatcttgtggaaaggacgaaacaccgtaatttctactaagtgtagatgcacagaacgccatggcatttaatttctactaagtgtagatcgcgatctataccgtctatataatttctactaagtgtagatttttttnnnnnnnnnnaagcttggcgtggatccgatatcaactagatcttgagacaaatggcagtattcatccacaattttaaaagaaaaggggggattggggggtacagtgcaggggaaagaatagtagacataatagcaacagacatacaaactaaag

SEQ ID NO: 17377 - DNA, 301 bp, Artificial Sequence
  Jak1.3_NTC.3
  crRNA array
  misc_feature (148)..(157): n is a, c, g, or t
cttggctttatatatcttgtggaaaggacgaaacaccgtaatttctactaagtgtagatgcacagaacgccatggcatttaatttctactaagtgtagattcgacgcgagacgacgtacataatttctactaagtgtagatttttttnnnnnnnnnnaagcttggcgtggatccgatatcaactagatcttgagacaaatggcagtattcatccacaattttaaaagaaaaggggggattggggggtacagtgcaggggaaagaatagtagacataatagcaacagacatacaaactaaag

SEQ ID NO: 17378 - DNA, 301 bp, Artificial Sequence
  Jak1.3_NTC.30
  crRNA array
  misc_feature (148)..(157): n is a, c, g, or t
cttggctttatatatcttgtggaaaggacgaaacaccgtaatttctactaagtgtagatgcacagaacgccatggcatttaatttctactaagtgtagatcgatcgtacgggtgtcctaataatttctactaagtgtagatttttttnnnnnnnnnnaagcttggcgtggatccgatatcaactagatcttgagacaaatggcagtattcatccacaattttaaaagaaaaggggggattggggggtacagtgcaggggaaagaatagtagacataatagcaacagacatacaaactaaag

SEQ ID NO: 17379 - DNA, 301 bp, Artificial Sequence
  Jak1.3_NTC.31
  crRNA array
  misc_feature (148)..(157): n is a, c, g, or t
cttggctttatatatcttgtggaaaggacgaaacaccgtaatttctactaagtgtagatgcacagaacgccatggcatttaatttctactaagtgtagatgccgaccgcgtgattgtaggtaatttctactaagtgtagatttttttnnnnnnnnnnaagcttggcgtggatccgatatcaactagatcttgagacaaatggcagtattcatccacaattttaaaagaaaaggggggattggggggtacagtgcaggggaaagaatagtagacataatagcaacagacatacaaactaaag

SEQ ID NO: 17380 - DNA, 301 bp, Artificial Sequence
  Jak1.3_NTC.32
  crRNA array
  misc_feature (148)..(157): n is a, c, g, or t
cttggctttatatatcttgtggaaaggacgaaacaccgtaatttctactaagtgtagatgcacagaacgccatggcatttaatttctactaagtgtagatgcacgttacgcccgggtcactaatttctactaagtgtagatttttttnnnnnnnnnnaagcttggcgtggatccgatatcaactagatcttgagacaaatggcagtattcatccacaattttaaaagaaaaggggggattggggggtacagtgcaggggaaagaatagtagacataatagcaacagacatacaaactaaag

SEQ ID NO: 17381 - DNA, 301 bp, Artificial Sequence
  Jak1.3_NTC.33
  crRNA array
  misc_feature (148)..(157): n is a, c, g, or t
cttggctttatatatcttgtggaaaggacgaaacaccgtaatttctactaagtgtagatgcacagaacgccatggcatttaatttctactaagtgtagattaagcgaccgacgcattcgctaatttctactaagtgtagatttttttnnnnnnnnnnaagcttggcgtggatccgatatcaactagatcttgagacaaatggcagtattcatccacaattttaaaagaaaaggggggattggggggtacagtgcaggggaaagaatagtagacataatagcaacagacatacaaactaaag

SEQ ID NO: 17382 - DNA, 301 bp, Artificial Sequence
  Jak1.3_NTC.34
  crRNA array
  misc_feature (148)..(157): n is a, c, g, or t
cttggctttatatatcttgtggaaaggacgaaacaccgtaatttctactaagtgtagatgcacagaacgccatggcatttaatttctactaagtgtagattagcgttcgacacgtgaaactaatttctactaagtgtagatttttttnnnnnnnnnnaagcttggcgtggatccgatatcaactagatcttgagacaaatggcagtattcatccacaattttaaaagaaaaggggggattggggggtacagtgcaggggaaagaatagtagacataatagcaacagacatacaaactaaag

SEQ ID NO: 17383 - DNA, 301 bp, Artificial Sequence
  Jak1.3_NTC.35
  crRNA array
  misc_feature (148)..(157): n is a, c, g, or t
cttggctttatatatcttgtggaaaggacgaaacaccgtaatttctactaagtgtagatgcacagaacgccatggcatttaatttctactaagtgtagattggcgcgtaatcgctattcgtaatttctactaagtgtagatttttttnnnnnnnnnnaagcttggcgtggatccgatatcaactagatcttgagacaaatggcagtattcatccacaattttaaaagaaaaggggggattggggggtacagtgcaggggaaagaatagtagacataatagcaacagacatacaaactaaag

SEQ ID NO: 17384 - DNA, 301 bp, Artificial Sequence
  Jak1.3_NTC.36
  crRNA array
  misc_feature (148)..(157): n is a, c, g, or t
cttggctttatatatcttgtggaaaggacgaaacaccgtaatttctactaagtgtagatgcacagaacgccatggcatttaatttctactaagtgtagatcaacccgccgtagcgggccttaatttctactaagtgtagatttttttnnnnnnnnnnaagcttggcgtggatccgatatcaactagatcttgagacaaatggcagtattcatccacaattttaaaagaaaaggggggattggggggtacagtgcaggggaaagaatagtagacataatagcaacagacatacaaactaaag

SEQ ID NO: 17385 - DNA, 301 bp, Artificial Sequence
  Jak1.3_NTC.37
  crRNA array
  misc_feature (148)..(157): n is a, c, g, or t
cttggctttatatatcttgtggaaaggacgaaacaccgtaatttctactaagtgtagatgcacagaacgccatggcatttaatttctactaagtgtagattttgcgttgacgcgattacttaatttctactaagtgtagatttttttnnnnnnnnnnaagcttggcgtggatccgatatcaactagatcttgagacaaatggcagtattcatccacaattttaaaagaaaaggggggattggggggtacagtgcaggggaaagaatagtagacataatagcaacagacatacaaactaaag

SEQ ID NO: 17386 - DNA, 301 bp, Artificial Sequence
  Jak1.3_NTC.38
  crRNA array
  misc_feature (148)..(157): n is a, c, g, or t
cttggctttatatatcttgtggaaaggacgaaacaccgtaatttctactaagtgtagatgcacagaacgccatggcatttaatttctactaagtgtagataacggagcgcgatactaccataatttctactaagtgtagatttttttnnnnnnnnnnaagcttggcgtggatccgatatcaactagatcttgagacaaatggcagtattcatccacaattttaaaagaaaaggggggattggggggtacagtgcaggggaaagaatagtagacataatagcaacagacatacaaactaaag

SEQ ID NO: 17387 - DNA, 301 bp, Artificial Sequence
  Jak1.3_NTC.39
  crRNA array
  misc_feature (148)..(157): n is a, c, g, or t
cttggctttatatatcttgtggaaaggacgaaacaccgtaatttctactaagtgtagatgcacagaacgccatggcatttaatttctactaagtgtagatccggacgttataacgtttcttaatttctactaagtgtagatttttttnnnnnnnnnnaagcttggcgtggatccgatatcaactagatcttgagacaaatggcagtattcatccacaattttaaaagaaaaggggggattggggggtacagtgcaggggaaagaatagtagacataatagcaacagacatacaaactaaag

SEQ ID NO: 17388 - DNA, 301 bp, Artificial Sequence
  Jak1.3_NTC.4
  crRNA array
  misc_feature (148)..(157): n is a, c, g, or t
cttggctttatatatcttgtggaaaggacgaaacaccgtaatttctactaagtgtagatgcacagaacgccatggcatttaatttctactaagtgtagatatacccgtcgcgaacgtgagtaatttctactaagtgtagatttttttnnnnnnnnnnaagcttggcgtggatccgatatcaactagatcttgagacaaatggcagtattcatccacaattttaaaagaaaaggggggattggggggtacagtgcaggggaaagaatagtagacataatagcaacagacatacaaactaaag

SEQ ID NO: 17389 - DNA, 301 bp, Artificial Sequence
  Jak1.3_NTC.40
  crRNA array
  misc_feature (148)..(157): n is a, c, g, or t
cttggctttatatatcttgtggaaaggacgaaacaccgtaatttctactaagtgtagatgcacagaacgccatggcatttaatttctactaagtgtagatattcgcgaacccggccggaataatttctactaagtgtagatttttttnnnnnnnnnnaagcttggcgtggatccgatatcaactagatcttgagacaaatggcagtattcatccacaattttaaaagaaaaggggggattggggggtacagtgcaggggaaagaatagtagacataatagcaacagacatacaaactaaag

SEQ ID NO: 17390 - DNA, 301 bp, Artificial Sequence
  Jak1.3_NTC.41
  crRNA array
  misc_feature (148)..(157): n is a, c, g, or t
cttggctttatatatcttgtggaaaggacgaaacaccgtaatttctactaagtgtagatgcacagaacgccatggcatttaatttctactaagtgtagatttgatggcgcgacgcgttattaatttctactaagtgtagatttttttnnnnnnnnnnaagcttggcgtggatccgatatcaactagatcttgagacaaatggcagtattcatccacaattttaaaagaaaaggggggattggggggtacagtgcaggggaaagaatagtagacataatagcaacagacatacaaactaaag

SEQ ID NO: 17391 - DNA, 301 bp, Artificial Sequence
  Jak1.3_NTC.42
  crRNA array
  misc_feature (148)..(157): n is a, c, g, or t
cttggctttatatatcttgtggaaaggacgaaacaccgtaatttctactaagtgtagatgcacagaacgccatggcatttaatttctactaagtgtagatggtcaaatcgcggcgataactaatttctactaagtgtagatttttttnnnnnnnnnnaagcttggcgtggatccgatatcaactagatcttgagacaaatggcagtattcatccacaattttaaaagaaaaggggggattggggggtacagtgcaggggaaagaatagtagacataatagcaacagacatacaaactaaag

SEQ ID NO: 17392 - DNA, 301 bp, Artificial Sequence
  Jak1.3_NTC.43
  crRNA array
  misc_feature (148)..(157): n is a, c, g, or t
cttggctttatatatcttgtggaaaggacgaaacaccgtaatttctactaagtgtagatgcacagaacgccatggcatttaatttctactaagtgtagatcgactcgcgcattgaactggtaatttctactaagtgtagatttttttnnnnnnnnnnaagcttggcgtggatccgatatcaactagatcttgagacaaatggcagtattcatccacaattttaaaagaaaaggggggattggggggtacagtgcaggggaaagaatagtagacataatagcaacagacatacaaactaaag

SEQ ID NO: 17393 - DNA, 301 bp, Artificial Sequence
  Jak1.3_NTC.44
  crRNA array
  misc_feature (148)..(157): n is a, c, g, or t
cttggctttatatatcttgtggaaaggacgaaacaccgtaatttctactaagtgtagatgcacagaacgccatggcatttaatttctactaagtgtagatagcgtcgtacgatttatcgttaatttctactaagtgtagatttttttnnnnnnnnnnaagcttggcgtggatccgatatcaactagatcttgagacaaatggcagtattcatccacaattttaaaagaaaaggggggattggggggtacagtgcaggggaaagaatagtagacataatagcaacagacatacaaactaaag

SEQ ID NO: 17394 - DNA, 301 bp, Artificial Sequence
  Jak1.3_NTC.45
  crRNA array
  misc_feature (148)..(157): n is a, c, g, or t
cttggctttatatatcttgtggaaaggacgaaacaccgtaatttctactaagtgtagatgcacagaacgccatggcatttaatttctactaagtgtagatcggaacgcgtgatactagggtaatttctactaagtgtagatttttttnnnnnnnnnnaagcttggcgtggatccgatatcaactagatcttgagacaaatggcagtattcatccacaattttaaaagaaaaggggggattggggggtacagtgcaggggaaagaatagtagacataatagcaacagacatacaaactaaag

SEQ ID NO: 17395 - DNA, 301 bp, Artificial Sequence
  Jak1.3_NTC.46
  crRNA array
  misc_feature (148)..(157): n is a, c, g, or t
cttggctttatatatcttgtggaaaggacgaaacaccgtaatttctactaagtgtagatgcacagaacgccatggcatttaatttctactaagtgtagatagcgggtcgtagacgcgcggtaatttctactaagtgtagatttttttnnnnnnnnnnaagcttggcgtggatccgatatcaactagatcttgagacaaatggcagtattcatccacaattttaaaagaaaaggggggattggggggtacagtgcaggggaaagaatagtagacataatagcaacagacatacaaactaaag

SEQ ID NO: 17396 - DNA, 301 bp, Artificial Sequence
  Jak1.3_NTC.47
  crRNA array
  misc_feature (148)..(157): n is a, c, g, or t
cttggctttatatatcttgtggaaaggacgaaacaccgtaatttctactaagtgtagatgcacagaacgccatggcatttaatttctactaagtgtagattctcgtatcgcgattgttaataatttctactaagtgtagatttttttnnnnnnnnnnaagcttggcgtggatccgatatcaactagatcttgagacaaatggcagtattcatccacaattttaaaagaaaaggggggattggggggtacagtgcaggggaaagaatagtagacataatagcaacagacatacaaactaaag

SEQ ID NO: 17397 - DNA, 301 bp, Artificial Sequence
  Jak1.3_NTC.48
  crRNA array
  misc_feature (148)..(157): n is a, c, g, or t
cttggctttatatatcttgtggaaaggacgaaacaccgtaatttctactaagtgtagatgcacagaacgccatggcatttaatttctactaagtgtagatcggtcgactacggctgttagtaatttctactaagtgtagatttttttnnnnnnnnnnaagcttggcgtggatccgatatcaactagatcttgagacaaatggcagtattcatccacaattttaaaagaaaaggggggattggggggtacagtgcaggggaaagaatagtagacataatagcaacagacatacaaactaaag

SEQ ID NO: 17398 - DNA, 301 bp, Artificial Sequence
  Jak1.3_NTC.49
  crRNA array
  misc_feature (148)..(157): n is a, c, g, or t
cttggctttatatatcttgtggaaaggacgaaacaccgtaatttctactaagtgtagatgcacagaacgccatggcatttaatttctactaagtgtagattcggggcgcgtcaactgaattaatttctactaagtgtagatttttttnnnnnnnnnnaagcttggcgtggatccgatatcaactagatcttgagacaaatggcagtattcatccacaattttaaaagaaaaggggggattggggggtacagtgcaggggaaagaatagtagacataatagcaacagacatacaaactaaag

SEQ ID NO: 17399 - DNA, 301 bp, Artificial Sequence
  Jak1.3_NTC.5
  crRNA array
  misc_feature (148)..(157): n is a, c, g, or t
cttggctttatatatcttgtggaaaggacgaaacaccgtaatttctactaagtgtagatgcacagaacgccatggcatttaatttctactaagtgtagatgcttacgcgtcgcgaatgtataatttctactaagtgtagatttttttnnnnnnnnnnaagcttggcgtggatccgatatcaactagatcttgagacaaatggcagtattcatccacaattttaaaagaaaaggggggattggggggtacagtgcaggggaaagaatagtagacataatagcaacagacatacaaactaaag

SEQ ID NO: 17400 - DNA, 301 bp, Artificial Sequence
  Jak1.3_NTC.50
  crRNA array
  misc_feature (148)..(157): n is a, c, g, or t
cttggctttatatatcttgtggaaaggacgaaacaccgtaatttctactaagtgtagatgcacagaacgccatggcatttaatttctactaagtgtagatattgccgctcgcgcaaaatctaatttctactaagtgtagatttttttnnnnnnnnnnaagcttggcgtggatccgatatcaactagatcttgagacaaatggcagtattcatccacaattttaaaagaaaaggggggattggggggtacagtgcaggggaaagaatagtagacataatagcaacagacatacaaactaaag

SEQ ID NO: 17401 - DNA, 301 bp, Artificial Sequence
  Jak1.3_NTC.51
  crRNA array
  misc_feature (148)..(157): n is a, c, g, or t
cttggctttatatatcttgtggaaaggacgaaacaccgtaatttctactaagtgtagatgcacagaacgccatggcatttaatttctactaagtgtagattaacgcgcaacacgccaatgtaatttctactaagtgtagatttttttnnnnnnnnnnaagcttggcgtggatccgatatcaactagatcttgagacaaatggcagtattcatccacaattttaaaagaaaaggggggattggggggtacagtgcaggggaaagaatagtagacataatagcaacagacatacaaactaaag

SEQ ID NO: 17402 - DNA, 301 bp, Artificial Sequence
  Jak1.3_NTC.6
  crRNA array
  misc_feature (148)..(157): n is a, c, g, or t
cttggctttatatatcttgtggaaaggacgaaacaccgtaatttctactaagtgtagatgcacagaacgccatggcatttaatttctactaagtgtagatcgaatcgcgcctacgggaattaatttctactaagtgtagatttttttnnnnnnnnnnaagcttggcgtggatccgatatcaactagatcttgagacaaatggcagtattcatccacaattttaaaagaaaaggggggattggggggtacagtgcaggggaaagaatagtagacataatagcaacagacatacaaactaaag

SEQ ID NO: 17403 - DNA, 301 bp, Artificial Sequence
  Jak1.3_NTC.7
  crRNA array
  misc_feature (148)..(157): n is a, c, g, or t
cttggctttatatatcttgtggaaaggacgaaacaccgtaatttctactaagtgtagatgcacagaacgccatggcatttaatttctactaagtgtagatcgccgaacggataagactattaatttctactaagtgtagatttttttnnnnnnnnnnaagcttggcgtggatccgatatcaactagatcttgagacaaatggcagtattcatccacaattttaaaagaaaaggggggattggggggtacagtgcaggggaaagaatagtagacataatagcaacagacatacaaactaaag

SEQ ID NO: 17404 - DNA, 301 bp, Artificial Sequence
  Jak1.3_NTC.8
  crRNA array
  misc_feature (148)..(157): n is a, c, g, or t
cttggctttatatatcttgtggaaaggacgaaacaccgtaatttctactaagtgtagatgcacagaacgccatggcatttaatttctactaagtgtagatcgaccgaggttacgctgggataatttctactaagtgtagatttttttnnnnnnnnnnaagcttggcgtggatccgatatcaactagatcttgagacaaatggcagtattcatccacaattttaaaagaaaaggggggattggggggtacagtgcaggggaaagaatagtagacataatagcaacagacatacaaactaaag

SEQ ID NO: 17405 - DNA, 301 bp, Artificial Sequence
  Jak1.3_NTC.9
  crRNA array
  misc_feature (148)..(157): n is a, c, g, or t
cttggctttatatatcttgtggaaaggacgaaacaccgtaatttctactaagtgtagatgcacagaacgccatggcatttaatttctactaagtgtagatatcgccgtacggctatggcataatttctactaagtgtagatttttttnnnnnnnnnnaagcttggcgtggatccgatatcaactagatcttgagacaaatggcagtattcatccacaattttaaaagaaaaggggggattggggggtacagtgcaggggaaagaatagtagacataatagcaacagacatacaaactaaag

SEQ ID NO: 17406 - DNA, 301 bp, Artificial Sequence
  Jak1.4_NTC.0
  crRNA array
  misc_feature (148)..(157): n is a, c, g, or t
cttggctttatatatcttgtggaaaggacgaaacaccgtaatttctactaagtgtagattgccgccactggatcccgagtaatttctactaagtgtagattatagcgtcgcgcgctaatttaatttctactaagtgtagatttttttnnnnnnnnnnaagcttggcgtggatccgatatcaactagatcttgagacaaatggcagtattcatccacaattttaaaagaaaaggggggattggggggtacagtgcaggggaaagaatagtagacataatagcaacagacatacaaactaaag

SEQ ID NO: 17407 - DNA, 301 bp, Artificial Sequence
  Jak1.4_NTC.1
  crRNA array
  misc_feature (148)..(157): n is a, c, g, or t
cttggctttatatatcttgtggaaaggacgaaacaccgtaatttctactaagtgtagattgccgccactggatcccgagtaatttctactaagtgtagatcgcgtaaccgttccggctcctaatttctactaagtgtagatttttttnnnnnnnnnnaagcttggcgtggatccgatatcaactagatcttgagacaaatggcagtattcatccacaattttaaaagaaaaggggggattggggggtacagtgcaggggaaagaatagtagacataatagcaacagacatacaaactaaag

SEQ ID NO: 17408 - DNA, 301 bp, Artificial Sequence
  Jak1.4_NTC.10
  crRNA array
  misc_feature (148)..(157): n is a, c, g, or t
cttggctttatatatcttgtggaaaggacgaaacaccgtaatttctactaagtgtagattgccgccactggatcccgagtaatttctactaagtgtagatcgctaagttcgcgcgggccgtaatttctactaagtgtagatttttttnnnnnnnnnnaagcttggcgtggatccgatatcaactagatcttgagacaaatggcagtattcatccacaattttaaaagaaaaggggggattggggggtacagtgcaggggaaagaatagtagacataatagcaacagacatacaaactaaag

SEQ ID NO: 17409 - DNA, 301 bp, Artificial Sequence
  Jak1.4_NTC.11
  crRNA array
  misc_feature (148)..(157): n is a, c, g, or t
cttggctttatatatcttgtggaaaggacgaaacaccgtaatttctactaagtgtagattgccgccactggatcccgagtaatttctactaagtgtagatcgttcgtcgacgaagcaatctaatttctactaagtgtagatttttttnnnnnnnnnnaagcttggcgtggatccgatatcaactagatcttgagacaaatggcagtattcatccacaattttaaaagaaaaggggggattggggggtacagtgcaggggaaagaatagtagacataatagcaacagacatacaaactaaag

SEQ ID NO: 17410 - DNA, 301 bp, Artificial Sequence
  Jak1.4_NTC.12
  crRNA array
  misc_feature (148)..(157): n is a, c, g, or t
cttggctttatatatcttgtggaaaggacgaaacaccgtaatttctactaagtgtagattgccgccactggatcccgagtaatttctactaagtgtagatcgccgacgattaatcaatagtaatttctactaagtgtagatttttttnnnnnnnnnnaagcttggcgtggatccgatatcaactagatcttgagacaaatggcagtattcatccacaattttaaaagaaaaggggggattggggggtacagtgcaggggaaagaatagtagacataatagcaacagacatacaaactaaag

SEQ ID NO: 17411 - DNA, 301 bp, Artificial Sequence
  Jak1.4_NTC.13
  crRNA array
  misc_feature (148)..(157): n is a, c, g, or t
cttggctttatatatcttgtggaaaggacgaaacaccgtaatttctactaagtgtagattgccgccactggatcccgagtaatttctactaagtgtagatgaccgttgtatcgcgatcaataatttctactaagtgtagatttttttnnnnnnnnnnaagcttggcgtggatccgatatcaactagatcttgagacaaatggcagtattcatccacaattttaaaagaaaaggggggattggggggtacagtgcaggggaaagaatagtagacataatagcaacagacatacaaactaaag

SEQ ID NO: 17412 - DNA, 301 bp, Artificial Sequence
  Jak1.4_NTC.14
  crRNA array
  misc_feature (148)..(157): n is a, c, g, or t
cttggctttatatatcttgtggaaaggacgaaacaccgtaatttctactaagtgtagattgccgccactggatcccgagtaatttctactaagtgtagatccgttcgtgcgatagtgttttaatttctactaagtgtagatttttttnnnnnnnnnnaagcttggcgtggatccgatatcaactagatcttgagacaaatggcagtattcatccacaattttaaaagaaaaggggggattggggggtacagtgcaggggaaagaatagtagacataatagcaacagacatacaaactaaag

SEQ ID NO: 17413 - DNA, 301 bp, Artificial Sequence
  Jak1.4_NTC.15
  crRNA array
  misc_feature (148)..(157): n is a, c, g, or t
cttggctttatatatcttgtggaaaggacgaaacaccgtaatttctactaagtgtagattgccgccactggatcccgagtaatttctactaagtgtagatgttgtcgtgccgcgaatttataatttctactaagtgtagatttttttnnnnnnnnnnaagcttggcgtggatccgatatcaactagatcttgagacaaatggcagtattcatccacaattttaaaagaaaaggggggattggggggtacagtgcaggggaaagaatagtagacataatagcaacagacatacaaactaaag

SEQ ID NO: 17414 - DNA, 301 bp, Artificial Sequence
  Jak1.4_NTC.16
  crRNA array
  misc_feature (148)..(157): n is a, c, g, or t
cttggctttatatatcttgtggaaaggacgaaacaccgtaatttctactaagtgtagattgccgccactggatcccgagtaatttctactaagtgtagatcggtacgttagacgaaaatttaatttctactaagtgtagatttttttnnnnnnnnnnaagcttggcgtggatccgatatcaactagatcttgagacaaatggcagtattcatccacaattttaaaagaaaaggggggattggggggtacagtgcaggggaaagaatagtagacataatagcaacagacatacaaactaaag

SEQ ID NO: 17415 - DNA, 301 bp, Artificial Sequence
  Jak1.4_NTC.17
  crRNA array
  misc_feature (148)..(157): n is a, c, g, or t
cttggctttatatatcttgtggaaaggacgaaacaccgtaatttctactaagtgtagattgccgccactggatcccgagtaatttctactaagtgtagattatcgaacgctatcgaacgttaatttctactaagtgtagatttttttnnnnnnnnnnaagcttggcgtggatccgatatcaactagatcttgagacaaatggcagtattcatccacaattttaaaagaaaaggggggattggggggtacagtgcaggggaaagaatagtagacataatagcaacagacatacaaactaaag

SEQ ID NO: 17416 - DNA, 301 bp, Artificial Sequence
  Jak1.4_NTC.18
  crRNA array
  misc_feature (148)..(157): n is a, c, g, or t
cttggctttatatatcttgtggaaaggacgaaacaccgtaatttctactaagtgtagattgccgccactggatcccgagtaatttctactaagtgtagattccggttacgaccggcaaaataatttctactaagtgtagatttttttnnnnnnnnnnaagcttggcgtggatccgatatcaactagatcttgagacaaatggcagtattcatccacaattttaaaagaaaaggggggattggggggtacagtgcaggggaaagaatagtagacataatagcaacagacatacaaactaaag

SEQ ID NO: 17417 - DNA, 301 bp, Artificial Sequence
  Jak1.4_NTC.19
  crRNA array
  misc_feature (148)..(157): n is a, c, g, or t
cttggctttatatatcttgtggaaaggacgaaacaccgtaatttctactaagtgtagattgccgccactggatcccgagtaatttctactaagtgtagatcgtcgtagaacgatacccgataatttctactaagtgtagatttttttnnnnnnnnnnaagcttggcgtggatccgatatcaactagatcttgagacaaatggcagtattcatccacaattttaaaagaaaaggggggattggggggtacagtgcaggggaaagaatagtagacataatagcaacagacatacaaactaaag

SEQ ID NO: 17418 - DNA, 301 bp, Artificial Sequence
  Jak1.4_NTC.2
  crRNA array
  misc_feature (148)..(157): n is a, c, g, or t
cttggctttatatatcttgtggaaaggacgaaacaccgtaatttctactaagtgtagattgccgccactggatcccgagtaatttctactaagtgtagatttatgtcgcgccgcgacccgtaatttctactaagtgtagatttttttnnnnnnnnnnaagcttggcgtggatccgatatcaactagatcttgagacaaatggcagtattcatccacaattttaaaagaaaaggggggattggggggtacagtgcaggggaaagaatagtagacataatagcaacagacatacaaactaaag

SEQ ID NO: 17419 - DNA, 301 bp, Artificial Sequence
  Jak1.4_NTC.20
  crRNA array
  misc_feature (148)..(157): n is a, c, g, or t
cttggctttatatatcttgtggaaaggacgaaacaccgtaatttctactaagtgtagattgccgccactggatcccgagtaatttctactaagtgtagatattccggcgcgaccagaagataatttctactaagtgtagatttttttnnnnnnnnnnaagcttggcgtggatccgatatcaactagatcttgagacaaatggcagtattcatccacaattttaaaagaaaaggggggattggggggtacagtgcaggggaaagaatagtagacataatagcaacagacatacaaactaaag

SEQ ID NO: 17420 - DNA, 301 bp, Artificial Sequence
  Jak1.4_NTC.21
  crRNA array
  misc_feature (148)..(157): n is a, c, g, or t
cttggctttatatatcttgtggaaaggacgaaacaccgtaatttctactaagtgtagattgccgccactggatcccgagtaatttctactaagtgtagatgtataacttcgcgcggtccgtaatttctactaagtgtagatttttttnnnnnnnnnnaagcttggcgtggatccgatatcaactagatcttgagacaaatggcagtattcatccacaattttaaaagaaaaggggggattggggggtacagtgcaggggaaagaatagtagacataatagcaacagacatacaaactaaag

SEQ ID NO: 17421 - DNA, 301 bp, Artificial Sequence
  Jak1.4_NTC.22
  crRNA array
  misc_feature (148)..(157): n is a, c, g, or t
cttggctttatatatcttgtggaaaggacgaaacaccgtaatttctactaagtgtagattgccgccactggatcccgagtaatttctactaagtgtagatgcgcgtcaacgtaatgtgcctaatttctactaagtgtagatttttttnnnnnnnnnnaagcttggcgtggatccgatatcaactagatcttgagacaaatggcagtattcatccacaattttaaaagaaaaggggggattggggggtacagtgcaggggaaagaatagtagacataatagcaacagacatacaaactaaag

SEQ ID NO: 17422 - DNA, 301 bp, Artificial Sequence
  Jak1.4_NTC.23
  crRNA array
  misc_feature (148)..(157): n is a, c, g, or t
cttggctttatatatcttgtggaaaggacgaaacaccgtaatttctactaagtgtagattgccgccactggatcccgagtaatttctactaagtgtagatacgcgctattatcgtaggtgtaatttctactaagtgtagatttttttnnnnnnnnnnaagcttggcgtggatccgatatcaactagatcttgagacaaatggcagtattcatccacaattttaaaagaaaaggggggattggggggtacagtgcaggggaaagaatagtagacataatagcaacagacatacaaactaaag

SEQ ID NO: 17423 - DNA, 301 bp, Artificial Sequence
  Jak1.4_NTC.24
  crRNA array
  misc_feature (148)..(157): n is a, c, g, or t
cttggctttatatatcttgtggaaaggacgaaacaccgtaatttctactaagtgtagattgccgccactggatcccgagtaatttctactaagtgtagatactatcgacgttcgtcccggtaatttctactaagtgtagatttttttnnnnnnnnnnaagcttggcgtggatccgatatcaactagatcttgagacaaatggcagtattcatccacaattttaaaagaaaaggggggattggggggtacagtgcaggggaaagaatagtagacataatagcaacagacatacaaactaaag

SEQ ID NO: 17424 - DNA, 301 bp, Artificial Sequence
  Jak1.4_NTC.25
  crRNA array
  misc_feature (148)..(157): n is a, c, g, or t
cttggctttatatatcttgtggaaaggacgaaacaccgtaatttctactaagtgtagattgccgccactggatcccgagtaatttctactaagtgtagattcgcgttatcgtgccgtgcgtaatttctactaagtgtagatttttttnnnnnnnnnnaagcttggcgtggatccgatatcaactagatcttgagacaaatggcagtattcatccacaattttaaaagaaaaggggggattggggggtacagtgcaggggaaagaatagtagacataatagcaacagacatacaaactaaag

SEQ ID NO: 17425 - DNA, 301 bp, Artificial Sequence
  Jak1.4_NTC.26
  crRNA array
  misc_feature (148)..(157): n is a, c, g, or t
cttggctttatatatcttgtggaaaggacgaaacaccgtaatttctactaagtgtagattgccgccactggatcccgagtaatttctactaagtgtagatcgcgacggcggttttaacactaatttctactaagtgtagatttttttnnnnnnnnnnaagcttggcgtggatccgatatcaactagatcttgagacaaatggcagtattcatccacaattttaaaagaaaaggggggattggggggtacagtgcaggggaaagaatagtagacataatagcaacagacatacaaactaaag

SEQ ID NO: 17426 - DNA, 301 bp, Artificial Sequence
  Jak1.4_NTC.27
  crRNA array
  misc_feature (148)..(157): n is a, c, g, or t
cttggctttatatatcttgtggaaaggacgaaacaccgtaatttctactaagtgtagattgccgccactggatcccgagtaatttctactaagtgtagatgtcgcgttgcgaccggcgcttaatttctactaagtgtagatttttttnnnnnnnnnnaagcttggcgtggatccgatatcaactagatcttgagacaaatggcagtattcatccacaattttaaaagaaaaggggggattggggggtacagtgcaggggaaagaatagtagacataatagcaacagacatacaaactaaag

SEQ ID NO: 17427 - DNA, 301 bp, Artificial Sequence
  Jak1.4_NTC.28
  crRNA array
  misc_feature (148)..(157): n is a, c, g, or t
cttggctttatatatcttgtggaaaggacgaaacaccgtaatttctactaagtgtagattgccgccactggatcccgagtaatttctactaagtgtagataccgctaatcggcgtaaacttaatttctactaagtgtagatttttttnnnnnnnnnnaagcttggcgtggatccgatatcaactagatcttgagacaaatggcagtattcatccacaattttaaaagaaaaggggggattggggggtacagtgcaggggaaagaatagtagacataatagcaacagacatacaaactaaag

SEQ ID NO: 17428 - DNA, 301 bp, Artificial Sequence
  Jak1.4_NTC.29
  crRNA array
  misc_feature (148)..(157): n is a, c, g, or t
cttggctttatatatcttgtggaaaggacgaaacaccgtaatttctactaagtgtagattgccgccactggatcccgagtaatttctactaagtgtagatcgcgatctataccgtctatataatttctactaagtgtagatttttttnnnnnnnnnnaagcttggcgtggatccgatatcaactagatcttgagacaaatggcagtattcatccacaattttaaaagaaaaggggggattggggggtacagtgcaggggaaagaatagtagacataatagcaacagacatacaaactaaag

SEQ ID NO: 17429 - DNA, 301 bp, Artificial Sequence
  Jak1.4_NTC.3
  crRNA array
  misc_feature (148)..(157): n is a, c, g, or t
cttggctttatatatcttgtggaaaggacgaaacaccgtaatttctactaagtgtagattgccgccactggatcccgagtaatttctactaagtgtagattcgacgcgagacgacgtacataatttctactaagtgtagatttttttnnnnnnnnnnaagcttggcgtggatccgatatcaactagatcttgagacaaatggcagtattcatccacaattttaaaagaaaaggggggattggggggtacagtgcaggggaaagaatagtagacataatagcaacagacatacaaactaaag

SEQ ID NO: 17430 - DNA, 301 bp, Artificial Sequence
  Jak1.4_NTC.30
  crRNA array
  misc_feature (148)..(157): n is a, c, g, or t
cttggctttatatatcttgtggaaaggacgaaacaccgtaatttctactaagtgtagattgccgccactggatcccgagtaatttctactaagtgtagatcgatcgtacgggtgtcctaataatttctactaagtgtagatttttttnnnnnnnnnnaagcttggcgtggatccgatatcaactagatcttgagacaaatggcagtattcatccacaattttaaaagaaaaggggggattggggggtacagtgcaggggaaagaatagtagacataatagcaacagacatacaaactaaag

SEQ ID NO: 17431 - DNA, 301 bp, Artificial Sequence
  Jak1.4_NTC.31
  crRNA array
  misc_feature (148)..(157): n is a, c, g, or t
cttggctttatatatcttgtggaaaggacgaaacaccgtaatttctactaagtgtagattgccgccactggatcccgagtaatttctactaagtgtagatgccgaccgcgtgattgtaggtaatttctactaagtgtagatttttttnnnnnnnnnnaagcttggcgtggatccgatatcaactagatcttgagacaaatggcagtattcatccacaattttaaaagaaaaggggggattggggggtacagtgcaggggaaagaatagtagacataatagcaacagacatacaaactaaag

SEQ ID NO: 17432 - DNA, 301 bp, Artificial Sequence
  Jak1.4_NTC.32
  crRNA array
  misc_feature (148)..(157): n is a, c, g, or t
cttggctttatatatcttgtggaaaggacgaaacaccgtaatttctactaagtgtagattgccgccactggatcccgagtaatttctactaagtgtagatgcacgttacgcccgggtcactaatttctactaagtgtagatttttttnnnnnnnnnnaagcttggcgtggatccgatatcaactagatcttgagacaaatggcagtattcatccacaattttaaaagaaaaggggggattggggggtacagtgcaggggaaagaatagtagacataatagcaacagacatacaaactaaag

SEQ ID NO: 17433 - DNA, 301 bp, Artificial Sequence
  Jak1.4_NTC.33
  crRNA array
  misc_feature (148)..(157): n is a, c, g, or t
cttggctttatatatcttgtggaaaggacgaaacaccgtaatttctactaagtgtagattgccgccactggatcccgagtaatttctactaagtgtagattaagcgaccgacgcattcgctaatttctactaagtgtagatttttttnnnnnnnnnnaagcttggcgtggatccgatatcaactagatcttgagacaaatggcagtattcatccacaattttaaaagaaaaggggggattggggggtacagtgcaggggaaagaatagtagacataatagcaacagacatacaaactaaag

SEQ ID NO: 17434 - DNA, 301 bp, Artificial Sequence
  Jak1.4_NTC.34
  crRNA array
  misc_feature (148)..(157): n is a, c, g, or t
cttggctttatatatcttgtggaaaggacgaaacaccgtaatttctactaagtgtagattgccgccactggatcccgagtaatttctactaagtgtagattagcgttcgacacgtgaaactaatttctactaagtgtagatttttttnnnnnnnnnnaagcttggcgtggatccgatatcaactagatcttgagacaaatggcagtattcatccacaattttaaaagaaaaggggggattggggggtacagtgcaggggaaagaatagtagacataatagcaacagacatacaaactaaag

SEQ ID NO: 17435 - DNA, 301 bp, Artificial Sequence
  Jak1.4_NTC.35
  crRNA array
  misc_feature (148)..(157): n is a, c, g, or t
cttggctttatatatcttgtggaaaggacgaaacaccgtaatttctactaagtgtagattgccgccactggatcccgagtaatttctactaagtgtagattggcgcgtaatcgctattcgtaatttctactaagtgtagatttttttnnnnnnnnnnaagcttggcgtggatccgatatcaactagatcttgagacaaatggcagtattcatccacaattttaaaagaaaaggggggattggggggtacagtgcaggggaaagaatagtagacataatagcaacagacatacaaactaaag

SEQ ID NO: 17436 - DNA, 301 bp, Artificial Sequence
  Jak1.4_NTC.36
  crRNA array
  misc_feature (148)..(157): n is a, c, g, or t
cttggctttatatatcttgtggaaaggacgaaacaccgtaatttctactaagtgtagattgccgccactggatcccgagtaatttctactaagtgtagatcaacccgccgtagcgggccttaatttctactaagtgtagatttttttnnnnnnnnnnaagcttggcgtggatccgatatcaactagatcttgagacaaatggcagtattcatccacaattttaaaagaaaaggggggattggggggtacagtgcaggggaaagaatagtagacataatagcaacagacatacaaactaaag

SEQ ID NO: 17437 - DNA, 301 bp, Artificial Sequence
  Jak1.4_NTC.37
  crRNA array
  misc_feature (148)..(157): n is a, c, g, or t
cttggctttatatatcttgtggaaaggacgaaacaccgtaatttctactaagtgtagattgccgccactggatcccgagtaatttctactaagtgtagattttgcgttgacgcgattacttaatttctactaagtgtagatttttttnnnnnnnnnnaagcttggcgtggatccgatatcaactagatcttgagacaaatggcagtattcatccacaattttaaaagaaaaggggggattggggggtacagtgcaggggaaagaatagtagacataatagcaacagacatacaaactaaag

SEQ ID NO: 17438 - DNA, 301 bp, Artificial Sequence
  Jak1.4_NTC.38
  crRNA array
  misc_feature (148)..(157): n is a, c, g, or t
cttggctttatatatcttgtggaaaggacgaaacaccgtaatttctactaagtgtagattgccgccactggatcccgagtaatttctactaagtgtagataacggagcgcgatactaccataatttctactaagtgtagatttttttnnnnnnnnnnaagcttggcgtggatccgatatcaactagatcttgagacaaatggcagtattcatccacaattttaaaagaaaaggggggattggggggtacagtgcaggggaaagaatagtagacataatagcaacagacatacaaactaaag

SEQ ID NO: 17439 - DNA, 301 bp, Artificial Sequence
  Jak1.4_NTC.39
  crRNA array
  misc_feature (148)..(157): n is a, c, g, or t
cttggctttatatatcttgtggaaaggacgaaacaccgtaatttctactaagtgtagattgccgccactggatcccgagtaatttctactaagtgtagatccggacgttataacgtttcttaatttctactaagtgtagatttttttnnnnnnnnnnaagcttggcgtggatccgatatcaactagatcttgagacaaatggcagtattcatccacaattttaaaagaaaaggggggattggggggtacagtgcaggggaaagaatagtagacataatagcaacagacatacaaactaaag

SEQ ID NO: 17440 - DNA, 301 bp, Artificial Sequence
  Jak1.4_NTC.4
  crRNA array
  misc_feature (148)..(157): n is a, c, g, or t
cttggctttatatatcttgtggaaaggacgaaacaccgtaatttctactaagtgtagattgccgccactggatcccgagtaatttctactaagtgtagatatacccgtcgcgaacgtgagtaatttctactaagtgtagatttttttnnnnnnnnnnaagcttggcgtggatccgatatcaactagatcttgagacaaatggcagtattcatccacaattttaaaagaaaaggggggattggggggtacagtgcaggggaaagaatagtagacataatagcaacagacatacaaactaaag

SEQ ID NO: 17441 - DNA, 301 bp, Artificial Sequence
  Jak1.4_NTC.40
  crRNA array
  misc_feature (148)..(157): n is a, c, g, or t
cttggctttatatatcttgtggaaaggacgaaacaccgtaatttctactaagtgtagattgccgccactggatcccgagtaatttctactaagtgtagatattcgcgaacccggccggaataatttctactaagtgtagatttttttnnnnnnnnnnaagcttggcgtggatccgatatcaactagatcttgagacaaatggcagtattcatccacaattttaaaagaaaaggggggattggggggtacagtgcaggggaaagaatagtagacataatagcaacagacatacaaactaaag

SEQ ID NO: 17442 - DNA, 301 bp, Artificial Sequence
  Jak1.4_NTC.41
  crRNA array
  misc_feature (148)..(157): n is a, c, g, or t
cttggctttatatatcttgtggaaaggacgaaacaccgtaatttctactaagtgtagattgccgccactggatcccgagtaatttctactaagtgtagatttgatggcgcgacgcgttattaatttctactaagtgtagatttttttnnnnnnnnnnaagcttggcgtggatccgatatcaactagatcttgagacaaatggcagtattcatccacaattttaaaagaaaaggggggattggggggtacagtgcaggggaaagaatagtagacataatagcaacagacatacaaactaaag

SEQ ID NO: 17443 - DNA, 301 bp, Artificial Sequence
  Jak1.4_NTC.42
  crRNA array
  misc_feature (148)..(157): n is a, c, g, or t
cttggctttatatatcttgtggaaaggacgaaacaccgtaatttctactaagtgtagattgccgccactggatcccgagtaatttctactaagtgtagatggtcaaatcgcggcgataactaatttctactaagtgtagatttttttnnnnnnnnnnaagcttggcgtggatccgatatcaactagatcttgagacaaatggcagtattcatccacaattttaaaagaaaaggggggattggggggtacagtgcaggggaaagaatagtagacataatagcaacagacatacaaactaaag

SEQ ID NO: 17444 - DNA, 301 bp, Artificial Sequence
  Jak1.4_NTC.43
  crRNA array
  misc_feature (148)..(157): n is a, c, g, or t
cttggctttatatatcttgtggaaaggacgaaacaccgtaatttctactaagtgtagattgccgccactggatcccgagtaatttctactaagtgtagatcgactcgcgcattgaactggtaatttctactaagtgtagatttttttnnnnnnnnnnaagcttggcgtggatccgatatcaactagatcttgagacaaatggcagtattcatccacaattttaaaagaaaaggggggattggggggtacagtgcaggggaaagaatagtagacataatagcaacagacatacaaactaaag

SEQ ID NO: 17445 - DNA, 301 bp, Artificial Sequence
  Jak1.4_NTC.44
  crRNA array
  misc_feature (148)..(157): n is a, c, g, or t
cttggctttatatatcttgtggaaaggacgaaacaccgtaatttctactaagtgtagattgccgccactggatcccgagtaatttctactaagtgtagatagcgtcgtacgatttatcgttaatttctactaagtgtagatttttttnnnnnnnnnnaagcttggcgtggatccgatatcaactagatcttgagacaaatggcagtattcatccacaattttaaaagaaaaggggggattggggggtacagtgcaggggaaagaatagtagacataatagcaacagacatacaaactaaag

SEQ ID NO: 17446 - DNA, 301 bp, Artificial Sequence
  Jak1.4_NTC.45
  crRNA array
  misc_feature (148)..(157): n is a, c, g, or t
cttggctttatatatcttgtggaaaggacgaaacaccgtaatttctactaagtgtagattgccgccactggatcccgagtaatttctactaagtgtagatcggaacgcgtgatactagggtaatttctactaagtgtagatttttttnnnnnnnnnnaagcttggcgtggatccgatatcaactagatcttgagacaaatggcagtattcatccacaattttaaaagaaaaggggggattggggggtacagtgcaggggaaagaatagtagacataatagcaacagacatacaaactaaag

SEQ ID NO: 17447 - DNA, 301 bp, Artificial Sequence
  Jak1.4_NTC.46
  crRNA array
  misc_feature (148)..(157): n is a, c, g, or t
cttggctttatatatcttgtggaaaggacgaaacaccgtaatttctactaagtgtagattgccgccactggatcccgagtaatttctactaagtgtagatagcgggtcgtagacgcgcggtaatttctactaagtgtagatttttttnnnnnnnnnnaagcttggcgtggatccgatatcaactagatcttgagacaaatggcagtattcatccacaattttaaaagaaaaggggggattggggggtacagtgcaggggaaagaatagtagacataatagcaacagacatacaaactaaag

SEQ ID NO: 17448 - DNA, 301 bp, Artificial Sequence
  Jak1.4_NTC.47
  crRNA array
  misc_feature (148)..(157): n is a, c, g, or t
cttggctttatatatcttgtggaaaggacgaaacaccgtaatttctactaagtgtagattgccgccactggatcccgagtaatttctactaagtgtagattctcgtatcgcgattgttaataatttctactaagtgtagatttttttnnnnnnnnnnaagcttggcgtggatccgatatcaactagatcttgagacaaatggcagtattcatccacaattttaaaagaaaaggggggattggggggtacagtgcaggggaaagaatagtagacataatagcaacagacatacaaactaaag

SEQ ID NO: 17449 - DNA, 301 bp, Artificial Sequence
  Jak1.4_NTC.48
  crRNA array
  misc_feature (148)..(157): n is a, c, g, or t
cttggctttatatatcttgtggaaaggacgaaacaccgtaatttctactaagtgtagattgccgccactggatcccgagtaatttctactaagtgtagatcggtcgactacggctgttagtaatttctactaagtgtagatttttttnnnnnnnnnnaagcttggcgtggatccgatatcaactagatcttgagacaaatggcagtattcatccacaattttaaaagaaaaggggggattggggggtacagtgcaggggaaagaatagtagacataatagcaacagacatacaaactaaag

SEQ ID NO: 17450 - DNA, 301 bp, Artificial Sequence
  Jak1.4_NTC.49
  crRNA array
  misc_feature (148)..(157): n is a, c, g, or t
cttggctttatatatcttgtggaaaggacgaaacaccgtaatttctactaagtgtagattgccgccactggatcccgagtaatttctactaagtgtagattcggggcgcgtcaactgaattaatttctactaagtgtagatttttttnnnnnnnnnnaagcttggcgtggatccgatatcaactagatcttgagacaaatggcagtattcatccacaattttaaaagaaaaggggggattggggggtacagtgcaggggaaagaatagtagacataatagcaacagacatacaaactaaag

SEQ ID NO: 17451 - DNA, 301 bp, Artificial Sequence
  Jak1.4_NTC.5
  crRNA array
  misc_feature (148)..(157): n is a, c, g, or t
cttggctttatatatcttgtggaaaggacgaaacaccgtaatttctactaagtgtagattgccgccactggatcccgagtaatttctactaagtgtagatgcttacgcgtcgcgaatgtataatttctactaagtgtagatttttttnnnnnnnnnnaagcttggcgtggatccgatatcaactagatcttgagacaaatggcagtattcatccacaattttaaaagaaaaggggggattggggggtacagtgcaggggaaagaatagtagacataatagcaacagacatacaaactaaag

SEQ ID NO: 17452 - DNA, 301 bp, Artificial Sequence
  Jak1.4_NTC.50
  crRNA array
  misc_feature (148)..(157): n is a, c, g, or t
cttggctttatatatcttgtggaaaggacgaaacaccgtaatttctactaagtgtagattgccgccactggatcccgagtaatttctactaagtgtagatattgccgctcgcgcaaaatctaatttctactaagtgtagatttttttnnnnnnnnnnaagcttggcgtggatccgatatcaactagatcttgagacaaatggcagtattcatccacaattttaaaagaaaaggggggattggggggtacagtgcaggggaaagaatagtagacataatagcaacagacatacaaactaaag

SEQ ID NO: 17453 - DNA, 301 bp, Artificial Sequence
  Jak1.4_NTC.51
  crRNA array
  misc_feature (148)..(157): n is a, c, g, or t
cttggctttatatatcttgtggaaaggacgaaacaccgtaatttctactaagtgtagattgccgccactggatcccgagtaatttctactaagtgtagattaacgcgcaacacgccaatgtaatttctactaagtgtagatttttttnnnnnnnnnnaagcttggcgtggatccgatatcaactagatcttgagacaaatggcagtattcatccacaattttaaaagaaaaggggggattggggggtacagtgcaggggaaagaatagtagacataatagcaacagacatacaaactaaag

SEQ ID NO: 17454 - DNA, 301 bp, Artificial Sequence
  Jak1.4_NTC.6
  crRNA array
  misc_feature (148)..(157): n is a, c, g, or t
cttggctttatatatcttgtggaaaggacgaaacaccgtaatttctactaagtgtagattgccgccactggatcccgagtaatttctactaagtgtagatcgaatcgcgcctacgggaattaatttctactaagtgtagatttttttnnnnnnnnnnaagcttggcgtggatccgatatcaactagatcttgagacaaatggcagtattcatccacaattttaaaagaaaaggggggattggggggtacagtgcaggggaaagaatagtagacataatagcaacagacatacaaactaaag

SEQ ID NO: 17455 - DNA, 301 bp, Artificial Sequence
  Jak1.4_NTC.7
  crRNA array
  misc_feature (148)..(157): n is a, c, g, or t
cttggctttatatatcttgtggaaaggacgaaacaccgtaatttctactaagtgtagattgccgccactggatcccgagtaatttctactaagtgtagatcgccgaacggataagactattaatttctactaagtgtagatttttttnnnnnnnnnnaagcttggcgtggatccgatatcaactagatcttgagacaaatggcagtattcatccacaattttaaaagaaaaggggggattggggggtacagtgcaggggaaagaatagtagacataatagcaacagacatacaaactaaag

SEQ ID NO: 17456 - DNA, 301 bp, Artificial Sequence
  Jak1.4_NTC.8
  crRNA array
  misc_feature (148)..(157): n is a, c, g, or t
cttggctttatatatcttgtggaaaggacgaaacaccgtaatttctactaagtgtagattgccgccactggatcccgagtaatttctactaagtgtagatcgaccgaggttacgctgggataatttctactaagtgtagatttttttnnnnnnnnnnaagcttggcgtggatccgatatcaactagatcttgagacaaatggcagtattcatccacaattttaaaagaaaaggggggattggggggtacagtgcaggggaaagaatagtagacataatagcaacagacatacaaactaaag

SEQ ID NO: 17457 - DNA, 301 bp, Artificial Sequence
  Jak1.4_NTC.9
  crRNA array
  misc_feature (148)..(157): n is a, c, g, or t
cttggctttatatatcttgtggaaaggacgaaacaccgtaatttctactaagtgtagattgccgccactggatcccgagtaatttctactaagtgtagatatcgccgtacggctatggcataatttctactaagtgtagatttttttnnnnnnnnnnaagcttggcgtggatccgatatcaactagatcttgagacaaatggcagtattcatccacaattttaaaagaaaaggggggattggggggtacagtgcaggggaaagaatagtagacataatagcaacagacatacaaactaaag

SEQ ID NO: 17458 - DNA, 301 bp, Artificial Sequence
  Kdm6a.1_NTC.0
  crRNA array
  misc_feature (148)..(157): n is a, c, g, or t
cttggctttatatatcttgtggaaaggacgaaacaccgtaatttctactaagtgtagatgctgccgcctctcgcggcagtaatttctactaagtgtagattatagcgtcgcgcgctaatttaatttctactaagtgtagatttttttnnnnnnnnnnaagcttggcgtggatccgatatcaactagatcttgagacaaatggcagtattcatccacaattttaaaagaaaaggggggattggggggtacagtgcaggggaaagaatagtagacataatagcaacagacatacaaactaaag

SEQ ID NO: 17459 - DNA, 301 bp, Artificial Sequence
  Kdm6a.1_NTC.1
  crRNA array
  misc_feature (148)..(157): n is a, c, g, or t
cttggctttatatatcttgtggaaaggacgaaacaccgtaatttctactaagtgtagatgctgccgcctctcgcggcagtaatttctactaagtgtagatcgcgtaaccgttccggctcctaatttctactaagtgtagatttttttnnnnnnnnnnaagcttggcgtggatccgatatcaactagatcttgagacaaatggcagtattcatccacaattttaaaagaaaaggggggattggggggtacagtgcaggggaaagaatagtagacataatagcaacagacatacaaactaaag

SEQ ID NO: 17460 - DNA, 301 bp, Artificial Sequence
  Kdm6a.1_NTC.10
  crRNA array
  misc_feature (148)..(157): n is a, c, g, or t
cttggctttatatatcttgtggaaaggacgaaacaccgtaatttctactaagtgtagatgctgccgcctctcgcggcagtaatttctactaagtgtagatcgctaagttcgcgcgggccgtaatttctactaagtgtagatttttttnnnnnnnnnnaagcttggcgtggatccgatatcaactagatcttgagacaaatggcagtattcatccacaattttaaaagaaaaggggggattggggggtacagtgcaggggaaagaatagtagacataatagcaacagacatacaaactaaag

SEQ ID NO: 17461 - DNA, 301 bp, Artificial Sequence
  Kdm6a.1_NTC.11
  crRNA array
  misc_feature (148)..(157): n is a, c, g, or t
cttggctttatatatcttgtggaaaggacgaaacaccgtaatttctactaagtgtagatgctgccgcctctcgcggcagtaatttctactaagtgtagatcgttcgtcgacgaagcaatctaatttctactaagtgtagatttttttnnnnnnnnnnaagcttggcgtggatccgatatcaactagatcttgagacaaatggcagtattcatccacaattttaaaagaaaaggggggattggggggtacagtgcaggggaaagaatagtagacataatagcaacagacatacaaactaaag

SEQ ID NO: 17462 - DNA, 301 bp, Artificial Sequence
  Kdm6a.1_NTC.12
  crRNA array
  misc_feature (148)..(157): n is a, c, g, or t
cttggctttatatatcttgtggaaaggacgaaacaccgtaatttctactaagtgtagatgctgccgcctctcgcggcagtaatttctactaagtgtagatcgccgacgattaatcaatagtaatttctactaagtgtagatttttttnnnnnnnnnnaagcttggcgtggatccgatatcaactagatcttgagacaaatggcagtattcatccacaattttaaaagaaaaggggggattggggggtacagtgcaggggaaagaatagtagacataatagcaacagacatacaaactaaag

SEQ ID NO: 17463 - DNA, 301 bp, Artificial Sequence
  Kdm6a.1_NTC.13
  crRNA array
  misc_feature (148)..(157): n is a, c, g, or t
cttggctttatatatcttgtggaaaggacgaaacaccgtaatttctactaagtgtagatgctgccgcctctcgcggcagtaatttctactaagtgtagatgaccgttgtatcgcgatcaataatttctactaagtgtagatttttttnnnnnnnnnnaagcttggcgtggatccgatatcaactagatcttgagacaaatggcagtattcatccacaattttaaaagaaaaggggggattggggggtacagtgcaggggaaagaatagtagacataatagcaacagacatacaaactaaag

SEQ ID NO: 17464 - DNA, 301 bp, Artificial Sequence
  Kdm6a.1_NTC.14
  crRNA array
  misc_feature (148)..(157): n is a, c, g, or t
cttggctttatatatcttgtggaaaggacgaaacaccgtaatttctactaagtgtagatgctgccgcctctcgcggcagtaatttctactaagtgtagatccgttcgtgcgatagtgttttaatttctactaagtgtagatttttttnnnnnnnnnnaagcttggcgtggatccgatatcaactagatcttgagacaaatggcagtattcatccacaattttaaaagaaaaggggggattggggggtacagtgcaggggaaagaatagtagacataatagcaacagacatacaaactaaag

SEQ ID NO: 17465 - DNA, 301 bp, Artificial Sequence
  Kdm6a.1_NTC.15
  crRNA array
  misc_feature (148)..(157): n is a, c, g, or t
cttggctttatatatcttgtggaaaggacgaaacaccgtaatttctactaagtgtagatgctgccgcctctcgcggcagtaatttctactaagtgtagatgttgtcgtgccgcgaatttataatttctactaagtgtagatttttttnnnnnnnnnnaagcttggcgtggatccgatatcaactagatcttgagacaaatggcagtattcatccacaattttaaaagaaaaggggggattggggggtacagtgcaggggaaagaatagtagacataatagcaacagacatacaaactaaag

SEQ ID NO: 17466 - DNA, 301 bp, Artificial Sequence
  Kdm6a.1_NTC.16
  crRNA array
  misc_feature (148)..(157): n is a, c, g, or t
cttggctttatatatcttgtggaaaggacgaaacaccgtaatttctactaagtgtagatgctgccgcctctcgcggcagtaatttctactaagtgtagatcggtacgttagacgaaaatttaatttctactaagtgtagatttttttnnnnnnnnnnaagcttggcgtggatccgatatcaactagatcttgagacaaatggcagtattcatccacaattttaaaagaaaaggggggattggggggtacagtgcaggggaaagaatagtagacataatagcaacagacatacaaactaaag

SEQ ID NO: 17467 - DNA, 301 bp, Artificial Sequence
  Kdm6a.1_NTC.17
  crRNA array
  misc_feature (148)..(157): n is a, c, g, or t
cttggctttatatatcttgtggaaaggacgaaacaccgtaatttctactaagtgtagatgctgccgcctctcgcggcagtaatttctactaagtgtagattatcgaacgctatcgaacgttaatttctactaagtgtagatttttttnnnnnnnnnnaagcttggcgtggatccgatatcaactagatcttgagacaaatggcagtattcatccacaattttaaaagaaaaggggggattggggggtacagtgcaggggaaagaatagtagacataatagcaacagacatacaaactaaag

SEQ ID NO: 17468 - DNA, 301 bp, Artificial Sequence
  Kdm6a.1_NTC.18
  crRNA array
  misc_feature (148)..(157): n is a, c, g, or t
cttggctttatatatcttgtggaaaggacgaaacaccgtaatttctactaagtgtagatgctgccgcctctcgcggcagtaatttctactaagtgtagattccggttacgaccggcaaaataatttctactaagtgtagatttttttnnnnnnnnnnaagcttggcgtggatccgatatcaactagatcttgagacaaatggcagtattcatccacaattttaaaagaaaaggggggattggggggtacagtgcaggggaaagaatagtagacataatagcaacagacatacaaactaaag

SEQ ID NO: 17469 - DNA, 301 bp, Artificial Sequence
  Kdm6a.1_NTC.19
  crRNA array
  misc_feature (148)..(157): n is a, c, g, or t
cttggctttatatatcttgtggaaaggacgaaacaccgtaatttctactaagtgtagatgctgccgcctctcgcggcagtaatttctactaagtgtagatcgtcgtagaacgatacccgataatttctactaagtgtagatttttttnnnnnnnnnnaagcttggcgtggatccgatatcaactagatcttgagacaaatggcagtattcatccacaattttaaaagaaaaggggggattggggggtacagtgcaggggaaagaatagtagacataatagcaacagacatacaaactaaag

SEQ ID NO: 17470 - DNA, 301 bp, Artificial Sequence
  Kdm6a.1_NTC.2
  crRNA array
  misc_feature (148)..(157): n is a, c, g, or t
cttggctttatatatcttgtggaaaggacgaaacaccgtaatttctactaagtgtagatgctgccgcctctcgcggcagtaatttctactaagtgtagatttatgtcgcgccgcgacccgtaatttctactaagtgtagatttttttnnnnnnnnnnaagcttggcgtggatccgatatcaactagatcttgagacaaatggcagtattcatccacaattttaaaagaaaaggggggattggggggtacagtgcaggggaaagaatagtagacataatagcaacagacatacaaactaaag

SEQ ID NO: 17471 - DNA, 301 bp, Artificial Sequence
  Kdm6a.1_NTC.20
  crRNA array
  misc_feature (148)..(157): n is a, c, g, or t
cttggctttatatatcttgtggaaaggacgaaacaccgtaatttctactaagtgtagatgctgccgcctctcgcggcagtaatttctactaagtgtagatattccggcgcgaccagaagataatttctactaagtgtagatttttttnnnnnnnnnnaagcttggcgtggatccgatatcaactagatcttgagacaaatggcagtattcatccacaattttaaaagaaaaggggggattggggggtacagtgcaggggaaagaatagtagacataatagcaacagacatacaaactaaag

SEQ ID NO: 17472 - DNA, 301 bp, Artificial Sequence
  Kdm6a.1_NTC.21
  crRNA array
  misc_feature (148)..(157): n is a, c, g, or t
cttggctttatatatcttgtggaaaggacgaaacaccgtaatttctactaagtgtagatgctgccgcctctcgcggcagtaatttctactaagtgtagatgtataacttcgcgcggtccgtaatttctactaagtgtagatttttttnnnnnnnnnnaagcttggcgtggatccgatatcaactagatcttgagacaaatggcagtattcatccacaattttaaaagaaaaggggggattggggggtacagtgcaggggaaagaatagtagacataatagcaacagacatacaaactaaag

SEQ ID NO: 17473 - DNA, 301 bp, Artificial Sequence
  Kdm6a.1_NTC.22
  crRNA array
  misc_feature (148)..(157): n is a, c, g, or t
cttggctttatatatcttgtggaaaggacgaaacaccgtaatttctactaagtgtagatgctgccgcctctcgcggcagtaatttctactaagtgtagatgcgcgtcaacgtaatgtgcctaatttctactaagtgtagatttttttnnnnnnnnnnaagcttggcgtggatccgatatcaactagatcttgagacaaatggcagtattcatccacaattttaaaagaaaaggggggattggggggtacagtgcaggggaaagaatagtagacataatagcaacagacatacaaactaaag

SEQ ID NO: 17474 - DNA, 301 bp, Artificial Sequence
  Kdm6a.1_NTC.23
  crRNA array
  misc_feature (148)..(157): n is a, c, g, or t
cttggctttatatatcttgtggaaaggacgaaacaccgtaatttctactaagtgtagatgctgccgcctctcgcggcagtaatttctactaagtgtagatacgcgctattatcgtaggtgtaatttctactaagtgtagatttttttnnnnnnnnnnaagcttggcgtggatccgatatcaactagatcttgagacaaatggcagtattcatccacaattttaaaagaaaaggggggattggggggtacagtgcaggggaaagaatagtagacataatagcaacagacatacaaactaaag

SEQ ID NO: 17475 - DNA, 301 bp, Artificial Sequence
  Kdm6a.1_NTC.24
  crRNA array
  misc_feature (148)..(157): n is a, c, g, or t
cttggctttatatatcttgtggaaaggacgaaacaccgtaatttctactaagtgtagatgctgccgcctctcgcggcagtaatttctactaagtgtagatactatcgacgttcgtcccggtaatttctactaagtgtagatttttttnnnnnnnnnnaagcttggcgtggatccgatatcaactagatcttgagacaaatggcagtattcatccacaattttaaaagaaaaggggggattggggggtacagtgcaggggaaagaatagtagacataatagcaacagacatacaaactaaag

SEQ ID NO: 17476 - DNA, 301 bp, Artificial Sequence
  Kdm6a.1_NTC.25
  crRNA array
  misc_feature (148)..(157): n is a, c, g, or t
cttggctttatatatcttgtggaaaggacgaaacaccgtaatttctactaagtgtagatgctgccgcctctcgcggcagtaatttctactaagtgtagattcgcgttatcgtgccgtgcgtaatttctactaagtgtagatttttttnnnnnnnnnnaagcttggcgtggatccgatatcaactagatcttgagacaaatggcagtattcatccacaattttaaaagaaaaggggggattggggggtacagtgcaggggaaagaatagtagacataatagcaacagacatacaaactaaag

SEQ ID NO: 17477 - DNA, 301 bp, Artificial Sequence
  Kdm6a.1_NTC.26
  crRNA array
  misc_feature (148)..(157): n is a, c, g, or t
cttggctttatatatcttgtggaaaggacgaaacaccgtaatttctactaagtgtagatgctgccgcctctcgcggcagtaatttctactaagtgtagatcgcgacggcggttttaacactaatttctactaagtgtagatttttttnnnnnnnnnnaagcttggcgtggatccgatatcaactagatcttgagacaaatggcagtattcatccacaattttaaaagaaaaggggggattggggggtacagtgcaggggaaagaatagtagacataatagcaacagacatacaaactaaag

SEQ ID NO: 17478 - DNA, 301 bp, Artificial Sequence
  Kdm6a.1_NTC.27
  crRNA array
  misc_feature (148)..(157): n is a, c, g, or t
cttggctttatatatcttgtggaaaggacgaaacaccgtaatttctactaagtgtagatgctgccgcctctcgcggcagtaatttctactaagtgtagatgtcgcgttgcgaccggcgcttaatttctactaagtgtagatttttttnnnnnnnnnnaagcttggcgtggatccgatatcaactagatcttgagacaaatggcagtattcatccacaattttaaaagaaaaggggggattggggggtacagtgcaggggaaagaatagtagacataatagcaacagacatacaaactaaag

SEQ ID NO: 17479 - DNA, 301 bp, Artificial Sequence
  Kdm6a.1_NTC.28
  crRNA array
  misc_feature (148)..(157): n is a, c, g, or t
cttggctttatatatcttgtggaaaggacgaaacaccgtaatttctactaagtgtagatgctgccgcctctcgcggcagtaatttctactaagtgtagataccgctaatcggcgtaaacttaatttctactaagtgtagatttttttnnnnnnnnnnaagcttggcgtggatccgatatcaactagatcttgagacaaatggcagtattcatccacaattttaaaagaaaaggggggattggggggtacagtgcaggggaaagaatagtagacataatagcaacagacatacaaactaaag

SEQ ID NO: 17480 - DNA, 301 bp, Artificial Sequence
  Kdm6a.1_NTC.29
  crRNA array
  misc_feature (148)..(157): n is a, c, g, or t
cttggctttatatatcttgtggaaaggacgaaacaccgtaatttctactaagtgtagatgctgccgcctctcgcggcagtaatttctactaagtgtagatcgcgatctataccgtctatataatttctactaagtgtagatttttttnnnnnnnnnnaagcttggcgtggatccgatatcaactagatcttgagacaaatggcagtattcatccacaattttaaaagaaaaggggggattggggggtacagtgcaggggaaagaatagtagacataatagcaacagacatacaaactaaag

SEQ ID NO: 17481 - DNA, 301 bp, Artificial Sequence
  Kdm6a.1_NTC.3
  crRNA array
  misc_feature (148)..(157): n is a, c, g, or t
cttggctttatatatcttgtggaaaggacgaaacaccgtaatttctactaagtgtagatgctgccgcctctcgcggcagtaatttctactaagtgtagattcgacgcgagacgacgtacataatttctactaagtgtagatttttttnnnnnnnnnnaagcttggcgtggatccgatatcaactagatcttgagacaaatggcagtattcatccacaattttaaaagaaaaggggggattggggggtacagtgcaggggaaagaatagtagacataatagcaacagacatacaaactaaag

SEQ ID NO: 17482 - DNA, 301 bp, Artificial Sequence
  Kdm6a.1_NTC.30
  crRNA array
  misc_feature (148)..(157): n is a, c, g, or t
cttggctttatatatcttgtggaaaggacgaaacaccgtaatttctactaagtgtagatgctgccgcctctcgcggcagtaatttctactaagtgtagatcgatcgtacgggtgtcctaataatttctactaagtgtagatttttttnnnnnnnnnnaagcttggcgtggatccgatatcaactagatcttgagacaaatggcagtattcatccacaattttaaaagaaaaggggggattggggggtacagtgcaggggaaagaatagtagacataatagcaacagacatacaaactaaag

SEQ ID NO: 17483 - DNA, 301 bp, Artificial Sequence
  Kdm6a.1_NTC.31
  crRNA array
  misc_feature (148)..(157): n is a, c, g, or t
cttggctttatatatcttgtggaaaggacgaaacaccgtaatttctactaagtgtagatgctgccgcctctcgcggcagtaatttctactaagtgtagatgccgaccgcgtgattgtaggtaatttctactaagtgtagatttttttnnnnnnnnnnaagcttggcgtggatccgatatcaactagatcttgagacaaatggcagtattcatccacaattttaaaagaaaaggggggattggggggtacagtgcaggggaaagaatagtagacataatagcaacagacatacaaactaaag

SEQ ID NO: 17484 - DNA, 301 bp, Artificial Sequence
  Kdm6a.1_NTC.32
  crRNA array
  misc_feature (148)..(157): n is a, c, g, or t
cttggctttatatatcttgtggaaaggacgaaacaccgtaatttctactaagtgtagatgctgccgcctctcgcggcagtaatttctactaagtgtagatgcacgttacgcccgggtcactaatttctactaagtgtagatttttttnnnnnnnnnnaagcttggcgtggatccgatatcaactagatcttgagacaaatggcagtattcatccacaattttaaaagaaaaggggggattggggggtacagtgcaggggaaagaatagtagacataatagcaacagacatacaaactaaag

SEQ ID NO: 17485 - DNA, 301 bp, Artificial Sequence
  Kdm6a.1_NTC.33
  crRNA array
  misc_feature (148)..(157): n is a, c, g, or t
cttggctttatatatcttgtggaaaggacgaaacaccgtaatttctactaagtgtagatgctgccgcctctcgcggcagtaatttctactaagtgtagattaagcgaccgacgcattcgctaatttctactaagtgtagatttttttnnnnnnnnnnaagcttggcgtggatccgatatcaactagatcttgagacaaatggcagtattcatccacaattttaaaagaaaaggggggattggggggtacagtgcaggggaaagaatagtagacataatagcaacagacatacaaactaaag

SEQ ID NO: 17486 - DNA, 301 bp, Artificial Sequence
  Kdm6a.1_NTC.34
  crRNA array
  misc_feature (148)..(157): n is a, c, g, or t
cttggctttatatatcttgtggaaaggacgaaacaccgtaatttctactaagtgtagatgctgccgcctctcgcggcagtaatttctactaagtgtagattagcgttcgacacgtgaaactaatttctactaagtgtagatttttttnnnnnnnnnnaagcttggcgtggatccgatatcaactagatcttgagacaaatggcagtattcatccacaattttaaaagaaaaggggggattggggggtacagtgcaggggaaagaatagtagacataatagcaacagacatacaaactaaag

SEQ ID NO: 17487 - DNA, 301 bp, Artificial Sequence
  Kdm6a.1_NTC.35
  crRNA array
  misc_feature (148)..(157): n is a, c, g, or t
cttggctttatatatcttgtggaaaggacgaaacaccgtaatttctactaagtgtagatgctgccgcctctcgcggcagtaatttctactaagtgtagattggcgcgtaatcgctattcgtaatttctactaagtgtagatttttttnnnnnnnnnnaagcttggcgtggatccgatatcaactagatcttgagacaaatggcagtattcatccacaattttaaaagaaaaggggggattggggggtacagtgcaggggaaagaatagtagacataatagcaacagacatacaaactaaag

SEQ ID NO: 17488 - DNA, 301 bp, Artificial Sequence
  Kdm6a.1_NTC.36
  crRNA array
  misc_feature (148)..(157): n is a, c, g, or t
cttggctttatatatcttgtggaaaggacgaaacaccgtaatttctactaagtgtagatgctgccgcctctcgcggcagtaatttctactaagtgtagatcaacccgccgtagcgggccttaatttctactaagtgtagatttttttnnnnnnnnnnaagcttggcgtggatccgatatcaactagatcttgagacaaatggcagtattcatccacaattttaaaagaaaaggggggattggggggtacagtgcaggggaaagaatagtagacataatagcaacagacatacaaactaaag

SEQ ID NO: 17489 - DNA, 301 bp, Artificial Sequence
  Kdm6a.1_NTC.37
  crRNA array
  misc_feature (148)..(157): n is a, c, g, or t
cttggctttatatatcttgtggaaaggacgaaacaccgtaatttctactaagtgtagatgctgccgcctctcgcggcagtaatttctactaagtgtagattttgcgttgacgcgattacttaatttctactaagtgtagatttttttnnnnnnnnnnaagcttggcgtggatccgatatcaactagatcttgagacaaatggcagtattcatccacaattttaaaagaaaaggggggattggggggtacagtgcaggggaaagaatagtagacataatagcaacagacatacaaactaaag

SEQ ID NO: 17490 - DNA, 301 bp, Artificial Sequence
  Kdm6a.1_NTC.38
  crRNA array
  misc_feature (148)..(157): n is a, c, g, or t
cttggctttatatatcttgtggaaaggacgaaacaccgtaatttctactaagtgtagatgctgccgcctctcgcggcagtaatttctactaagtgtagataacggagcgcgatactaccataatttctactaagtgtagatttttttnnnnnnnnnnaagcttggcgtggatccgatatcaactagatcttgagacaaatggcagtattcatccacaattttaaaagaaaaggggggattggggggtacagtgcaggggaaagaatagtagacataatagcaacagacatacaaactaaag

SEQ ID NO: 17491 - DNA, 301 bp, Artificial Sequence
  Kdm6a.1_NTC.39
  crRNA array
  misc_feature (148)..(157): n is a, c, g, or t
cttggctttatatatcttgtggaaaggacgaaacaccgtaatttctactaagtgtagatgctgccgcctctcgcggcagtaatttctactaagtgtagatccggacgttataacgtttcttaatttctactaagtgtagatttttttnnnnnnnnnnaagcttggcgtggatccgatatcaactagatcttgagacaaatggcagtattcatccacaattttaaaagaaaaggggggattggggggtacagtgcaggggaaagaatagtagacataatagcaacagacatacaaactaaag

SEQ ID NO: 17492 - DNA, 301 bp, Artificial Sequence
  Kdm6a.1_NTC.4
  crRNA array
  misc_feature (148)..(157): n is a, c, g, or t
cttggctttatatatcttgtggaaaggacgaaacaccgtaatttctactaagtgtagatgctgccgcctctcgcggcagtaatttctactaagtgtagatatacccgtcgcgaacgtgagtaatttctactaagtgtagatttttttnnnnnnnnnnaagcttggcgtggatccgatatcaactagatcttgagacaaatggcagtattcatccacaattttaaaagaaaaggggggattggggggtacagtgcaggggaaagaatagtagacataatagcaacagacatacaaactaaag

SEQ ID NO: 17493 - DNA, 301 bp, Artificial Sequence
  Kdm6a.1_NTC.40
  crRNA array
  misc_feature (148)..(157): n is a, c, g, or t
cttggctttatatatcttgtggaaaggacgaaacaccgtaatttctactaagtgtagatgctgccgcctctcgcggcagtaatttctactaagtgtagatattcgcgaacccggccggaataatttctactaagtgtagatttttttnnnnnnnnnnaagcttggcgtggatccgatatcaactagatcttgagacaaatggcagtattcatccacaattttaaaagaaaaggggggattggggggtacagtgcaggggaaagaatagtagacataatagcaacagacatacaaactaaag

SEQ ID NO: 17494 - DNA, 301 bp, Artificial Sequence
  Kdm6a.1_NTC.41
  crRNA array
  misc_feature (148)..(157): n is a, c, g, or t
cttggctttatatatcttgtggaaaggacgaaacaccgtaatttctactaagtgtagatgctgccgcctctcgcggcagtaatttctactaagtgtagatttgatggcgcgacgcgttattaatttctactaagtgtagatttttttnnnnnnnnnnaagcttggcgtggatccgatatcaactagatcttgagacaaatggcagtattcatccacaattttaaaagaaaaggggggattggggggtacagtgcaggggaaagaatagtagacataatagcaacagacatacaaactaaag

SEQ ID NO: 17495 - DNA, 301 bp, Artificial Sequence
  Kdm6a.1_NTC.42
  crRNA array
  misc_feature (148)..(157): n is a, c, g, or t
cttggctttatatatcttgtggaaaggacgaaacaccgtaatttctactaagtgtagatgctgccgcctctcgcggcagtaatttctactaagtgtagatggtcaaatcgcggcgataactaatttctactaagtgtagatttttttnnnnnnnnnnaagcttggcgtggatccgatatcaactagatcttgagacaaatggcagtattcatccacaattttaaaagaaaaggggggattggggggtacagtgcaggggaaagaatagtagacataatagcaacagacatacaaactaaag

SEQ ID NO: 17496 - DNA, 301 bp, Artificial Sequence
  Kdm6a.1_NTC.43
  crRNA array
  misc_feature (148)..(157): n is a, c, g, or t
cttggctttatatatcttgtggaaaggacgaaacaccgtaatttctactaagtgtagatgctgccgcctctcgcggcagtaatttctactaagtgtagatcgactcgcgcattgaactggtaatttctactaagtgtagatttttttnnnnnnnnnnaagcttggcgtggatccgatatcaactagatcttgagacaaatggcagtattcatccacaattttaaaagaaaaggggggattggggggtacagtgcaggggaaagaatagtagacataatagcaacagacatacaaactaaag

SEQ ID NO: 17497 - DNA, 301 bp, Artificial Sequence
  Kdm6a.1_NTC.44
  crRNA array
  misc_feature (148)..(157): n is a, c, g, or t
cttggctttatatatcttgtggaaaggacgaaacaccgtaatttctactaagtgtagatgctgccgcctctcgcggcagtaatttctactaagtgtagatagcgtcgtacgatttatcgttaatttctactaagtgtagatttttttnnnnnnnnnnaagcttggcgtggatccgatatcaactagatcttgagacaaatggcagtattcatccacaattttaaaagaaaaggggggattggggggtacagtgcaggggaaagaatagtagacataatagcaacagacatacaaactaaag

SEQ ID NO: 17498 - DNA, 301 bp, Artificial Sequence
  Kdm6a.1_NTC.45
  crRNA array
  misc_feature (148)..(157): n is a, c, g, or t
cttggctttatatatcttgtggaaaggacgaaacaccgtaatttctactaagtgtagatgctgccgcctctcgcggcagtaatttctactaagtgtagatcggaacgcgtgatactagggtaatttctactaagtgtagatttttttnnnnnnnnnnaagcttggcgtggatccgatatcaactagatcttgagacaaatggcagtattcatccacaattttaaaagaaaaggggggattggggggtacagtgcaggggaaagaatagtagacataatagcaacagacatacaaactaaag

SEQ ID NO: 17499 - DNA, 301 bp, Artificial Sequence
  Kdm6a.1_NTC.46
  crRNA array
  misc_feature (148)..(157): n is a, c, g, or t
cttggctttatatatcttgtggaaaggacgaaacaccgtaatttctactaagtgtagatgctgccgcctctcgcggcagtaatttctactaagtgtagatagcgggtcgtagacgcgcggtaatttctactaagtgtagatttttttnnnnnnnnnnaagcttggcgtggatccgatatcaactagatcttgagacaaatggcagtattcatccacaattttaaaagaaaaggggggattggggggtacagtgcaggggaaagaatagtagacataatagcaacagacatacaaactaaag

SEQ ID NO: 17500 - DNA, 301 bp, Artificial Sequence
  Kdm6a.1_NTC.47
  crRNA array
  misc_feature (148)..(157): n is a, c, g, or t
cttggctttatatatcttgtggaaaggacgaaacaccgtaatttctactaagtgtagatgctgccgcctctcgcggcagtaatttctactaagtgtagattctcgtatcgcgattgttaataatttctactaagtgtagatttttttnnnnnnnnnnaagcttggcgtggatccgatatcaactagatcttgagacaaatggcagtattcatccacaattttaaaagaaaaggggggattggggggtacagtgcaggggaaagaatagtagacataatagcaacagacatacaaactaaag

SEQ ID NO: 17501 - DNA, 301 bp, Artificial Sequence
  Kdm6a.1_NTC.48
  crRNA array
  misc_feature (148)..(157): n is a, c, g, or t
cttggctttatatatcttgtggaaaggacgaaacaccgtaatttctactaagtgtagatgctgccgcctctcgcggcagtaatttctactaagtgtagatcggtcgactacggctgttagtaatttctactaagtgtagatttttttnnnnnnnnnnaagcttggcgtggatccgatatcaactagatcttgagacaaatggcagtattcatccacaattttaaaagaaaaggggggattggggggtacagtgcaggggaaagaatagtagacataatagcaacagacatacaaactaaag

SEQ ID NO: 17502 - DNA, 301 bp, Artificial Sequence
  Kdm6a.1_NTC.49
  crRNA array
  misc_feature (148)..(157): n is a, c, g, or t
cttggctttatatatcttgtggaaaggacgaaacaccgtaatttctactaagtgtagatgctgccgcctctcgcggcagtaatttctactaagtgtagattcggggcgcgtcaactgaattaatttctactaagtgtagatttttttnnnnnnnnnnaagcttggcgtggatccgatatcaactagatcttgagacaaatggcagtattcatccacaattttaaaagaaaaggggggattggggggtacagtgcaggggaaagaatagtagacataatagcaacagacatacaaactaaag

SEQ ID NO: 17503 - DNA, 301 bp, Artificial Sequence
  Kdm6a.1_NTC.5
  crRNA array
  misc_feature (148)..(157): n is a, c, g, or t
cttggctttatatatcttgtggaaaggacgaaacaccgtaatttctactaagtgtagatgctgccgcctctcgcggcagtaatttctactaagtgtagatgcttacgcgtcgcgaatgtataatttctactaagtgtagatttttttnnnnnnnnnnaagcttggcgtggatccgatatcaactagatcttgagacaaatggcagtattcatccacaattttaaaagaaaaggggggattggggggtacagtgcaggggaaagaatagtagacataatagcaacagacatacaaactaaag

SEQ ID NO: 17504 - DNA, 301 bp, Artificial Sequence
  Kdm6a.1_NTC.50
  crRNA array
  misc_feature (148)..(157): n is a, c, g, or t
cttggctttatatatcttgtggaaaggacgaaacaccgtaatttctactaagtgtagatgctgccgcctctcgcggcagtaatttctactaagtgtagatattgccgctcgcgcaaaatctaatttctactaagtgtagatttttttnnnnnnnnnnaagcttggcgtggatccgatatcaactagatcttgagacaaatggcagtattcatccacaattttaaaagaaaaggggggattggggggtacagtgcaggggaaagaatagtagacataatagcaacagacatacaaactaaag

SEQ ID NO: 17505 - DNA, 301 bp, Artificial Sequence
  Kdm6a.1_NTC.51
  crRNA array
  misc_feature (148)..(157): n is a, c, g, or t
cttggctttatatatcttgtggaaaggacgaaacaccgtaatttctactaagtgtagatgctgccgcctctcgcggcagtaatttctactaagtgtagattaacgcgcaacacgccaatgtaatttctactaagtgtagatttttttnnnnnnnnnnaagcttggcgtggatccgatatcaactagatcttgagacaaatggcagtattcatccacaattttaaaagaaaaggggggattggggggtacagtgcaggggaaagaatagtagacataatagcaacagacatacaaactaaag

SEQ ID NO: 17506 - DNA, 301 bp, Artificial Sequence
  Kdm6a.1_NTC.6
  crRNA array
  misc_feature (148)..(157): n is a, c, g, or t
cttggctttatatatcttgtggaaaggacgaaacaccgtaatttctactaagtgtagatgctgccgcctctcgcggcagtaatttctactaagtgtagatcgaatcgcgcctacgggaattaatttctactaagtgtagatttttttnnnnnnnnnnaagcttggcgtggatccgatatcaactagatcttgagacaaatggcagtattcatccacaattttaaaagaaaaggggggattggggggtacagtgcaggggaaagaatagtagacataatagcaacagacatacaaactaaag

SEQ ID NO: 17507 - DNA, 301 bp, Artificial Sequence
  Kdm6a.1_NTC.7
  crRNA array
  misc_feature (148)..(157): n is a, c, g, or t
cttggctttatatatcttgtggaaaggacgaaacaccgtaatttctactaagtgtagatgctgccgcctctcgcggcagtaatttctactaagtgtagatcgccgaacggataagactattaatttctactaagtgtagatttttttnnnnnnnnnnaagcttggcgtggatccgatatcaactagatcttgagacaaatggcagtattcatccacaattttaaaagaaaaggggggattggggggtacagtgcaggggaaagaatagtagacataatagcaacagacatacaaactaaag

SEQ ID NO: 17508 - DNA, 301 bp, Artificial Sequence
  Kdm6a.1_NTC.8
  crRNA array
  misc_feature (148)..(157): n is a, c, g, or t
cttggctttatatatcttgtggaaaggacgaaacaccgtaatttctactaagtgtagatgctgccgcctctcgcggcagtaatttctactaagtgtagatcgaccgaggttacgctgggataatttctactaagtgtagatttttttnnnnnnnnnnaagcttggcgtggatccgatatcaactagatcttgagacaaatggcagtattcatccacaattttaaaagaaaaggggggattggggggtacagtgcaggggaaagaatagtagacataatagcaacagacatacaaactaaag

SEQ ID NO: 17509 - DNA, 301 bp, Artificial Sequence
  Kdm6a.1_NTC.9
  crRNA array
  misc_feature (148)..(157): n is a, c, g, or t
cttggctttatatatcttgtggaaaggacgaaacaccgtaatttctactaagtgtagatgctgccgcctctcgcggcagtaatttctactaagtgtagatatcgccgtacggctatggcataatttctactaagtgtagatttttttnnnnnnnnnnaagcttggcgtggatccgatatcaactagatcttgagacaaatggcagtattcatccacaattttaaaagaaaaggggggattggggggtacagtgcaggggaaagaatagtagacataatagcaacagacatacaaactaaag

SEQ ID NO: 17510 - DNA, 301 bp, Artificial Sequence
  Kdm6a.2_NTC.0
  crRNA array
  misc_feature (148)..(157): n is a, c, g, or t
cttggctttatatatcttgtggaaaggacgaaacaccgtaatttctactaagtgtagatgctgcaggtaaggcacgttttaatttctactaagtgtagattatagcgtcgcgcgctaatttaatttctactaagtgtagatttttttnnnnnnnnnnaagcttggcgtggatccgatatcaactagatcttgagacaaatggcagtattcatccacaattttaaaagaaaaggggggattggggggtacagtgcaggggaaagaatagtagacataatagcaacagacatacaaactaaag

SEQ ID NO: 17511 - DNA, 301 bp, Artificial Sequence
  Kdm6a.2_NTC.1
  crRNA array
  misc_feature (148)..(157): n is a, c, g, or t
cttggctttatatatcttgtggaaaggacgaaacaccgtaatttctactaagtgtagatgctgcaggtaaggcacgttttaatttctactaagtgtagatcgcgtaaccgttccggctcctaatttctactaagtgtagatttttttnnnnnnnnnnaagcttggcgtggatccgatatcaactagatcttgagacaaatggcagtattcatccacaattttaaaagaaaaggggggattggggggtacagtgcaggggaaagaatagtagacataatagcaacagacatacaaactaaag

SEQ ID NO: 17512 - DNA, 301 bp, Artificial Sequence
  Kdm6a.2_NTC.10
  crRNA array
  misc_feature (148)..(157): n is a, c, g, or t
cttggctttatatatcttgtggaaaggacgaaacaccgtaatttctactaagtgtagatgctgcaggtaaggcacgttttaatttctactaagtgtagatcgctaagttcgcgcgggccgtaatttctactaagtgtagatttttttnnnnnnnnnnaagcttggcgtggatccgatatcaactagatcttgagacaaatggcagtattcatccacaattttaaaagaaaaggggggattggggggtacagtgcaggggaaagaatagtagacataatagcaacagacatacaaactaaag

SEQ ID NO: 17513 - DNA, 301 bp, Artificial Sequence
  Kdm6a.2_NTC.11
  crRNA array
  misc_feature (148)..(157): n is a, c, g, or t
cttggctttatatatcttgtggaaaggacgaaacaccgtaatttctactaagtgtagatgctgcaggtaaggcacgttttaatttctactaagtgtagatcgttcgtcgacgaagcaatctaatttctactaagtgtagatttttttnnnnnnnnnnaagcttggcgtggatccgatatcaactagatcttgagacaaatggcagtattcatccacaattttaaaagaaaaggggggattggggggtacagtgcaggggaaagaatagtagacataatagcaacagacatacaaactaaag

SEQ ID NO: 17514 - DNA, 301 bp, Artificial Sequence
  Kdm6a.2_NTC.12
  crRNA array
  misc_feature (148)..(157): n is a, c, g, or t
cttggctttatatatcttgtggaaaggacgaaacaccgtaatttctactaagtgtagatgctgcaggtaaggcacgttttaatttctactaagtgtagatcgccgacgattaatcaatagtaatttctactaagtgtagatttttttnnnnnnnnnnaagcttggcgtggatccgatatcaactagatcttgagacaaatggcagtattcatccacaattttaaaagaaaaggggggattggggggtacagtgcaggggaaagaatagtagacataatagcaacagacatacaaactaaag

SEQ ID NO: 17515 - DNA, 301 bp, Artificial Sequence
  Kdm6a.2_NTC.13
  crRNA array
  misc_feature (148)..(157): n is a, c, g, or t
cttggctttatatatcttgtggaaaggacgaaacaccgtaatttctactaagtgtagatgctgcaggtaaggcacgttttaatttctactaagtgtagatgaccgttgtatcgcgatcaataatttctactaagtgtagatttttttnnnnnnnnnnaagcttggcgtggatccgatatcaactagatcttgagacaaatggcagtattcatccacaattttaaaagaaaaggggggattggggggtacagtgcaggggaaagaatagtagacataatagcaacagacatacaaactaaag

SEQ ID NO: 17516 - DNA, 301 bp, Artificial Sequence
  Kdm6a.2_NTC.14
  crRNA array
  misc_feature (148)..(157): n is a, c, g, or t
cttggctttatatatcttgtggaaaggacgaaacaccgtaatttctactaagtgtagatgctgcaggtaaggcacgttttaatttctactaagtgtagatccgttcgtgcgatagtgttttaatttctactaagtgtagatttttttnnnnnnnnnnaagcttggcgtggatccgatatcaactagatcttgagacaaatggcagtattcatccacaattttaaaagaaaaggggggattggggggtacagtgcaggggaaagaatagtagacataatagcaacagacatacaaactaaag

SEQ ID NO: 17517 - DNA, 301 bp, Artificial Sequence
  Kdm6a.2_NTC.15
  crRNA array
  misc_feature (148)..(157): n is a, c, g, or t
cttggctttatatatcttgtggaaaggacgaaacaccgtaatttctactaagtgtagatgctgcaggtaaggcacgttttaatttctactaagtgtagatgttgtcgtgccgcgaatttataatttctactaagtgtagatttttttnnnnnnnnnnaagcttggcgtggatccgatatcaactagatcttgagacaaatggcagtattcatccacaattttaaaagaaaaggggggattggggggtacagtgcaggggaaagaatagtagacataatagcaacagacatacaaactaaag

SEQ ID NO: 17518 - DNA, 301 bp, Artificial Sequence
  Kdm6a.2_NTC.16
  crRNA array
  misc_feature (148)..(157): n is a, c, g, or t
cttggctttatatatcttgtggaaaggacgaaacaccgtaatttctactaagtgtagatgctgcaggtaaggcacgttttaatttctactaagtgtagatcggtacgttagacgaaaatttaatttctactaagtgtagatttttttnnnnnnnnnnaagcttggcgtggatccgatatcaactagatcttgagacaaatggcagtattcatccacaattttaaaagaaaaggggggattggggggtacagtgcaggggaaagaatagtagacataatagcaacagacatacaaactaaag

SEQ ID NO: 17519 - DNA, 301 bp, Artificial Sequence
  Kdm6a.2_NTC.17
  crRNA array
  misc_feature (148)..(157): n is a, c, g, or t
cttggctttatatatcttgtggaaaggacgaaacaccgtaatttctactaagtgtagatgctgcaggtaaggcacgttttaatttctactaagtgtagattatcgaacgctatcgaacgttaatttctactaagtgtagatttttttnnnnnnnnnnaagcttggcgtggatccgatatcaactagatcttgagacaaatggcagtattcatccacaattttaaaagaaaaggggggattggggggtacagtgcaggggaaagaatagtagacataatagcaacagacatacaaactaaag

SEQ ID NO: 17520 - DNA, 301 bp, Artificial Sequence
  Kdm6a.2_NTC.18
  crRNA array
  misc_feature (148)..(157): n is a, c, g, or t
cttggctttatatatcttgtggaaaggacgaaacaccgtaatttctactaagtgtagatgctgcaggtaaggcacgttttaatttctactaagtgtagattccggttacgaccggcaaaataatttctactaagtgtagatttttttnnnnnnnnnnaagcttggcgtggatccgatatcaactagatcttgagacaaatggcagtattcatccacaattttaaaagaaaaggggggattggggggtacagtgcaggggaaagaatagtagacataatagcaacagacatacaaactaaag

SEQ ID NO: 17521 - DNA, 301 bp, Artificial Sequence
  Kdm6a.2_NTC.19
  crRNA array
  misc_feature (148)..(157): n is a, c, g, or t
cttggctttatatatcttgtggaaaggacgaaacaccgtaatttctactaagtgtagatgctgcaggtaaggcacgttttaatttctactaagtgtagatcgtcgtagaacgatacccgataatttctactaagtgtagatttttttnnnnnnnnnnaagcttggcgtggatccgatatcaactagatcttgagacaaatggcagtattcatccacaattttaaaagaaaaggggggattggggggtacagtgcaggggaaagaatagtagacataatagcaacagacatacaaactaaag

SEQ ID NO: 17522 - DNA, 301 bp, Artificial Sequence
  Kdm6a.2_NTC.2
  crRNA array
  misc_feature (148)..(157): n is a, c, g, or t
cttggctttatatatcttgtggaaaggacgaaacaccgtaatttctactaagtgtagatgctgcaggtaaggcacgttttaatttctactaagtgtagatttatgtcgcgccgcgacccgtaatttctactaagtgtagatttttttnnnnnnnnnnaagcttggcgtggatccgatatcaactagatcttgagacaaatggcagtattcatccacaattttaaaagaaaaggggggattggggggtacagtgcaggggaaagaatagtagacataatagcaacagacatacaaactaaag

SEQ ID NO: 17523 - DNA, 301 bp, Artificial Sequence
  Kdm6a.2_NTC.20
  crRNA array
  misc_feature (148)..(157): n is a, c, g, or t
cttggctttatatatcttgtggaaaggacgaaacaccgtaatttctactaagtgtagatgctgcaggtaaggcacgttttaatttctactaagtgtagatattccggcgcgaccagaagataatttctactaagtgtagatttttttnnnnnnnnnnaagcttggcgtggatccgatatcaactagatcttgagacaaatggcagtattcatccacaattttaaaagaaaaggggggattggggggtacagtgcaggggaaagaatagtagacataatagcaacagacatacaaactaaag

SEQ ID NO: 17524 - DNA, 301 bp, Artificial Sequence
  Kdm6a.2_NTC.21
  crRNA array
  misc_feature (148)..(157): n is a, c, g, or t
cttggctttatatatcttgtggaaaggacgaaacaccgtaatttctactaagtgtagatgctgcaggtaaggcacgttttaatttctactaagtgtagatgtataacttcgcgcggtccgtaatttctactaagtgtagatttttttnnnnnnnnnnaagcttggcgtggatccgatatcaactagatcttgagacaaatggcagtattcatccacaattttaaaagaaaaggggggattggggggtacagtgcaggggaaagaatagtagacataatagcaacagacatacaaactaaag

SEQ ID NO: 17525 - DNA, 301 bp, Artificial Sequence
  Kdm6a.2_NTC.22
  crRNA array
  misc_feature (148)..(157): n is a, c, g, or t
cttggctttatatatcttgtggaaaggacgaaacaccgtaatttctactaagtgtagatgctgcaggtaaggcacgttttaatttctactaagtgtagatgcgcgtcaacgtaatgtgcctaatttctactaagtgtagatttttttnnnnnnnnnnaagcttggcgtggatccgatatcaactagatcttgagacaaatggcagtattcatccacaattttaaaagaaaaggggggattggggggtacagtgcaggggaaagaatagtagacataatagcaacagacatacaaactaaag

SEQ ID NO: 17526 - DNA, 301 bp, Artificial Sequence
  Kdm6a.2_NTC.23
  crRNA array
  misc_feature (148)..(157): n is a, c, g, or t
cttggctttatatatcttgtggaaaggacgaaacaccgtaatttctactaagtgtagatgctgcaggtaaggcacgttttaatttctactaagtgtagatacgcgctattatcgtaggtgtaatttctactaagtgtagatttttttnnnnnnnnnnaagcttggcgtggatccgatatcaactagatcttgagacaaatggcagtattcatccacaattttaaaagaaaaggggggattggggggtacagtgcaggggaaagaatagtagacataatagcaacagacatacaaactaaag

SEQ ID NO: 17527 - DNA, 301 bp, Artificial Sequence
  Kdm6a.2_NTC.24
  crRNA array
  misc_feature (148)..(157): n is a, c, g, or t
cttggctttatatatcttgtggaaaggacgaaacaccgtaatttctactaagtgtagatgctgcaggtaaggcacgttttaatttctactaagtgtagatactatcgacgttcgtcccggtaatttctactaagtgtagatttttttnnnnnnnnnnaagcttggcgtggatccgatatcaactagatcttgagacaaatggcagtattcatccacaattttaaaagaaaaggggggattggggggtacagtgcaggggaaagaatagtagacataatagcaacagacatacaaactaaag

SEQ ID NO: 17528 - DNA, 301 bp, Artificial Sequence
  Kdm6a.2_NTC.25
  crRNA array
  misc_feature (148)..(157): n is a, c, g, or t
cttggctttatatatcttgtggaaaggacgaaacaccgtaatttctactaagtgtagatgctgcaggtaaggcacgttttaatttctactaagtgtagattcgcgttatcgtgccgtgcgtaatttctactaagtgtagatttttttnnnnnnnnnnaagcttggcgtggatccgatatcaactagatcttgagacaaatggcagtattcatccacaattttaaaagaaaaggggggattggggggtacagtgcaggggaaagaatagtagacataatagcaacagacatacaaactaaag

SEQ ID NO: 17529 - DNA, 301 bp, Artificial Sequence
  Kdm6a.2_NTC.26
  crRNA array
  misc_feature (148)..(157): n is a, c, g, or t
cttggctttatatatcttgtggaaaggacgaaacaccgtaatttctactaagtgtagatgctgcaggtaaggcacgttttaatttctactaagtgtagatcgcgacggcggttttaacactaatttctactaagtgtagatttttttnnnnnnnnnnaagcttggcgtggatccgatatcaactagatcttgagacaaatggcagtattcatccacaattttaaaagaaaaggggggattggggggtacagtgcaggggaaagaatagtagacataatagcaacagacatacaaactaaag

SEQ ID NO: 17530 - DNA, 301 bp, Artificial Sequence
  Kdm6a.2_NTC.27
  crRNA array
  misc_feature (148)..(157): n is a, c, g, or t
cttggctttatatatcttgtggaaaggacgaaacaccgtaatttctactaagtgtagatgctgcaggtaaggcacgttttaatttctactaagtgtagatgtcgcgttgcgaccggcgcttaatttctactaagtgtagatttttttnnnnnnnnnnaagcttggcgtggatccgatatcaactagatcttgagacaaatggcagtattcatccacaattttaaaagaaaaggggggattggggggtacagtgcaggggaaagaatagtagacataatagcaacagacatacaaactaaag

SEQ ID NO: 17531 - DNA, 301 bp, Artificial Sequence
  Kdm6a.2_NTC.28
  crRNA array
  misc_feature (148)..(157): n is a, c, g, or t
cttggctttatatatcttgtggaaaggacgaaacaccgtaatttctactaagtgtagatgctgcaggtaaggcacgttttaatttctactaagtgtagataccgctaatcggcgtaaacttaatttctactaagtgtagatttttttnnnnnnnnnnaagcttggcgtggatccgatatcaactagatcttgagacaaatggcagtattcatccacaattttaaaagaaaaggggggattggggggtacagtgcaggggaaagaatagtagacataatagcaacagacatacaaactaaag

SEQ ID NO: 17532 - DNA, 301 bp, Artificial Sequence
  Kdm6a.2_NTC.29
  crRNA array
  misc_feature (148)..(157): n is a, c, g, or t
cttggctttatatatcttgtggaaaggacgaaacaccgtaatttctactaagtgtagatgctgcaggtaaggcacgttttaatttctactaagtgtagatcgcgatctataccgtctatataatttctactaagtgtagatttttttnnnnnnnnnnaagcttggcgtggatccgatatcaactagatcttgagacaaatggcagtattcatccacaattttaaaagaaaaggggggattggggggtacagtgcaggggaaagaatagtagacataatagcaacagacatacaaactaaag

SEQ ID NO: 17533 - DNA, 301 bp, Artificial Sequence
  Kdm6a.2_NTC.3
  crRNA array
  misc_feature (148)..(157): n is a, c, g, or t
cttggctttatatatcttgtggaaaggacgaaacaccgtaatttctactaagtgtagatgctgcaggtaaggcacgttttaatttctactaagtgtagattcgacgcgagacgacgtacataatttctactaagtgtagatttttttnnnnnnnnnnaagcttggcgtggatccgatatcaactagatcttgagacaaatggcagtattcatccacaattttaaaagaaaaggggggattggggggtacagtgcaggggaaagaatagtagacataatagcaacagacatacaaactaaag

SEQ ID NO: 17534 - DNA, 301 bp, Artificial Sequence
  Kdm6a.2_NTC.30
  crRNA array
  misc_feature (148)..(157): n is a, c, g, or t
cttggctttatatatcttgtggaaaggacgaaacaccgtaatttctactaagtgtagatgctgcaggtaaggcacgttttaatttctactaagtgtagatcgatcgtacgggtgtcctaataatttctactaagtgtagatttttttnnnnnnnnnnaagcttggcgtggatccgatatcaactagatcttgagacaaatggcagtattcatccacaattttaaaagaaaaggggggattggggggtacagtgcaggggaaagaatagtagacataatagcaacagacatacaaactaaag

SEQ ID NO: 17535 - DNA, 301 bp, Artificial Sequence
  Kdm6a.2_NTC.31
  crRNA array
  misc_feature (148)..(157): n is a, c, g, or t
cttggctttatatatcttgtggaaaggacgaaacaccgtaatttctactaagtgtagatgctgcaggtaaggcacgttttaatttctactaagtgtagatgccgaccgcgtgattgtaggtaatttctactaagtgtagatttttttnnnnnnnnnnaagcttggcgtggatccgatatcaactagatcttgagacaaatggcagtattcatccacaattttaaaagaaaaggggggattggggggtacagtgcaggggaaagaatagtagacataatagcaacagacatacaaactaaag

SEQ ID NO: 17536 - DNA, 301 bp, Artificial Sequence
  Kdm6a.2_NTC.32
  crRNA array
  misc_feature (148)..(157): n is a, c, g, or t
cttggctttatatatcttgtggaaaggacgaaacaccgtaatttctactaagtgtagatgctgcaggtaaggcacgttttaatttctactaagtgtagatgcacgttacgcccgggtcactaatttctactaagtgtagatttttttnnnnnnnnnnaagcttggcgtggatccgatatcaactagatcttgagacaaatggcagtattcatccacaattttaaaagaaaaggggggattggggggtacagtgcaggggaaagaatagtagacataatagcaacagacatacaaactaaag

SEQ ID NO: 17537 - DNA, 301 bp, Artificial Sequence
  Kdm6a.2_NTC.33
  crRNA array
  misc_feature (148)..(157): n is a, c, g, or t
cttggctttatatatcttgtggaaaggacgaaacaccgtaatttctactaagtgtagatgctgcaggtaaggcacgttttaatttctactaagtgtagattaagcgaccgacgcattcgctaatttctactaagtgtagatttttttnnnnnnnnnnaagcttggcgtggatccgatatcaactagatcttgagacaaatggcagtattcatccacaattttaaaagaaaaggggggattggggggtacagtgcaggggaaagaatagtagacataatagcaacagacatacaaactaaag

SEQ ID NO: 17538 - DNA, 301 bp, Artificial Sequence
  Kdm6a.2_NTC.34
  crRNA array
  misc_feature (148)..(157): n is a, c, g, or t
cttggctttatatatcttgtggaaaggacgaaacaccgtaatttctactaagtgtagatgctgcaggtaaggcacgttttaatttctactaagtgtagattagcgttcgacacgtgaaactaatttctactaagtgtagatttttttnnnnnnnnnnaagcttggcgtggatccgatatcaactagatcttgagacaaatggcagtattcatccacaattttaaaagaaaaggggggattggggggtacagtgcaggggaaagaatagtagacataatagcaacagacatacaaactaaag

SEQ ID NO: 17539 - DNA, 301 bp, Artificial Sequence
  Kdm6a.2_NTC.35
  crRNA array
  misc_feature (148)..(157): n is a, c, g, or t
cttggctttatatatcttgtggaaaggacgaaacaccgtaatttctactaagtgtagatgctgcaggtaaggcacgttttaatttctactaagtgtagattggcgcgtaatcgctattcgtaatttctactaagtgtagatttttttnnnnnnnnnnaagcttggcgtggatccgatatcaactagatcttgagacaaatggcagtattcatccacaattttaaaagaaaaggggggattggggggtacagtgcaggggaaagaatagtagacataatagcaacagacatacaaactaaag

SEQ ID NO: 17540 - DNA, 301 bp, Artificial Sequence
  Kdm6a.2_NTC.36
  crRNA array
  misc_feature (148)..(157): n is a, c, g, or t
cttggctttatatatcttgtggaaaggacgaaacaccgtaatttctactaagtgtagatgctgcaggtaaggcacgttttaatttctactaagtgtagatcaacccgccgtagcgggccttaatttctactaagtgtagatttttttnnnnnnnnnnaagcttggcgtggatccgatatcaactagatcttgagacaaatggcagtattcatccacaattttaaaagaaaaggggggattggggggtacagtgcaggggaaagaatagtagacataatagcaacagacatacaaactaaag

SEQ ID NO: 17541 - DNA, 301 bp, Artificial Sequence
  Kdm6a.2_NTC.37
  crRNA array
  misc_feature (148)..(157): n is a, c, g, or t
cttggctttatatatcttgtggaaaggacgaaacaccgtaatttctactaagtgtagatgctgcaggtaaggcacgttttaatttctactaagtgtagattttgcgttgacgcgattacttaatttctactaagtgtagatttttttnnnnnnnnnnaagcttggcgtggatccgatatcaactagatcttgagacaaatggcagtattcatccacaattttaaaagaaaaggggggattggggggtacagtgcaggggaaagaatagtagacataatagcaacagacatacaaactaaag

SEQ ID NO: 17542 - DNA, 301 bp, Artificial Sequence
  Kdm6a.2_NTC.38
  crRNA array
  misc_feature (148)..(157): n is a, c, g, or t
cttggctttatatatcttgtggaaaggacgaaacaccgtaatttctactaagtgtagatgctgcaggtaaggcacgttttaatttctactaagtgtagataacggagcgcgatactaccataatttctactaagtgtagatttttttnnnnnnnnnnaagcttggcgtggatccgatatcaactagatcttgagacaaatggcagtattcatccacaattttaaaagaaaaggggggattggggggtacagtgcaggggaaagaatagtagacataatagcaacagacatacaaactaaag

SEQ ID NO: 17543 - DNA, 301 bp, Artificial Sequence
  Kdm6a.2_NTC.39
  crRNA array
  misc_feature (148)..(157): n is a, c, g, or t
cttggctttatatatcttgtggaaaggacgaaacaccgtaatttctactaagtgtagatgctgcaggtaaggcacgttttaatttctactaagtgtagatccggacgttataacgtttcttaatttctactaagtgtagatttttttnnnnnnnnnnaagcttggcgtggatccgatatcaactagatcttgagacaaatggcagtattcatccacaattttaaaagaaaaggggggattggggggtacagtgcaggggaaagaatagtagacataatagcaacagacatacaaactaaag

SEQ ID NO: 17544 - DNA, 301 bp, Artificial Sequence
  Kdm6a.2_NTC.4
  crRNA array
  misc_feature (148)..(157): n is a, c, g, or t
cttggctttatatatcttgtggaaaggacgaaacaccgtaatttctactaagtgtagatgctgcaggtaaggcacgttttaatttctactaagtgtagatatacccgtcgcgaacgtgagtaatttctactaagtgtagatttttttnnnnnnnnnnaagcttggcgtggatccgatatcaactagatcttgagacaaatggcagtattcatccacaattttaaaagaaaaggggggattggggggtacagtgcaggggaaagaatagtagacataatagcaacagacatacaaactaaag

SEQ ID NO: 17545 - DNA, 301 bp, Artificial Sequence
  Kdm6a.2_NTC.40
  crRNA array
  misc_feature (148)..(157): n is a, c, g, or t
cttggctttatatatcttgtggaaaggacgaaacaccgtaatttctactaagtgtagatgctgcaggtaaggcacgttttaatttctactaagtgtagatattcgcgaacccggccggaataatttctactaagtgtagatttttttnnnnnnnnnnaagcttggcgtggatccgatatcaactagatcttgagacaaatggcagtattcatccacaattttaaaagaaaaggggggattggggggtacagtgcaggggaaagaatagtagacataatagcaacagacatacaaactaaag

SEQ ID NO: 17546 - DNA, 301 bp, Artificial Sequence
  Kdm6a.2_NTC.41
  crRNA array
  misc_feature (148)..(157): n is a, c, g, or t
cttggctttatatatcttgtggaaaggacgaaacaccgtaatttctactaagtgtagatgctgcaggtaaggcacgttttaatttctactaagtgtagatttgatggcgcgacgcgttattaatttctactaagtgtagatttttttnnnnnnnnnnaagcttggcgtggatccgatatcaactagatcttgagacaaatggcagtattcatccacaattttaaaagaaaaggggggattggggggtacagtgcaggggaaagaatagtagacataatagcaacagacatacaaactaaag

SEQ ID NO: 17547 - DNA, 301 bp, Artificial Sequence
  Kdm6a.2_NTC.42
  crRNA array
  misc_feature (148)..(157): n is a, c, g, or t
cttggctttatatatcttgtggaaaggacgaaacaccgtaatttctactaagtgtagatgctgcaggtaaggcacgttttaatttctactaagtgtagatggtcaaatcgcggcgataactaatttctactaagtgtagatttttttnnnnnnnnnnaagcttggcgtggatccgatatcaactagatcttgagacaaatggcagtattcatccacaattttaaaagaaaaggggggattggggggtacagtgcaggggaaagaatagtagacataatagcaacagacatacaaactaaag

SEQ ID NO: 17548 - DNA, 301 bp, Artificial Sequence
  Kdm6a.2_NTC.43
  crRNA array
  misc_feature (148)..(157): n is a, c, g, or t
cttggctttatatatcttgtggaaaggacgaaacaccgtaatttctactaagtgtagatgctgcaggtaaggcacgttttaatttctactaagtgtagatcgactcgcgcattgaactggtaatttctactaagtgtagatttttttnnnnnnnnnnaagcttggcgtggatccgatatcaactagatcttgagacaaatggcagtattcatccacaattttaaaagaaaaggggggattggggggtacagtgcaggggaaagaatagtagacataatagcaacagacatacaaactaaag

SEQ ID NO: 17549 - DNA, 301 bp, Artificial Sequence
  Kdm6a.2_NTC.44
  crRNA array
  misc_feature (148)..(157): n is a, c, g, or t
cttggctttatatatcttgtggaaaggacgaaacaccgtaatttctactaagtgtagatgctgcaggtaaggcacgttttaatttctactaagtgtagatagcgtcgtacgatttatcgttaatttctactaagtgtagatttttttnnnnnnnnnnaagcttggcgtggatccgatatcaactagatcttgagacaaatggcagtattcatccacaattttaaaagaaaaggggggattggggggtacagtgcaggggaaagaatagtagacataatagcaacagacatacaaactaaag

SEQ ID NO: 17550 - DNA, 301 bp, Artificial Sequence
  Kdm6a.2_NTC.45
  crRNA array
  misc_feature (148)..(157): n is a, c, g, or t
cttggctttatatatcttgtggaaaggacgaaacaccgtaatttctactaagtgtagatgctgcaggtaaggcacgttttaatttctactaagtgtagatcggaacgcgtgatactagggtaatttctactaagtgtagatttttttnnnnnnnnnnaagcttggcgtggatccgatatcaactagatcttgagacaaatggcagtattcatccacaattttaaaagaaaaggggggattggggggtacagtgcaggggaaagaatagtagacataatagcaacagacatacaaactaaag

SEQ ID NO: 17551 - DNA, 301 bp, Artificial Sequence
  Kdm6a.2_NTC.46
  crRNA array
  misc_feature (148)..(157): n is a, c, g, or t
cttggctttatatatcttgtggaaaggacgaaacaccgtaatttctactaagtgtagatgctgcaggtaaggcacgttttaatttctactaagtgtagatagcgggtcgtagacgcgcggtaatttctactaagtgtagatttttttnnnnnnnnnnaagcttggcgtggatccgatatcaactagatcttgagacaaatggcagtattcatccacaattttaaaagaaaaggggggattggggggtacagtgcaggggaaagaatagtagacataatagcaacagacatacaaactaaag

SEQ ID NO: 17552 - DNA, 301 bp, Artificial Sequence
  Kdm6a.2_NTC.47
  crRNA array
  misc_feature (148)..(157): n is a, c, g, or t
cttggctttatatatcttgtggaaaggacgaaacaccgtaatttctactaagtgtagatgctgcaggtaaggcacgttttaatttctactaagtgtagattctcgtatcgcgattgttaataatttctactaagtgtagatttttttnnnnnnnnnnaagcttggcgtggatccgatatcaactagatcttgagacaaatggcagtattcatccacaattttaaaagaaaaggggggattggggggtacagtgcaggggaaagaatagtagacataatagcaacagacatacaaactaaag

SEQ ID NO: 17553 - DNA, 301 bp, Artificial Sequence
  Kdm6a.2_NTC.48
  crRNA array
  misc_feature (148)..(157): n is a, c, g, or t
cttggctttatatatcttgtggaaaggacgaaacaccgtaatttctactaagtgtagatgctgcaggtaaggcacgttttaatttctactaagtgtagatcggtcgactacggctgttagtaatttctactaagtgtagatttttttnnnnnnnnnnaagcttggcgtggatccgatatcaactagatcttgagacaaatggcagtattcatccacaattttaaaagaaaaggggggattggggggtacagtgcaggggaaagaatagtagacataatagcaacagacatacaaactaaag

SEQ ID NO: 17554 - DNA, 301 bp, Artificial Sequence
  Kdm6a.2_NTC.49
  crRNA array
  misc_feature (148)..(157): n is a, c, g, or t
cttggctttatatatcttgtggaaaggacgaaacaccgtaatttctactaagtgtagatgctgcaggtaaggcacgttttaatttctactaagtgtagattcggggcgcgtcaactgaattaatttctactaagtgtagatttttttnnnnnnnnnnaagcttggcgtggatccgatatcaactagatcttgagacaaatggcagtattcatccacaattttaaaagaaaaggggggattggggggtacagtgcaggggaaagaatagtagacataatagcaacagacatacaaactaaag

SEQ ID NO: 17555 - DNA, 301 bp, Artificial Sequence
  Kdm6a.2_NTC.5
  crRNA array
  misc_feature (148)..(157): n is a, c, g, or t
cttggctttatatatcttgtggaaaggacgaaacaccgtaatttctactaagtgtagatgctgcaggtaaggcacgttttaatttctactaagtgtagatgcttacgcgtcgcgaatgtataatttctactaagtgtagatttttttnnnnnnnnnnaagcttggcgtggatccgatatcaactagatcttgagacaaatggcagtattcatccacaattttaaaagaaaaggggggattggggggtacagtgcaggggaaagaatagtagacataatagcaacagacatacaaactaaag

SEQ ID NO: 17556 - DNA, 301 bp, Artificial Sequence
  Kdm6a.2_NTC.50
  crRNA array
  misc_feature (148)..(157): n is a, c, g, or t
cttggctttatatatcttgtggaaaggacgaaacaccgtaatttctactaagtgtagatgctgcaggtaaggcacgttttaatttctactaagtgtagatattgccgctcgcgcaaaatctaatttctactaagtgtagatttttttnnnnnnnnnnaagcttggcgtggatccgatatcaactagatcttgagacaaatggcagtattcatccacaattttaaaagaaaaggggggattggggggtacagtgcaggggaaagaatagtagacataatagcaacagacatacaaactaaag

SEQ ID NO: 17557 - DNA, 301 bp, Artificial Sequence
  Kdm6a.2_NTC.51
  crRNA array
  misc_feature (148)..(157): n is a, c, g, or t
cttggctttatatatcttgtggaaaggacgaaacaccgtaatttctactaagtgtagatgctgcaggtaaggcacgttttaatttctactaagtgtagattaacgcgcaacacgccaatgtaatttctactaagtgtagatttttttnnnnnnnnnnaagcttggcgtggatccgatatcaactagatcttgagacaaatggcagtattcatccacaattttaaaagaaaaggggggattggggggtacagtgcaggggaaagaatagtagacataatagcaacagacatacaaactaaag

SEQ ID NO: 17558 - DNA, 301 bp, Artificial Sequence
  Kdm6a.2_NTC.6
  crRNA array
  misc_feature (148)..(157): n is a, c, g, or t
cttggctttatatatcttgtggaaaggacgaaacaccgtaatttctactaagtgtagatgctgcaggtaaggcacgttttaatttctactaagtgtagatcgaatcgcgcctacgggaattaatttctactaagtgtagatttttttnnnnnnnnnnaagcttggcgtggatccgatatcaactagatcttgagacaaatggcagtattcatccacaattttaaaagaaaaggggggattggggggtacagtgcaggggaaagaatagtagacataatagcaacagacatacaaactaaag

SEQ ID NO: 17559 - DNA, 301 bp, Artificial Sequence
  Kdm6a.2_NTC.7
  crRNA array
  misc_feature (148)..(157): n is a, c, g, or t
cttggctttatatatcttgtggaaaggacgaaacaccgtaatttctactaagtgtagatgctgcaggtaaggcacgttttaatttctactaagtgtagatcgccgaacggataagactattaatttctactaagtgtagatttttttnnnnnnnnnnaagcttggcgtggatccgatatcaactagatcttgagacaaatggcagtattcatccacaattttaaaagaaaaggggggattggggggtacagtgcaggggaaagaatagtagacataatagcaacagacatacaaactaaag

SEQ ID NO: 17560 - DNA, 301 bp, Artificial Sequence
  Kdm6a.2_NTC.8
  crRNA array
  misc_feature (148)..(157): n is a, c, g, or t
cttggctttatatatcttgtggaaaggacgaaacaccgtaatttctactaagtgtagatgctgcaggtaaggcacgttttaatttctactaagtgtagatcgaccgaggttacgctgggataatttctactaagtgtagatttttttnnnnnnnnnnaagcttggcgtggatccgatatcaactagatcttgagacaaatggcagtattcatccacaattttaaaagaaaaggggggattggggggtacagtgcaggggaaagaatagtagacataatagcaacagacatacaaactaaag

SEQ ID NO: 17561 - DNA, 301 bp, Artificial Sequence
  Kdm6a.2_NTC.9
  crRNA array
  misc_feature (148)..(157): n is a, c, g, or t
cttggctttatatatcttgtggaaaggacgaaacaccgtaatttctactaagtgtagatgctgcaggtaaggcacgttttaatttctactaagtgtagatatcgccgtacggctatggcataatttctactaagtgtagatttttttnnnnnnnnnnaagcttggcgtggatccgatatcaactagatcttgagacaaatggcagtattcatccacaattttaaaagaaaaggggggattggggggtacagtgcaggggaaagaatagtagacataatagcaacagacatacaaactaaag

SEQ ID NO: 17562 - DNA, 301 bp, Artificial Sequence
  Kdm6a.3_NTC.0
  crRNA array
  misc_feature (148)..(157): n is a, c, g, or t
cttggctttatatatcttgtggaaaggacgaaacaccgtaatttctactaagtgtagattgctggtgccggggaagttttaatttctactaagtgtagattatagcgtcgcgcgctaatttaatttctactaagtgtagatttttttnnnnnnnnnnaagcttggcgtggatccgatatcaactagatcttgagacaaatggcagtattcatccacaattttaaaagaaaaggggggattggggggtacagtgcaggggaaagaatagtagacataatagcaacagacatacaaactaaag

SEQ ID NO: 17563 - DNA, 301 bp, Artificial Sequence
  Kdm6a.3_NTC.1
  crRNA array
  misc_feature (148)..(157): n is a, c, g, or t
cttggctttatatatcttgtggaaaggacgaaacaccgtaatttctactaagtgtagattgctggtgccggggaagttttaatttctactaagtgtagatcgcgtaaccgttccggctcctaatttctactaagtgtagatttttttnnnnnnnnnnaagcttggcgtggatccgatatcaactagatcttgagacaaatggcagtattcatccacaattttaaaagaaaaggggggattggggggtacagtgcaggggaaagaatagtagacataatagcaacagacatacaaactaaag

SEQ ID NO: 17564 - DNA, 301 bp, Artificial Sequence
  Kdm6a.3_NTC.10
  crRNA array
  misc_feature (148)..(157): n is a, c, g, or t
cttggctttatatatcttgtggaaaggacgaaacaccgtaatttctactaagtgtagattgctggtgccggggaagttttaatttctactaagtgtagatcgctaagttcgcgcgggccgtaatttctactaagtgtagatttttttnnnnnnnnnnaagcttggcgtggatccgatatcaactagatcttgagacaaatggcagtattcatccacaattttaaaagaaaaggggggattggggggtacagtgcaggggaaagaatagtagacataatagcaacagacatacaaactaaag

SEQ ID NO: 17565 - DNA, 301 bp, Artificial Sequence
  Kdm6a.3_NTC.11
  crRNA array
  misc_feature (148)..(157): n is a, c, g, or t
cttggctttatatatcttgtggaaaggacgaaacaccgtaatttctactaagtgtagattgctggtgccggggaagttttaatttctactaagtgtagatcgttcgtcgacgaagcaatctaatttctactaagtgtagatttttttnnnnnnnnnnaagcttggcgtggatccgatatcaactagatcttgagacaaatggcagtattcatccacaattttaaaagaaaaggggggattggggggtacagtgcaggggaaagaatagtagacataatagcaacagacatacaaactaaag

SEQ ID NO: 17566 - DNA, 301 bp, Artificial Sequence
  Kdm6a.3_NTC.12
  crRNA array
  misc_feature (148)..(157): n is a, c, g, or t
cttggctttatatatcttgtggaaaggacgaaacaccgtaatttctactaagtgtagattgctggtgccggggaagttttaatttctactaagtgtagatcgccgacgattaatcaatagtaatttctactaagtgtagatttttttnnnnnnnnnnaagcttggcgtggatccgatatcaactagatcttgagacaaatggcagtattcatccacaattttaaaagaaaaggggggattggggggtacagtgcaggggaaagaatagtagacataatagcaacagacatacaaactaaag

SEQ ID NO: 17567 - DNA, 301 bp, Artificial Sequence
  Kdm6a.3_NTC.13
  crRNA array
  misc_feature (148)..(157): n is a, c, g, or t
cttggctttatatatcttgtggaaaggacgaaacaccgtaatttctactaagtgtagattgctggtgccggggaagttttaatttctactaagtgtagatgaccgttgtatcgcgatcaataatttctactaagtgtagatttttttnnnnnnnnnnaagcttggcgtggatccgatatcaactagatcttgagacaaatggcagtattcatccacaattttaaaagaaaaggggggattggggggtacagtgcaggggaaagaatagtagacataatagcaacagacatacaaactaaag

SEQ ID NO: 17568 - DNA, 301 bp, Artificial Sequence
  Kdm6a.3_NTC.14
  crRNA array
  misc_feature (148)..(157): n is a, c, g, or t
cttggctttatatatcttgtggaaaggacgaaacaccgtaatttctactaagtgtagattgctggtgccggggaagttttaatttctactaagtgtagatccgttcgtgcgatagtgttttaatttctactaagtgtagatttttttnnnnnnnnnnaagcttggcgtggatccgatatcaactagatcttgagacaaatggcagtattcatccacaattttaaaagaaaaggggggattggggggtacagtgcaggggaaagaatagtagacataatagcaacagacatacaaactaaag

SEQ ID NO: 17569 - DNA, 301 bp, Artificial Sequence
  Kdm6a.3_NTC.15
  crRNA array
  misc_feature (148)..(157): n is a, c, g, or t
cttggctttatatatcttgtggaaaggacgaaacaccgtaatttctactaagtgtagattgctggtgccggggaagttttaatttctactaagtgtagatgttgtcgtgccgcgaatttataatttctactaagtgtagatttttttnnnnnnnnnnaagcttggcgtggatccgatatcaactagatcttgagacaaatggcagtattcatccacaattttaaaagaaaaggggggattggggggtacagtgcaggggaaagaatagtagacataatagcaacagacatacaaactaaag

SEQ ID NO: 17570 - DNA, 301 bp, Artificial Sequence
  Kdm6a.3_NTC.16
  crRNA array
  misc_feature (148)..(157): n is a, c, g, or t
cttggctttatatatcttgtggaaaggacgaaacaccgtaatttctactaagtgtagattgctggtgccggggaagttttaatttctactaagtgtagatcggtacgttagacgaaaatttaatttctactaagtgtagatttttttnnnnnnnnnnaagcttggcgtggatccgatatcaactagatcttgagacaaatggcagtattcatccacaattttaaaagaaaaggggggattggggggtacagtgcaggggaaagaatagtagacataatagcaacagacatacaaactaaag

SEQ ID NO: 17571 - DNA, 301 bp, Artificial Sequence
  Kdm6a.3_NTC.17
  crRNA array
  misc_feature (148)..(157): n is a, c, g, or t
cttggctttatatatcttgtggaaaggacgaaacaccgtaatttctactaagtgtagattgctggtgccggggaagttttaatttctactaagtgtagattatcgaacgctatcgaacgttaatttctactaagtgtagatttttttnnnnnnnnnnaagcttggcgtggatccgatatcaactagatcttgagacaaatggcagtattcatccacaattttaaaagaaaaggggggattggggggtacagtgcaggggaaagaatagtagacataatagcaacagacatacaaactaaag

SEQ ID NO: 17572 - DNA, 301 bp, Artificial Sequence
  Kdm6a.3_NTC.18
  crRNA array
  misc_feature (148)..(157): n is a, c, g, or t
cttggctttatatatcttgtggaaaggacgaaacaccgtaatttctactaagtgtagattgctggtgccggggaagttttaatttctactaagtgtagattccggttacgaccggcaaaataatttctactaagtgtagatttttttnnnnnnnnnnaagcttggcgtggatccgatatcaactagatcttgagacaaatggcagtattcatccacaattttaaaagaaaaggggggattggggggtacagtgcaggggaaagaatagtagacataatagcaacagacatacaaactaaag

SEQ ID NO: 17573 - DNA, 301 bp, Artificial Sequence
  Kdm6a.3_NTC.19
  crRNA array
  misc_feature (148)..(157): n is a, c, g, or t
cttggctttatatatcttgtggaaaggacgaaacaccgtaatttctactaagtgtagattgctggtgccggggaagttttaatttctactaagtgtagatcgtcgtagaacgatacccgataatttctactaagtgtagatttttttnnnnnnnnnnaagcttggcgtggatccgatatcaactagatcttgagacaaatggcagtattcatccacaattttaaaagaaaaggggggattggggggtacagtgcaggggaaagaatagtagacataatagcaacagacatacaaactaaag

SEQ ID NO: 17574 - DNA, 301 bp, Artificial Sequence
  Kdm6a.3_NTC.2
  crRNA array
  misc_feature (148)..(157): n is a, c, g, or t
cttggctttatatatcttgtggaaaggacgaaacaccgtaatttctactaagtgtagattgctggtgccggggaagttttaatttctactaagtgtagatttatgtcgcgccgcgacccgtaatttctactaagtgtagatttttttnnnnnnnnnnaagcttggcgtggatccgatatcaactagatcttgagacaaatggcagtattcatccacaattttaaaagaaaaggggggattggggggtacagtgcaggggaaagaatagtagacataatagcaacagacatacaaactaaag

SEQ ID NO: 17575 - DNA, 301 bp, Artificial Sequence
  Kdm6a.3_NTC.20
  crRNA array
  misc_feature (148)..(157): n is a, c, g, or t
cttggctttatatatcttgtggaaaggacgaaacaccgtaatttctactaagtgtagattgctggtgccggggaagttttaatttctactaagtgtagatattccggcgcgaccagaagataatttctactaagtgtagatttttttnnnnnnnnnnaagcttggcgtggatccgatatcaactagatcttgagacaaatggcagtattcatccacaattttaaaagaaaaggggggattggggggtacagtgcaggggaaagaatagtagacataatagcaacagacatacaaactaaag

SEQ ID NO: 17576 - DNA, 301 bp, Artificial Sequence
  Kdm6a.3_NTC.21
  crRNA array
  misc_feature (148)..(157): n is a, c, g, or t
cttggctttatatatcttgtggaaaggacgaaacaccgtaatttctactaagtgtagattgctggtgccggggaagttttaatttctactaagtgtagatgtataacttcgcgcggtccgtaatttctactaagtgtagatttttttnnnnnnnnnnaagcttggcgtggatccgatatcaactagatcttgagacaaatggcagtattcatccacaattttaaaagaaaaggggggattggggggtacagtgcaggggaaagaatagtagacataatagcaacagacatacaaactaaag

SEQ ID NO: 17577 - DNA, 301 bp, Artificial Sequence
  Kdm6a.3_NTC.22
  crRNA array
  misc_feature (148)..(157): n is a, c, g, or t
cttggctttatatatcttgtggaaaggacgaaacaccgtaatttctactaagtgtagattgctggtgccggggaagttttaatttctactaagtgtagatgcgcgtcaacgtaatgtgcctaatttctactaagtgtagatttttttnnnnnnnnnnaagcttggcgtggatccgatatcaactagatcttgagacaaatggcagtattcatccacaattttaaaagaaaaggggggattggggggtacagtgcaggggaaagaatagtagacataatagcaacagacatacaaactaaag

SEQ ID NO: 17578 - DNA, 301 bp, Artificial Sequence
  Kdm6a.3_NTC.23
  crRNA array
  misc_feature (148)..(157): n is a, c, g, or t
cttggctttatatatcttgtggaaaggacgaaacaccgtaatttctactaagtgtagattgctggtgccggggaagttttaatttctactaagtgtagatacgcgctattatcgtaggtgtaatttctactaagtgtagatttttttnnnnnnnnnnaagcttggcgtggatccgatatcaactagatcttgagacaaatggcagtattcatccacaattttaaaagaaaaggggggattggggggtacagtgcaggggaaagaatagtagacataatagcaacagacatacaaactaaag

SEQ ID NO: 17579 - DNA, 301 bp, Artificial Sequence
  Kdm6a.3_NTC.24
  crRNA array
  misc_feature (148)..(157): n is a, c, g, or t
cttggctttatatatcttgtggaaaggacgaaacaccgtaatttctactaagtgtagattgctggtgccggggaagttttaatttctactaagtgtagatactatcgacgttcgtcccggtaatttctactaagtgtagatttttttnnnnnnnnnnaagcttggcgtggatccgatatcaactagatcttgagacaaatggcagtattcatccacaattttaaaagaaaaggggggattggggggtacagtgcaggggaaagaatagtagacataatagcaacagacatacaaactaaag

SEQ ID NO: 17580 - DNA, 301 bp, Artificial Sequence
  Kdm6a.3_NTC.25
  crRNA array
  misc_feature (148)..(157): n is a, c, g, or t
cttggctttatatatcttgtggaaaggacgaaacaccgtaatttctactaagtgtagattgctggtgccggggaagttttaatttctactaagtgtagattcgcgttatcgtgccgtgcgtaatttctactaagtgtagatttttttnnnnnnnnnnaagcttggcgtggatccgatatcaactagatcttgagacaaatggcagtattcatccacaattttaaaagaaaaggggggattggggggtacagtgcaggggaaagaatagtagacataatagcaacagacatacaaactaaag

SEQ ID NO: 17581 - DNA, 301 bp, Artificial Sequence
  Kdm6a.3_NTC.26
  crRNA array
  misc_feature (148)..(157): n is a, c, g, or t
cttggctttatatatcttgtggaaaggacgaaacaccgtaatttctactaagtgtagattgctggtgccggggaagttttaatttctactaagtgtagatcgcgacggcggttttaacactaatttctactaagtgtagatttttttnnnnnnnnnnaagcttggcgtggatccgatatcaactagatcttgagacaaatggcagtattcatccacaattttaaaagaaaaggggggattggggggtacagtgcaggggaaagaatagtagacataatagcaacagacatacaaactaaag

SEQ ID NO: 17582 - DNA, 301 bp, Artificial Sequence
  Kdm6a.3_NTC.27
  crRNA array
  misc_feature (148)..(157): n is a, c, g, or t
cttggctttatatatcttgtggaaaggacgaaacaccgtaatttctactaagtgtagattgctggtgccggggaagttttaatttctactaagtgtagatgtcgcgttgcgaccggcgcttaatttctactaagtgtagatttttttnnnnnnnnnnaagcttggcgtggatccgatatcaactagatcttgagacaaatggcagtattcatccacaattttaaaagaaaaggggggattggggggtacagtgcaggggaaagaatagtagacataatagcaacagacatacaaactaaag

SEQ ID NO: 17583 - DNA, 301 bp, Artificial Sequence
  Kdm6a.3_NTC.28
  crRNA array
  misc_feature (148)..(157): n is a, c, g, or t
cttggctttatatatcttgtggaaaggacgaaacaccgtaatttctactaagtgtagattgctggtgccggggaagttttaatttctactaagtgtagataccgctaatcggcgtaaacttaatttctactaagtgtagatttttttnnnnnnnnnnaagcttggcgtggatccgatatcaactagatcttgagacaaatggcagtattcatccacaattttaaaagaaaaggggggattggggggtacagtgcaggggaaagaatagtagacataatagcaacagacatacaaactaaag

SEQ ID NO: 17584 - DNA, 301 bp, Artificial Sequence
  Kdm6a.3_NTC.29
  crRNA array
  misc_feature (148)..(157): n is a, c, g, or t
cttggctttatatatcttgtggaaaggacgaaacaccgtaatttctactaagtgtagattgctggtgccggggaagttttaatttctactaagtgtagatcgcgatctataccgtctatataatttctactaagtgtagatttttttnnnnnnnnnnaagcttggcgtggatccgatatcaactagatcttgagacaaatggcagtattcatccacaattttaaaagaaaaggggggattggggggtacagtgcaggggaaagaatagtagacataatagcaacagacatacaaactaaag

SEQ ID NO: 17585 - DNA, 301 bp, Artificial Sequence
  Kdm6a.3_NTC.3
  crRNA array
  misc_feature (148)..(157): n is a, c, g, or t
cttggctttatatatcttgtggaaaggacgaaacaccgtaatttctactaagtgtagattgctggtgccggggaagttttaatttctactaagtgtagattcgacgcgagacgacgtacataatttctactaagtgtagatttttttnnnnnnnnnnaagcttggcgtggatccgatatcaactagatcttgagacaaatggcagtattcatccacaattttaaaagaaaaggggggattggggggtacagtgcaggggaaagaatagtagacataatagcaacagacatacaaactaaag

SEQ ID NO: 17586 - DNA, 301 bp, Artificial Sequence
  Kdm6a.3_NTC.30
  crRNA array
  misc_feature (148)..(157): n is a, c, g, or t
cttggctttatatatcttgtggaaaggacgaaacaccgtaatttctactaagtgtagattgctggtgccggggaagttttaatttctactaagtgtagatcgatcgtacgggtgtcctaataatttctactaagtgtagatttttttnnnnnnnnnnaagcttggcgtggatccgatatcaactagatcttgagacaaatggcagtattcatccacaattttaaaagaaaaggggggattggggggtacagtgcaggggaaagaatagtagacataatagcaacagacatacaaactaaag

SEQ ID NO: 17587 - DNA, 301 bp, Artificial Sequence
  Kdm6a.3_NTC.31
  crRNA array
  misc_feature (148)..(157): n is a, c, g, or t
cttggctttatatatcttgtggaaaggacgaaacaccgtaatttctactaagtgtagattgctggtgccggggaagttttaatttctactaagtgtagatgccgaccgcgtgattgtaggtaatttctactaagtgtagatttttttnnnnnnnnnnaagcttggcgtggatccgatatcaactagatcttgagacaaatggcagtattcatccacaattttaaaagaaaaggggggattggggggtacagtgcaggggaaagaatagtagacataatagcaacagacatacaaactaaag

SEQ ID NO: 17588 - DNA, 301 bp, Artificial Sequence
  Kdm6a.3_NTC.32
  crRNA array
  misc_feature (148)..(157): n is a, c, g, or t
cttggctttatatatcttgtggaaaggacgaaacaccgtaatttctactaagtgtagattgctggtgccggggaagttttaatttctactaagtgtagatgcacgttacgcccgggtcactaatttctactaagtgtagatttttttnnnnnnnnnnaagcttggcgtggatccgatatcaactagatcttgagacaaatggcagtattcatccacaattttaaaagaaaaggggggattggggggtacagtgcaggggaaagaatagtagacataatagcaacagacatacaaactaaag

SEQ ID NO: 17589 - DNA, 301 bp, Artificial Sequence
  Kdm6a.3_NTC.33
  crRNA array
  misc_feature (148)..(157): n is a, c, g, or t
cttggctttatatatcttgtggaaaggacgaaacaccgtaatttctactaagtgtagattgctggtgccggggaagttttaatttctactaagtgtagattaagcgaccgacgcattcgctaatttctactaagtgtagatttttttnnnnnnnnnnaagcttggcgtggatccgatatcaactagatcttgagacaaatggcagtattcatccacaattttaaaagaaaaggggggattggggggtacagtgcaggggaaagaatagtagacataatagcaacagacatacaaactaaag

SEQ ID NO: 17590 - DNA, 301 bp, Artificial Sequence
  Kdm6a.3_NTC.34
  crRNA array
  misc_feature (148)..(157): n is a, c, g, or t
cttggctttatatatcttgtggaaaggacgaaacaccgtaatttctactaagtgtagattgctggtgccggggaagttttaatttctactaagtgtagattagcgttcgacacgtgaaactaatttctactaagtgtagatttttttnnnnnnnnnnaagcttggcgtggatccgatatcaactagatcttgagacaaatggcagtattcatccacaattttaaaagaaaaggggggattggggggtacagtgcaggggaaagaatagtagacataatagcaacagacatacaaactaaag

SEQ ID NO: 17591 - DNA, 301 bp, Artificial Sequence
  Kdm6a.3_NTC.35
  crRNA array
  misc_feature (148)..(157): n is a, c, g, or t
cttggctttatatatcttgtggaaaggacgaaacaccgtaatttctactaagtgtagattgctggtgccggggaagttttaatttctactaagtgtagattggcgcgtaatcgctattcgtaatttctactaagtgtagatttttttnnnnnnnnnnaagcttggcgtggatccgatatcaactagatcttgagacaaatggcagtattcatccacaattttaaaagaaaaggggggattggggggtacagtgcaggggaaagaatagtagacataatagcaacagacatacaaactaaag

SEQ ID NO: 17592 - DNA, 301 bp, Artificial Sequence
  Kdm6a.3_NTC.36
  crRNA array
  misc_feature (148)..(157): n is a, c, g, or t
cttggctttatatatcttgtggaaaggacgaaacaccgtaatttctactaagtgtagattgctggtgccggggaagttttaatttctactaagtgtagatcaacccgccgtagcgggccttaatttctactaagtgtagatttttttnnnnnnnnnnaagcttggcgtggatccgatatcaactagatcttgagacaaatggcagtattcatccacaattttaaaagaaaaggggggattggggggtacagtgcaggggaaagaatagtagacataatagcaacagacatacaaactaaag

SEQ ID NO: 17593 - DNA, 301 bp, Artificial Sequence
  Kdm6a.3_NTC.37
  crRNA array
  misc_feature (148)..(157): n is a, c, g, or t
cttggctttatatatcttgtggaaaggacgaaacaccgtaatttctactaagtgtagattgctggtgccggggaagttttaatttctactaagtgtagattttgcgttgacgcgattacttaatttctactaagtgtagatttttttnnnnnnnnnnaagcttggcgtggatccgatatcaactagatcttgagacaaatggcagtattcatccacaattttaaaagaaaaggggggattggggggtacagtgcaggggaaagaatagtagacataatagcaacagacatacaaactaaag

SEQ ID NO: 17594 - DNA, 301 bp, Artificial Sequence
  Kdm6a.3_NTC.38
  crRNA array
  misc_feature (148)..(157): n is a, c, g, or t
cttggctttatatatcttgtggaaaggacgaaacaccgtaatttctactaagtgtagattgctggtgccggggaagttttaatttctactaagtgtagataacggagcgcgatactaccataatttctactaagtgtagatttttttnnnnnnnnnnaagcttggcgtggatccgatatcaactagatcttgagacaaatggcagtattcatccacaattttaaaagaaaaggggggattggggggtacagtgcaggggaaagaatagtagacataatagcaacagacatacaaactaaag

SEQ ID NO: 17595 - DNA, 301 bp, Artificial Sequence
  Kdm6a.3_NTC.39
  crRNA array
  misc_feature (148)..(157): n is a, c, g, or t
cttggctttatatatcttgtggaaaggacgaaacaccgtaatttctactaagtgtagattgctggtgccggggaagttttaatttctactaagtgtagatccggacgttataacgtttcttaatttctactaagtgtagatttttttnnnnnnnnnnaagcttggcgtggatccgatatcaactagatcttgagacaaatggcagtattcatccacaattttaaaagaaaaggggggattggggggtacagtgcaggggaaagaatagtagacataatagcaacagacatacaaactaaag

SEQ ID NO: 17596 - DNA, 301 bp, Artificial Sequence
  Kdm6a.3_NTC.4
  crRNA array
  misc_feature (148)..(157): n is a, c, g, or t
cttggctttatatatcttgtggaaaggacgaaacaccgtaatttctactaagtgtagattgctggtgccggggaagttttaatttctactaagtgtagatatacccgtcgcgaacgtgagtaatttctactaagtgtagatttttttnnnnnnnnnnaagcttggcgtggatccgatatcaactagatcttgagacaaatggcagtattcatccacaattttaaaagaaaaggggggattggggggtacagtgcaggggaaagaatagtagacataatagcaacagacatacaaactaaag

SEQ ID NO: 17597 - DNA, 301 bp, Artificial Sequence
  Kdm6a.3_NTC.40
  crRNA array
  misc_feature (148)..(157): n is a, c, g, or t
cttggctttatatatcttgtggaaaggacgaaacaccgtaatttctactaagtgtagattgctggtgccggggaagttttaatttctactaagtgtagatattcgcgaacccggccggaataatttctactaagtgtagatttttttnnnnnnnnnnaagcttggcgtggatccgatatcaactagatcttgagacaaatggcagtattcatccacaattttaaaagaaaaggggggattggggggtacagtgcaggggaaagaatagtagacataatagcaacagacatacaaactaaag

SEQ ID NO: 17598 - DNA, 301 bp, Artificial Sequence
  Kdm6a.3_NTC.41
  crRNA array
  misc_feature (148)..(157): n is a, c, g, or t
cttggctttatatatcttgtggaaaggacgaaacaccgtaatttctactaagtgtagattgctggtgccggggaagttttaatttctactaagtgtagatttgatggcgcgacgcgttattaatttctactaagtgtagatttttttnnnnnnnnnnaagcttggcgtggatccgatatcaactagatcttgagacaaatggcagtattcatccacaattttaaaagaaaaggggggattggggggtacagtgcaggggaaagaatagtagacataatagcaacagacatacaaactaaag

SEQ ID NO: 17599 - DNA, 301 bp, Artificial Sequence
  Kdm6a.3_NTC.42
  crRNA array
  misc_feature (148)..(157): n is a, c, g, or t
cttggctttatatatcttgtggaaaggacgaaacaccgtaatttctactaagtgtagattgctggtgccggggaagttttaatttctactaagtgtagatggtcaaatcgcggcgataactaatttctactaagtgtagatttttttnnnnnnnnnnaagcttggcgtggatccgatatcaactagatcttgagacaaatggcagtattcatccacaattttaaaagaaaaggggggattggggggtacagtgcaggggaaagaatagtagacataatagcaacagacatacaaactaaag

SEQ ID NO: 17600 - DNA, 301 bp, Artificial Sequence
  Kdm6a.3_NTC.43
  crRNA array
  misc_feature (148)..(157): n is a, c, g, or t
cttggctttatatatcttgtggaaaggacgaaacaccgtaatttctactaagtgtagattgctggtgccggggaagttttaatttctactaagtgtagatcgactcgcgcattgaactggtaatttctactaagtgtagatttttttnnnnnnnnnnaagcttggcgtggatccgatatcaactagatcttgagacaaatggcagtattcatccacaattttaaaagaaaaggggggattggggggtacagtgcaggggaaagaatagtagacataatagcaacagacatacaaactaaag

SEQ ID NO: 17601 - DNA, 301 bp, Artificial Sequence
  Kdm6a.3_NTC.44
  crRNA array
  misc_feature (148)..(157): n is a, c, g, or t
cttggctttatatatcttgtggaaaggacgaaacaccgtaatttctactaagtgtagattgctggtgccggggaagttttaatttctactaagtgtagatagcgtcgtacgatttatcgttaatttctactaagtgtagatttttttnnnnnnnnnnaagcttggcgtggatccgatatcaactagatcttgagacaaatggcagtattcatccacaattttaaaagaaaaggggggattggggggtacagtgcaggggaaagaatagtagacataatagcaacagacatacaaactaaag

SEQ ID NO: 17602 - DNA, 301 bp, Artificial Sequence
  Kdm6a.3_NTC.45
  crRNA array
  misc_feature (148)..(157): n is a, c, g, or t
cttggctttatatatcttgtggaaaggacgaaacaccgtaatttctactaagtgtagattgctggtgccggggaagttttaatttctactaagtgtagatcggaacgcgtgatactagggtaatttctactaagtgtagatttttttnnnnnnnnnnaagcttggcgtggatccgatatcaactagatcttgagacaaatggcagtattcatccacaattttaaaagaaaaggggggattggggggtacagtgcaggggaaagaatagtagacataatagcaacagacatacaaactaaag

SEQ ID NO: 17603 - DNA, 301 bp, Artificial Sequence
  Kdm6a.3_NTC.46
  crRNA array
  misc_feature (148)..(157): n is a, c, g, or t
cttggctttatatatcttgtggaaaggacgaaacaccgtaatttctactaagtgtagattgctggtgccggggaagttttaatttctactaagtgtagatagcgggtcgtagacgcgcggtaatttctactaagtgtagatttttttnnnnnnnnnnaagcttggcgtggatccgatatcaactagatcttgagacaaatggcagtattcatccacaattttaaaagaaaaggggggattggggggtacagtgcaggggaaagaatagtagacataatagcaacagacatacaaactaaag

SEQ ID NO: 17604 - DNA, 301 bp, Artificial Sequence
  Kdm6a.3_NTC.47
  crRNA array
  misc_feature (148)..(157): n is a, c, g, or t
cttggctttatatatcttgtggaaaggacgaaacaccgtaatttctactaagtgtagattgctggtgccggggaagttttaatttctactaagtgtagattctcgtatcgcgattgttaataatttctactaagtgtagatttttttnnnnnnnnnnaagcttggcgtggatccgatatcaactagatcttgagacaaatggcagtattcatccacaattttaaaagaaaaggggggattggggggtacagtgcaggggaaagaatagtagacataatagcaacagacatacaaactaaag

SEQ ID NO: 17605 - DNA, 301 bp, Artificial Sequence
  Kdm6a.3_NTC.48
  crRNA array
  misc_feature (148)..(157): n is a, c, g, or t
cttggctttatatatcttgtggaaaggacgaaacaccgtaatttctactaagtgtagattgctggtgccggggaagttttaatttctactaagtgtagatcggtcgactacggctgttagtaatttctactaagtgtagatttttttnnnnnnnnnnaagcttggcgtggatccgatatcaactagatcttgagacaaatggcagtattcatccacaattttaaaagaaaaggggggattggggggtacagtgcaggggaaagaatagtagacataatagcaacagacatacaaactaaag

SEQ ID NO: 17606 - DNA, 301 bp, Artificial Sequence
  Kdm6a.3_NTC.49
  crRNA array
  misc_feature (148)..(157): n is a, c, g, or t
cttggctttatatatcttgtggaaaggacgaaacaccgtaatttctactaagtgtagattgctggtgccggggaagttttaatttctactaagtgtagattcggggcgcgtcaactgaattaatttctactaagtgtagatttttttnnnnnnnnnnaagcttggcgtggatccgatatcaactagatcttgagacaaatggcagtattcatccacaattttaaaagaaaaggggggattggggggtacagtgcaggggaaagaatagtagacataatagcaacagacatacaaactaaag

SEQ ID NO: 17607 - DNA, 301 bp, Artificial Sequence
  Kdm6a.3_NTC.5
  crRNA array
  misc_feature (148)..(157): n is a, c, g, or t
cttggctttatatatcttgtggaaaggacgaaacaccgtaatttctactaagtgtagattgctggtgccggggaagttttaatttctactaagtgtagatgcttacgcgtcgcgaatgtataatttctactaagtgtagatttttttnnnnnnnnnnaagcttggcgtggatccgatatcaactagatcttgagacaaatggcagtattcatccacaattttaaaagaaaaggggggattggggggtacagtgcaggggaaagaatagtagacataatagcaacagacatacaaactaaag

SEQ ID NO: 17608 - DNA, 301 bp, Artificial Sequence
  Kdm6a.3_NTC.50
  crRNA array
  misc_feature (148)..(157): n is a, c, g, or t
cttggctttatatatcttgtggaaaggacgaaacaccgtaatttctactaagtgtagattgctggtgccggggaagttttaatttctactaagtgtagatattgccgctcgcgcaaaatctaatttctactaagtgtagatttttttnnnnnnnnnnaagcttggcgtggatccgatatcaactagatcttgagacaaatggcagtattcatccacaattttaaaagaaaaggggggattggggggtacagtgcaggggaaagaatagtagacataatagcaacagacatacaaactaaag

SEQ ID NO: 17609 - DNA, 301 bp, Artificial Sequence
  Kdm6a.3_NTC.51
  crRNA array
  misc_feature (148)..(157): n is a, c, g, or t
cttggctttatatatcttgtggaaaggacgaaacaccgtaatttctactaagtgtagattgctggtgccggggaagttttaatttctactaagtgtagattaacgcgcaacacgccaatgtaatttctactaagtgtagatttttttnnnnnnnnnnaagcttggcgtggatccgatatcaactagatcttgagacaaatggcagtattcatccacaattttaaaagaaaaggggggattggggggtacagtgcaggggaaagaatagtagacataatagcaacagacatacaaactaaag

SEQ ID NO: 17610 - DNA, 301 bp, Artificial Sequence
  Kdm6a.3_NTC.6
  crRNA array
  misc_feature (148)..(157): n is a, c, g, or t
cttggctttatatatcttgtggaaaggacgaaacaccgtaatttctactaagtgtagattgctggtgccggggaagttttaatttctactaagtgtagatcgaatcgcgcctacgggaattaatttctactaagtgtagatttttttnnnnnnnnnnaagcttggcgtggatccgatatcaactagatcttgagacaaatggcagtattcatccacaattttaaaagaaaaggggggattggggggtacagtgcaggggaaagaatagtagacataatagcaacagacatacaaactaaag

SEQ ID NO: 17611 - DNA, 301 bp, Artificial Sequence
  Kdm6a.3_NTC.7
  crRNA array
  misc_feature (148)..(157): n is a, c, g, or t
cttggctttatatatcttgtggaaaggacgaaacaccgtaatttctactaagtgtagattgctggtgccggggaagttttaatttctactaagtgtagatcgccgaacggataagactattaatttctactaagtgtagatttttttnnnnnnnnnnaagcttggcgtggatccgatatcaactagatcttgagacaaatggcagtattcatccacaattttaaaagaaaaggggggattggggggtacagtgcaggggaaagaatagtagacataatagcaacagacatacaaactaaag

SEQ ID NO: 17612 - DNA, 301 bp, Artificial Sequence
  Kdm6a.3_NTC.8
  crRNA array
  misc_feature (148)..(157): n is a, c, g, or t
cttggctttatatatcttgtggaaaggacgaaacaccgtaatttctactaagtgtagattgctggtgccggggaagttttaatttctactaagtgtagatcgaccgaggttacgctgggataatttctactaagtgtagatttttttnnnnnnnnnnaagcttggcgtggatccgatatcaactagatcttgagacaaatggcagtattcatccacaattttaaaagaaaaggggggattggggggtacagtgcaggggaaagaatagtagacataatagcaacagacatacaaactaaag

SEQ ID NO: 17613 - DNA, 301 bp, Artificial Sequence
  Kdm6a.3_NTC.9
  crRNA array
  misc_feature (148)..(157): n is a, c, g, or t
cttggctttatatatcttgtggaaaggacgaaacaccgtaatttctactaagtgtagattgctggtgccggggaagttttaatttctactaagtgtagatatcgccgtacggctatggcataatttctactaagtgtagatttttttnnnnnnnnnnaagcttggcgtggatccgatatcaactagatcttgagacaaatggcagtattcatccacaattttaaaagaaaaggggggattggggggtacagtgcaggggaaagaatagtagacataatagcaacagacatacaaactaaag

SEQ ID NO: 17614 - DNA, 301 bp, Artificial Sequence
  Kdm6a.4_NTC.0
  crRNA array
  misc_feature (148)..(157): n is a, c, g, or t
cttggctttatatatcttgtggaaaggacgaaacaccgtaatttctactaagtgtagattgtctcctacgaatcccccctaatttctactaagtgtagattatagcgtcgcgcgctaatttaatttctactaagtgtagatttttttnnnnnnnnnnaagcttggcgtggatccgatatcaactagatcttgagacaaatggcagtattcatccacaattttaaaagaaaaggggggattggggggtacagtgcaggggaaagaatagtagacataatagcaacagacatacaaactaaag

SEQ ID NO: 17615 - DNA, 301 bp, Artificial Sequence
  Kdm6a.4_NTC.1
  crRNA array
  misc_feature (148)..(157): n is a, c, g, or t
cttggctttatatatcttgtggaaaggacgaaacaccgtaatttctactaagtgtagattgtctcctacgaatcccccctaatttctactaagtgtagatcgcgtaaccgttccggctcctaatttctactaagtgtagatttttttnnnnnnnnnnaagcttggcgtggatccgatatcaactagatcttgagacaaatggcagtattcatccacaattttaaaagaaaaggggggattggggggtacagtgcaggggaaagaatagtagacataatagcaacagacatacaaactaaag

SEQ ID NO: 17616 - DNA, 301 bp, Artificial Sequence
  Kdm6a.4_NTC.10
  crRNA array
  misc_feature (148)..(157): n is a, c, g, or t
cttggctttatatatcttgtggaaaggacgaaacaccgtaatttctactaagtgtagattgtctcctacgaatcccccctaatttctactaagtgtagatcgctaagttcgcgcgggccgtaatttctactaagtgtagatttttttnnnnnnnnnnaagcttggcgtggatccgatatcaactagatcttgagacaaatggcagtattcatccacaattttaaaagaaaaggggggattggggggtacagtgcaggggaaagaatagtagacataatagcaacagacatacaaactaaag

SEQ ID NO: 17617 - DNA, 301 bp, Artificial Sequence
  Kdm6a.4_NTC.11
  crRNA array
  misc_feature (148)..(157): n is a, c, g, or t
cttggctttatatatcttgtggaaaggacgaaacaccgtaatttctactaagtgtagattgtctcctacgaatcccccctaatttctactaagtgtagatcgttcgtcgacgaagcaatctaatttctactaagtgtagatttttttnnnnnnnnnnaagcttggcgtggatccgatatcaactagatcttgagacaaatggcagtattcatccacaattttaaaagaaaaggggggattggggggtacagtgcaggggaaagaatagtagacataatagcaacagacatacaaactaaag

SEQ ID NO: 17618 - DNA, 301 bp, Artificial Sequence
  Kdm6a.4_NTC.12
  crRNA array
  misc_feature (148)..(157): n is a, c, g, or t
cttggctttatatatcttgtggaaaggacgaaacaccgtaatttctactaagtgtagattgtctcctacgaatcccccctaatttctactaagtgtagatcgccgacgattaatcaatagtaatttctactaagtgtagatttttttnnnnnnnnnnaagcttggcgtggatccgatatcaactagatcttgagacaaatggcagtattcatccacaattttaaaagaaaaggggggattggggggtacagtgcaggggaaagaatagtagacataatagcaacagacatacaaactaaag

SEQ ID NO: 17619 - DNA, 301 bp, Artificial Sequence
  Kdm6a.4_NTC.13
  crRNA array
  misc_feature (148)..(157): n is a, c, g, or t
cttggctttatatatcttgtggaaaggacgaaacaccgtaatttctactaagtgtagattgtctcctacgaatcccccctaatttctactaagtgtagatgaccgttgtatcgcgatcaataatttctactaagtgtagatttttttnnnnnnnnnnaagcttggcgtggatccgatatcaactagatcttgagacaaatggcagtattcatccacaattttaaaagaaaaggggggattggggggtacagtgcaggggaaagaatagtagacataatagcaacagacatacaaactaaag

SEQ ID NO: 17620 - DNA, 301 bp, Artificial Sequence
  Kdm6a.4_NTC.14
  crRNA array
  misc_feature (148)..(157): n is a, c, g, or t
cttggctttatatatcttgtggaaaggacgaaacaccgtaatttctactaagtgtagattgtctcctacgaatcccccctaatttctactaagtgtagatccgttcgtgcgatagtgttttaatttctactaagtgtagatttttttnnnnnnnnnnaagcttggcgtggatccgatatcaactagatcttgagacaaatggcagtattcatccacaattttaaaagaaaaggggggattggggggtacagtgcaggggaaagaatagtagacataatagcaacagacatacaaactaaag

SEQ ID NO: 17621 - DNA, 301 bp, Artificial Sequence
  Kdm6a.4_NTC.15
  crRNA array
  misc_feature (148)..(157): n is a, c, g, or t
cttggctttatatatcttgtggaaaggacgaaacaccgtaatttctactaagtgtagattgtctcctacgaatcccccctaatttctactaagtgtagatgttgtcgtgccgcgaatttataatttctactaagtgtagatttttttnnnnnnnnnnaagcttggcgtggatccgatatcaactagatcttgagacaaatggcagtattcatccacaattttaaaagaaaaggggggattggggggtacagtgcaggggaaagaatagtagacataatagcaacagacatacaaactaaag

SEQ ID NO: 17622 - DNA, 301 bp, Artificial Sequence
  Kdm6a.4_NTC.16
  crRNA array
  misc_feature (148)..(157): n is a, c, g, or t
cttggctttatatatcttgtggaaaggacgaaacaccgtaatttctactaagtgtagattgtctcctacgaatcccccctaatttctactaagtgtagatcggtacgttagacgaaaatttaatttctactaagtgtagatttttttnnnnnnnnnnaagcttggcgtggatccgatatcaactagatcttgagacaaatggcagtattcatccacaattttaaaagaaaaggggggattggggggtacagtgcaggggaaagaatagtagacataatagcaacagacatacaaactaaag

SEQ ID NO: 17623 - DNA, 301 bp, Artificial Sequence
  Kdm6a.4_NTC.17
  crRNA array
  misc_feature (148)..(157): n is a, c, g, or t
cttggctttatatatcttgtggaaaggacgaaacaccgtaatttctactaagtgtagattgtctcctacgaatcccccctaatttctactaagtgtagattatcgaacgctatcgaacgttaatttctactaagtgtagatttttttnnnnnnnnnnaagcttggcgtggatccgatatcaactagatcttgagacaaatggcagtattcatccacaattttaaaagaaaaggggggattggggggtacagtgcaggggaaagaatagtagacataatagcaacagacatacaaactaaag

SEQ ID NO: 17624 - DNA, 301 bp, Artificial Sequence
  Kdm6a.4_NTC.18
  crRNA array
  misc_feature (148)..(157): n is a, c, g, or t
cttggctttatatatcttgtggaaaggacgaaacaccgtaatttctactaagtgtagattgtctcctacgaatcccccctaatttctactaagtgtagattccggttacgaccggcaaaataatttctactaagtgtagatttttttnnnnnnnnnnaagcttggcgtggatccgatatcaactagatcttgagacaaatggcagtattcatccacaattttaaaagaaaaggggggattggggggtacagtgcaggggaaagaatagtagacataatagcaacagacatacaaactaaag

SEQ ID NO: 17625 - DNA, 301 bp, Artificial Sequence
  Kdm6a.4_NTC.19
  crRNA array
  misc_feature (148)..(157): n is a, c, g, or t
cttggctttatatatcttgtggaaaggacgaaacaccgtaatttctactaagtgtagattgtctcctacgaatcccccctaatttctactaagtgtagatcgtcgtagaacgatacccgataatttctactaagtgtagatttttttnnnnnnnnnnaagcttggcgtggatccgatatcaactagatcttgagacaaatggcagtattcatccacaattttaaaagaaaaggggggattggggggtacagtgcaggggaaagaatagtagacataatagcaacagacatacaaactaaag

SEQ ID NO: 17626 - DNA, 301 bp, Artificial Sequence
  Kdm6a.4_NTC.2
  crRNA array
  misc_feature (148)..(157): n is a, c, g, or t
cttggctttatatatcttgtggaaaggacgaaacaccgtaatttctactaagtgtagattgtctcctacgaatcccccctaatttctactaagtgtagatttatgtcgcgccgcgacccgtaatttctactaagtgtagatttttttnnnnnnnnnnaagcttggcgtggatccgatatcaactagatcttgagacaaatggcagtattcatccacaattttaaaagaaaaggggggattggggggtacagtgcaggggaaagaatagtagacataatagcaacagacatacaaactaaag

SEQ ID NO: 17627 - DNA, 301 bp, Artificial Sequence
  Kdm6a.4_NTC.20
  crRNA array
  misc_feature (148)..(157): n is a, c, g, or t
cttggctttatatatcttgtggaaaggacgaaacaccgtaatttctactaagtgtagattgtctcctacgaatcccccctaatttctactaagtgtagatattccggcgcgaccagaagataatttctactaagtgtagatttttttnnnnnnnnnnaagcttggcgtggatccgatatcaactagatcttgagacaaatggcagtattcatccacaattttaaaagaaaaggggggattggggggtacagtgcaggggaaagaatagtagacataatagcaacagacatacaaactaaag

SEQ ID NO: 17628 - DNA, 301 bp, Artificial Sequence
  Kdm6a.4_NTC.21
  crRNA array
  misc_feature (148)..(157): n is a, c, g, or t
cttggctttatatatcttgtggaaaggacgaaacaccgtaatttctactaagtgtagattgtctcctacgaatcccccctaatttctactaagtgtagatgtataacttcgcgcggtccgtaatttctactaagtgtagatttttttnnnnnnnnnnaagcttggcgtggatccgatatcaactagatcttgagacaaatggcagtattcatccacaattttaaaagaaaaggggggattggggggtacagtgcaggggaaagaatagtagacataatagcaacagacatacaaactaaag

SEQ ID NO: 17629 - DNA, 301 bp, Artificial Sequence
  Kdm6a.4_NTC.22
  crRNA array
  misc_feature (148)..(157): n is a, c, g, or t
cttggctttatatatcttgtggaaaggacgaaacaccgtaatttctactaagtgtagattgtctcctacgaatcccccctaatttctactaagtgtagatgcgcgtcaacgtaatgtgcctaatttctactaagtgtagatttttttnnnnnnnnnnaagcttggcgtggatccgatatcaactagatcttgagacaaatggcagtattcatccacaattttaaaagaaaaggggggattggggggtacagtgcaggggaaagaatagtagacataatagcaacagacatacaaactaaag

SEQ ID NO: 17630 - DNA, 301 bp, Artificial Sequence
  Kdm6a.4_NTC.23
  crRNA array
  misc_feature (148)..(157): n is a, c, g, or t
cttggctttatatatcttgtggaaaggacgaaacaccgtaatttctactaagtgtagattgtctcctacgaatcccccctaatttctactaagtgtagatacgcgctattatcgtaggtgtaatttctactaagtgtagatttttttnnnnnnnnnnaagcttggcgtggatccgatatcaactagatcttgagacaaatggcagtattcatccacaattttaaaagaaaaggggggattggggggtacagtgcaggggaaagaatagtagacataatagcaacagacatacaaactaaag

SEQ ID NO: 17631 - DNA, 301 bp, Artificial Sequence
  Kdm6a.4_NTC.24
  crRNA array
  misc_feature (148)..(157): n is a, c, g, or t
cttggctttatatatcttgtggaaaggacgaaacaccgtaatttctactaagtgtagattgtctcctacgaatcccccctaatttctactaagtgtagatactatcgacgttcgtcccggtaatttctactaagtgtagatttttttnnnnnnnnnnaagcttggcgtggatccgatatcaactagatcttgagacaaatggcagtattcatccacaattttaaaagaaaaggggggattggggggtacagtgcaggggaaagaatagtagacataatagcaacagacatacaaactaaag

SEQ ID NO: 17632 - DNA, 301 bp, Artificial Sequence
  Kdm6a.4_NTC.25
  crRNA array
  misc_feature (148)..(157): n is a, c, g, or t
cttggctttatatatcttgtggaaaggacgaaacaccgtaatttctactaagtgtagattgtctcctacgaatcccccctaatttctactaagtgtagattcgcgttatcgtgccgtgcgtaatttctactaagtgtagatttttttnnnnnnnnnnaagcttggcgtggatccgatatcaactagatcttgagacaaatggcagtattcatccacaattttaaaagaaaaggggggattggggggtacagtgcaggggaaagaatagtagacataatagcaacagacatacaaactaaag

SEQ ID NO: 17633 - DNA, 301 bp, Artificial Sequence
  Kdm6a.4_NTC.26
  crRNA array
  misc_feature (148)..(157): n is a, c, g, or t
cttggctttatatatcttgtggaaaggacgaaacaccgtaatttctactaagtgtagattgtctcctacgaatcccccctaatttctactaagtgtagatcgcgacggcggttttaacactaatttctactaagtgtagatttttttnnnnnnnnnnaagcttggcgtggatccgatatcaactagatcttgagacaaatggcagtattcatccacaattttaaaagaaaaggggggattggggggtacagtgcaggggaaagaatagtagacataatagcaacagacatacaaactaaag

SEQ ID NO: 17634 - DNA, 301 bp, Artificial Sequence
  Kdm6a.4_NTC.27
  crRNA array
  misc_feature (148)..(157): n is a, c, g, or t
cttggctttatatatcttgtggaaaggacgaaacaccgtaatttctactaagtgtagattgtctcctacgaatcccccctaatttctactaagtgtagatgtcgcgttgcgaccggcgcttaatttctactaagtgtagatttttttnnnnnnnnnnaagcttggcgtggatccgatatcaactagatcttgagacaaatggcagtattcatccacaattttaaaagaaaaggggggattggggggtacagtgcaggggaaagaatagtagacataatagcaacagacatacaaactaaag

SEQ ID NO: 17635 - DNA, 301 bp, Artificial Sequence
  Kdm6a.4_NTC.28
  crRNA array
  misc_feature (148)..(157): n is a, c, g, or t
cttggctttatatatcttgtggaaaggacgaaacaccgtaatttctactaagtgtagattgtctcctacgaatcccccctaatttctactaagtgtagataccgctaatcggcgtaaacttaatttctactaagtgtagatttttttnnnnnnnnnnaagcttggcgtggatccgatatcaactagatcttgagacaaatggcagtattcatccacaattttaaaagaaaaggggggattggggggtacagtgcaggggaaagaatagtagacataatagcaacagacatacaaactaaag

SEQ ID NO: 17636 - DNA, 301 bp, Artificial Sequence
  Kdm6a.4_NTC.29
  crRNA array
  misc_feature (148)..(157): n is a, c, g, or t
cttggctttatatatcttgtggaaaggacgaaacaccgtaatttctactaagtgtagattgtctcctacgaatcccccctaatttctactaagtgtagatcgcgatctataccgtctatataatttctactaagtgtagatttttttnnnnnnnnnnaagcttggcgtggatccgatatcaactagatcttgagacaaatggcagtattcatccacaattttaaaagaaaaggggggattggggggtacagtgcaggggaaagaatagtagacataatagcaacagacatacaaactaaag

SEQ ID NO: 17637 - DNA, 301 bp, Artificial Sequence
  Kdm6a.4_NTC.3
  crRNA array
  misc_feature (148)..(157): n is a, c, g, or t
cttggctttatatatcttgtggaaaggacgaaacaccgtaatttctactaagtgtagattgtctcctacgaatcccccctaatttctactaagtgtagattcgacgcgagacgacgtacataatttctactaagtgtagatttttttnnnnnnnnnnaagcttggcgtggatccgatatcaactagatcttgagacaaatggcagtattcatccacaattttaaaagaaaaggggggattggggggtacagtgcaggggaaagaatagtagacataatagcaacagacatacaaactaaag

SEQ ID NO: 17638 - DNA, 301 bp, Artificial Sequence
  Kdm6a.4_NTC.30
  crRNA array
  misc_feature (148)..(157): n is a, c, g, or t
cttggctttatatatcttgtggaaaggacgaaacaccgtaatttctactaagtgtagattgtctcctacgaatcccccctaatttctactaagtgtagatcgatcgtacgggtgtcctaataatttctactaagtgtagatttttttnnnnnnnnnnaagcttggcgtggatccgatatcaactagatcttgagacaaatggcagtattcatccacaattttaaaagaaaaggggggattggggggtacagtgcaggggaaagaatagtagacataatagcaacagacatacaaactaaag

SEQ ID NO: 17639 - DNA, 301 bp, Artificial Sequence
  Kdm6a.4_NTC.31
  crRNA array
  misc_feature (148)..(157): n is a, c, g, or t
cttggctttatatatcttgtggaaaggacgaaacaccgtaatttctactaagtgtagattgtctcctacgaatcccccctaatttctactaagtgtagatgccgaccgcgtgattgtaggtaatttctactaagtgtagatttttttnnnnnnnnnnaagcttggcgtggatccgatatcaactagatcttgagacaaatggcagtattcatccacaattttaaaagaaaaggggggattggggggtacagtgcaggggaaagaatagtagacataatagcaacagacatacaaactaaag

SEQ ID NO: 17640 - DNA, 301 bp, Artificial Sequence
  Kdm6a.4_NTC.32
  crRNA array
  misc_feature (148)..(157): n is a, c, g, or t
cttggctttatatatcttgtggaaaggacgaaacaccgtaatttctactaagtgtagattgtctcctacgaatcccccctaatttctactaagtgtagatgcacgttacgcccgggtcactaatttctactaagtgtagatttttttnnnnnnnnnnaagcttggcgtggatccgatatcaactagatcttgagacaaatggcagtattcatccacaattttaaaagaaaaggggggattggggggtacagtgcaggggaaagaatagtagacataatagcaacagacatacaaactaaag

SEQ ID NO: 17641 - DNA, 301 bp, Artificial Sequence
  Kdm6a.4_NTC.33
  crRNA array
  misc_feature (148)..(157): n is a, c, g, or t
cttggctttatatatcttgtggaaaggacgaaacaccgtaatttctactaagtgtagattgtctcctacgaatcccccctaatttctactaagtgtagattaagcgaccgacgcattcgctaatttctactaagtgtagatttttttnnnnnnnnnnaagcttggcgtggatccgatatcaactagatcttgagacaaatggcagtattcatccacaattttaaaagaaaaggggggattggggggtacagtgcaggggaaagaatagtagacataatagcaacagacatacaaactaaag

SEQ ID NO: 17642 - DNA, 301 bp, Artificial Sequence
  Kdm6a.4_NTC.34
  crRNA array
  misc_feature (148)..(157): n is a, c, g, or t
cttggctttatatatcttgtggaaaggacgaaacaccgtaatttctactaagtgtagattgtctcctacgaatcccccctaatttctactaagtgtagattagcgttcgacacgtgaaactaatttctactaagtgtagatttttttnnnnnnnnnnaagcttggcgtggatccgatatcaactagatcttgagacaaatggcagtattcatccacaattttaaaagaaaaggggggattggggggtacagtgcaggggaaagaatagtagacataatagcaacagacatacaaactaaag

SEQ ID NO: 17643 - DNA, 301 bp, Artificial Sequence
  Kdm6a.4_NTC.35
  crRNA array
  misc_feature (148)..(157): n is a, c, g, or t
cttggctttatatatcttgtggaaaggacgaaacaccgtaatttctactaagtgtagattgtctcctacgaatcccccctaatttctactaagtgtagattggcgcgtaatcgctattcgtaatttctactaagtgtagatttttttnnnnnnnnnnaagcttggcgtggatccgatatcaactagatcttgagacaaatggcagtattcatccacaattttaaaagaaaaggggggattggggggtacagtgcaggggaaagaatagtagacataatagcaacagacatacaaactaaag

SEQ ID NO: 17644 - DNA, 301 bp, Artificial Sequence
  Kdm6a.4_NTC.36
  crRNA array
  misc_feature (148)..(157): n is a, c, g, or t
cttggctttatatatcttgtggaaaggacgaaacaccgtaatttctactaagtgtagattgtctcctacgaatcccccctaatttctactaagtgtagatcaacccgccgtagcgggccttaatttctactaagtgtagatttttttnnnnnnnnnnaagcttggcgtggatccgatatcaactagatcttgagacaaatggcagtattcatccacaattttaaaagaaaaggggggattggggggtacagtgcaggggaaagaatagtagacataatagcaacagacatacaaactaaag

SEQ ID NO: 17645 - DNA, 301 bp, Artificial Sequence
  Kdm6a.4_NTC.37
  crRNA array
  misc_feature (148)..(157): n is a, c, g, or t
cttggctttatatatcttgtggaaaggacgaaacaccgtaatttctactaagtgtagattgtctcctacgaatcccccctaatttctactaagtgtagattttgcgttgacgcgattacttaatttctactaagtgtagatttttttnnnnnnnnnnaagcttggcgtggatccgatatcaactagatcttgagacaaatggcagtattcatccacaattttaaaagaaaaggggggattggggggtacagtgcaggggaaagaatagtagacataatagcaacagacatacaaactaaag

SEQ ID NO: 17646 - DNA, 301 bp, Artificial Sequence
  Kdm6a.4_NTC.38
  crRNA array
  misc_feature (148)..(157): n is a, c, g, or t
cttggctttatatatcttgtggaaaggacgaaacaccgtaatttctactaagtgtagattgtctcctacgaatcccccctaatttctactaagtgtagataacggagcgcgatactaccataatttctactaagtgtagatttttttnnnnnnnnnnaagcttggcgtggatccgatatcaactagatcttgagacaaatggcagtattcatccacaattttaaaagaaaaggggggattggggggtacagtgcaggggaaagaatagtagacataatagcaacagacatacaaactaaag

SEQ ID NO: 17647 - DNA, 301 bp, Artificial Sequence
  Kdm6a.4_NTC.39
  crRNA array
  misc_feature (148)..(157): n is a, c, g, or t
cttggctttatatatcttgtggaaaggacgaaacaccgtaatttctactaagtgtagattgtctcctacgaatcccccctaatttctactaagtgtagatccggacgttataacgtttcttaatttctactaagtgtagatttttttnnnnnnnnnnaagcttggcgtggatccgatatcaactagatcttgagacaaatggcagtattcatccacaattttaaaagaaaaggggggattggggggtacagtgcaggggaaagaatagtagacataatagcaacagacatacaaactaaag

SEQ ID NO: 17648 - DNA, 301 bp, Artificial Sequence
  Kdm6a.4_NTC.4
  crRNA array
  misc_feature (148)..(157): n is a, c, g, or t
cttggctttatatatcttgtggaaaggacgaaacaccgtaatttctactaagtgtagattgtctcctacgaatcccccctaatttctactaagtgtagatatacccgtcgcgaacgtgagtaatttctactaagtgtagatttttttnnnnnnnnnnaagcttggcgtggatccgatatcaactagatcttgagacaaatggcagtattcatccacaattttaaaagaaaaggggggattggggggtacagtgcaggggaaagaatagtagacataatagcaacagacatacaaactaaag

SEQ ID NO: 17649 - DNA, 301 bp, Artificial Sequence
  Kdm6a.4_NTC.40
  crRNA array
  misc_feature (148)..(157): n is a, c, g, or t
cttggctttatatatcttgtggaaaggacgaaacaccgtaatttctactaagtgtagattgtctcctacgaatcccccctaatttctactaagtgtagatattcgcgaacccggccggaataatttctactaagtgtagatttttttnnnnnnnnnnaagcttggcgtggatccgatatcaactagatcttgagacaaatggcagtattcatccacaattttaaaagaaaaggggggattggggggtacagtgcaggggaaagaatagtagacataatagcaacagacatacaaactaaag

SEQ ID NO: 17650 - DNA, 301 bp, Artificial Sequence
  Kdm6a.4_NTC.41
  crRNA array
  misc_feature (148)..(157): n is a, c, g, or t
cttggctttatatatcttgtggaaaggacgaaacaccgtaatttctactaagtgtagattgtctcctacgaatcccccctaatttctactaagtgtagatttgatggcgcgacgcgttattaatttctactaagtgtagatttttttnnnnnnnnnnaagcttggcgtggatccgatatcaactagatcttgagacaaatggcagtattcatccacaattttaaaagaaaaggggggattggggggtacagtgcaggggaaagaatagtagacataatagcaacagacatacaaactaaag

SEQ ID NO: 17651 - DNA, 301 bp, Artificial Sequence
  Kdm6a.4_NTC.42
  crRNA array
  misc_feature (148)..(157): n is a, c, g, or t
cttggctttatatatcttgtggaaaggacgaaacaccgtaatttctactaagtgtagattgtctcctacgaatcccccctaatttctactaagtgtagatggtcaaatcgcggcgataactaatttctactaagtgtagatttttttnnnnnnnnnnaagcttggcgtggatccgatatcaactagatcttgagacaaatggcagtattcatccacaattttaaaagaaaaggggggattggggggtacagtgcaggggaaagaatagtagacataatagcaacagacatacaaactaaag

SEQ ID NO: 17652 - DNA, 301 bp, Artificial Sequence
  Kdm6a.4_NTC.43
  crRNA array
  misc_feature (148)..(157): n is a, c, g, or t
cttggctttatatatcttgtggaaaggacgaaacaccgtaatttctactaagtgtagattgtctcctacgaatcccccctaatttctactaagtgtagatcgactcgcgcattgaactggtaatttctactaagtgtagatttttttnnnnnnnnnnaagcttggcgtggatccgatatcaactagatcttgagacaaatggcagtattcatccacaattttaaaagaaaaggggggattggggggtacagtgcaggggaaagaatagtagacataatagcaacagacatacaaactaaag

SEQ ID NO: 17653 - DNA, 301 bp, Artificial Sequence
  Kdm6a.4_NTC.44
  crRNA array
  misc_feature (148)..(157): n is a, c, g, or t
cttggctttatatatcttgtggaaaggacgaaacaccgtaatttctactaagtgtagattgtctcctacgaatcccccctaatttctactaagtgtagatagcgtcgtacgatttatcgttaatttctactaagtgtagatttttttnnnnnnnnnnaagcttggcgtggatccgatatcaactagatcttgagacaaatggcagtattcatccacaattttaaaagaaaaggggggattggggggtacagtgcaggggaaagaatagtagacataatagcaacagacatacaaactaaag

SEQ ID NO: 17654 - DNA, 301 bp, Artificial Sequence
  Kdm6a.4_NTC.45
  crRNA array
  misc_feature (148)..(157): n is a, c, g, or t
cttggctttatatatcttgtggaaaggacgaaacaccgtaatttctactaagtgtagattgtctcctacgaatcccccctaatttctactaagtgtagatcggaacgcgtgatactagggtaatttctactaagtgtagatttttttnnnnnnnnnnaagcttggcgtggatccgatatcaactagatcttgagacaaatggcagtattcatccacaattttaaaagaaaaggggggattggggggtacagtgcaggggaaagaatagtagacataatagcaacagacatacaaactaaag

SEQ ID NO: 17655 - DNA, 301 bp, Artificial Sequence
  Kdm6a.4_NTC.46
  crRNA array
  misc_feature (148)..(157): n is a, c, g, or t
cttggctttatatatcttgtggaaaggacgaaacaccgtaatttctactaagtgtagattgtctcctacgaatcccccctaatttctactaagtgtagatagcgggtcgtagacgcgcggtaatttctactaagtgtagatttttttnnnnnnnnnnaagcttggcgtggatccgatatcaactagatcttgagacaaatggcagtattcatccacaattttaaaagaaaaggggggattggggggtacagtgcaggggaaagaatagtagacataatagcaacagacatacaaactaaag

SEQ ID NO: 17656 - DNA, 301 bp, Artificial Sequence
  Kdm6a.4_NTC.47
  crRNA array
  misc_feature (148)..(157): n is a, c, g, or t
cttggctttatatatcttgtggaaaggacgaaacaccgtaatttctactaagtgtagattgtctcctacgaatcccccctaatttctactaagtgtagattctcgtatcgcgattgttaataatttctactaagtgtagatttttttnnnnnnnnnnaagcttggcgtggatccgatatcaactagatcttgagacaaatggcagtattcatccacaattttaaaagaaaaggggggattggggggtacagtgcaggggaaagaatagtagacataatagcaacagacatacaaactaaag
